United States Patent Application Publication US 2024/0327476 A1 - sequence listing, part 68

SEQ ID NO: 128625 - DNA, 876 bp, synthetic construct
  misc_feature 1..876: note = Description of Artificial Sequence: Synthetic coding sequence
  source 1..876: mol_type = other DNA
atgtcttcccagttgattttgcggccctttacggtatctcatcttaagctctgcgctggaattatgatcaccgcgagccacaaccctaagcaagacaatggctacaaagtctactgggacaatggagctcaaattatttcaccacatgataagggcatcagtcaggccatcgaagagaatctagagccctggccccaggcttgggacgactccctgattgattctagtcccctgctccacaatccaagcgccagtattaacaatgattatttcgaggacttaaaaaagtattgtttccatcgaagtgtaaatcgagagacaaaggtgaagtttgtgcacacctccgttcatggagtgggccattcatttgttcagtccgctttcaaggcttttgaccttgtcccaccagaagccgtccctgagcagaaagacccagatcccgagtttcccaccgtaaaatatccaaaccccgaagaagggaagggggttttgacactgtcgttcgctctggcggataaaaccaaagctcgcattgttctggctaacgaccccgacgcggatcgcctcgccgtggcagaaaaacaggactctggcgaatggagagtcttttccgggaatgagcttggcgccctgcttgggtggtggctgttcacaagttggaaagagaaaaatcaggaccgttccgccctgaaagacacatatatgctcagttccaccgtctcatctaagattttgagagccattgcactgaaggaggggtttcactttgaagagacactgaccggcttcaagtggatggggaatagggcaaaacaactcatcgaccaggggaagactgtcctgtttgcgtttgaagaagccatcggaaaaaaatag

SEQ ID NO: 128626 - DNA, 1869 bp, synthetic construct
  misc_feature 1..1869: note = Description of Artificial Sequence: Synthetic coding sequence
  source 1..1869: mol_type = other DNA
atggctgagaatactgaaggcgacctcaattctaatctgttacacgccccatatcacaccggtgatccgcagctagacaccgcaatcggacaatggctgcgctgggacaagaatcctaagacaaaggaacagattgaaaacctgctgcggaacggcatgaacaaggagctgagggatagactgtgttgcagaatgacctttggcaccgcagggttgcgctccgccatgggtgcagggttttgctacatcaatgatttgaccgtgatccagtctactcagggtatgtataagtacttggagagatgcttctcggactttaaacaaagaggtttcgtcgtgggatatgacactagggggcaagtgacgtcttcctgctcctcccagcgtctggcaaaacttactgctgccgtgctactggccaaggatgtcccagtgtacttattttcccgctatgtacctaccccatttgtgccgtatgccgtacagaaactaaaggcggtagcaggcgtaatgatcactgcatcacataatcgaaaggaggacaatggatacaaggtgtactgggagaccggcgctcaaattacatcgccacacgacaaagagatcctgaaatgtatagaggagtgcgtggaaccatggaatggcagttggaacgataatctcgtcgacaccagcccccttaaaagggatccccttcaagacatttgcagacggtacatggaggacctgaagaaaatttgtttttatcgtgaactcaatagcaaaacaactctgaagtttgtccacaccagtttccacggagtaggccacgactatgtccaattggcttttaaagtatttggctttaaaccccctattccggtgcctgaacagaaggatccagatccagatttctctaccgtaaagtgcccaaatcctgaagagggagagtcggtgctagagctgagcctgaggctcgctgagaaggaaaacgctcgcgtcgtactcgcaactgatcctgacgcagacaggctggctgcagctgagctccaggagaatgggtgctggaaggtatttacaggtaatgagctcgccgcccttttcgggtggtggatgtttgattgttggaagaaaaacaaatctcggaatgccgacgtcaaaaacgtgtacatgttggccacgacggtgtcttccaagatcctgaaggccatcgctctcaaagaggggttccatttcgaggaaacattacctggattcaagtggatcggatccaggattatcgacttgctcgagaatggaaaagaagttctgtttgcctttgaggaaagtataggattcctgtgcgggacgtctgttctagataaggatggggtgtccgctgcagtggtggttgccgaaatggcttcttaccttgaaactatgaacattacactgaagcagcagctggtcaaggtgtacgagaaatacggttaccacatttcaaagactagctattttctctgctatgagcctcccacaattaagtccatcttcgaacgtcttaggaattttgatagtccaaaagagtacccaaaattttgcggtaccttcgccatcctgcacgttcgggacgtgaccaccggatatgactcaagccagcccaacaagaagagtgtactgcctgtgagtaagaacagccaaatgattacatttacatttcaaaatgggtgcgttgcaacactgagaacaagcggcaccgagccaaagatcaaatattatgccgagatgtgtgccagccctgatcagagcgatactgcacttctggaagaagagttaaagaaactaattgacgccctgatcgagaatttcctccagccttctaagaacggacttatttggcggtcagtttag

SEQ ID NO: 128627 - DNA, 1713 bp, synthetic construct
  misc_feature 1..1713: note = Description of Artificial Sequence: Synthetic coding sequence
  source 1..1713: mol_type = other DNA
atgggcggcgaatggggccaatccgctatttgccccgaaagcgcccaggaatggacttatcaggtgggccagcatctggttgatatggatttgggggctattactaaatactcagctttgcacgccaagccgaacgggctgattctgcagtacggcaccgccggatttagaacaaaagcagagcacctggatcacgtcatgtttcgcatgggcctccttgctgtgctgagaagcaagcaaacaaaatctactatcggggtgatggtgacggcatcccacaaccctgaagaggacaacggggtcaagctggtggaccctctcggcgaaatgttggcccccagttgggaagagcacgcaacatgcttggctaacgctgaggaacaagatatgcagcgcgtattgatcgatatctcagaaaaggaggctgtgaacttgcagcaggatgccttcgtggtcatagggcgagacacacgtccttcatctgaaaaactgtcccagtcagtgattgatggggtaactgtcctcgggggccaattccatgattatgggctcctcacaaccccccaactacactatatggtttactgtcgaaacacgggcggacgctacggtaaggctaccatcgaaggttattaccagaaactgagcaaggccttcgtggagcttactaagcaggcaagctgctcaggagacgaataccgctcattgaaggtggactgcgctaatggcataggcgccctgaagctgagggagatggaacactatttttcacaagggctgtctgtacagctattcaatgacgggtctaagggtaagctcaaccacctgtgtggcgctgactttgtaaaatctcaccagaagccaccacaaggtatggagatcaagagcaatgagcgctgttgttcctttgacggggacgccgatcgaatcgtgtactactaccacgacgcggacggacatttccacctcatcgacggagacaaaattgcgactctgatcagttcattcttgaaagagctcctggtagagatcggtgagagcctgaatatcggggtggtgcagactgcctacgccaatggtagcagcactaggtacctcgaggaagtgatgaaagtgcccgtgtattgcacgaaaacaggggtgaaacacttacaccacaaggcacaggagttcgacatcggtgtctacttcgaggccaacggtcacggaacggccttgttcagtacagctgtggaaatgaaaattaagcagtctgccgagcagttagaagataaaaaaaggaaggccgccaagatgctggagaacattatcgaccttttcaatcaagccgctggtgatgccatcagtgacatgttggtcatcgaagcaattctcgctctaaaaggcctgaccgtgcagcagtgggatgctttatacaccgacctcccaaacagacaactcaaggttcaggtcgctgaccgtcgggtgatcagcaccactgatgctgagaggcaggccgtcacccctccaggactgcaggaggccataaatgacctcgtgaaaaagtacaaactgtccagggcttttgtccgtccatccgggacggaagacgtcgtgagagtttatgccgaagctgactcccaagaatccgcggaccacttagcccatgaagtctccctggccgtgtttcagctggccggagggattggggaaaggccacaacccggcttctag

SEQ ID NO: 128628 - DNA, 444 bp, synthetic construct
  misc_feature 1..444: note = Description of Artificial Sequence: Synthetic coding sequence
  source 1..444: mol_type = other DNA
atggatctgggcgccatcaccaagtactcagcactccacgcaaagcctaatggcctcattctccaatatggcaccgcgggctttcggacaaaggccgaacatctcgaccacgtgatgtttaggatggggttgcttgccgtgcttcggagtaaacagacaaagagtaccatcggcgtcatggtcactgcatcgcataaccctgaggaggataatggagtaaagctggtggatcctctaggggaaatgctggctccctcttgggaggaacacgccacatgtttagccaacgctgaggagcaggatatgcaacgggtcctgatagatatctcagaaaaagaggctgtcaacctgcagcaggacgcttttgtggtcatcggacgggacacccggccctcatccgagaaattaagtcagtctgtcatcgacggtgtgaccgtgctgtag

SEQ ID NO: 128629 - DNA, 1629 bp, synthetic construct
  misc_feature 1..1629: note = Description of Artificial Sequence: Synthetic coding sequence
  source 1..1629: mol_type = other DNA
atggatctgggggccataaccaagtatagcgcccttcacgccaagcccaatggattgatcctccagtatgggaccgcggggtttcgaaccaaggcagaacacttggatcacgtcatgttccgcatggggcttctggccgtactgagaagcaagcagactaagagcactataggggtcatggtcaccgcctcccataaccctgaggaggataatggtgttaagcttgtcgatcccttgggggaaatgttagccccatcttgggaggagcacgcaacgtgcctggctaatgccgaagagcaggatatgcaaagggtcctgattgatatttccgagaaagaagcagtgaatttgcagcaggacgcctttgtcgtgatcggacgagataccagaccgagtagcgagaaactctcacaatcagtgatcgacggagtaaccgtcttgggggggcagttccacgattacggcctgcttaccactcctcagttgcactatatggtgtactgtaggaacacggggggcaggtacggcaaggctacaatcgaaggatactaccagaagctctcaaaagcgtttgtggagcttaccaaacaagcttcgtgtagcggggatgaatacaggtcactgaaagttgactgcgctaatggcattggagctctaaaactgagagagatggaacattatttctcacaggggctgtctgtgcagctgtttaacgatggatcaaaagggaaacttaatcacctctgtggagccgactttgtaaaatcacaccaaaaaccccctcagggaatggagattaagagtaatgagcggtgttgctccttcgacggcgacgcggatcgcatcgtatattattatcacgatgcagatggccacttccacctaatcgacggagacaagattgccactctcatatcctcctttttgaaagaactgttggtcgagatcggtgaaagtctcaatattggagtggttcagaccgcctatgcaaatggcagtagcacaagatatttggaggaggtcatgaaggtacctgtttattgtacgaagactggcgtgaagcacctgcaccacaaggcacaggaattcgacatcggtgtatactttgaagctaatggccacgggaccgcactcttctctaccgcagtggagatgaagattaagcagagtgccgaacagctggaggataaaaaacgtaaggctgccaaaatgcttgagaatattatcgatctcttcaaccaggcagcaggggatgccatctctgacatgttggtgatcgaggccatcctggccctcaagggtcttaccgtgcaacaatgggacgctctttatacagacttgccaaacagacaattgaaggttcaagtcgctgataggagagtgatcagtacaactgacgccgaacgccaagccgtgaccccccccggcctgcaggaggccatcaacgatctcgtgaagaaatataaactatctcgcgccttcgttcgcccttccggtaccgaggatgtggtgcgggtctacgctgaggccgacagccaagagtctgccgatcacctggctcatgaagtcagtctcgctgtgttccagctggctggcgggattggcgagcggcctcagcctggcttttag

SEQ ID NO: 128630 - DNA, 1701 bp, synthetic construct
  misc_feature 1..1701: note = Description of Artificial Sequence: Synthetic coding sequence
  source 1..1701: mol_type = other DNA
atggatcttggggccatcactaaatactccgccctgcacgccaaacccaacggacttatcctgcagtacggcacggccggtttcaggacaaaggccgaacatttggaccatgtaatgttcaggatggggctactggccgtattacggagtaaacaaaccaaaagcactatcggggtcatggtgaccgcaagccataatcccgaggaggataacggagtgaaattagttgatcccttgggcgaaatgctggctccgagttgggaggagcacgcaacttgccttgctaacgcggaggaacaggacatgcaacgagtgctaattgacatatccgagaaggaggcagtgaacctgcagcaggacgcattcgtggttattgggcgcgacacacgaccatccagcgaaaaactgtctcagagcgtgatcgatggagtgacagttttaggtggacaattccatgattacgggctgctaacaactccccaattgcactacatggtgtactgcaggaacaccggaggacggtatggaaaagccacgatcgagggttactaccagaagctttccaaggcgtttgtcgagctgaccaaacaggcaagctgtagtggtgatgaataccgtagtttaaaagtggactgtgctaatggcatcggtgccctgaaactccgcgagatggagcactatttctcacagggactgtctgttcagctcttcaatgatggctctaagggaaagttaaatcacctctgcggtgccgatttcgtgaagtctcaccagaagccaccacagggcatggagataaagtcaaacgagcggtgttgcagttttgacggggacgccgataggatcgtgtactattatcatgacgcagacggacatttccatttgatcgatggcgacaaaattgcgaccctgatcagcagcttcttgaaggaactcctggtggaaatcggagaatcgctgaatatcggcgtagtccagaccgcttacgctaatggaagctcaacgagatacctcgaagaggtcatgaaagtccctgtatattgcaccaaaacaggggtaaaacatctgcaccacaaggctcaagaattcgatatcggggtatactttgaagccaatggacacggaaccgccctcttttcgacagccgtggagatgaagatcaagcagtccgcagaacaactggaagataaaaagcgtaaggctgctaagatgctggagaacatcatcgaccttttcaatcaggcagcaggggacgcaatctccgatatgctcgtcatcgaggcaatccttgctctgaagggcctgactgtgcaacagtgggacgctctgtatacagacttgccgaaccgtcaactaaaagttcaggtggcggatcgacgtgtgatctctacgacagacgctgaaagacaggcagtcaccccgcctggattgcaagaggcaataaatgacctcgtgaagaagtataagctctccagagcattcgtcaggccgtccggaaccgaggacgtggtgagggtttatgcagaagctgactcacaggagtcggccgatcatctagcccatgaggtgagcctggctgtcttccagctggccggtgggatcggggagcggccacagccaggctataaagctgctgagaccactcacaatataaacaacgcttttggacctggaaccgctaatgaacacaccgtaccttag

SEQ ID NO: 128631 - DNA, 720 bp, synthetic construct
  misc_feature 1..720: note = Description of Artificial Sequence: Synthetic coding sequence
  source 1..720: mol_type = other DNA
atggagggctcgcctatccccgtcctcaccgtgcctaccgcaccttatgaggatcagagacccgcaggcggcggcggcctacggcgccctacggggctctttgaaggacagaggaactatttacccaattttatccagagcgtgttatcctctatcgacttaagggaccggcagggttgcacgatggtagtgggatctgacggacgctactttagtcgaaccgcaatagaaatcgtggttcaaatggctgctgccaatgggatcggcaggttaatcatcggccagaatgggatcctctcaactcccgctgtctcttgcataattcgtaaaattaaagcagcaggtgggatcattctcacagcaagccactgtccagggggccccggcggcgagttcggagtgaaatttaacgtggcgaatggcgtagagatcgtggatcctgtggacatttacctgaatctcttacgcacaatcttcgactttcacgccattaaaggtctgctgaccgggcctagtcaactcaagatccgcatagatgccatgcatggagtgatgggaccatatgtgagaaaggtcttatgtgatgaactgggcgcacccgcaaacagcgccataaattgtgtgccccttgaggacttcggtgggcaacatccggaccctaaccttacgtacgcgaccactctgctggaggccatgaaagggggtgagtacggattctag

SEQ ID NO: 128632 - DNA, 1704 bp, synthetic construct
  misc_feature 1..1704: note = Description of Artificial Sequence: Synthetic coding sequence
  source 1..1704: mol_type = other DNA
atggaggggagtccaatcccagtgttgaccgttccaactgctccatacgaggaccagcgccccgccggcggcggaggcctgcgacggccgacaggcctgtttgaaggtcaacggaattacctgccaaacttcatacagtctgttctgtccagcattgatctacgggatcgtcagggatgtaccatggtggtcgggtcggatggacgctactttagcagaactgccatcgagatcgtggtccagatggccgccgccaatgggatcggaagacttattataggacaaaatggcattctgtctaccccagctgtgagctgcatcatcagaaaaatcaaggccgcaggggggataatcctcactgcctcccattgtcccgggggccctggtggagagttcggagtgaaatttaacgttgccaacggaggccccgcacccgatgtggtgagcgacaaaatttaccaaatttcgaaaaccatcgaggaatatgctatttgcccggacctgaggattgacttaagcagattgggcaggcaggagttcgatctcgaaaataagtttaagcctttccgcgtagagattgtggaccctgtggatatttacctgaacctgctgagaacgatctttgactttcatgcaattaagggcctcctgacgggtcctagccagctgaagattcgcatcgacgccatgcatggcgtgatggggccttatgtccgcaaagtcctgtgcgacgaacttggcgcaccggccaactcggcgataaattgcgtgccacttgaggatttcggcggacagcacccggatccaaatctgacctatgcgacaactttacttgaggctatgaaggggggagaatatggcttcggggccgccttcgacgccgatggcgacagatatatgattctggggcagaatggctttttcgtgtcccccagcgactcactggctatcatcgccgcgaatctatcctgtatcccttactttcgccagatgggtgtcaggggatttgggcgcagtatgccgacatctatggcactagatcgtgtcgctaagtcaatgaaggtgccagtttatgagaccccagccgggtggagatttttttcaaacctgatggacagtgggaggtgtaacctgtgcggcgaagaatccttcggcaccggttctgatcacctcagggaaaaggacggactgtgggccgtcctggtctggctctctataatcgccgccagaaaacagagtgtcgaggaaattgttagagaccattgggctaaattcggtcgccattattactgtcgatttgattatgagggtctggatcccaaaacgacttactatataatgcgcgatctggaagcgctcgtaacagacaagtcctttattggacaacagttcgcagtcggcagccatgtgtattccgtggccaaaactgatagctttgagtacgtggatcctgttgacggcactgtcactaagaagcagggcctgcggatcattttttctgacgcatctcgactcatctttaggctgtctagcagttccggagtgagagcaactctgaggctgtatgcagaaagttatgaaagggacccctctgggcatgatcaggagccccaggcggtgctctcccccctgatagcaatcgcacttaagattagccaaattcacgaacgtactgggcgacggggtcccacagtgatcacttag

SEQ ID NO: 128633 - DNA, 1452 bp, synthetic construct
  misc_feature 1..1452: note = Description of Artificial Sequence: Synthetic coding sequence
  source 1..1452: mol_type = other DNA
atggcacaggccgacatagccctgatcggactggctgtgatgggccaaaatctgattctgaatatgaatgaccatggctttgtggtatgcgcattcaaccggaccgttagcaaggtggatgacttcttggcaaacgaggccaagggaacaaaggtcgtgggtgcccagtctctgaaggaaatggtgagcaaactgaagaagccccggcgcataattttgttagttaaagcgggacaggcagtggacgattttattgaaaagctggtgcctctgctggatactggcgatataattatcgacgggggaaactccgagtaccgggacacgacacggcgctgccgtgatttaaaggctaagggaatactgtttgtaggatcgggtgtgagtggcggcgaagaaggggcacgctatggaccttctctcatgcctggggggaacaaagaggcctggccacatatcaaaactattttccagggaattgcagccaaggtcgggaccggagaaccttgttgtgattgggtaggcgatgaaggagctggccacttcgtgaagatggtgcataatggcattgaatacggcgacatgcagctcatatgtgaggcctatcacctgatgaaggatgtcttggggatggcccaagacgagatggcccaggcgttcgaggactggaataagacagaattggacagtttcctgatagagattacggccaacatcctcaaattccaggacaccgatggcaagcacctgctaccaaagatccgcgactctgccgggcagaagggcactggaaagtggaccgctatttcagctctggagtatggtgtgcccgtaacgttaatcggcgaggcagtgttcgctagatgtctctccagtctgaaagacgagcggattcaggcctcaaagaagcttaaaggaccacagaagtttcaatttgacggcgacaagaaaagttttttggaggacattcgcaaggctctatatgcctccaagatcattagctatgcgcaggggttcatgctgctgcgccaggcagccaccgaattcggctggacattgaattacggcggaatagctctgatgtggcgaggaggttgcataatccgctccgtgtttctgggaaagatcaaagatgcttttgacagaaacccagaactgcagaatttactgctcgacgacttttttaaatcggcagtcgaaaattgccaagattcctggaggcgggcggtttccacaggtgtgcaggcaggcatacctatgccgtgctttaccaccgctttatccttctatgatgggtatcgccacgagatgcttcctgcctcattaatccaggctcagcgggactactttggtgcccatacctacgaactgctggcgaagcctggtcagtttatccacactaactggaccggacacggtggcaccgtgtcatcttcgagctacaacgcttag

SEQ ID NO: 128634 - DNA, 1413 bp, synthetic construct
  misc_feature 1..1413: note = Description of Artificial Sequence: Synthetic coding sequence
  source 1..1413: mol_type = other DNA
atggggcaaaatctaatcctgaatatgaatgaccatggctttgtcgtttgtgcatttaatcgcactgtctctaaagttgatgattttctggcaaacgaggctaagggaacgaaggtcgtcggagcccagtccctgaaagagatggtttcaaagctcaaaaaaccccggcgcattatactgctggtcaaggctgggcaggcagtcgacgactttattgagaagctggtccctctcttggacaccggggacatcatcatcgacggaggaaatagcgagtatcgagatacaactcgcaggtgcagagacctaaaggcgaaaggaattctatttgtgggctctggtgtttccggtggcgaggagggagccagatacgggccctcactgatgcccggcggcaacaaagaagcatggccccacataaagacaatcttccaagggattgcagccaaagtagggacgggtgagccctgttgcgattgggtgggggatgagggggcgggtcactttgtcaagatggtacacaacggcatagagtatggcgatatgcaactgatctgtgaggcatatcacctcatgaaagacgtcttaggcatggctcaggatgagatggcccaagcctttgaggactggaataaaacagagctagattccttcttgatcgagattaccgcaaacatcctgaaattccaggatacagacggtaagcacctccttccgaagatacgtgattccgccgggcaaaagggaaccgggaagtggaccgcaatctccgccctggagtacggagtgccggtcactctgattggagaggccgtgttcgcccgatgcttgtctagtctcaaggatgaaagaattcaggcctctaagaaactgaagggtccacagaagttccaatttgatggagataagaagagctttttggaggatattcgcaaagccctctatgcatctaagatcatcagttacgctcagggatttatgctgctgcggcaggcagccaccgaatttggctggactctgaattatggcggcatcgcgcttatgtggagaggaggatgcattatccgatccgtctttcttggcaagatcaaggacgcttttgatcgcaatcccgagctccagaatctgctcctggacgacttcttcaaatccgctgtcgaaaattgtcaggactcatggagacgggcagttagcactggggtgcaagctgggatccctatgccatgttttacgaccgccctgtccttctacgacgggtaccgccacgagatgctccctgcctcccttatccaggcccagcgcgactacttcggcgctcacacgtacgaactactcgcaaaaccaggacagtttattcacactaattggactggtcacgggggcacagttagtagcagttcatataacgcctag

SEQ ID NO: 128635 - DNA, 1386 bp, synthetic construct
  misc_feature 1..1386: note = Description of Artificial Sequence: Synthetic coding sequence
  source 1..1386: mol_type = other DNA
atggcccaggccgatattgcccttattggcctggcagtcatgggccagaaccttattctgaatatgaatgaccacggctttgtagtgtgcgcctttaaccgcacagtctctaaggtcgatgactttctcgctaacgaggccaaaggcacgaaagtggttggcgcgcagtctctgaaagaaatggtttctaagctcaagaaaccccgcagaattattttacttgtgaaagcaggccaggctgtagacgacttcattgaaaagttacggagatgcagggacctgaaggccaaaggcatcctattcgtcgggtcaggggtgagtggtggggaggaaggggctaggtacgggccaagccttatgccaggaggcaataaggaagcttggccccatatcaaaacgatcttccaagggatcgctgcaaaggtcggaacaggcgaaccgtgttgcgactgggtgggagacgagggagccggccacttcgtgaagatggtgcacaacggtatcgaatacggggacatgcagctgatttgcgaagcctatcacctgatgaaggatgtactcggcatggcacaagatgagatggcacaggccttcgaggactggaacaagactgagctggattcatttctgatcgagatcaccgctaatatattaaagtttcaggatactgatggcaaacatctgctaccaaagattcgcgattctgcggggcagaaaggcacgggaaagtggactgcaatctctgcccttgaatatggcgtgcctgtaacgcttataggcgaggccgtattcgctaggtgtttgagttcattgaaagacgaaaggatccaggcatccaagaagctcaagggacctcagaaatttcagtttgacggagacaaaaagtcctttttggaggacatccggaaagccctatacgcctccaaaattattagttacgctcagggatttatgctgctgagacaagccgccactgaattcggttggaccctgaattatggaggcatcgcgctaatgtggcggggcgggtgtatcatccggtcggtgtttttgggtaagattaaggacgctttcgaccggaacccagagctgcagaatctcctgctggatgatttttttaaatccgcagttgagaattgccaggactcctggcggagagccgtttctaccggagtacaggcagggatccccatgccctgcttcacgaccgcattgtctttttacgatgggtaccggcacgaaatgctacctgcctcactcattcaggcccaacgggactacttcggcgctcacacgtacgaactcctagctaaaccagggcagtttatccacacaaactggactggccacggaggaaccgtgtcttcttcatcatacaatgcctag

SEQ ID NO: 128636 - DNA, 1290 bp, synthetic construct
  misc_feature 1..1290: note = Description of Artificial Sequence: Synthetic coding sequence
  source 1..1290: mol_type = other DNA
atgaccaccgccttgtggagtgttctactgataggtctcagtccaaagctgatgatcagttggcctatgcggcaagctgtggacgattttattgaaaagctggtgccactgctcgatacaggagacatcatcatcgatggcggcaactcggaatacagagatacaactaggagatgcagagatctgaaggcgaaggggattctcttcgtcggaagcggggtctctggcggcgaggagggtgcacgttacgggcccagcctgatgccaggaggcaacaaagaggcttggccacacataaaaactatcttccaggggatcgcggctaaggtggggacaggagagccgtgctgcgattgggtgggagatgagggggcagggcatttcgtcaaaatggtccacaacggcattgagtatggggacatgcagctgatctgtgaggcttatcatcttatgaaggatgttctgggtatggcccaagacgagatggcacaggctttcgaggactggaataaaactgaactcgattctttcttgattgaaataacagccaacatcctgaaattccaggacacagacgggaagcatcttctgccaaaaatccgggactccgcaggtcagaaggggaccggcaaatggacagctatttccgcactggaatacggagtgcctgttacactgatcggggaggcagtgttcgctcgctgtctatcctcacttaaagatgagcgaatccaggcatccaagaagctgaaggggcctcagaagttccaattcgacggggacaagaaatctttcctcgaagacattagaaaggcattatacgcctctaaaatcatctcctacgcgcaaggctttatgctactacgccaagccgctacagaattcgggtggacccttaactatgggggcatcgcattgatgtggcgcggtggctgcatcattaggtcagtgtttctgggaaagataaaagatgcttttgaccgcaaccctgaacttcagaatctgcttctcgacgatttcttcaaaagcgccgtggagaattgccaggattcctggaggagagctgtgtccactggcgtgcaggccgggatccccatgccctgttttaccacagccctcagcttttacgacggataccggcacgagatgttgccggcttcactgattcaggcacagagagactactttggagcacacacgtacgaactgctggctaagccagggcagttcatccatacaaattggactggacatggaggaacagtgtcctcatcttcctacaatgcttag

SEQ ID NO: 128637 - DNA, 1500 bp, synthetic construct
  misc_feature 1..1500: note = Description of Artificial Sequence: Synthetic coding sequence
  source 1..1500: mol_type = other DNA
atgactttctggacgcagatgttctttctgcttcaagattgcgaggggctgatcgtgcgctccgctactaaagtgacagcagatgtgattaacgctgccgaaaaactgcaagtggtgggacgcgcgggcacaggcgtggataatgtggatctcgaagccgcaaccagaaagggcatcctagtgatgaacacacctaatggcaacagtctttctgccgccgagctgacctgtggaatgatcatgtgtctggcccggcagataccacaggctaccgcctctatgaaggatggaaagtgggagcgcaagaagttcatgggcacggagttaaacggcaagacactggggattttgggcctgggtaggatcggccgagaagtagccacacggatgcaatcattcgggatgaagacaatcggatatgacccaataatctcgcctgaggtgagcgccagcttcggggtacaacagttaccactcgaagaaatttggccgctgtgcgattttattacagtacatactccgctcctcccatcaaccaccgggctcctaaacgataacaccttcgcacagtgtaagaaaggcgttcgggtggtgaattgcgcacgaggcggtatcgttgacgagggggctctcctccgggccctacagtcaggacagtgcgcgggagccgcccttgacgtgttcacagaggagccccctcgtgaccgggcactagtggatcacgaaaatgtcatcagttgcccacacctgggcgcatctaccaaagaagcccagagcaggtgtggtgaggaaatagcagtgcagtttgtggatatggttaaagggaagagcttaacaggcgtagtcaacgcccaagcactaacgtccgcgttctcccctcacaccaagccctggatcggattggcagaggcactcggtaccttgatgcgcgcttgggcaggttcccccaaaggcaccatccaggtgattacgcaagggacctctctaaagaatgctggaaactgcttatcacctgctgtaattgtgggactcctcaaagaagcctccaagcaggctgatgttaatctcgtgaatgccaagctgttggtgaaagaggctggcctgaacgtcaccacttcacactcgcctgctgcaccgggagagcagggtttcggcgagtgcctgctagcagttgccctggccggtgccccttatcaagccgttgggttggtccagggcactacccctgttttgcagggactcaacggcgccgtctttcggcccgaggtacctcttcggcgtgatctgcccctgctcctcttcaggacgcagacatccgatccagctatgttgcctactatgattggactgctcgctgaagcaggggtacggctcctgagctaccaaacttcactggtatctgatggagagacctggcatgtgatgggcattagctccctgctgcccagcctggaagcttggaagcagcatgtcacagaggctttccaattccacttctag

SEQ ID NO: 128638 - DNA, 1602 bp, synthetic construct
  misc_feature 1..1602: note = Description of Artificial Sequence: Synthetic coding sequence
  source 1..1602: mol_type = other DNA
atggccttcgccaacctccgcaaggtgttgatttctgacagcctggacccttgctgcaggaaaatcctgcaggatggcggactgcaagtagtggaaaagcagaacttgtctaaggaagaactcatcgccgagttacaggactgcgaggggttaattgttcgcagtgccacaaaggtgaccgccgatgtgatcaacgctgcagagaagctccaagtcgtgggtagagcgggaacaggcgtcgataacgtcgacctagaggcggccacacgaaagggcatacttgtcatgaatacacccaatggaaatagtttgagtgcagcagagctgacatgtggcatgattatgtgtctcgctaggcagatccctcaggctaccgcatccatgaaagacgggaaatgggaaagaaaaaaatttatgggcacagagctcaacggcaagaccctcggtattctcggcctcgggcggatcggcagagaggttgccacacggatgcagtccttcggaatgaagactatcggctatgatcctattatcagtccagaagtgtcagccagtttcggcgtgcaacagcttcccttagaagaaatttggccactttgcgactttattacagtccatacacccctgcttccttcaacaacgggcctgctcaatgataacacctttgcccagtgtaagaagggcgtgagagttgtgaactgtgcaaggggaggaatcgtcgacgagggtgcccttctccgcgcgttacagagtggccaatgcgcgggggccgccttagacgtcttcactgaggagcctccgcgggaccgagcacttgtcgaccacgagaacgttattagctgtccccatctcggtgcttcgactaaagaggctcagtcaagatgcggcgaagaaattgccgtgcagttcgtcgatatggtgaagggtaagagcctgactggcgtagttaatgcccaggctcttacaagtgccttctctccacacaccaagccttggattggattagctgaggccctgggcactcttatgagggcctgggctggttcacccaagggcacaatccaggtgatcactcagggcacctccctgaaaaacgccggcaattgcctttcccctgctgtgattgtgggactgctgaaagaagccagcaagcaggcagacgttaacctggtgaatgcaaaactgctcgtcaaagaagccgggctcaacgtaacaacatcgcactcacccgctgcccctggcgagcaagggtttggggagtgcctgttagctgttgctctcgccggagccccttatcaagcggtcggcctggtacaaggtacaacccccgttctccagggtctgaatggcgccgtcttccgtccggaggtgccactgagaagggaccttcctttgcttctttttagaacacagacctctgatcccgccatgcttcccactatgatcggcttgctggcagaagcgggcgtgcgcttgctgtcctatcaaacatccctcgtgagtgatggcgaaacatggcacgtcatgggtataagctcactgttaccttccttagaggcttggaaacagcatgtcactgaagcctttcagttccacttttag

SEQ ID NO: 128639 - DNA, 291 bp, synthetic construct
  misc_feature 1..291: note = Description of Artificial Sequence: Synthetic coding sequence
  source 1..291: mol_type = other DNA
atgaaaacaatcggctacgaccctattataagtcccgaagtgagcgcttcttttggcgtgcagcagctccctctcgaggaaatatggcccctctgtgattttatcacagtgcatacccctctactgccttcaaccaccggacttctaaacgataacacgtttgcgcaatgtaagaagggggtgcgggtggtaaattgcgctcgcggtggcattgtcgacgagggcgcactcttaagagctctgcagagtggccaatgtgcgggcgcagccctagacgtgttcaccgaatag

SEQ ID NO: 128640 - DNA, 1221 bp, synthetic construct
  misc_feature 1..1221: note = Description of Artificial Sequence: Synthetic coding sequence
  source 1..1221: mol_type = other DNA
atgaaggacggaaaatgggagcgcaaaaagttcatgggtaccgaactgaatggcaagacactgggtatacttggcctcggaagaatcggccgtgaagttgccacacgtatgcagtcatttgggatgaagaccattggatatgaccctataatttcccccgaggtgtccgctagctttggtgttcagcaattacctctggaagagatatggcccctgtgcgattttattacagttcacactcctctgttaccgtctacaaccggcctgctgaacgacaacacattcgcccagtgtaaaaaaggggtgagagtggtgaactgcgcccggggtggaatagtcgatgaaggcgcattgcttcgggcactgcagtccggccagtgcgcaggggccgctctcgatgtcttcactgaggaacctcctagagatagggcattggtcgaccacgagaatgtcatttcctgcccccatctgggtgcttctactaaggaagcccagagtcggtgtggagaagagatagctgtgcaattcgtagacatggttaagggcaagagtctgacaggggtagtaaacgcccaggcactaacctccgccttctccccccataccaaaccctggattggattggccgaagcactaggaacactgatgagagcgtgggccgggtcgcccaagggtaccatccaggtgatcactcaaggtacctcgttaaaaaatgctggcaactgtcttagtccggccgttattgtcggcttactgaaagaggccagcaagcaggctgacgttaatctggtgaatgccaaacttctcgtgaaagaagccgggctgaacgtgaccacatctcactcaccagccgcccctggcgagcaaggcttcggtgaatgcctgcttgccgttgccctagcaggcgctccttaccaagcagtagggctggtgcagggcaccaccccagtgttacagggactgaacggggctgtgtttagaccagaggtgcccctcaggagggatctgcccttgttattgtttcggacacagacaagcgaccccgccatgctgcccacaatgatcggactgctagctgaggccggcgtgcgccttctaagctatcagacctctctggtttctgacggtgagacatggcacgttatgggcatttctagtttgctaccctccctagaggcgtggaagcagcacgtaaccgaggcctttcagtttcacttctag

SEQ ID NO: 128641 - DNA, 1254 bp, synthetic construct
  misc_feature 1..1254: note = Description of Artificial Sequence: Synthetic coding sequence
  source 1..1254: mol_type = other DNA
atgtccctgtccaacaagcttacccttgacaagctcgatgtcaaaggcaagcgtgtcgtgatgcgggtcgacttcaacgttcccatgaagaataaccagattactaacaaccagaggattaaagctgccgtgcctagcattaaattttgtctcgacaatggagcaaagtctgtggtcctcatgagtcacctcgggcggcctgatggagtgcccatgcccgacaagtactcattggagccggtggccgtcgaactgaagtcacttttgggcaaagatgtcctcttccttaaagattgcgttggtcccgaggtggaaaaagcttgcgctaaccctgcagcgggtagtgtcatcctcttggaaaatctaaggtttcacgtagaagaggagggcaaagggaaggacgcatctgggaacaaggtgaaagccgaacctgccaagatcgaggcctttcgggcctccctctcaaagctgggcgacgtttacgtgaacgacgcattcgggaccgctcaccgtgcacattcctcaatggtgggagtgaatctcccgcagaaagctggcggatttctgatgaagaaagagctgaattattttgccaaggcgctcgagagccctgaaaggcccttcctggcaatcctgggcggggccaaggttgctgacaaaatacagctcattaacaatatgctggataaggttaatgagatgatcataggcggcggtatggcctttaccttcttgaaagtactgaataacatggaaattggcacatctctgttcgatgaggagggggcgaagatcgtgaaggatttgatgagcaaggccgagaagaacggagtgaagattacactcccggtcgattttgtcaccgccgacaagtttgacgagaacgccaaaaccgggcaggcgacagtggcctctgggatcccagccggatggatgggattagattgtggacccgaatcctctaagaagtatgctgaagctgtcactagagcaaaacagatcgtgtggaatggtccagtgggcgtgttcgagtgggaagcattcgcacgggggaccaaagccctgatggatgaggtcgtgaaagccacctcacgaggatgtattaccattataggcggcggggacacagccacatgctgtgcaaaatggaacactgaggacaaggtgtctcatgtcagtacaggcgggggagcatcattggaactgcttgagggaaaggtgctgccaggagtggatgctttgagcaatatctag

SEQ ID NO: 128642 - DNA, 846 bp, synthetic construct
  misc_feature 1..846: note = Description of Artificial Sequence: Synthetic coding sequence
  source 1..846: mol_type = other DNA
atgtcactctctaataaactcactctggacaagttggacgttaaaggaaaacgcgtggtcatgagagtcgatttcaatgtgccaatgaagaataatcagatcactaacaaccaaagaataaaggctgccgtccctagcatcaagttctgcctggacaacggagcaaaatcagtcgtcctgatgagccacctgggccgacccgacggccggccctttctggcgatattggggggcgcgaaagtagcagacaaaatccagttgattaacaacatgctcgacaaggtaaacgaaatgatcattggtggcggcatggcatttacatttttgaaggtgctgaataacatggagatcggaacaagtttatttgatgaagagggcgccaagattgtcaaggatctcatgtctaaagctgaaaagaatggagtgaagatcacactacccgttgacttcgttaccgcggataagttcgacgaaaacgccaagacgggccaggccactgtggcatcagggatccctgcggggtggatgggacttgattgcggacccgagtcttccaaaaaatatgctgaggctgtcactagggctaaacagattgtttggaatggaccagtgggtgtctttgaatgggaggcattcgcgcggggcaccaaggctctaatggatgaggttgtgaaggctacctcaagaggatgcattacaattattggcggaggggatacggcaacctgctgcgcaaagtggaataccgaggacaaagtatctcacgtgagcaccggcgggggggcatccctcgaacttcttgagggaaaagtgttgcccggcgtcgacgccctgagtaatatatag

SEQ ID NO: 128643 - DNA, 729 bp, synthetic construct
  misc_feature 1..729: note = Description of Artificial Sequence: Synthetic coding sequence
  source 1..729: mol_type = other DNA
atggtcggagtaaacctccctcagaaggcaggggggtttctaatgaagaaggaactgaattacttcgcgaaggcactggagagccctgaaagaccatttttggctatacttgggggggctaaggtcgcagataaaatccagctcatcaataatatgctggacaaggtgaacgaaatgattattggagggggtatggccttcacttttctgaaagttcttaacaatatggaaatcgggacatccctgtttgacgaggagggtgccaagatagtgaaagaccttatgtccaaggcagaaaaaaatggcgtgaaaatcactctacccgtcgacttcgtaaccgcagataagttcgatgagaatgctaagacaggacaagcaaccgttgcaagtggcattcctgcggggtggatgggcttggactgcgggccggaatcctcgaagaagtatgccgaagcagtgactagagctaagcagatcgtgtggaatggccccgtgggcgtctttgagtgggaggcattcgctaggggcacaaaggctctcatggacgaggtcgttaaagcgacctccagaggatgcattacaataattggaggcggcgataccgctacatgctgtgctaagtggaacacagaagataaggtctcgcacgtatcgactggcggaggcgcatccctggaactgttagaaggaaaggtcctacccggcgtcgatgccttgtcgaacatttag

SEQ ID NO: 128644 - DNA, 1170 bp, synthetic construct
  misc_feature 1..1170: note = Description of Artificial Sequence: Synthetic coding sequence
  source 1..1170: mol_type = other DNA
atgaaaaacaaccagatcacaaacaaccagcgaatcaaggcagcagttccttccatcaaattttgtcttgacaacggagcaaagagcgtggtcctcatgtctcacctcggccggccggatggagtacccatgcctgacaaatactccctggagcctgttgcagtcgagctaaaatccctgctcggtaaggatgtgctgttcctcaaagactgtgtcggacctgaggtggagaaggcatgtgcgaatcctgctgctgggagtgtgatcctccttgagaacctccggtttcatgtggaggaggaagggaaaggaaaggacgcatcaggaaataaagtgaaggccgagcccgctaaaatcgaggcctttagggcatctctgagcaagctgggagacgtgtacgtgaacgatgcttttgggaccgcacaccgcgcacattcttcaatggttggtgtgaatctgcctcagaaggccggaggttttctgatgaaaaaagagctcaattatttcgcgaaggccttagagagtccagagaggccattcctagcaatattgggtggtgctaaagtggccgacaagatccagcttattaacaatatgttagacaaagtaaatgagatgatcatcggggggggcatggccttcaccttcttgaaggtgcttaacaatatggaaatcggaacaagcctgtttgacgaagagggtgctaagattgttaaggatttaatgtctaaggcagagaagaacggcgtgaaaattacgctgccagttgatttcgtgaccgccgacaagtttgacgagaatgcaaagactggccaggcaacagtcgcttccggcattccagctggctggatgggactggactgcgggccagagagcagcaaaaaatacgcagaagccgtgacacgcgctaagcaaattgtgtggaatgggcctgtaggagtgttcgagtgggaagccttcgcccgcggaacgaaggcccttatggatgaagtagtcaaggccactagccggggctgtatcaccatcatagggggtggcgataccgccacgtgttgtgctaaatggaacactgaggataaagtatctcatgtatccacaggcggcggggcgtccttagaactcctggagggtaaagtgttgcctggggtggacgctttgagcaacatttag

SEQ ID NO: 128645 - DNA, 1254 bp, synthetic construct
  misc_feature 1..1254: note = Description of Artificial Sequence: Synthetic coding sequence
  source 1..1254: mol_type = other DNA
atgtctctaagcaaaaaactgacccttgacaagttggacgtccgaggtaaacgtgttatcatgagagtagattttaatgtgccaatgaaaaaaaaccagataactaataaccagcgcataaaggccagcataccctctattaagtactgccttgacaatggcgccaaggccgtggtgctgatgagccacctgggccgccccgacggcgtacctatgcctgacaaatatagcctcgccccagtggctgtggaactgaaaagtctgctcggaaaagacgtactattcctgaaagattgtgtcggggccgaggttgaaaaggcttgtgccaaccccgcccccggcagcgtgatactacttgagaatcttcggttccacgttgaggaggagggcaagggtcaagatccaagtggcaaaaagattaaagctgagcctgataaaatagaagcttttagagcttctctgagcaagctgggcgacgtgtacgtgaatgacgccttcgggaccgcccacagagcccacagctccatggtcggggtcaatctcccacataaggcgtctgggtttctgatgaagaaagagctggattatttcgcaaaggctctggaaaatcctgtgcgccctttccttgcaattcttggtggagccaaggtggcggataaaatccagctgatcaaaaacatgctcgacaaagtgaacgagatgataattggaggtgggatggcctacacgttcctgaaagtcctgaacaatatggaaatcggggcgagcctcttcgacgaagaaggcgcaaaaatcgttaaggacattatggcaaaagctcagaaaaacggagtgaggatcacattcccagtggacttcgtgactggggataagttcgacgagaacgcacaagtgggtaaggccacggtggcgtccggcataagcccaggctggatgggactggattgcggtcctgagagcaacaagaatcacgcccaagtagttgcgcaagcgagacttattgtctggaatggaccactcggcgtattcgaatgggatgcttttgcaaagggaacaaaggccctcatggatgagatcgtgaaggcgacctccaaggggtgcattaccgtgatcggggggggcgatactgcaacttgctgcgctaaatggaacacagaagacaaggtctctcacgtgagcacagggggcggcgccagccttgagttgctcgagggcaagatcttgcccggcgtcgaggcactctctaacatgtag

SEQ ID NO: 128646 - DNA, 765 bp, synthetic construct
  misc_feature 1..765: note = Description of Artificial Sequence: Synthetic coding sequence
  source 1..765: mol_type = other DNA
atggctgcctacaagctagtgcttatccgccacggggagtccgcttggaacctggagaatagattctcaggctggtacgatgccgatcttagtccagcaggacatgaggaagccaaacgcggcggtcaggctttgagagacgctggttatgaattcgatatttgcttcaccagtgtccagaagcgagccatccggacgctgtggaccgtactggatgccatcgaccagatgtggcttccggtagttaggacctggcgcctcaatgagaggcattatgggggcctcaccggactcaacaaggcagagacggcagcaaaacatggggaggctcaggtaaaaatctggcggagatcatatgacgtgccacccccccccatggagccggatcatccattttactctaatattagtaaggacaggcggtacgccgatctgacggaggatcagctcccgagttgcgaatccctcaaggataccatagctagagccctccccttctggaacgaagagattgtgccgcagataaaagaagggaagagagtgctgatagcggctcatgggaacagcctgcggggaatcgttaagcacctcgagggattgagtgaggaggctatcatggagcttaatttacccaccggcattccaatcgtgtacgagcttgacaaaaacctgaagccaatcaaacctatgcagttcctcggagatgaggaaactgtgcggaaggccatggaagccgtcgctgcccagggcaaagccaaaaaatag

SEQ ID NO: 128647 - DNA, 435 bp, synthetic construct
  misc_feature 1..435: note = Description of Artificial Sequence: Synthetic coding sequence
  source 1..435: mol_type = other DNA
atgccattaatcaggtgtggctgtcacgacgtcccccccccgcccatggaacctgaccacccgttctactctaatatcagtaaagacaggaggtatgccgacctgaccgaagaccagctcccctcctgtgagagtctaaaggacactatcgcgagagccctccctttctggaatgaggaaattgtcccccagattaaagagggaaagcgggtactgatcgcagcacatggaaacagcctgaggggcatcgtaaaacacttggagggcctttctgaagaggcaatcatggaactgaatctcccaacgggaattccaattgtttatgagctggacaagaacctgaaacccattaagccaatgcagttcttaggcgacgaggagaccgtgcgaaaagccatggaggcggttgcagcccaaggtaaagccaagaaatag

SEQ ID NO: 128648 - DNA, 762 bp, synthetic construct
  misc_feature 1..762: note = Description of Artificial Sequence: Synthetic coding sequence
  source 1..762: mol_type = other DNA
atggctacgcatcgcctggttatggttcgccacggcgagtctacctggaaccaggagaacagattctgtgggtggttcgatgctgagctctcagagaaagggacagaagaggccaaacggggcgccaaggccataaaggatgccaaaatggagtttgacatatgctatacatctgtcctgaagagggccataagaactctgtgggccattttggacggcaccgaccagatgtggctgcccgtcgtgaggacttggcgtctaaatgagaggcattacggcggacttaccggacttaataaggccgaaacggctgcaaagcacggagaagagcaggtgaaaatatggcgccgttcctttgatatcccacctccacctatggatgagaagcacccctactataacagtatttctaaagagaggcgatatgccggactcaaacctggtgaactcccaacttgcgaatctctcaaggacactatcgctagagccctgcctttttggaatgaggaaatcgtcccacagattaaggcagggaaacgcgttctcattgcagcccatggcaactcactgcggggaatcgtaaagcacctggaggggatgtctgatcaggcaataatggagttaaatctgcccacaggaatcccaattgtatacgagctgaataaggaactcaaacctactaaacccatgcaatttttgggcgacgaggagaccgtgagaaaggcgatggaggctgtcgcggcccaagggaaagctaagtag

SEQ ID NO: 128649 - DNA, 765 bp, synthetic construct
  misc_feature 1..765: note = Description of Artificial Sequence: Synthetic coding sequence
  source 1..765: mol_type = other DNA
atggcggcctataagttagtgttgatccgacacggcgagtctacttggaacctagaaaacagatttagttgttggtatgacgctgatcttagcccagccggccacgaagaagcaaaaagaggcgggcaggcactgcgggacgctgggtacgagttcgacatttgtctaacgtcagtccagaagcgggtcataaggaccttgtggaccgtgctggatgccatcgatcaaatgtggcttccagtagtgagaacatggagactgaatgaaaggcattacggaggcctaacggggctgaacaaggccgagacagctgccaaacacggggaagcacaagtaaagatatggcgcagatcttatgatgttcctccccctcccatggaacctgatcaccccttttactctaacatcagcaaagatcgaaggtatgctgacttgaccgaagaccagctgccctcttatgagtctcccaaggatacaatcgctagggccctgcccttttggaacgaagaaattgtgccacagatcaaggaaggaaaacgcgttctgattgcggcgcatgggaattctctgcagggaatcgccaaacacgttgaagggctgagcgaagaagctattatggagctaaatctaccaactggcataccgattgtgtacgagctggataagaatcttaagcctatcaagccaatgcagtttttaggcgatgaagaaactgtttgtaaagccatcgaggcggtcgcagcacagggaaaggctaagaaatag

SEQ ID NO: 128650 - DNA, 966 bp, synthetic construct
  misc_feature 1..966: note = Description of Artificial Sequence: Synthetic coding sequence
  source 1..966: mol_type = other DNA
atggccgctgcagaggctgggggagacgatgcacgatgtgttcggctcagtgcagagagggcacaggccctgctcgctgatgtggacactcttctttttgactgtgacggagtcttgtggcggggtgaaacagctgtgcctggcgccccagaggccctgcgcgctttgcgcgcaaggggcaaaaggttaggatttatcaccaataactcatcgaagaccagggcggcctacgcagagaagcttaggcgtcttgggtttggagggcctgcaggccctggtgccagccttgaggtgtttggcactgcatactgcactgcactgtatctgcggcagcggctggccggagctccggcccctaaggcttatgtgctgggctccccagcacttgccgccgagttggaggcagtgggtgttgcatctgtgggggtcgggcctgagcctctccagggagaagggcccggcgactggctacatgcaccgttggaacctgatgtaagagctgtggtcgtcgggttcgacccacacttcagctatatgaagctgactaaggcactgcggtatctgcaacagcctggctgcctcctggtgggcaccaatatggataaccggctgcctctggagaacgggcggtttattgccggtactggctgccttgtgagggccgtggagatggcagctcagcgtcaggctgatatcatcggtaagccatcacggtttattttcgattgcgtgtctcaggagtacgggatcaatccagaacggactgtgatggtaggggatcgtcttgacacagacatattgttgggcgcaacttgtggcctgaagacaatccttaccctaacaggagtctctactttgggagacgtgaagaataaccaggagtcagactgcgtgtcaaagaaaaagatggttcccgacttctacgtcgatagtattgccgatttactccccgcacttcaaggttag

SEQ ID NO: 128651 - DNA, 378 bp, synthetic construct
  misc_feature 1..378: note = Description of Artificial Sequence: Synthetic coding sequence
  source 1..378: mol_type = other DNA
atggcagtggctgacctggcgctcattcccgacgtagacattgactcagatggcgtcttcaagtatgtgctaattagggtacacagcgcgccacggtcaggcgcaccagcagctgagagtaaggaaatagtgcggggctacaaatgggctgaataccatgcggatatatacgataaggtgtctggggacatgcagaaacagggctgtgactgcgagtgcctaggggggggcaggatctctcaccagagtcaggacaaaaagatacacgtgtatggttattcaatggcctatggccctgcacagcacgctatctcaacggagaagatcaaagctaagtatcctgactacgaagtcacctgggctaacgacggctattag

SEQ ID NO: 128652 - DNA, 375 bp, synthetic construct
  misc_feature 1..375: note = Description of Artificial Sequence: Synthetic coding sequence
  source 1..375: mol_type = other DNA
atggcggtggcggacctggcactgattcccgacgtggacattgacagtgacggcgtgtttaaatacgtgctaatccgggtgcattccgctcctagatctggggcccctgcagccgagagtaaagaaatagtccggggttataaatgggccgagtatcatgcagatatttatgataaggtgagtggggatatgcaaaaacagggttgtgactgcgaatgcctgggaggagggcgaatttcacatcagtctcaggacaaaaaaatccatgtctacggctacagcatgatgagacccacatgcgtcccgcttggtgcgtcaggccccaggatccaccaccagggcctttggagctgcccagcccgccattttaattag

SEQ ID NO: 128653 - DNA, 375 bp, synthetic construct
  misc_feature 1..375: note = Description of Artificial Sequence: Synthetic coding sequence
  source 1..375: mol_type = other DNA
atggcagtagctgatctagctctgattcccgatgtggacatcgactccgacggtgtgtttaagtacgttctcattagagtgcattctgccccgagatcaggagctcccgctgccgagagcaaggagattgtccgtgggtacaaatgggctgaataccatgccgatatctatgacaaagtgtctggcgatatgcagaagcaaggttgcgattgtgaatgcttgggcggaggaagaatttcccaccaatctcaggacaagaaaattcatgtctacggatatagtatgatgaggccaacatgcgtgcccctcggggctagcgggccacggatacaccaccagggactgtggtcttgccctgcacgacatttcaattag

SEQ ID NO: 128654 - DNA, 1356 bp, synthetic construct
  misc_feature 1..1356: note = Description of Artificial Sequence: Synthetic coding sequence
  source 1..1356: mol_type = other DNA
atggctacagacgacaagacaagccctactctggactctgccaatgatctgcctcgaagccccactagtccctctcaccttacccatttcaaacctctgacgcctgatcaagatgagccaccattcaagtccgcttatagttccttcgtaaatctgttccgcttcaataaggagcgtgctgagggcggccagggcgaacaacagcccctttctggctcctggacctctcctcagctgccctcccgcacccagagcgtacgcagtcccaccccctacaagaagcagctgaatgaagagttacaacgccggtcctccgccttaggggacctgcgggcttgtacatactgcagaaaaattgccctaagctatgcccacagcactgatagtaattctataggtgaggaccttaacgcattatctgattctgcttgtagtgttagcgtgctcgatccctccgagccccgaacaccagtgggatcacgtaaggcgagcaggaatatctttttggaggacgatctggcctggcagtcattaatccaccctgacagctccaacaccccactctccacacgattggtttctgtacaagaggatgccgggaagagccccgcacgtaataggtccgctagcatcacgaatttgtctctggacagatccggatcaccgatggtccctagctacgaaacgtctgtgtctcctcaggcgaatagaacctacgtaagaacagagacaactgaagatgaaaggaaaatcctccttgactctgtgcagttgaaggacctgtggaaaaaaatttgtcatcactcaagcggtatggaatttcaggatcaccggtactggctgcgaacccatcctaactgcatagtggggaaggaactagtaaattggctaatacggaatgggcacatcgccactcgagcgcaggcaattgccataggtcaagctatggtggacgggaggtggctcgactgtgttagtcatcacgaccaattgttccgggatgagtatgccctatatcggcccctgcagtcgacagagttctctgagactccatctccggactcagactccgtgaactcagtagagggacatagcgagccatcttggttcaaagatatcaagtttgatgattcagacactgaacagattgcagaagaaggtgatgacaatctggcaaattctgccagtccgtccaagagaaccagcgttagctctttccagagcactgtggattccgacagtgccgcttctatttcgctcaatgtagaacttgacaacgttaactttcatatcaaaaaaccaagcaaatatcctcacgtgccgccccatcctgcggatcagaagggacgcaggtag

SEQ ID NO: 128655 - DNA, 1647 bp, synthetic construct
  misc_feature 1..1647: note = Description of Artificial Sequence: Synthetic coding sequence
  source 1..1647: mol_type = other DNA
atggccaccgacgacaagacttctcctacccttgattctgcgaatgatctgcctcgctcccctacttcaccttctcatcttacacactttaagcccctgactcctgaccaggacgaaccgccgttcaaatcagcatattccagcttcgtaaatctctttagattcaacaaggaacgcgcagaaggagggcagggtgaacagcagcctttgagcggttcttggacatcccctcagctgccttcgcggactcagtctgtgaggtctccaaccccctacaagaaacagctgaacgaggagttgcagcgccgctcttccgcattggacactagaaggaaagcagaacctacttttggcggacacgatccccgtaccgccgtccagctgagatctctgagtaccgtgctaaagaggctgaaggaaattatggaagggaagtcccaggactctgatctgaagcaatactggatgcctgactcccaatgtaaggagtgctacgactgttcggaaaagtttactacattcaggaggcggcatcattgccggctgtgtggtcagatcttctgtagtcggtgctgcaatcaggagattcccggtaaatttatgggttacacgggcgatctcagggcttgtacgtactgcaggaaaatcgctctatcatatgcccactccaccgattcgaactccattggagaggacctgaacgctctttctgattccgcctgctctgtttccgtgctggacccttccgagcccaggactcccgttggatctcggaaagcatccagaaatatctttctggaagacgacctggcttggcagagtcttattcaccctgattctagcaatacccctctgtctactcgtttagtgtctgtccaggaagacgccggtaagtctccagctcggaatcggtctgcctcgattaccaacctctcactcgatcgtagtgggtccccaatggtccctagttatgaaacaagtgtgagcccccaggccaacagaacatatgtaaggacagagactacagaggacgaacgaaaaatcctcctggactcagtgcagttgaaggacctgtggaagaaaatatgtcatcatagctctggaatggaatttcaggatcatagatattggctgagaacacaccccaattgcatagtgggaaaagagttagtcaactggctgatcagaaacggacatattgcaacacgcgctcaggccattgctatcggacaggccatggtagacggaaggtggttagactgcgtgtcacatcacgaccagctattccgcgacgaatacgcgttgtataggcccctgcaatcaactgagttcagtgagaccccttctccagactctgactcagtgaatagtgtggagggacacagtgagccctcttggtttaaagacattaagtttgatgattccgatacggagcagattgccgaagagggtgatgacaaccttgctaactcagcaagcccttccaagcggacaagcgtgagctccttccagtccaccgtggattccgatagtgccgcttcaatttcccttaacgtggaacttgataatgtgaatttccacattaagaaaccaagcaagtacccccacgttcccccccatccagccgaccaaaagggccggcgctag

SEQ ID NO: 128656 - DNA, 6297 bp, synthetic construct
  misc_feature 1..6297: note = Description of Artificial Sequence: Synthetic coding sequence
  source 1..6297: mol_type = other DNA
atggctactgatgataagaccagtccgactctcgattctgcgaacgacctgcctaggagtcccacttctccaagccatctgacacactttaaacctctgacgcctgaccaagacgagcccccgttcaagtcagcctattcaagctttgttaaccttttccgatttaataaagagcgggccgaaggtgggcagggtgaacagcaacctcttagtgggagctggacgagcccacagctcccctcccgcacacagtccgtgagaagccctactccatataagaaacagcttaacgaagagctgcagcgaaggagctcagcgcttgacactaggaggaaggcggaaccaaccttcggcggccacgaccctcggaccgccgtccagcttaggagcctgtctacagtgctgaagagattgaaagaaatcatggagggcaagtctcaggattcagaccttaagcagtattggatgcctgactctcagtgcaaggaatgttacgactgtagcgagaaatttacgacttttcgtagacgccaccattgtcggttgtgcggccagattttctgttctaggtgttgtaatcaggagataccaggcaagtttatgggctacacaggagacctgcgtgcttgtacttattgccggaagatagccctgtcatacgcccactccaccgatagcaattctatcggggaggaccttaacgccctgagtgactcagcttgcagtgtgagtgtccttgatccatccgagccaagaacccccgtgggatctaggaaggcaagtcgcaacattttcttggaggatgatctcgcctggcagagtttgatccatcccgatagctcaaataccccactgtccacacgcctggtctccgttcaagaggacgcgggaaagagccctgctaggaaccggtctgccagcatcaccaacttaagcttagatcgttccggctctccaatggtgccctcttatgagaccagcgtctcccctcaggcaaacagaacctacgttagaaccgaaacaaccgaggacgagaggaagatcttattagactccgtccagctcaaggacctgtggaaaaaaatctgccaccattctagcggaatggagtttcaggatcatcgatactggctgcgaacgcacccaaattgcatcgtagggaaggagctggtcaactggctgattcggaacggccacatcgccactagagcccaggctatcgctattggacaggcaatggtcgatggccgttggctggactgtgtgagccatcacgatcaactgttccgagacgagtacgctctctaccggcctctgcagtcgaccgagtttagtgaaaccccttcacccgatagcgacagcgtgaattcagtcgaggggcacagtgagccctcttggtttaaggatatcaagttcgacgattctgacactgagcagatcgccgaggagggcgatgataatctggcaaattctgcttctccctcgaagagaacatctgtctccagttttcagtcgacagtggactcagacagtgccgcctccatctccctgaatgtggagctggataacgttaactttcatatcaagaagccaagcaagtatcctcacgtacctcctcacccagctgatcagaaggaatatcttatcagcgatacggggggtcagcagctcagcatttctgacgcttttattaaggagagcctctttaaccgcagagtggaggagaagagtaaagaactaccctttactcctctgggttggcaccataacaacctggaacttctgagggaagagaacggcgagaagcaggcaatggagagattactgtcggccaatcacaatcacatgatggctctgttacaacaactactgcactctgactctttgagctctagctggcgagatattatagtgtcactggtctgtcaggtggtccaaactgtgagacccgacgtgaaaaaccaggacgatgatatggacatccgacagtttgtgcacattaagaagatccctggcggtaagaagttcgactctgtagtggtgaatggattcgtgtgtactaagaacatagcccataaaaaaatgtcttcctgtatcaagaatccgaaaattctactcctgaaatgttctatcgagtacctttaccgggaggagaccaagttcacttgtattgaccctatagtgctgcaagagagagagttcttgaagaactatgtgcagagaatcgtggacgtgagaccaactctagtgctggtggaaaagacagtttcccgtatcgcgcaggatatgctgctggaacatggcataaccctggtgattaatgtgaaatcccaggtgttggagagaattagccgcatgacacagggtgacctggtgatgagtatggaccaactcctgaccaagccccaccttgggacatgccataagttctatatgcagatcttccagttgcccaatgaacaaaccaagacactgatgttcttcgagggatgccctcaacatttaggttgtactattaaactaaggggcggatctgactacgagctggctcgggtgaaagagatcctgatttttatgatttgcgtggcttatcactctcagctcgagatatctttcctaatggatgagttcgccatgccgccaacccttatgcagaacccgtcgtttcatagtctgatagagggtcgggggcatgaaggggccgtccaggagcaatacggaggcggctccatcccttgggaccctgatatccctccagaatccctaccgtgcgatgacagtagccttctggaactccgtattgtgtttgagaagggcgaacaggaaaataagaacctcccgcaggccgtggcatcagtaaaacaccaggagcatagtaccactgcctgccccgctgggctgccctgcgccttttttgcaccagtgcccgagtccctcctgccactgcccgtggatgatcagcaggatgccctgggatccgagcaacccgaaacactgcaacaaacagtcgtgttgcaggaccctaaatcccaaatccgagccttccgggatcccctgcaggatgatacgggattgtatgtcaccgaggaggtgacctcaagcgaggacaaacgaaagacctattccctggctttcaaacaagagctcaaggacgtaatactctgcatatcgccagtaattacattccgggagcccttcctgctcactgagaagggcatgagatgtagtacaagagattatttcgccgaacaagtctattggagcccactgctgaacaaagagttcaaggagatggagaacaggaggaagaagcaacttctccgcgatctgtccgggctacaggggatgaacggcagcatccaggctaagtccatccaggtgcttccttcccacgaacttgtgtccacaagaattgcagaacatctgggggattcgcagtcgctcggacgcatgctagcagattaccgggcaagaggtggccggattcagcctaagaatagcgacccatttgcccacagtaaggatgcttccagtacttccagcggccagagtggatccaagaacgaaggcgatgaagagcgtgggttaatcttaagcgatgctgtgtggtctacaaaggttgactgccttaaccctatcaaccaccagagattgtgcgtcctgttcagcagttctagtgcccagtcgtcaaacgcccccagcgcctgcgtgtccccatggatagtgaccatggagttttacggaaaaaatgatctcaccttaggaatttttcttgagcggtactgtttcaggcccagctatcagtgtccaagcatgttttgtgatactcccatggtgcatcacataaggcgattcgtgcacggacagggctgtgttcaaataatactcaaggaactcgactcccccgtgcctggctaccagcacacaatcctgacctattcctggtgtcggatctgtaaacaggtgacaccagtggtcgccctgtctaacgaaagttggagcatgtcgtttgccaaatatctcgagcttcgcttctatggacaccagtacacacgcagagctaacgctgagccctgtggtcattctatccaccacgattaccaccagtatttctcctataaccagatggtagcaagcttctcctatagcccaattcgactgcttgaagtgtgtgtgcctctcccaaagatatttatcaagagacaggcacctctaaaggtctccctgctgcaggatctcaaagattttttccagaaggtgtcacaggtgtatgtggcaatagacgagcgcctcgcgagcctgaaaaccgacacattttctaagacacgcgaagagaagatggaagacatcttcgcacagaaggaaatggaggaaggcgagttcaagaattggatcgaaaaaatgcaggccagactgatgagctccagcgtagatactcctcagcagctgcagtccgtgtttgagagcctcatcgcgaagaagcagagcctgtgtgaggtgttgcaggcatggaacaataggctacaagatttgttccagcaggagaagggccgcaagcgcccaagcgtgccgccatcccccggtaggctgagacaaggagaagaaagcaaaatatctgccatggatgcatccccacgaaacataagcccgggcctgcagaatggcgaaaaagaggaccggtttcttaccaccctgtcaagccaatcctccacctcaagcactcacctacagctgccaacaccccctgaggtgatgagcgagcagtcagtgggggggcccccggagctagatacagcaagtagctccgaggacgtgtttgatgggcatctgctgggtagcacagattcccaggtcaaggagaaaagtacgatgaaggctatattcgctaatctgctgccaggcaactcttataatccaattccctttccttttgatccagacaaacactatttaatgtatgaacacgagagagtgccgatcgcggtgtgcgaaaaggagcctagtagcatcatcgcatttgccctcagttgcaaggaataccggaacgccttagaagagcttagcaaggcgacacagtggaattctgcagaggagggtctgcccactaactccacgtctgactccagaccaaaatcaagttccccaattcggctcccagagatgagcggtggtcagaccaatcgaaccacagagactgagcctcagcctacaaaaaaggcctccggtatgctgtctttctttagaggtactgccggaaaaagtccagacttgtccagccagaaacgagagactcttagaggagccgatagcgcatactaccaggtgggacaaacaggaaaagagggaacagaaaatcagggagtagagcctcaggatgaggtcgatggaggcgacactcagaaaaagcagcttatcaatccccacgtggaacttcagttctcagacgctaacgcaaaattttattgcagactgtattacgcaggagagttccataagatgagggaggtcatactggatagttcggaggaggacttcataagatccttgagccattcgtccccttggcaagcccgaggcggaaagtccggagcagctttctacgcaacggaggacgaccgattcatcctgaagcaaatgccccgactcgaggttcagtcctttcttgacttcgctccccactactttaattacataacaaatgccgtccagcagaaacgaccgacagctctagcgaaaatcctaggagtgtacaggatcggctataagaattctcagaataacactgaaaagaagcttgatcttctggtgatggagaatctcttctacgggagaaaaatggctcaagtgtttgacctcaagggatctctgcgcaataggaatgtgaagacggacacagggaaggagtcatgtgacgtcgtgctcctagacgaaaacctcctaaaaatggtacgagataatcccttgtacatccgatcccattctaaagctgtcctacgtacttctatacactccgacagccactttctttcctctcacctaattatcgactactcactgctggtcgggagggatgacacttccaatgagttagtcgtcggaataatagactacattagaacttttacctgggataagaaattagaaatggtcgtgaagtctacaggcatcttaggcggccagggcaaaatgccaacagtggtatcccccgaactatatagaacccgcttctgcgaggcaatggacaaatacttcctgatggtgcctgaccattggactggcctcggtctaaactgttag

SEQ ID NO: 128657 - DNA, 3051 bp, synthetic construct
  misc_feature 1..3051: note = Description of Artificial Sequence: Synthetic coding sequence
  source 1..3051: mol_type = other DNA
atggaatttcaggaccacaggtactggctaaggacccaccctaattgcattgtcgggaaagagctggtaaattggttgatacggaatggacacattgccaccagagcccaggcgatcgccattgggcaggctatggtggatggacgatggctggactgcgtttcccaccacgaccagttattcagagatgagtacgctctgtacagaccattgcaaagcaccgagttcagcgaaactccatctcctgattcagactccgtgaactctgtcgagggtcattcagaaccctcgtggttcaaggatattaagttcgatgacagtgataccgaacagatcgctgaagagggcgatgataacttggcaaaatacctaatctccgacactggcggccagcagctgtctataagtgatgcatttattaaagaaagcctttttaataggagggtggaggaaaaatcaaaggaactacccttcaccccacttggttggcatcataacaacctcgaactgctcagagaggaaaatggcgaaaagcaggcaatggagcggttgctcagtgccaaccacaatcacatgatggctttgctccagcagctgttgcatagtgattctttgagcagctcatggagagatattatcgttagcttagtatgccaggtcgtacagacagttcggccagacgtaaaaaaccaggatgacgatatggatatccgacagttcgtccacataaaaaagattcccggaggaaagaaattcgactcggttgtggtgaacggatttgtatgtacaaaaaacattgcccacaagaagatgtcctcctgcatcaaaaatcccaaaatactgctgcttaaatgtagtatcgaatatttgtacagagaagaaactaaattcacctgcattgacccaatcgttctgcaagagcgcgaatttctgaagaattacgtgcagcgaatcgtggatgtgcgccccacactggtgctcgtagagaagactgtaagcaggattgcgcaggacatgctgctagagcacggcataaccttggttataaatgtcaaatcgcaggtcctcgagcgcatttcccgaatgacccagggagacctggtaatgagcatggatcagctgctgactaaaccgcacttgggtacatgccataaattttacatgcagattttccaacttccaaatgagcagacaaaaactctcatgttctttgagggttgtccacagcacttgggatgcactatcaagttgagggggggttccgactatgaactcgcacgagtgaaggaaatccttatctttatgatctgcgtcgcctaccactcccagctcgagatttcgttcctaatggacgaatttgctatgccacccacccttatgcaaaacccttccttccattctctgattgaaggtagagggcatgagggggcagtgcaggaacagtacggcggcggatctataccatgggaccctgatattcctcccgaaagcctaccctgtgatgatagtagtcttttagagctgcggatcgtgtttgagaagggggagcaggagaataagaatctgccgcaggccgtggcctctgtgaagcaccaggaacacagcaccacagcttgccccgctggcctgccttgtgcatttttcgcacccgtgccagagtctctgttgccgctacctgttgatgatcagcaggatgccctgggttcagagcagccagagaccctccagcagaccgtagtgctgcaagaccctaagtctcaaatccgggcatttagagaccccttgcaggatgataccggcttatacgtaaccgaggaggtaacatcttccgaggataaacgaaagacatatagcctcgcgttcaagcaggagctgaaagacgtaattctgtgtatcagccccgtgatcactttccgagagccattcttgttaaccgagaagggaatgaggtgctctaccagggactacttcgctgaacaggtatattggagtcctctcctaaataaagaattcaaggaaatggagaacaggagaaagaagcaactgctccgggatctaagtgggttacaaggaatgaatgggtctattcaggctaagagtatccaggtgttacccagtcacgagcttgttagtactcggattgcagaacaccttggggactcccagtcactgggcagaatgctggcagactatcgggctcgaggcggaagaatacagcccaagaactccgacccctttgctcacagcaaggacgccagcagcactagctcaggccagtctggcagtaagaacgagggagacgaggagagagggcttatcctgagcgatgcagtgtggagcaccaaggttgactgtctgaacccgatcaaccaccagcggctctgtgtgctcttttcctcttcatccgctcagtcatcaaatgccccctctgcctgcgtgagcccgtggattgtcacgatggagttctatggaaagaacgacctcacactggggatctttcttgagagatactgttttcgccccagctaccagtgcccctcgatgttctgtgatacacccatggttcatcacattcggaggtttgtgcatggccagggatgcgttcagatcatcctcaaggagttggacagccctgtgccgggctatcagcacacaatattaacatatagctggtgccggatttgcaagcaggtgacgcctgtggttgcactgagtaatgagtcgtggtcgatgtccttcgcaaagtatctggagctccgcttctacggtcatcagtacacccggcgggctaacgctgaaccctgcggacactccatccatcacgactatcaccagtacttttcctacaaccagatggtggcctcattctcttactccccaatcagactgcttgaggtttgcgttcccctgcccaagatatttattaagaggcaggcaccactcaaggtgtctctgctgcaggatctgaaggacttcttccaaaaggtgtctcaagtgtatgtagctattgatgaacgactggcttcactcaagaccgacacgtttagctag

SEQ ID NO: 128658 - DNA, 522 bp, synthetic construct
  misc_feature 1..522: note = Description of Artificial Sequence: Synthetic coding sequence
  source 1..522: mol_type = other DNA
atgcgaccctggtcttctccagcccagctcgtagccggagctcaacccgccgggcggggcgacccacttggtccccgacccatccctccacccagattccgaagggcctcgagccagcgtgagccaccgtaccccagaccagctgagcccgcactggaactggctgggagcaaatgccaaccggacacccctgccgcttcactctgtcctgctgattcgccgtctcaacatcgggtcatgcctcctggtcctgcctcctgggccaatgtgggcagccggccccacaccgttgcaaatggtcatgaattgtttgaagtgtccgaggaacgcgatgaggaggtggcagcattctgtcacatgttagacatcctccgctcgggatcagatattcaggactattttctgactggctacgtgtggtcggcagtgacgcctagtccggaacacttaggcgatgaggtgaaccttaaggtgaccgtgctttgcgatagactgcaggaggcgttgaccttcacctgctag

SEQ ID NO: 128659 - DNA, 4905 bp, synthetic construct
  misc_feature 1..4905: note = Description of Artificial Sequence: Synthetic coding sequence
  source 1..4905: mol_type = other DNA
atgagctctacccagggcaacggcgaacactggaagtcgctggaatcggtcggcatctctcgaaaagagcttgcgatggcagaagcattgcagatggagtatgatgcgctgagtcgactgcgccacgacaaggaggagaatagggccaagcagaacgctgacccttcccttatttcatgggacgaaccaggagtggacttctattcgaaaccggccggaagaaggaccgacctcaagcttttaagaggccttagcggcagtgacccaaccctcaactataactctctgtctccccaggagggtccacccaatcactccactagccagggcccccaaccaggaagtgacccctggcctaaaggatcgctgtcaggcgactacctgtacatcttcgacggctcggacggaggagtttcatcttccccaggtccgggcgatattgagggttcctgcaagaaactgtctcccccgcctctacccccccgcgccagtatctgggatacaccccctctgccccctcggaagggcagtccgtcgagttccaagattagtcaaccatcagacatcaataccttcagcctggtggagcaactgcctggcaaactcttagaacatcgcattcttgaggaagaggaggtcttggggggtggaggtcaggggcgcctgctgggcagtgtcgactacgacggcattaatgatgcaatcactaggttgaacttgaaatccacttacgacgccgagatgctcagagacgccaccaggggatggaaagaggggaggggacccttggacttttcaaaagacactagtggaaagcctgtggccaggtctaagacaatgcccccccaggtccctcctaggacatatgcctctaggtacgggaatcgtaagaacgctacacctggaaagaaccgaagaattagcgccgccccagtcggatcccgacctcacacagtagccaatggtcatgaattgttcgaggtaagcgaagagcgggacgaggaggtggccgctttctgccatatgctagatattctgcggtccggtagtgatattcaggactactttctgactggctacgtgtggtcagcggtcacccctagtccggagcatttgggggacgaagtgaacctaaaagtgaccgtgttgtgcgatcgcctgcaggaggcactcacattcacctgtaattgttccagcacagtcgacctcctcatttatcagaccctttgttacacccatgatgacctccgaaatgtggacgtgggcgactttgtactgaagccttgtggattggaagagtttcttcagaataaacacgccctcgggtcacacgagtatatccagtactgccggaaattcgatatcgatatccgcctccagttaatggagcagaaggtggtgcggtcagatctcgcccggaccgtcaacgacgaccaatcaccctctacattaaactacctggtccatcttcaggaacggccagtcaagcagacaatcagtcgccaggctctgtccctcctgtttgacacataccataatgaggtggatgctttcctgttggcagatggcgattttcctttgaaggctgaccgcgttgttcaaagcgtcaaagccatctgtaatgcgcttgccgctgtcgaaacccctgagatcacatccgccctaaaccaactgcccccatgcccaagccgaatgcagcctaagatccagaaggacccatccgttcttgctgtaagggagaaccgtgaaaaggtggtggaggctctgactgctgccatcctcgatctggtggaactgtactgcaacacctttaacgcggactttcagactgcggttcccgggtccagaaaacatgacctggtacaagaggcgtgtcatttcgcaaggagcttggctttcacggtttatgcaacacatagaatccctattatctgggccacatcttacgaggatttttacctgtcctgttccctgtcccatggagggaaggagctctgcagcccactccagactcggagagcccatttcagtaagtacctcttccatctgattgtctgggaccagcagatttgtttcccagtccaggtcaatcgcttaccgagggagactctcctgtgtgctacactttatgcattgcctatcccgccaccggggtccagctccgaggccaataaacagcgacgggtccctgaggctctcggctgggttaccaccccccttttcaactttcggcaagttctgacgtgtgggcgcaaactcctgggcctgtggcccgccacacaagaaaacccttctgctagatggtctgctccaaacttccaccagcccgactcggttattctgcagatcgacttccccacctctgcattcgacattaagtttaccagtccacccggcgacaaattctctcctcgctacgagtttggctcactgagggaagaagatcagagaaagctgaaagatataatgcagaaggaaagtctttactggctgacggatgccgacaagaagaggctctgggaaaaaaggtactactgtcactctgaggtatcatcattgcccttggtgctggcatccgcaccctcttgggagtgggcctgccttccggacatctatgtgctactaaagcagtggacccacatgaatcaccaagatgcccttggactcctccacgccacctttcctgaccaggaagttaggcgaatggctgtccagtggattggaagtctgtccgatgcggagctgctcgactacctgcctcagctggtccaggccctcaaatatgaatgttacttggactccccacttgttagatttctcctgaaacgtgctgtcagcgatttgcgggtgacacactatttcttctggcttttaaaggacggcctcaaagatagtcagttcagtattaggtatcagtatctgttagccgccctcctttgctgctgtggaaagggccttcgcgaggaatttaatcgccaatgttggctggtcaacgccctggcgaaattagcacagcaggtccgcgaggccgctccctctgccaggcagggtattctgcgcacagggctcgaagaagtgaagcagttttttgcactgaatggctcctgccgcttgccgctgtctcccagtcttctggtgaaggggatagtacccagggattgtagttactttaactccaacgcggtcccgctgaagctgagttttcaaaatgtggacccacttggggagaacattagagttatttttaaatgtggcgacgatttgcgtcaggacatgctgaccctgcagatgatcagaatcatgtcaaaaatctgggtgcaggaaggacttgatatgagaatggtgatattccggtgcttctccaccggccgaggccggggtatggttgagatgatcccaaacgcggagaccttaaggaaaatccaggtagaacacggagttaccggcagttttaaggatcggcctctggccgattggttgcagaaacacaatcccggagaggacgagtacgagaaggccgtggaaaatttcatttattcttgtgcagggtgctgcgtggccacctatgtcttaggaatttgtgacaggcataatgacaatatcatgctcaaaacgacaggacatatgttccatatcgacttcggtagattcctgggacacgctcaaatgtttggtaatattaagagggaccgggccccgttcgtgttcacatctgacatggcttacgtaatcaacggtggcgacaagccctcctcacgcttccacgactttgtcgacttgtgttgtcaggcatataacctgatccggaagcatactcacctctttcttaacctgctagggttaatgctgagctgcgggatcccagaactaagcgacctcgaggaccttaagtacgtatacgacgccctcagaccccaggataccgaagcaaacgccaccacttacttcactcggttaatcgaaagcagcctgggaagtgtcgcaacgaaactcaatttttttattcacaatctcgcccaaatgaaattcacaggttctgatgaccggcttacactctccttcgctagccgcacgcacacgttaaagtcaagcggcagaatctctgacgtgttcctctgcagacatgaaaaaatattccatccaaataagggttacatatacgtggtcaaggtcatgcgggagaatactcacgaggcaacctatatccagcggaccttcgaggaattccaagagctccacaacaagctcagactgctgttccccagcagccaccttccatccttccctagccgatttgtgattggaaggtccaggggagaggcggttgcagaacgcaggcgagaggagcttaacgggtacatttggcacctcatccatgcccctcctgaggttgccgaatgcgatctggtttacacttttttccatccccttcccagggatgaaaaagcaatggggacctctccggcccctaagagttctgatggaacatgggctcgacccgtcggaaaggtaggtggcgaagtgaaactgtctattagctacaaaaacaataaattatttatcatggtgatgcacatccgcggacttcaactactgcaggacggcaacgacccagacccttatgtgaaaatatacctgctgcccgacccccaaaaaaccacaaagcgcaaaacaaaagtagcccgcaagacctgtaaccccacttataacgaaatgctggtctacgatggaattcctaagggagacctgcagcagcgtgagctccaacttagtgtgttatctgagcaagggttttgggaaaatgtactcctaggcgaggtgaatataaggctcagggaacttgacctggcccaagagaaaacggggtggtttgccctgggaagtagaagccacggcacgctgtag

SEQ ID NO: 128660 - DNA, 360 bp, synthetic construct
  misc_feature 1..360: note = Description of Artificial Sequence: Synthetic coding sequence
  source 1..360: mol_type = other DNA
atgttcggaaacattaagagggacagggccccgtttgtgttcacttcggacatggcatatgtcattaacggaggggataaaccatccagcaggttccatgactttgtcgacctttgttgtcaggcctataatctgatacgcaaacacacacacttgttcctgaacctgctaggattgatgttgagctgtggtattcctgagttgtctgatctagaagacttaaaatacgtgtacgacgccctcagaccacaggacacagaggccaacgcgaccacctactttacccgagtgatattggcctctgtagtcggcgggcgtgaatccaagacgtgttcagctgtgagtagctctggagactag

SEQ ID NO: 128661 - DNA, 396 bp, synthetic construct
  misc_feature 1..396: note = Description of Artificial Sequence: Synthetic coding sequence
  source 1..396: mol_type = other DNA
atgtctagtactcaggggaacggtgagcattggaaatctcttgagtccgtaggaatcagcagaaaagaacttgcaatggccgaggccctgcagatggaatacgacgctctgagccgcttacggcatgataaagaagagaaccgggccaagcaaaacgctgatccctcactgatcagctgggacgaaccaggcgtcgacttctattcaaagcccgcaggcagaaggacagacctgaaactgctgcggggcctctctggatcggaccctaccctgaattataattccctgagcccacaggagggccctcctaatcacagcactagtcaaggaccccagccagggtccgacccatggccaaagggatccctgagtggtgattacctgtatatattttag

SEQ ID NO: 128662 - DNA, 4821 bp, synthetic construct
  misc_feature 1..4821: note = Description of Artificial Sequence: Synthetic coding sequence
  source 1..4821: mol_type = other DNA
atgagctctacccaggggaacggggaacactggaagtccctggagtccgttgggatctctcgcaaagaactggcaatggctgaggccctgcagatggaatatgatgccttgagtcgactgaggcacgataaggaagagaaccgagctaaacagaacgcggacccatcactcatttcttgggacgaaccaggagttgacttctactcaaagccagccggtcgcaggactgaccttaagctgcttcggggtttgtctggtagcgatcctaccctgaattacaattccctctctccgcaggaggggccacctaatcatagcacctcccagggtcctcagcccggatctgatccatggcctaaagggagcctcagcggtgattatctgtatatctttgacggcagtgacggcggcgtgtcatcatcacccggccccggggacattgaaggcagttgtaaaaaactttcgccacctccccttccaccccgtgcttctatctgggacacacccccgctgccccctcggaaggggagcccatcttcatcaaagataagccagcccagcgatatcaacactttttctctggttgagcagcttccaggcaagctgcttgagcatagaatcctggaagaagaggaagtgctggggggaggcggtcaggggaggctgctcgggtccgtggattacgatggtataaacgacgccattaccagactgaacttgaagagcacctatgatgccgagatgctgagagatgcaactcgggggtggaaggaggggagggggcctctcgacttctcgaaagacacatccggaaagcccgtggcccggagcaaaaccatgcctccacaggtccctcctagaacctatgctagcaggtatggtaaccgcaagaatgccacacctgggaaaaatcgcaggatttccgccgcccctgtgggatcacggcctcacaccgtcgccaatggccacgagctgttcgaagtgagcgaggagcgagatgaggaagtcgctgcattttgccacatgctcgacatcctgcgaagtggaagcgatatccaagattacttcttgactgggtatgtgtggagcgccgtgacaccatctccagagcatctcggcgatgaggtgaacctgaaggtgaccgtgctgtgcgacaggctgcaggaggcattgacctttacatgtaactgctcctctacagtggacctgttaatctaccagaccctgtgttatacccacgatgatcttcgtaacgtggatgtgggcgacttcgtgctgaagccctgcggccttgaagagtttctgcagaacaaacacgctcttgggagccacgaatacatccagtactgtcgcaaatttgatatcgacatccgcttacagctcatggagcagaaagtcgtgcgatcggacctggcccgcacggtcaatgatgatcagtcaccttccacgctgaactacctcgttcacctacaagagcgccctgtgaagcaaaccatcagccgtcaggccttgagcctgctgttcgacacttaccataacgaggttgacgccttcctgctggccgacggagatttccccctgaaggccgacagagttgtacagagtgtcaaagctatatgcaacgcacttgcagccgtagaaacgcctgaaattacctctgcattgaaccagcttccaccatgcccttcccgaatgcagcctaagatccagaaggatccatccgtgctagccgtgagggaaaacagggagaaggtggtggaagcattaacagcagctatcttggatctcgtcgagctgtattgtaacacattcaacgccgacttccagactgctgttcccggctcaaggaagcacgatctggtacaagaagcctgccattttgcaagatcgttggccttcaccgtctatgctacacatcgaatcccgattatctgggcgacaagctatgaggatttttacctaagttgctccctcagccacggcggcaaggaattatgctcacctctgcagacccgtcgcgcacatttcagtaagtacctgtttcacttaattgtctgggaccagcagatatgttttcctgtgcaggtgaaccgccttccgagggaaaccctgctctgcgccactctctatgcgcttcccattcctccgcccggcagttcgtctgaagctaacaagcaacgtcgggtgcctgaggctctgggatgggtcacgacgccgttatttaactttcgccaggtgttgacatgcggccgcaagctgctgggactgtggcccgccactcaagagaatccttccgcccgctggtctgctccgaacttccaccaaccagacagtgtcatccttcagatcgattttcccacctcagcttttgacatcaagttcacttcacctcccggcgacaagttcagtccgaggtatgagtttggatccctccgtgaggaggatcaaagaaagctcaaagacatcatgcagaaggaaagcctgtactggctgacagacgctgataagaagagattgtgggagaaaagatattactgccactcagagtggacccacatgaaccaccaggacgctctgggattattgcatgctacctttcctgatcaggaggtaaggcggatggcggtgcagtggataggctcactttctgatgcagagctcttagattatcttcctcaactggtgcaagccctgaagtatgaatgttatctggattctccactcgtgaggttcctgctcaagagggcagtcagcgatctcagggtgacccactattttttctggttacttaaagatggtcttaaagatagccagttttccatacgctaccagtaccttctggcggcccttctatgttgctgtggcaagggcctgagggaagaattcaataggcagtgctggcttgtgaacgcactcgcgaagctcgctcagcaggtaagagaggccgccccctctgccagacaggggattcttagaactggactagaggaggtcaaacaattcttcgctctcaatggctcctgccggttaccactgtctccctcattgctggtgaagggaatagttccacgcgattgcagttacttcaactccaacgccgtgcctctcaagctgtcattccagaatgtcgacccacttggcgagaacatacgcgtcatcttcaaatgcggtgatgacctccggcaggacatgctgactctccaaatgatccgaattatgtctaaaatctgggtccaggaaggactagacatgaggatggtgatcttccggtgcttcagtactggacgcgggagaggaatggttgagatgattcctaatgcagagacattgaggaagattcaggttgagcacggcgtcaccggctcatttaaagaccggcccctcgcagactggctgcagaagcataatcccggcgaagatgaatatgagaaagccgttgaaaatttcatctatagttgtgccggatgctgcgtagcgacctacgtgctcggaatttgtgacaggcataacgataacattatgcttaagacaacaggccacatgtttcacattgacttcggcaggttcctggggcatgcccagatgttcggaaacattaaacgagatcgggcaccctttgtattcacaagcgacatggcctacgttatcaacgggggagacaaaccatccagcagatttcacgacttcgtggacctgtgttgccaggcgtacaatctgatccgcaaacacacccatctgttcctgaacctgctaggcctcatgctgtcctgcgggattcctgagctctccgacttggaagacctgaagtatgtttacgatgccttaaggcctcaagacactgaggctaacgccacaacctactttacaaggctcattgagtcgtcacttggttccgtcgctacgaagctgaattttttcatccacaatctggcccagatgaaatttacaggatcagacgatcggctgactttgagcttcgcttctcgcacccatacactcaagtctagcggacgcatttcagacgtttttctgtgtcgtcacgagaagatattccacccgaataaaggctatatctatgtcgtcaaagtgatgcgggaaaatactcatgaagccacgtacattcagcgcacattcgaagagttccaggaactgcataacaagttgcgcttgttatttccatcttctcacctaccgagcttcccgagccgcttcgtgatcggccgcagcagaggcgaagcagtggcagagcgtcgccgcgaggaactgaacggatacatctggcacctcattcatgcaccacctgaagttgccgaatgcgatttggtctacaccttcttccaccctctccctcgagacgaaaaggctatggggactagccccgcccccaagagttctgacgggacctgggccagaccagttgggaaggtggggggcgaggtgaaactgagcatctcctacaagaataacaagcttttcattatggttatgcacatccgtgggctgcagctgctccaagacgggaatgatcccgacccatacgtgaagatttatctcctgcctgacccacagaaaacaacgaagcggaaaacgaaggtcgcacggaaaacctgtaaccctacttataatgaaatgctggtctatgacggtatcccaaaaggtgacctacaacagcgcgaattacagttgagcgtcctttccgaacaggggttctgggaaaacgtgcttctcggcgaggtgaacatccggctgcgcgaactggatcttgcccaagagaagaccggttggttcgcccttggtagccgctcccacggtactctttag

SEQ ID NO: 128663 - DNA, 183 bp, synthetic construct
  misc_feature 1..183: note = Description of Artificial Sequence: Synthetic coding sequence
  source 1..183: mol_type = other DNA
atgtcaagcacccagggcaatggagagcactggaaaagtctcgagtccgtgggcatctcacgcaaggagctggccatggctgaggccctacagatggaatacgacgccctgtcgcggctgaggcacgacaaggaagaaaacagagctaaacaaaacgccgaccccagcctgataagttggtag

SEQ ID NO: 128664 - DNA, 522 bp, synthetic construct
  misc_feature 1..522: note = Description of Artificial Sequence: Synthetic coding sequence
  source 1..522: mol_type = other DNA
atgaggccatggagctcaccagcgcagctagtggccggcgcccaacccgcaggacggggagacccactgggacctcgacccatacctcccccccgcttcaggcgtgcttccagtcagcgagaacctccttacccacgacctgccgaaccagccctggagttggccggatcaaaatgtcaacccgacacccccgccgcctcactatgccctgccgatagcccgagtcagcatagagtgatgccacccgggcctgcgtcctgggccaacgtgggttcccgaccacatacagtggccaatggacacgagctgtttgaagtcagtgaagagcgggatgaagaagtagctgcattttgtcacatgttggatattctgcgcagtgggagcgacatccaggactactttctgacaggttacgtctggtccgcggtaacaccctctcctgagcatctgggagatgaggtcaatctgaaggtgaccgtgctctgcgaccggcttcaagaggcccttacgttcacatgctag

SEQ ID NO: 128665 - DNA, 4338 bp, synthetic construct
  misc_feature 1..4338: note = Description of Artificial Sequence: Synthetic coding sequence
  source 1..4338: mol_type = other DNA
atggcttattcttggcagacagaccctaaccccaatgagagccacgaaaaacagtacgagcatcaagaatttcttttcgttaatcagccacactcttcatcacaggtctcactcgggtttgaccaaatcgtggacgaaataagcggtaaaattccccactacgagtccgaaattgatgagaatacctttttcgtgcctacggcacctaaatgggacagcaccggacatagtctgaacgaagcccaccagatcagtcttaatgaattcactagtaagagccgggagctctcttggcatcaagtctcaaaggcccctgctatcgggttctccccctctgtgctgcccaagccgcaaaatacaaataaggagtgcagctggggctctcccattggcaagcatcatggtgccgatgattctagatttagtatccttgcgccttcatttacatcactggataagatcaacctggagaaggagcttgagaacgagaatcacaactaccatataggctttgaatcctcgatccctccaacaaacagcagtttcagctccgactttatgcccaaggaggagaacaagcgatcaggccatgtaaacattgttgaaccttccttgatgctgctgaaaggctctctgcagcccgggatgtgggaatcaacctggcagaagaatattgaatctatcggttgttctatccagctggtcgaggtgccacagtcctccaacacttctctggccagcttctgcaataaggtcaagaagatcagggagagatatcacgccgcagacgtgaatttcaactctggaaagatctggtccaccactactgccttcccttatcagctcttttccaagactaagttcaatatacatatttttatcgacaattcgacccaacctctgcatttcatgccatgcgctaattaccttgtcaaagatttgattgcagagatcctccacttctgtaccaatgaccagctcctgcccaaagaccacatcctatcagtttgtgggagcgaagagttcttgcaaaacgaccattgtctgggttcccacaaaatgtttcaaaaagataagagcgtgattcaactacatttgcagaagtcccgggaggcccctggtaagctgagcagaaagcatgaggaggatcattctcagttctacttaaaccagttactggaatttatgcacatctggaaggttagcaggcagtgcctactgaccctgatacggaagtatgattttcacctgaagtacctcttaaaaacccaagaaaacgtttacaacattatcgaagaagttaagaaaatttgttcagttttggggtgtgtggagaccaaacaaattacggacgccgtgaatgaactgagtttgattttgcagagaaaaggcgagaatttctatcagtcctcagagactagtgccaaaggacttatcgagaaggtgacaactgagcttagtactagcatttaccagctcatcaacgtatattgcaacagcttttacgccgacttccagcctgtgaacgttccacggtgtacttcctatctgaaccccggccttccgtctcatctgtcgtttacggtttacgcagcacacaacatccctgaaacttgggtgcaccgaatcaactttccccttgaaatcaagtctctgcctcgggagagcatgcttaccgtgaagttatttggcatagcctgcgctacaaataacgccaatctgcttgcttggacttgccttccactctttcctaaggaaaagagcatcctgggaagtatgctcttttccatgacattgcaatctgaacctcccgttgaaatgatcacacccggcgtgtgggacgtgagccaacccagccctgtcacacttcagatcgattttccagccactggctgggagtatatgaaaccggatagcgaggagaatcggtcaaatctcgaggaacctctgaaggagtgtataaagcacattgcacgtttaagccagaaacagacaccgctcctgctctccgaagagaaaaagcgctacttgtggttttaccgcttttattgcaataatgaaaactgctcacttccactagtgctgggctccgcacctggctgggatgaaagaacagtcagcgaaatgcatacaatcctgcgccggtggacctttagtcaacctctcgaggcccttggtcttttgacgagctcctttcctgatcaggagatccgcaaggtcgccgtgcagcaactcgataacctgctgaacgatgaattacttgagtatttaccacagctggtgcaggccgtaaaattcgagtggaatttggagagccctctagtacaattgctgctccatagaagcctccagagcattcaggtggcccatagactatactggctgcttaagaatgctgagaacgaagcgtattttaagtcctggtaccagaaactgttggcagcccttcaattctgcgccgggaaggccttaaatgatgagttttccaaagaacagaaacttatcaagatcctgggtgacatcggagagcgcgtgaaatccgcctctgatcaccagcgccaggaagtattgaagaaggagatcggccgcttagaagagttttttcaggacgtcaatacctgtcatttgcctttgaatcccgcactctgcataaaaggaatagatcatgatgcctgctcttatttcacctcaaatgcactgccccttaaaatcacctttatcaacgctaatccgatgggcaagaacataagcattattttcaaagccggcgatgacctgcgtcaggacatgctggtccttcagttgatacaagttatggataatatctggttgcaggagggtctggatatgcaaatgatcatctataggtgcctaagtacaggaaaggaccaggggctcgttcagatggtgccagacgcggtcaccctggccaagatacaccgacactcgggactgataggcccattgaaagagaacactatcaagaaatggttttcccagcataaccacctcaaggcagattacgagaaggcgctccggaattttttctactcttgcgcaggatggtgcgtggtaacctttatccttggagtttgtgatcgtcataatgacaatatcatgcttactaaaagcgggcatatgtttcacatcgatttcgggaagtttctgggccatgctcaaacattcggagggatcaagcgtgatagggctcccttcatattcacctccgagatggaatacttcattactgaagggggcaaaaacccgcaacactttcaggatttcgtggaattgtgctgtcgggcctacaatattatccggaagcactcgcagctcctgcttaatctgctggagatgatgctctatgccggcctgccggagctctccgggatccaggacctgaagtatgtttataataatttacggcctcaggacaccgacctcgaagctactagtcattttaccaagaaaataaaggagtcactggagtgttttcctgtgaagctgaataatttgatacacacgttagctcagatgtccgcaatctcccccgcaaagtcaacatcacagacattcccgcaagagagctgtcttctcagtacaacacgcagcattgaacgcgccacaatcctgggatttagtaaaaagagctctaacctgtacttgatccaggtgacccacagcaacaatgagacatcccttactgaaaaatcctttgaacaattctccaagttacattcacagctacagaagcagtttgccagtcttactcttcctgaatttcctcattggtggcacctgccgttcaccaattccgatcacaggaggttcagagacctcaatcactacatggaacagatcctcaatgtatcccatgaagttacgaattctgattgtgttctgagtttcttcctgagtgaggctgtacagcagactgtggaagaatcaagcccagtatacctgggcgagaaattcccagataagaagccaaaagtccagctggtcatttcctacgaagacgtcaagcttacaattcttgtgaaacatatgaagaatatccacctccctgacgggtctgcgccaagcgcccacgtcgagttttaccttctcccatatccttccgaagtgagacggagaaagaccaagtctgtgcccaagtgcacagaccccacatataacgaaatcgttgtgtatgatgaggtcaccgaactgcaaggccacgtcttgatgttgatagtgaaatccaaaacagtttttgtcggagccataaatatccgcttgtgtagcgtcccgctagataaagagaaatggtatccgctggggaactctataatttag

SEQ ID NO: 128666 - DNA, 4338 bp, synthetic construct
  misc_feature 1..4338: note = Description of Artificial Sequence: Synthetic coding sequence
  source 1..4338: mol_type = other DNA
atggcctacagctggcaaactgatccaaatcccaatgaaagccacgagaagcaatatgagcaccaagagttcctattcgtgaatcaaccgcattcatctagccaggtgtccctgggctttgaccagattgtggatgagatttccgggaagataccccactacgagtcagaaattgatgaaaatacattcttcgtgcctaccgcaccaaagtgggacagcacaggacactccctgaatgaagctcaccagattagcctcaacgagttcacctccaagagtagggagttgtcatggcaccaagtcagcaaagcacccgccatcggtttcagcccctcagtgttgcccaaaccacagaacacaaataaagaatgcagttgggggagtcccatcgggaaacaccacggggctgatgactccaggttcagtatcctcgccccctccttcaccagccttgataagatcaacctggaaaaagagcttgagaacgaaaaccataactatcacatcggcttcgagtccagtatccccccaacaaacagttcttttagctccgactttatgccaaaggaggagaataagagaagtggacacgtcaacatagtggagccaagcctcatgctgttaaaggggtcattacagccgggtatgtgggaatctacctggcagaagaacatcgagtctattggctgttccattcagctagtggaagtcccccaaagtagcaacacctcgctggcgtctttctgcaataaggtcaagaagattagggagaggtaccatgccgctgatgtaaactttaactccgggaagatctggagcactaccacagcatttccctatcagctgttctccaaaacaaagtttaacattcatatctttatcgataactctacacagccacttcattttatgccctgcgccaattatctcgttaaagaccttattgccgaaatattacacttttgcacaaacgaccagcttctgcctaaggatcatattctttccgtctgcggaagtgaagagttcctgcagaacgaccattgcctgggctcacataagatgtttcagaaagataaatcagtgatccagctgcatctgcaaaagtctcgtgaagccccaggaaaactgagtcgaaaacacgaggaggaccactctcagttttacctgaaccaacttctcgaatttatgcacatttggaaggtaagtaggcagtgtttgctgacactgatccgaaagtacgatttccatttaaaatatctgctaaagactcaggaaaacgtttacaatatcattgaggaagtgaaaaaaatttgctctgtactaggatgtgtggagacaaagcaaatcacagatgctgtgaatgagctgtccctcatcctccagcggaaaggtgagaatttttatcaatcttcagaaacttccgcgaaaggcctgatcgagaaagtgacaacggaactctcaacaagtatctaccaactcatcaacgtgtactgcaattctttttacgctgactttcagccagttaatgtgccccggtgcacttcctacctcaatcccggcttaccttctcacttgtcctttaccgtgtatgctgctcataacattcccgaaacgtgggtacaccgaatcaattttccactcgagatcaagtccctacctcgcgaatcaatgttgacagtcaaactttttggcattgcctgtgctaccaataatgctaatctgttagcctggacgtgcctgccactgtttcctaaggagaagtccatcctcggttcgatgctattcagcatgaccctgcagagcgaacctcccgtggagatgattacacctggagtctgggatgtatcccagccctccccggtcacccttcagatcgatttccctgccaccggatgggagtatatgaaaccagattccgaagagaatcgttctaacctcgaggagccactcaaggaatgcattaagcacatcgcacgcttgagccagaaacagacccccctcctgctgagcgaggaaaaaaagcgatacctgtggttctacagattttattgtaataatgaaaattgtagcctgcctctggttctgggttccgccccaggttgggatgagcggacagtttccgagatgcacacaatcctgagacggtggacattctcacagcccctcgaggccctgggcctgttaacttctagcttcccagaccaggagatcagaaaggtagcagtgcagcagcttgataatctattgaacgacgagctgctggaataccttccgcagctagtgcaggccgtgaagttcgaatggaacctggagtcgcccctggtgcagctgcttttgcaccgctccctgcagtcaattcaggttgcccaccggctgtattggttgctgaaaaacgcggagaacgaagcctattttaaatcatggtaccagaaattgcttgctgctctgcagttttgtgcaggaaaagcgctcaacgatgagtttagtaaggaacagaaacttatcaaaatcctgggcgatatcggtgaaagagtgaagtccgctagtgatcaccagaggcaggaggtgttgaagaaggagattggacgccttgaagagtttttccaggacgtcaacacctgtcacctccccttaaacccagccctatgcattaagggcatcgaccatgacgcttgctcttacttcaccagcaacgcactccctctaaagattacattcatcaacgccaatccgatggggaagaatatatctattatctttaaagccggcgatgacctccggcaggatatgctggtactgcagctgattcaagttatggacaatatttggctgcaggagggtctcgacatgcagatgataatctatcggtgcctgagcactggaaaggatcagggtctagtgcagatggtccccgacgccgtgactctcgcgaaaattcatcgccacagcggattgattggcccactgaaagaaaataccatcaaaaagtggttcagccagcacaatcacttgaaggccgattacgagaaagctctgaggaattttttctactcatgcgcagggtggtgcgttgtcacattcattctgggggtctgcgatagacacaatgataatataatgctgactaagtcagggcacatgttccatatcgattttgggaagttcctaggacacgctcagacctttgggggcatcaaacgggatagagcccctttcatatttacgtccgagatggagtatttcatcacggaaggagggaaaaatccccagcacttccaggacttcgtggaactctgttgccgagcatacaatatcatacgtaagcatagtcagttgttactaaacctactggagatgatgctgtatgctggcctgccagagttaagcggcattcaggatcttaagtacgtctataacaatctgaggcctcaggacactgatttagaagccacctcccatttcaccaaaaagataaaagaatcccttgaatgtttccccgttaagctgaataatctgatccacactctcgcgcagatgagcgccatctctccagccaagtctacatcccagacatttccgcaggaatcatgcctgctcagtacaactcgttccatcgagcgggcaacaatcctgggcttctcaaaaaagtctagcaatctttacctgatacaggtgacccattcaaacaatgagacgagtctgaccgagaagagcttcgaacagttctccaagcttcactcccagctgcagaagcaattcgcgtcactcacactaccggaatttcctcactggtggcatttaccgtttacgaactcagaccacagacgctttcgggacctgaaccattatatggaacagatccttaacgtgagccacgaagttaccaacagcgattgcgtgctgagttttttcctctcagaagctgttcagcagactgtggaggagtcttctcccgtatatctgggggagaagttccccgataagaaacccaaagtacagctggttatctcttacgaagatgtgaagctgactatcctcgtgaagcacatgaagaatatccatcttcccgatgggagcgccccttccgcccacgtcgaattttatctgttgccatacccgagtgaggtcagacgccggaaaaccaagagcgtgcctaagtgcactgaccctacctacaacgagatagtggtgtacgacgaagtgaccgaactgcagggtcacgtacttatgctgattgtgaagtcgaagaccgtgttcgttggggccatcaacatcaggctgtgtagtgttccactagataaggagaagtggtatccgctaggtaatagtatcatctag

SEQ ID NO: 128667 - DNA, 4461 bp, synthetic construct
  misc_feature 1..4461: note = Description of Artificial Sequence: Synthetic coding sequence
  source 1..4461: mol_type = other DNA
atggcgtacagctggcagactgatcccaatccgaatgagagccacgagaaacagtacgagcaccaggagttcttgttcgtgaatcaaccccactcgtcttcccaagtgtccctggggttcgatcaaatcgtcgatgaaatatcgggaaaaatcccccactacgagtcggagatcgacgagaatacattcttcgtacctaccgcccccaagtgggacagcacagggcattccctgaatgaggcgcatcagatttcccttaatgagttcacatcaaagtccagggagcttagttggcatcaggtcagcaaagccccagcaattggcttcagtccatcggtgttgcctaaaccccagaataccaataaagaatgcagctggggctcaccaattggcaagcaccacggcgcagacgacagtcgcttctcgattctcgccccctcatttacatcactcgacaaaataaacctcgaaaaggaactggaaaacgaaaatcataactaccatatcggttttgaatcgtcaatccctccaacgaactcatcattttcctctgattttatgcctaaggaggaaaataagcgcagtggccatgtcaacattgtggaaccgtcacttatgctgttaaaagggagtcttcagccaggcatgtgggaatccacatggcagaaaaacattgaatcaattgggtgttctatccagctcgtggaggtgccccagtcctctaatacatccctggccagcttttgtaataaagtgaagaaaataagggagcggtatcacgccgctgacgtgaattttaatagcggtaagatttggtctaccaccactgcctttccttatcagctattctcgaagactaagtttaatattcatatctttattgataatagcacccagcccctgcacttcatgccctgtgctaattatctcgtgaaagatctaattgccgagattcttcatttttgcactaatgatcagttgctcccaaaggaccacatcttgagtgtgtgtggatctgaggaattcctgcaaaacgatcactgcctgggatctcataagatgtttcaaaaagacaaaagcgtcattcagctccatcttcagaaatctagagaggctcccggtaaattgtccagaaaacacgaggaagatcattcacagttctatctgaatcagcttctggagtttatgcacatctggaaagtgagcaggcagtgcctccttacgttgattcggaaatacgattttcatttgaaatacctcctgaagacgcaagagaacgtgtataacataatcgaagaggtcaaaaagatttgtagtgtacttggctgcgtggagaccaagcagatcacagacgctgtcaacgaactctcactgattctgcagcgcaagggggaaaacttctaccaatcatcggagacatcagctaagggtctaattgagaaggtgactacagaactgagcacgtctatataccagctcataaatgtttattgtaactccttttatgcagacttccagcctgtgaatgtgccaaggtgcacctcctatttgaatcctggtctgccgagtcacctctcctttacagtgtacgccgctcataatattcctgaaacttgggtccattcatacaaggccttcagttttacgtgttggctaacctacgcggggaagaagctatgtcaggtacgcaactatcgcaatattccggacaagaagctcttcttttttctggtgaattggaacgagacaataaacttcccactcgaaataaagtccctccccagggagtccatgctcactgtgaagctctttggtatcgcctgtgccaccaacaatgcgaacctgctggcctggacctgtttgcccctgttccccaaggagaaatctatcctgggatccatgttattctcaatgacactgcaatccgagccgcccgtggagatgatcaccccaggcgtttgggatgtgtcgcagccctcacctgttactttgcagattgactttcccgctacggggtgggagtacatgaaacctgattccgaagaaaataggtctaacctggaggaacctctaaaggagtgcatcaagcacatagcacgattgagccagaaacaaacacctttactcctttccgaggagaagaagagatacctctggttctaccggttttattgtaataacgagaattgttctcttcccctggtattgggttccgcccccggatgggacgaacgcaccgtgagtgagatgcatacaatcctgagacgctggactttcagccaacccctagaggccctcggtctgttgaccagctccttccctgaccaagagatccgcaaagttgccgtacagcagttggacaacttgttaaatgatgagctgcttgagtacttgccacagctagtgcaggcagttaagttcgagtggaatttggagtcacccttggtccagttactactccacagaagcctacaaagcatccaggttgcccacaggttgtattggcttctcaagaacgctgagaatgaagcatatttcaaaagctggtaccaaaagctgctcgctgctcttcagttctgcgcgggaaaggccctgaatgatgagttttccaaggagcagaagctgatcaagattctcggagacatcggagaaagagtaaaatccgcctccgatcaccaacggcaggaagtgcttaagaaggagatcggaaggctagaagaattcttccaggatgtgaacacatgccatctcccccttaacccagccctttgtatcaagggtatcgaccatgacgcctgctcatacttcacatcaaacgccttgccactcaagatcacatttatcaatgctaaccctatgggaaagaatatcagtatcattttcaaagccggggacgacctcaggcaggatatgctcgtgcttcagctgatacaagtgatggacaatatatggctccaggagggcctggacatgcaaatgatcatctacagatgcctctccaccggaaaggatcaaggactcgtacaaatggttcctgacgctgtgacattagccaaaatccataggcacagtgggttaataggacctttaaaggagaatacaataaaaaagtggttttcgcagcataatcatcttaaagccgattacgagaaggctttaaggaactttttttacagctgtgccggatggtgtgtggttactttcatcctgggcgtttgtgaccggcataacgacaatattatgctgacaaaatcagggcacatgtttcatattgacttcgggaaattcctggggcacgcccaaacatttggaggcattaaacgcgacagggcaccttttatctttacaagtgagatggagtatttcattactgaaggaggcaagaacccccagcatttccaagatttcgtggagctttgttgccgtgcctataatatcattagaaagcattctcagttactactgaatctgctggagatgatgctctacgctggactgccggagttatcaggaatccaggacctcaagtacgtctataataatttaaggccccaggacactgatttggaggctacatcgcacttcaccaagaagatcaaggagtctctagaatgcttccctgttaagctcaacaacttaattcacaccctggcccaaatgagtgcaattagccccgcgaagtccacatcacagacatttcctcaagaaagttgtcttctgtctacaacacggagcatcgagcgggccactatcctgggattcagtaaaaagtcatcaaacctttacctgatacaggtcacccacagcaataatgagacctccctgactgagaagtctttcgagcagttttcgaagctgcactcccagctgcagaaacagtttgcatcactgaccttgccagagttccctcactggtggcatctgcctttcaccaattccgatcaccgaagattcagggatcttaaccattacatggagcagatccttaatgtctctcacgaggttacgaacagcgattgtgtcttatcatttttcctgagcgaagcggtgcaacagaccgtggaggaatctagccccgtttacctcggcgaaaagtttccagataaaaaacctaaggtccagctggtgataagctacgaagatgtgaagttgacaatcctggttaagcatatgaaaaatatccatttgccagacggttccgcccctagcgcccacgtggagttctacctgcttccatacccttccgaggtcagaagaagaaaaacgaaatccgtgcctaaatgtacagacccaacatacaatgaaattgtggtgtatgatgaggttactgaactccagggtcacgttctgatgctcatagtcaaaagtaagactgttttcgttggggccatcaacatccgtttgtgctccgtgcccttggataaggaaaaatggtatccactggggaatagcatcatctag

SEQ ID NO: 128668 - DNA, 414 bp, synthetic construct
  misc_feature 1..414: note = Description of Artificial Sequence: Synthetic coding sequence
  source 1..414: mol_type = other DNA
atgaccatggaaacgctgccgaaggtcctggaggtggatgaaaagagccctgaggctaaggatctgctgccaagtcagaccgcttcttccttatgtatctcctctcgttcagaatccgtctggaccaccactccgaggagtaactgggagatctataggaaaccgatcgttatcatgtccgtgggcggcgcaatcctgctttttggcgtcgtcattacctgccttgcttacaccttgaaactttccgacaagtccctatccatcttgaaaatggtgggccccgggtttctgtccttaggactgatgatgcttgtgtgcggcctggtgtgggtacccataataaagaagaagcagaaacacagacagaaatccaactttctgcgctcacttaagtcattctttctgactaggtag

SEQ ID NO: 128669 - DNA, 414 bp, synthetic construct
  misc_feature 1..414: note = Description of Artificial Sequence: Synthetic coding sequence
  source 1..414: mol_type = other DNA
atgactatggaaacactcccaaaggtcctcgaggttgatgaaaagtccccagaagcgaaagaccttctgccaagtcagaccgctagcagcctgtgtatatcttccagatcggagtccgtgtggaccaccacaccccggtccaactgggagatatatagaaagcccatagtcattatgagtgtgggcggagctattttgctgtttggggtcgtgataacctgcctggcatacacccttaagctgtctgataaaagtctgagcatcctgaaaatggtggggccaggattcctctccctgggcctaatgatgctggtctgtggactggtctgggtgcctatcatcaaaaagaagcagaaacaccgccaaaagtctaactttctgagatctctaaaatctttctttctgacacgttag

SEQ ID NO: 128670 - DNA, 159 bp, synthetic construct
  misc_feature 1..159: note = Description of Artificial Sequence: Synthetic coding sequence
  source 1..159: mol_type = other DNA
atggagaaggtacagtacctgactagatcagccatccgacgggcatcaacaatcgaaatgccccagcaagcgcgacaaaagctccagaatctgttcataaatttttgcctgattctgatttgtctgctcctaatatgtatcatcgtgatgcttctctag

SEQ ID NO: 128671 - DNA, 1371 bp, synthetic construct
  misc_feature 1..1371: note = Description of Artificial Sequence: Synthetic coding sequence
  source 1..1371: mol_type = other DNA
atgccacccggtccctgggagtcctgcttttgggtgggtgggctaatcctgtggttgtccgtgggctcctctggagacgctccaccaacaccgcaacccaaatgtgcagactttcaatctgcaaatttattcgagggaacggatctcaaggtccagtttctgttattcgtgcccagtaaccctagctgcggtcagctggtcgagggaagctccgatctccagaatagcggattcaacgctacacttggtacaaaacttatcatccacggctttcgagttctggggactaaaccttcatggatcgacacttttatcagaacattgctgagagcaacaaatgctaatgtcattgcggtcgactggatttacggctccactggagtttacttcagcgccgtcaagaatgtgataaagctctctttagaaatatcgctctttctgaacaaattgttggtcctgggggtctctgagagcagcatccacatcattggcgtgtccttgggagcacatgtgggaggtatggtaggccagctatttggcggtcagctggggcagattactggcctggaccctgccggccccgaatacacacgggcctccgttgaggagagattagacgccggcgacgcattgttcgtggaagctatacataccgatacagataacctgggaatccggatccccgtcggccacgtggattactttgtgaatggcgggcaggaccagcctggttgccctacatttttctacgctggttattcttacttaatctgcgatcacatgagagccgttcatctctacattagcgccctggagaacagttgccctttgatggccttcccttgtgccagttacaaagccttcctcgcaggccgatgcctggactgcttcaacccttttctgttgtcttgtccgcggatcggtcttgtagaacagggaggagtaaaaatcgaacccctgcccaaggaggtgaaggtgtacctcctaactactagctctgctccttattgcatgcatcatagcttggtggaattccatctcaaggaactgcgcaacaaggatacgaacattgaggttacattcttgagctctaatattacctcctcgagcaaaatcactatcccaaagcagcagagatatggcaagggcattatcgcccatgctaccccacagtgtcagattaaccaggtgaagttcaagtttcagtcttccaatcgtgtttggaaaaaggatcgaacgacaattatcggaaagttctgcaccgccttactcccggtgaacgaccgcgaaaagatggtgtgcttacccgagcccgttaacctgcaagcgtccgtaacagtgagttgtgacctaaagatagcctgcgtctag

SEQ ID NO: 128672 - DNA, 1323 bp, synthetic construct
  misc_feature 1..1323: note = Description of Artificial Sequence: Synthetic coding sequence
  source 1..1323: mol_type = other DNA
atgccaccgggaccttgggaatcttgtttttgggttggggggttgattctctggttgtccgtcggctcatctggcgatgccccccccacccctcaacccaagtgtgccgactttcaaagcgcaaacctcttcgaaggcaccgatctcaaggtgcagtttctccttttcgttccaagcaatccctcttgtgggcagctggtggagggaagttcagatctgcagaactcagggttcaacgccacactgggcaccaaactcatcatacacggctttcgggtgctcggaaccaagccctcatggattgacacatttatccgtacactcctgcgcgcaacaaacgccaacgtcattgcagtagactggatatacggttcaactggggtgtacttttcagctgtcaagaatgtcctgggtgtctccgagtcgtccatccatatcatcggcgtctccctaggtgcccatgttggaggaatggtcggccaactcttcggcggacaacttggccaaattacgggtctcgatccagctgggccagaatacacgcgtgcatctgtcgaagagaggctggacgcgggcgatgccttattcgtggaagctatccacacagatacagacaaccttggaattagaattcccgtaggtcatgtcgactactttgttaatggagggcaggaccagccagggtgcccaacctttttctacgccggctactcctatttaatatgcgaccacatgcgcgctgttcacctgtatatttctgccctcgagaactcatgtccgttaatggccttcccgtgcgcaagttataaggcctttttggcggggcggtgcctcgactgcttcaacccattcctgctgtcctgccctcggatcggcctggtggagcaagggggcgtgaagatagagccactgcccaaggaggtcaaagtatatttgcttaccacttcttccgctccctactgcatgcaccatagcctcgtggagtttcacttgaaggagttgcggaacaaggacaccaatattgaagtcacctttctgtcatccaatattacatccagctctaaaataactattcccaagcagcagcgatacggaaaaggcataattgcacatgcaaccccccagtgtcaaatcaaccaagtaaaatttaagtttcaatcatccaaccgagtatggaagaaagacagaaccactattataggtaagttctgtacggccctgctgccagtgaacgacagggagaagatggtatgcctccccgagcctgtgaatctgcaagcaagcgtgacggtaagttgtgacctgaagattgcctgtgtgtag

SEQ ID NO: 128673 - DNA, 852 bp, synthetic construct
  misc_feature 1..852: note = Description of Artificial Sequence: Synthetic coding sequence
  source 1..852: mol_type = other DNA
atggttggccagctctttggcggacagctcgggcagattactgggttggacccagccggacctgaatacacgagagcctctgtggaggagagattggacgcaggggatgctcttttcgtggaggcgatccacaccgatacagacaacctgggcatccgtataccagtgggacatgtggattattttgtaaatggggggcaggaccaacctggctgtcccacattcttttacgccgggtactcttatttgatctgcgaccatatgcgggctgttcacttatacattagcgctttggagaactcctgtcctctcatggctttcccctgcgcatcctacaaagcgttcctggctggccgctgtttggactgttttaatccttttttgctctcctgtccgagaattggactggtggagcagggcggtgttaaaatcgagcctctccccaaagaagtaaaggtttatctgctaaccacctctagcgccccttactgtatgcaccatagtctggtggagtttcacctgaaagaactccgaaataaggacactaacatcgaagtgacgtttctgagtagtaacataactagtagttcgaagataacgatccccaagcaacagagatacggtaaaggcatcattgcacatgcaacccctcagtgtcagatcaaccaggtcaaattcaagtttcagagcagtaatagagtttggaagaaagaccggactactattattggaaagttctgtactgcactgctccctgtcaacgaccgtgaaaagatggtctgcctgcctgaacccgtaaacttacaggctagcgtcacggtgtcttgcgatcttaagatcgcctgcgtatag

SEQ ID NO: 128674 - DNA, 1656 bp, synthetic construct
  misc_feature 1..1656: note = Description of Artificial Sequence: Synthetic coding sequence
  source 1..1656: mol_type = other DNA
atgcgtacgcggccaaggccaaggctgaggaggaccgaaaatttccttacagctgtgcaccacggcaagaaggaggaaaaggccgcagtcgagcgccgaagactgcatgtgctgaaggcactcaagaaactgaggatagaagctgacgaggctcctgtagtggcagtgctggggagcgggggcgggcttcgggcccacatcgcatgtcttggcgttctctccgagatgaaagaacaagggctgctggacgccgtcacctacctggccggcgtgtcagggagcacctgggcgatttctagcctgtacactaatgacggagacatggaggcacttgaagccgatcttaaacatcggttcacgaggcaagaatgggatctggcgaagtccctacagaagactatccaggccgcgcgttcggagaactatagcctcaccgacttttgggcctacatggtcatctctaagcagacacgggagctccccgagtctcatctgagcaatatgaaaaaaccagtggaagaaggcactctcccatatcccatcttcgcggccatcgacaatgatctgcagccttcgtggcaggaagccagagctccggaaacctggttcgagtttacaccacaccatgccggattttcggctctgggggccttcgtctctattacacattttggatccaaatttaaaaaaggaagactggttcggacccaccctgagcgggatttaacgttcttacggggcttgtggggatccgctttgggaaacacagaagtcattagagaatacatttttgaccagttaagaaacctcactttgaaagggctttggcgtcgtgctgtcgccaacgccaagtcaatcggtcacctcatttttgccagactgctgcgcctgcaggagtcttctcagggtgagcacccacctccagaggatgagggtggggaacctgagcacacttggctgactgaaatgctggagaactggaccagaacgtcattggaaaaacaggagcagccccatgaggaccccgaacgcaaagggtcgttgtcaaatctgatggacttcgtgaaaaagactgggatctgcgcctctaaatgggaatgggggaccactcacaattttctgtataagcacggagggattagggacaagattatgagttctcggaagcacttacatctcgttgacgcgggtcttgccatcaataccccttttccacttgtcctcccgcccacccgcgaggtccatctcatactgtccttcgacttctctgctggagatccttttgagacaatacgcgccactacagactattgtcggcgacacaagatacccttcccacaagttgaggaggccgagctagacctgtggagcaaggctcccgctagctgctacatcctcaaaggcgagaccgggcctgtggtaatgcattttcctctgtttaacattgatgcctgtggaggggacatcgaggcatggagcgacacgtacgatacctttaaattggcagatacttacaccctcgacgtcgtggttctcttactagccctagcgaaaaaaaatgtgagagagaacaaaaagaaaatactgagagagcttatgaacgttgctgggctttattaccctaaggacagcgcccgctcttgttgccttgcttag

SEQ ID NO: 128675 - DNA, 4392 bp, synthetic construct
  misc_feature 1..4392: note = Description of Artificial Sequence: Synthetic coding sequence
  source 1..4392: mol_type = other DNA
atgctgctgtccccctctctgctcctcctgctgttactcggtgccccccgcggatgcgcagaaggagtagccgcagcactgacaccggagagacttcttgaatggcaggacaagggtatttttgtcatccagtccgagtcactgaaaaaatgtatccaagctggaaagtccgttctgaccttggaaaattgcaagcaggctaacaaacacatgctctggaaatgggtgagtaaccatggactttttaacataggcggctccggatgcttaggactgaatttttctgcacccgaacagcctctgagcctgtatgaatgtgacagcacactggtgagtctgcgctggcgctgcaaccgtaagatgatcaccggtccacttcagtactcggtacaggtagcccacgataacacagtggtggcgtccaggaagtacatacacaaatggatttcttacggctccggtggaggagatatctgcgagtatctccacaaggacctgcatacgataaagggaaatacccacggcatgccgtgcatgtttccatttcaatacaaccaccagtggcaccacgaatgcacccgtgaaggaagggaggacgacctactgtggtgtgcaaccacatcaaggtacgaaagggacgagaagtggggcttctgccctgatccgacttcagcggaggtcgggtgcgacacgatctgggaaaaagacttaaacagtcacatctgttatcagttcaatttgttatcctccctgagctggagcgaagctcacagcagttgccagatgcagggtggaacgctgcttagcataacagatgagaccgaagaaaactttatacgagaacatatgagttcaaaaactgtcgaagtatggatgggtctcaatcagctggacgaacacgctggatggcaatggtcagacggaacccccctcaactatttgaattggtctccagaagtgaacttcgaaccctttgtggaagatcattgtggtactttctcaagcttcatgccgtccgcctggcggtcgagggactgtgagagtaccttaccatacatctgcaagaagtacctgaaccacattgaccacgagattgtcgaaaaagatgcttggaaatattacgcaactcattgcgagcccggatggaacccctataatcgaaattgttacaaattgcagaaggaggagaagacctggcacgaagctctccgttcctgccaagccgacaacagcgcactcattgacatcaccagcctcgccgaggtggaatttctagtcacactgcttggggacgaaaatgcctctgagacatggattggcctgtctagcaacaaaattccagtgagctttgagtggagcaacgattcctcagttatcttcacgaattggcacactttggaaccccatatatttccaaatcggtcacagctgtgtgttagcgcagaacaaagcgaaggccattggaaggtgaagaattgcgaggagcgtctgttctatatctgcaaaaaggccggccacgtgctttctgatgctgaaagcgggtgtcaggaaggatgggagaggcacggcggattctgctacaagatcgatactgtgctgcgcagctttgatcaggctagtagtggttactattgccctccagctttagtgacgatcaccaacaggttcgagcaggcgttcattacctccctgatatcctctgtagttaagatgaaagactcctacttctggatagccctccaggaccagaatgacacgggcgagtacacatggaaacccgtcggccagaaacctgaacctgtgcagtatactcattggaacactcaccagccgaggtactctggcggctgtgtggcaatgagagggagacacccgttgggcagatgggaagtgaagcattgtagacactttaaagctatgagtctgtgcaagcagcccgtcgaaaatcaggagaaagccgaatacgaagagcggtggccgtttcatccttgctacctggattgggaatccgaacctggactggcatcctgcttcaaggtctttcattcagagaaagttctgatgaagcgaacctggagagaggcagaggccttctgtgaagagttcggagctcacctcgccagcttcgcccacatcgaggaggaaaatttcgtaaacgagctgttacattctaagttcaattggaccgaggagcgacaattttggattggtttcaacaagcggaatccccttaatgcaggcagttgggagtggagtgatcgaacccccgtggtatcctcatttttggacaacacatactttggggaggacgccaggaactgcgcagtgtacaaggccaacaaaaccttgttacccctgcactgcggaagcaaacgggaatggatttgtaagatcccacgggatgtgaaaccaaagatcccattctggtaccagtacgatgtgccctggctcttttaccaggacgcggaatacctgtttcacaccttcgctagcgaatggctcaatttcgagttcgtgtgtagttggttacatagcgacctgctgacgatacactccgcccatgaacaggagtttatccactctaagatcaaggctctcagtaagtatggagcgtcttggtggataggcctgcaggaagaacgagcgaacgatgaattcaggtggagagatggaactcccgtcatctaccaaaactgggatactgggagagagaggacagtgaacaatcagtctcagcgctgtggattcatctcgagtatcactgggctctggggcagtgaagaatgttctgtgtccatgcccagcatctgtaagcggaagaaggtctggctcatcgagaaaaaaaaagatactcccaagcagcatgggacgtgcccaaaaggctggctttacttcaattataagtgcttgctcctgaacattccaaaggacccttcaagttggaaaaactggacacacgcccagcatttctgcgccgaggagggcggcaccctcgtggctatcgagtccgaggtcgagcaggcgttcatcacgatgaacctctttggacaaacgacaagcgtctggattggcctgcagaacgatgattacgaaacttggctcaacgggaagccagtggtttactccaactggtccccgtttgacataataaatataccaagtcataacaccactgaggtgcagaaacacattcccctgtgcgctctgctttccagcaacccaaatttccactttactggtaagtggtattttgaggattgcgggaaagagggatatggatttgtctgtgagaagatgcaggataccagtggccacggcgtgaacacctctgacatgtaccccatgcccaacacgctggaatacggcaaccgtacttacaagattattaacgcgaatatgacttggtatgccgctatcaagacgtgcctgatgcataaagcgcagcttgtttcaattaccgaccaataccatcagagcttcctgaccgtggtgctcaataggctgggctacgcgcattggataggcctgtttaccacggataacggcttgaacttcgactggagtgacgggacaaagagcagcttcacattctggaaggatgaagagtcttccttgttaggcgattgcgtgtttgctgattccaacggaagatggcactcaacagcttgtgaatcattcctccagggtgccatttgtcacgtccctcctgaaacacggcaatcagagcatccagagctgtgctccgagacctccattccatggatcaaatttaagtccaattgttattctttttccacagttctagatagcatgtcttttgaggcggcccatgagttttgcaagaaggagggcagcaacctgctgacaattaaggacgaggctgaaaacgcttttttgctggaggagctgttcgccttcggctcatccgtgcagatggtgtggctgaatgcccagtttgatgggaataacgaaaccataaagtggttcgacggcactccaacggaccagagcaactggggcattcggaaacctgacacagactacttcaagccgcaccattgcgtagccttacgcatccctgagggactctggcagctgagcccctgccaagagaagaaggggtttatttgcaaaatggaggctgatatacacactgccgaagccctcccggaaaagggcccgagccattcgatcattcctttagcagtggtgctaacccttatcgtgattgttgcaatctgcactctatctttttgtatatacaagcacaacgggggtttttttaggaggttggcaggattccgcaacccctactatcccgccacaaatttcagtactgtctatttggaggagaacatccttatctccgacctggaaaagagcgaccagtag

SEQ ID NO: 128676 - DNA, 3975 bp, synthetic construct
  misc_feature 1..3975: note = Description of Artificial Sequence: Synthetic coding sequence
  source 1..3975: mol_type = other DNA
atgctcctgtcgccaagcctgcttctgctgctactgctcggcgctcccaggggctgcgctgaaggggttgcagctgcccttacacccgagaggctgctggaatggcaagataaaggaatattcgttatacagtcggagagcctgaaaaaatgcatccaggcagggaaatctgtcctgacccttgagaactgtaaacaggcaaacaagcatatgttatggaaatgggtgtctaaccacgggcttttcaacatcggagggtccggctgtctgggcctgaatttcagcgctcccgagcagcctctgtcactatatgagtgtgatagtacactggtgtccctgaggtggagatgcaacaggaagatgattaccggtccgctacaatattccgttcaggtggctcacgacaacacggtggttgcttcccggaaatacattcacaagtggattagctatgggagtggggggggggatatctgcgagtacttgcacaaggacctgcatacaatcaagggcaatacccacggaatgccctgtatgtttccctttcagtataatcatcagtggcaccacgaatgcaccagagagggcagggaggacgacctgctatggtgtgcgaccacaagccggtacgagcgcgacgagaaatggggattctgccctgatccgacaagcgccgaggtgggctgcgatacgatctgggagaaggacctaaacagtcatatctgttaccagttcaatcttctgagcagcttgtcttggtccgaggctcattctagttgccagatgcagggggggaccttactgtccattactgatgaaaccgaagagaattttatcagggaacatatgtcctctaagaccgtcgaagtttggatgggactaaaccagttagatgaacatgcgggttggcagtggagcgacggaaccccactcaactacttaaactggagccctgaggtcaattttgaaccctttgtggaggaccattgcggcacattcagctcgttcatgccaagcgcatggcgcagcagagactgtgaaagtaccttgccctatatttgcaaaaagtatctgaatcatatcgaccacgagattgttgagaaggacgcatggaagtattacgctacccactgcgagcccggatggaacccttacaatcggaattgctacaagctgcagaaggaagaaaaaacatggcatgaggccctccgatcttgccaggctgacaatagcgcactcattgatattacgtctctggcggaagtggagtttctggtgaccctcttgggcgatgagaacgctagtgaaacttggatcggcctttccagtaataagatcccagtcagcttcgagtggtctaatgattcctctgtcatttttacgaactggcacacgctagagcctcacattttccccaatcgcagccagctttgcgtcagtgccgagcagtcggaggggcactggaaagtgaaaaactgtgaagagcgtctattctatatttgtaagaaagcggggcacgtcctttccgatgcagagagtggatgtcaagagggatgggaaagacatggaggattctgctataaaatagataccgttctgcgctctttcgaccaggcctctagcgggtactactgccccccagctctggtgactatcaccaaccgctttgaacaagcgttcatcaccagcctgatctctagcgtggtgaagatgaaggactcctatttctggatcgcactgcaggatcagaacgacaccggcgagtatacttggaagccagtgggccagaagcccgagccagtgcagtacacgcactggaacacgcaccagccacggtattcaggcggctgtgtggcaatgcgtggacggcatcccttggggcgctgggaggtgaaacactgccgtcacttcaaggcgatgtccctctgtaaacagccggttgagaaccaagaaaaagccgaatatgaggagaggtggcctttccatccctgctaccttgattgggaatcagaacctggtcttgctagttgttttaaagtatttcactccgagaaagtgctgatgaaaagaacttggcgggaggcagaagctttctgtgaggaatttggggcccacttggcatcgtttgcacacatcgaagaggagaattttgtgaatgagctgctgcattccaagtttaactggaccgaggaaagacaattttggataggttttaataaacgcaaccccctgaacgctggatcgtgggagtggagtgatcgcactcccgtcgtgtcatcttttctcgacaatacttatttcggcgaagacgcccgcaattgcgccgtctacaaggccaacaagaccctgttgccactccactgtggatctaagcgggagtggatatgcaaaattccgcgcgacgtgaagcctaaaatacccttttggtatcagtacgatgtaccttggttattctaccaggacgcagagtatctgttccatacttttgcaagtgagtggctgaacttcgagttcgtgtgttcctggcttcactccgacctgctaactatccattcagcacacgagcaagaatttatccactctaaaatcaaggctctgagcaaatacggggcaagttggtggatcggcctgcaggaggaacgcgccaacgacgagtttagatggcgtgacggaacacccgtaatctatcagaactgggacacgggacgggaaagaacggtcaataaccagtctcaacgctgtggattcatcagtagcatcacggggctgtggggcagtgaagagtgcagcgtttcaatgcctagcatatgcaagcgcaagaaagtgtggcttatcgagaaaaaaaaagatacacccaagcagcatggtacatgccccaagggatggttgtacttcaactacaagtgcttacttctgaacatacctaaagaccctagcagttggaagaattggacccatgctcagcacttctgtgcagaagagggaggcaccctggtcgctattgaatccgaagtcgagcaggctttcattaccatgaatctctttggacaaacaacgagtgtttggatcgggttgcagaatgatgactacgagacctggttaaatggtaaacctgtagtgtattccaactggtctcccttcgatatcataaacataccttcccataacaccacagaggtacaaaaacacattccgctgtgtgccttgctcagtagcaatcccaattttcatttcacaggcaagtggtatttcgaagactgtggcaaggaaggctatggattcgtgtgcgaaaaaatgcaggatacatccggccatggtgttaacaccagcgacatgtatccgatgcctaatacacttgagtacggcaatcgtacctacaagatcatcaacgccaacatgacctggtatgcggctatcaaaacctgcctgatgcacaaagctcagctagtgtcgattactgatcaatatcaccagtccttcctaacagtggtcttaaatcgacttggatacgctcattggattggcctgtttactaccgacaacgggcttaacttcgactggtcagacggaaccaagtcctccttcacgttttggaaagacgaggagagcagccttcttggtgattgcgtgtttgctgactccaacggacgttggcattcaaccgcttgcgagagctttctccagggcgccatatgccatgtgccaccggagacacgtcagtctgagcacccggagctgtgtagtgaaacatccattccatggatcaagttcaagagcaactgttactcgttctccaccgtgctggactccatgagctttgaggcagcgcatgagttttgcaaaaaagagggctctaatctcctcaccatcaaagatgaagccgagaatgctttcttacttgaagagctttttgctttcgggtcgtccgtgcagatggtttggcttaacgctcagtttgacggcaattctaaatag

SEQ ID NO: 128677 - DNA, 1584 bp, synthetic construct
  misc_feature 1..1584: note = Description of Artificial Sequence: Synthetic coding sequence
  source 1..1584: mol_type = other DNA
atgggctcctcagaagtctcgataatcccaggattacagaaggaggaaaaagccgcggtcgaaagaaggcggctgcacgtgctaaaggccctcaaaaaactcagaatcgaggccgatgaagcacccgtggtggcagtgttaggatccggaggtggcttgagagcccacatcgcttgtctaggcgttctgtccgagatgaaagagcagggcctgctagatgccgtgacatacctggcaggagtttccggctctacgtgggccattagctcactgtacacaaatgatggggatatggaggctttagaagccgacctgaagcacagattcacgaggcaagagtgggatctggccaagtccctccagaaaacaatccaggccgcacgctccgagaattacagtctgactgacttttgggcctatatggtgatttctaagcagacccgagagttgcctgagagccatctctccaacatgaaaaaaccagtcgaggaaggaactttgccatatcctatcttcgcagccatcgacaatgatctgcagcccagctggcaggaagctcgagcgccggagacttggtttgagttcacaccacaccacgccggattctctgcactgggcgcctttgtcagcattacacacttcggaagcaaatttaagaagggtcgattagtgcggacacatccagaacgggatttgacgtttctgcggggtctctggggcagcgccctcggtaatactgaggtgataagggaatacatctttgatcagcttcgcaacctcactctgaagggcctgtggaggagagccgtggccaatgccaagtccatcggtcacttgattttcgccagactactgagactccaagagagctctcagggcgagcacccaccccctgaggacgagggtggcgaacctgaacatacctggttaactgagatgctggaaaattggacccggacttcattggaaaagcaagagcagccccatgaggatcccgaacgaaaaggctccttgtctaatcttatggactttgtcaaaaagactggcatctgtgcctcaaaatgggaatggggcacgactcacaacttcctttataagcacggaggtatccgcgacaagatcatgtcttccagaaagcatctgcatctggtggatgcgggccttgctattaataccccattccccctggtgttaccacctacgagagaggttcatctaatattgtcattcgacttctccgctggggatccgttcgagactatccgggcaacgaccgattattgtagacggcacaaaataccctttcctcaggtagaggaggctgaactcgacctctggtctaaagcaccagctagctgctatattttgaagggggagacgggtcccgtggtgatgcacttcccactgttcaatattgacgcatgcggtggagacattgaagcctggtccgacacctatgatacgttcaagctggccgacacctacacactggacgtcgtagtactcctgctggccctggccaaaaaaaatgttcgagagaataagaaaaagatactgcgggagctgatgaatgtggcgggttag

SEQ ID NO: 128678 - DNA, 1626 bp, synthetic construct
  misc_feature 1..1626: note = Description of Artificial Sequence: Synthetic coding sequence
  source 1..1626: mol_type = other DNA
atgggctcttccgaagtttccatcatcccagggctgcagaaggaagaaaaggctgccgtggaacgccgccgtctccacgttttaaaagccctgaaaaagctgcgcatcgaagctgacgaggcccctgtggttgctgtacttgggagcggtggcggcctaagggcccacatcgcatgtttgggagtgttgagcgaaatgaaagagcagggactgctggatgcagtgacctatctcgctggcgtgagcggttcaacttgggcaatcagcagcttatacaccaatgatggcgacatggaagcccttgaggcggacctgaagcataggtttacaagacaagagtgggatctggcaaagtccttgcagaagaccattcaggcagcgcgatctgagaattattctctcaccgatttttgggcatacatggtgatttcaaagcagacccgtgagctcccagagagtcacctgtccaacatgaagaagcctgtagaagagggcactctgccctacccaatctttgcggctatagataatgatctgcagccatcctggcaggaagcccgggctccggagacttggttcgaattcacacctcatcacgctggattctctgcccttggggcctttgtatctatcactcattttgggagcaaatttaagaagggacgtctcgtccgcactcatcccgaaagggaccttacattcctaaggggcctgtgggggagcgccctcggtaatactgaggtaatcagggaatatatattcgatcagctcagaaatttgacgttgaagggcctgtggcgcagagccgttgccaacgctaagagcattggccatctaatcttcgccaggttgctgcggcttcaggagtccagccaaggcgaacaccccccacccgaggacgaggggggggagcctgagcacacgtggttgacggagatgctcgagaactggactaggacctctctggaaaagcaagagcagccacatgaagacccagaacggaagggatccctaagcaacttgatggactttgttaaaaaaaccggcatctgtgcctctaagtgggagtggggcacaacacacaattttttatacaagcatgggggtattcgtgataagataatgagcagtcggaagcatctacatctggtcgacgctgggctggccattaatacaccttttcctctggtgctgcctccaactcgcgaagtgcatctgattctgagcttcgatttcagcgctggggatccttttgagaccatacgagcaacgaccgattactgtagacgccataagataccttttcctcaggtggaggaggctgaacttgacctgtggtcaaaggcacccgccagttgttacatattgaaaggcgagaccgggccagtggtgatgcacttccccctatttaatattgatgcatgtgggggagacatagaagcctggtcagatacatacgataccttcaagttagccgacacttataccttagacgtggtggtgctgttgctggcccttgccaaaaagaatgtgcgagaaaataaaaaaaaaattttgagagagctgatgaatgtggctgggctctactatcccaaggactctgctcgctcctgttgcctcgcttag

SEQ ID NO: 128679 - DNA, 2457 bp, synthetic construct
  misc_feature 1..2457: note = Description of Artificial Sequence: Synthetic coding sequence
  source 1..2457: mol_type = other DNA
atggagagtttgagtccaggaggccctccaggacacccataccaaggggaagcctcgacatgctggcagctgacggttcgcgtactggaagctcgcaacctgcgttgggcagacctgctgagtgaggccgatccgtacgtgatccttcagctgagcaccgcacccggcatgaagtttaaaactaaaacgctgacggacacttcacatccagtctggaatgaagccttccgctttctgatacagagccaagttaagaacgtgctggagctgagtatttacgatgaagacagcgtgaccgaagacgatatctgtttcaaagtcctatacgacatatccgaagtgctgcctgggaagctacttcgtaagaccttctcacagagtccacagggagaagaagaactggatgtggaattcctcatggaggagacaagcgacaggccagagaaccttattaccaataaggtgatagtggcccgcgaactctcatgtctggatgttcatcttgactccaccgggtcaaccgccgttgtggctgatcaggacaaactagagctcgaactggtgctgaaaggatcttacgaggatacccaaacatcatttctcgggactgccagtgctttcagatttcattacatggcagcccttgaaacggaactgtccggacgccttcggtcatcaaggtctaatggctggaatggcgataattccgccggctatcttacggtacctttaagaccgttaacaatcggtaaggaggtcacaatggacgtaccagctccgaatgcccccggggttcggctgcagctcaaagccgagggatgccccgaggagctagccgttcacctgggcttcaatttgtgcgccgaggagcaggcctttctgagtcgtcggaagcaagttgtggctaaggcgttgaaacaggctttacaacttgatagggatctgcaagaggatgaggtgccagtggtcggtatcatggctacaggtgggggcgctcgtgcaatgacctcgctatatggtcatctgctggctcttcaaaaactgggcctcctggactgcgttacttattttagcgggatctctggaagtacctggacaatggctcacctctacggtgaccctgagtggtcacagagggacttagaaggacccattcgatatgctagagaacaccttgcaaaaagcaaactggaagtgttttcacctgaacgactggcttcctatagaagagaactagagttacgggcagagcaggggcacccgactacgtttgtggacctgtgggccttagtactggagtcaatgcttcacgggcaggtgatggatcagaaactatcagggcagcgtgctgcgctggagcgcggtcagaatcctctgcccctttacctgagcttgaacgtgaaggagaacaacttagagaccctagattttaaagagtgggtggaattctctccatacgaagtgggattcctgaagtatggggcgtttgtgcccccagagttgttcgggtctgagtttttcatgggcagattgatgaggcgtatccctgagccgaggatctgctttcttgaggccatctggagtaatatctttagcctcaacctgctggatgcttggtacgacttgaccagctcaggtgagagctggaaacagcatatcaaagataagacaaggtctttggagaaggagcctttaaccacaagcggaaccagctctagactcgaagcgtcttggctgcaaccaggcaccgccctcgcacaggctttcaagggctttctcaccggaagaccactgcaccagagatctccaaactttttgcaagggctgcagctacaccaggactattgctcccacaaggatttctcgacctgggcagattaccagctggattcaatgccgtcccagcttacccctaaggagcctagattgtgtttggtggatgccgcatactttatcaatacctcctcaccatccatgtttcgccccggaaggcgcctggaccttatcctcagtttcgattactccttgtccgcacccttcgaagcgctgcagcagaccgaactttactgcagggcccggggactgcctttccctagggtggagcctagccctcaggatcagcaccagcctagagagtgtcatcttttcagtgatcctgcatgcccggaagcacctatcctgcttcattttccccttgtcaacgcttctttcaaggaccactcagcaccgggggtccagcgttcgccggcagagttgcagggagggcaggtggacttaaccggcgccacctgcccatacacgttaagtaatatgacttacaaagaagaagactttgagcgcttgctcaggttatcagattacaacgtgcagactagccagggcgcgatcctccaagcactgcgaaccgctctaaagcatagaactctggaggcccggcctcctcgagcacagacatag

SEQ ID NO: 128680 - DNA, 1326 bp, synthetic construct
  misc_feature 1..1326: note = Description of Artificial Sequence: Synthetic coding sequence
  source 1..1326: mol_type = other DNA
atggtcccccccaaactacatgtcctgttttgcctgtgtgggtgtcttgctgtggtgtacccgtttgattggcaatatataaaccctgtagcgcacatgaagagcagtgcctgggtgaataaaattcaggtgttgatggctgcagcaagctttggccagaccaagatacccagaggaaatgggccctactctgttgggtgcacagacttaatgttcgatcataccaacaaaggcactttccttaggctctactatcccagccaagacaacgatagactcgacactctctggataccgaacaaagagtacttttggggactgtccaaatttctgggcacccattggctgatgggcaatatcctgagacttctgtttgggtcgatgacaacgcccgctaactggaattcccccctgcggccgggggagaaataccccctcgtcgtgttcagccatggcctcggtgcgttccgcactctctactcagctattggaatcgacttagcctcacacgggtttatcgtggcagcagttgagcatcgggacagaagtgcctctgctacctactattttaaggatcagagcgcagcggagataggtgacaaatcctggctttacctccgcacgcttaaacaggaagaagagactcacatacgtaatgaacaggttcgccaacgagccaaggagtgttcgcaagcgttgagcctaatccttgacatcgaccacgggaaaccagtgaagaatgctctcgatcttaagttcgacatggaacaactcaaagattctattgaccgggaaaaaatcgctgtgatcggacactcttttggcggagcgacggtgattcagactctttcagaagaccagagatttagatgcggcatcgcactcgacgcctggatgtttccactaggcgatgaggtatactctcgaatacctcagccattattcttcatcaacagtgaatatttccagtaccctgccaacattatcaagatgaaaaaatgctacagtcccgataaggaacgcaaaatgattactatccgcgggagtgtgcaccagaatttcgccgattttaccttcgccacagggaaaattataggacacatgctcaaacttaaaggagacatcgatagtaacgtggcaattgacctttcaaacaaggcttcactggcgtttctgcagaagcaccttggcctgcataaagactttgaccagtgggactgcctgatcgagggagacgatgaaaatctgattcccggcactaacattaataccacaaaccagcatattatgcttcaaaactctagcgggatcgagaaatacaattag

SEQ ID NO: 128681 - DNA, 1326 bp, synthetic construct
  misc_feature 1..1326: note = Description of Artificial Sequence: Synthetic coding sequence
  source 1..1326: mol_type = other DNA
atggtgcctccgaagcttcacgtcctcttttgcttatgtggttgcctagccgtcgtatacccatttgactggcagtatatcaatcccgtcgcccacatgaaatccagcgcatgggttaataagatccaggttctgatggctgcagcgtcctttggccagactaaaatcccgcgtgggaatgggccatactcggtgggatgtactgacctgatgttcgatcacactaataagggcacattcctgcggctctactacccctcccaagacaatgatagattagacaccctctggattccaaacaaggaatatttttgggggctttccaaattcctggggacacactggctcatgggaaatattctgagacttctatttggttctatgaccactcctgccaactggaattctcctttgcggccgggcgagaaatacccgctagtggtgtttagtcacggactcggtgccttccgaacactctactcagccatcggcatcgacctggcgagtcatggtttcattgtggctgccgtggaacatcgagaccggagtgctagcgctacttactatttcaaggaccagagcgcagccgagatcggcgacaaaagctggctgtacctgagaaccttaaaacaggaggaggagacacacatcagaaacgaacaggtccgccaaagggctaaggaatgtagccaggccttgtccctgattctggatattgatcatgggaagcctgtcaagaatgctctggacctgaagtttgatatggaacagctgaaggactccatcgacagagagaagattgctgtcatcggccactctttcggaggcgctaccgttattcagactcttagcgaagatcagagatttcgttgtgggattgcacttgacgcctggatgttcccacttggcgacgaggtttattcacggataccccagcctctctttttcatcaatagtgaatatttccagtatcctgccaacatcataaaaatgaagaagtgctacagtcctgacaaagaaaggaagatgattactatcaggggcagcgtccatcagaattttgccgatttcacatttgcgacagggaagattattgggcatatgttgaagctgaagggtgatatcgatagcaacgttgccatcgatctctctaataaagcaagcttggcgttcctccagaaacacttgggtctgcacaaggatttcgatcagtgggactgcttgatagagggggatgacgaaaatctgataccgggtaccaatatcaacacaactaaccagcatattatgctgcagaatagcagcggtatcgaaaagtataactag

SEQ ID NO: 128682 - DNA, 660 bp, synthetic construct
  misc_feature 1..660: note = Description of Artificial Sequence: Synthetic coding sequence
  source 1..660: mol_type = other DNA
atggctgccgccagctttggacagacgaagattccgcggggaaatggaccttactccgtggggtgtacagacctaatgtttgatcatactaacaagggcacatttttacggctttactatccttcccaggataacgataggctggacaccctgtggatccctaataaggagtacttctggggcctgagtaaattcctgggcacccattggctgatggggaatattctgcgactactctttggcagtatgacgacaccagctaattggaactccccactacgcccaggagaaaaataccccttggtggtgttttcccacggattgggagcctttcgcaccctgtattccgcgatcggaatagatctggcttcccacggcttcatagtggcagcggtggagcatagggaccgaagtgcctctgccacgtattattttaaggatcaatcagcagccgaaatcggcgataagtcatggctttacctacggacccttaagcaggaggaagaaacccacatcagaaatgagcaagttcggcagcgcgccaaggagtgtagccaggctctgagtctaatcctcgatatcgaccacggtaagcccgttaagaatgcattggatctcaaatttgatatggaacagcttaaggtatcttacaagaagtag

SEQ ID NO: 128683 - DNA, 414 bp, synthetic construct
  misc_feature 1..414: note = Description of Artificial Sequence: Synthetic coding sequence
  source 1..414: mol_type = other DNA
atgactacccctgccaactggaactcccccttgaggcccggcgaaaaatatcctttagtcgtgtttagccacggacttggcgctttcaggactctttacagtgcgattggcatcgacctggcaagccacggattcatcgtcgctgccgtggaacaccgagaccgatctgctagtgcgacttactacttcaaagatcaaagcgctgctgaaatcggggacaagtcttggctttatctccgtactctcaagcaggaggaggagacacatattagaaatgaacaggtcaggcagagagccaaggaatgttcccaggctctgagtctgatcttagacatcgaccacggcaaaccagtcaaaaacgctctggacttgaaattcgacatggaacagcttaaggtgtcatacaagaaatag

SEQ ID NO: 128684 - DNA, 489 bp, synthetic construct
  misc_feature 1..489: note = Description of Artificial Sequence: Synthetic coding sequence
  source 1..489: mol_type = other DNA
atgagagcccccattcccgaacctaagcctggggacctcatcgagattttccgtcccttctacaggcattgggccatctacgtgggtgatggctacgttgtgcatctggcaccaccatccgaagttgcgggagcaggagccgcatccgttatgagtgcattgacggataaagctatcgtaaaaaaggagttgctttacgatgtcgcaggctctgataaatatcaggtcaataataaacacgacgataagtacagccccctcccgtgttccaagattatccagcgtgcagaggaactcgtgggccaggaggttctgtataaactgacctctgagaactgcgagcattttgttaatgagttgcgatatggggtggcgcggtcggatcaggtaagggacgtgatcattgccgcttctgttgctggtatgggtctggcagctatgagcctgattggggtcatgttttctaggaacaagcgtcagaagcagtag

SEQ ID NO: 128685 - DNA, 489 bp, synthetic construct
  misc_feature 1..489: note = Description of Artificial Sequence: Synthetic coding sequence
  source 1..489: mol_type = other DNA
atgcgggccccgatcccggagcccaagcccggggacctgatcgaaatctttcgccctttctaccgccattgggctatctatgtgggtgacggctacgtggtacacttggcccccccgagtgaagttgctggagccggggccgcctccgttatgtcagctcttacagataaggctattgttaagaaggagctgctctatgacgtagctggatcagacaagtaccaggtgaacaacaaacacgatgacaaatacagccccctgccctgttccaagattatccagagggctgaggaactcgtcgggcaggaagttctgtataaactgacatcagagaactgtgaacatttcgttaatgaactccgttatggtgtggcacgatctgaccaagtgagggacgtgatcatagctgcatctgtcgcaggcatggggctcgccgccatgtcactcataggagtgatgttctcccgaaataagcgtcaaaaacagtag

SEQ ID NO: 128686 - DNA, 4377 bp, synthetic construct
  misc_feature 1..4377: note = Description of Artificial Sequence: Synthetic coding sequence
  source 1..4377: mol_type = other DNA
atgggtcttcgccctggcattttcctgctggaactcctattacttctggggcagggcacaccccagatacatacctctccgcggaagagtactctggagggacagctctggccagaaacccttaagaactctccctttccctgcaatccaaataaacttggggtgaatatgccaagtaagagcgtgcatagtctcaagccatccgatatcaaatttgttgccgccattggaaatctggaaatcccccctgatcctggaaccggtgacctggagaagcaggactggactgagagacctcagcaggtgtgcatgggtgtcatgaccgtcctgagcgacattatccgctatttctcaccatctgtgccaatgccagtgtgtcacacgggcaagcgagtcatcccacacgatggggctgaagatttgtggattcaggctcaagagttggtacggaatatgaaggagaacctccagctcgactttcagtttgactggaaactaataaacgtgtttttctctaatgctagccagtgctatctttgcccaagcgcacagcaaaacgggttagccgcagggggtgttgatgaattaatgggcgttctggactacctccaacaggaggtgccgagggctttcgtgaatcttgttgacttaagcgaagttgctgaggtcagtaggcagtaccacggaacatggctgagtcccgctcccgaaccctgcaattgttcagaagagacaacaagactcgcgaaggtcgtaatgcagtggtcctaccaggaagcatggaattccctcctggcatcttcgagatactcggaacaggagtcgtttaccgttgtttttcagcccttcttctatgagactactccatctctgcacagcgaagatccccgacttcaggatagcacaaccctggcctggcatttgtggaatcggatgatggaacccgctggggagaaggatgagccactctccgtgaagcacggaaggcccatgaaatgcccaagccaagagtccccttacctcttctcatacagaaattccaactatctgaccagactgcagaagccgcaggacaagctggaggtaagggagggagccgagattcggtgccctgataaggacccttccgatacagtgcccacatctgttcatcgtctgaagccagccgatattaacgtgataggcgcgttgggagacagcctgaccgccggaaacggtgcagggagtaccccaggaaatgtgcttgatgtgttaacacagtatcggggcctgagctggagcgtaggcggagatgagaacatcggaaccgtgacaaccctggcaaatatcctgagggaattcaatccctccctgaagggattctccgtggggacaggaaaagaaacatcaccgaatgccttcctaaatcaagcagtggctggagggagagccgaggatctccctgtgcaggctagaagactcgtcgacctgatgaagaatgatacacggatccatttccaagaggattggaagatcattactctgtttatagggggaaatgacctgtgtgacttctgtaacgaccttgtgcactatagtccccagaacttcacagataatatagggaaagcgctcgacattcttcacgccgaggtgccgcgggctttcgtcaacttggttaccgttctcgaaattgtcaaccttagagaactgtaccaggagaagaaggtctattgtccaagaatgatcctgcgcagcctgtgtccttgcgtgctgaaattcgatgacaactctactgaactggctacgttgatcgagttcaataagaaatttcaggagaaaacacaccagctcatcgaaagtggccggtatgacaccagagaggactttaccgtggtcgtgcagccgttttttgaaaatgtcgatatgcctaagacgagcgaaggactgcctgataattcttttttcgccccagattgttttcatttctcttccaagtcacactcccgggctgcttctgccctgtggaataacatgctggagccggtgggccagaaaactacacgccacaagttcgagaacaaaattaacataacctgccctaatcaggtgcaaccctttctgagaacgtataagaactccatgcaggggcacggaacatggctcccttgtagggacagggctcctagcgctctgcacccaacttccgtgcacgccctgcggccagccgatatccaagtcgttgctgctttgggtgactccctgacggctggaaacggtatcggaagcaagcccgacgacttacccgatgtaaccactcagtaccgcgggctttcctatagtgcagggggagatgggtccctcgagaacgtaactacactccccaacattcttcgggagttcaatcgtaaccttaccggttatgccgtggggaccggagatgcgaacgacaccaatgcatttctgaatcaggctgtgcccggtgctaaggctgaggacctcatgtctcaggtacagaccctgatgcagaaaatgaaggacgaccaccgagttaacttccatgaggattggaaggtaataaccgttctgattgggggttctgacctgtgcgattactgtacagactccaacttgtactcggccgctaattttgtacaccatctgcgcaatgccctggatgttctgcatagagaggtgccgcgtgtgttggtgaatctggtggacttcctgaaccctaccatcatgagacaggtctttctcgggaaccccgataagtgtcctgtgcaacaagcttccgtgctctgcaactgcgttcttactttgagggaaaatagccaggaactggcccgactcgaggccttttcccgagcctacaggagttccatgcgcgaactggttggttccggaagatacgatacccaagaggacttctctgtggtcctacaacctttctttcagaacatacagctcccagtgctggctgacggactgcctgacacttcatttttcgcgccagactgcatacacccaaaccagaagtttcattctcagctggctcgcgccctgtggaccaatatgctcgagcccttagggagtaagacggagacgcttgatctcagggctgagatgcccatcacctgcccaacccaaaatgagcctttcctgagaaccccacgtaacagcaactatacgtaccccattaagcccgcaatagagaactgggggtcggactttctatgtacagaatggaaagcatcaaactccgtccctaccagcgtgcatcagcttcggcctgccgatatcaaggtggtggcggcgctcggcgatagcctgaccaccgccgtcggcgcaaggcccaacaacagttccgacctcccgacgtcgtggcgtggcttgagctggagcattgggggagatggtaatttagaaactcacactactctgccaaacatactgaaaaagtttaacccctacttgctgggtttttccacatcgacttgggaaggcacagcggggttaaacgttgctgctgagggcgcaagagccagagatatgccagcccaggcgtgggatctggtggagaggatgaaaaacagtcctgacattaacctcgagaaagactggaagctggtgaccctgttcatcggagtcaacgacttatgtcactactgtgagaacccagaagcccatctggcaaccgagtatgtgcaacatatccaacaggcactggacatccttagtgaggagctgcccagagctttcgtaaatgtggttgaagtcatggaactagcttcattgtatcagggtcagggcggcaaatgtgccatgctggctgcccagaacaattgtacgtgtcttagacattcacaatcctcactcgagaagcaggaactgaagaaggtgaattggaacctgcagcacggaatctcctctttcagttactggcaccagtatacacagagggaggactttgccgtggtggtgcagccattcttccagaataccctaacgcctctgaacgaacggggagatactgacttgaccttttttagtgaggattgcttccacttctcggaccgcgggcatgccgaaatggcaattgccctgtggaataatatgctcgaaccagtcggacgcaaaaccactagcaataatttcacgcactcacgagccaaactgaagtgtccgtcacctgagtccccttacctctacaccctgcgaaatagtcgcctgctgccggaccaggccgaggaggccccggaagtcctgtactgggcagtgccagtcgcagccggagtggggttggttgtgggaatcattggtactgttgtgtggcgatgtcgccgtggcggtaggcgagaagatccgcctatgtcgctgagaaccgtggccctctag

SEQ ID NO: 128687 - DNA, 1467 bp, synthetic construct
  misc_feature 1..1467: note = Description of Artificial Sequence: Synthetic coding sequence
  source 1..1467: mol_type = other DNA
atggagcccgccggtgaaaaggacgagccgttgtcggtcaaacacggtcggcccatgaaatgcccctcccaagaatccccgtatctgtttagctaccgaaactccaactacctgacccgactgcaaaagccgcaggacaagctggaagtccgcgagggggctgagatccgctgccctgacaaggatcctagcgataccgtgccgactagcgtccaccgactgaagcctgcagatataaacgtcataggcgccctcggagatagcctgaccgcaggtaacggagccggaagcacccctggcaatgtgctggacgtgctgacacagtaccggggactctcctggtcagtggggggcgacgagaatatcggcacagttactaccctggcgaatatcctaagggaatttaacccttcgctgaagggcttttcagtgggaaccggaaaggagacttcccctaacgcttttttgaatcaagccgtcgccggtggccgagcagaggatctcccagtgcaggctcgccggctggtagatctaatgaagaacgatactagaattcatttccaggaggattggaagattatcacccttttcatcgggggaaatgacttatgcgacttctgcaatgacctggttcattactccccccagaattttactgataacatcggcaaagcgctggatatcctgcacgccgaggtgccacgggccttcgttaacctggtgacggttctggagatcgtcaacttgcgtgaattgtatcaggagaagaaggtatattgcccaagaatgatcctgcgatctctgtgcccctgcgttcttaaatttgacgacaactcgacggaactggcgaccctcattgagttcaacaaaaagtttcaggaaaaaacacatcagctgatcgaatcaggtaggtacgacacaagggaagacttcaccgttgtggtgcagccctttttcgaaaatgtggacatgccaaaaactagtgaaggcctgcccgacaactccttcttcgcacccgactgcttccacttcagctcgaagtcccactcgagggccgccagtgccctttggaataacatgctggaacccgtcggtcagaaaaccacgcgccataagtttgagaacaaaattaacatcacctgcccaaatcaagtacaaccatttctccgaacatataaaaattctatgcagggccacggaacatggctgccttgccgagatagagcaccgagcgcccttcatccaaccagtgtgcatgcgttacggccagcagacatacaggtcgtggcagcgctgggagactcactgaccgctgggaacggtattggatctaagccggatgacctgcccgacgtgacgacacagtataggggcctgtcctaccgagagtctaagcccgggttcctgagcgatagttgggtgtccaaatctaatcgaaaatgtacgcgcaaagcaccgaacccgtag

SEQ ID NO: 128688 - DNA, 4344 bp, synthetic construct
  misc_feature 1..4344: note = Description of Artificial Sequence: Synthetic coding sequence
  source 1..4344: mol_type = other DNA
atgggactacgacctggaatattcctgcttgagctgttgctccttttgggacagggcaccccgcagattcacacttccccaaggaagtccactctcgagggacagctttggcccgagactcttaaaaattctccttttccgtgcaatcctaataagctgggagtgaacatgccctccaaatcggtacactctctcaaacctagcgatatcaagtttgtggccgctatcggcaatctcgaaattccaccagaccctggaacaggcgacctggagaagcaggactggaccgaaaggccccagcaggtctgtatgggagtgatgactgtgttgtcagacattattcgctatttctcaccctcggtgcccatgcccgtttgccatactggcaaacgggtgattccacatgatggggccgaggatctgtggatacaggctcaggagctcgtgcgcaacatgaaagagaatcttcagctcgacttccagtttgactggaaacttattaatgtgttctttagcaacgcgagtcagtgttacctttgcccctctgcccagcaggccccatcactgtccactgtactgctgtcccagaacgggctggcagccggaggcgtggacgagcttatgggcgtcctggattatcttcagcaggaggttccccgggcttttgtaaacctggtggacctctccgaagttgcggaagtgagtcgtcagtaccacggaacctggctttcccctgcgccagagccgtgcaactgcagtgaggaaactactaggctcgcaaaggttgtgatgcagtggtcctatcaggaagcttggaacagtttgctggcttcctctcggtacagcgaacaagagtcatttacggtggtgttccaaccatttttttacgagaccacccctagtctccatagtgaggatccacggctccaggatagcaccacactcgcttggcacctgtggaatcgcatgatggagccagcaggcgagaaagatgaacctctttctgtcaaacatggaaggccaatgaagtgtccttctcaggagtctccttacctgttctcatatagaaattcaaactatctcaccaggctgcaaaaaccgcaggataaactggaggtccgcgaaggcgctgagatccgctgtccagacaaggacccatctgacaccgttcctacgtccgtccacagactcaaacctgccgacatcaatgtaataggtgccctcggcgattctttgacagctgggaatggagccggaagcacccctgggaacgtcctcgatgtgttgacgcagtatcgtggcttgtcctggtcagtcggtggtgatgagaatatcggcaccgtcaccaccttagccaatatcctgagggagttcaaccctagtctcaagggcttttccgtgggaactgggaaggagacgtccccaaacgccttcctaaatcaggccgtcgccgggggccgtgctgaagatctgccagtccaagccaggcgcctggtggatttgatgaagaatgatactcgcattcacttccaggaggattggaaaattatcacgctgtttataggaggcaacgatttgtgtgacttttgtaatgacttggtcccacgcgccttcgttaacctcgtcaccgtgctggaaattgtcaatctcagagagctgtaccaagaaaagaaggtgtactgtccccggatgatactgagaagtctctgcccatgcgtcctgaaattcgacgataattccacggaacttgcaactctaatcgagtttaataagaagtttcaggagaagactcatcagctgatcgaatccggccgctacgacacacgggaggacttcactgtggtagtgcagcccttttttgaaaacgtggatatgcctaagacttctgagggactccctgataattcgtttttcgcgcctgactgcttccacttttcttctaagtctcatagccgagcggcttccgccctgtggaataatatgctcgaaccggtcggacagaagacaacaaggcacaagtttgagaataagatcaacatcacctgccccaaccaggtgcagccctttctgcggacttacaagaattcaatgcagggccacgggacatggttgccctgccgagaccgcgcccccagtgctctgcaccctacgagtgttcatgcactccgaccagctgacatccaggttgtggctgcactgggcgattccctgacagctggtaacggtatcgggtcgaaaccagacgatctacctgacgtcacaacccagtacaggggcctgtcatacagtgctggaggggacgggagcctggaaaatgtaactacacttcctaacatcttaagggaattcaatagaaatctgaccggctacgccgtgggcaccggggatgctaatgacactaatgccttcttgaatcaggcagtacctggagcaaaggcagaggacctgatgtcccaggtgcagactctgatgcagaagatgaaggatgatcacagggttaactttcacgaggactggaaggttatcacggttctgattggcgggtccgatttatgcgattactgtacggatagtaatctctattctgccgccaactttgtccaccatctccgcaacgcgctggatgtcctgcaccgggaagtcccgcgggttctcgtgaaccttgtggactttctcaacccaacaattatgaggcaggtcttcttagggaatcccgacaagtgccctgtccagcaggcctctgtcctctgtaactgcgttctgacattaagggaaaattctcaggagctggcgcgacttgaggcattctccagggcctacagaagttccatgcgggagctcgtaggtagcggtagatacgacacacaggaagactttagcgtcgtcctgcagcccttcttccagaacatccaattaccggtgctcgccgatgggctacccgacacaagcttctttgcgccagactgcattcaccctaatcagaagtttcactctcagcttgcgagagccctctggacaaacatgttggaacccctggggagtaaaacagagaccttggatctgagagccgaaatgcctataacatgccccacacaaaacgagcctttcttgaggactccccgcaattcaaactacacctaccccattaagcctgccattgaaaactgggggagtgattttctttgtactgagtggaaggcctctaattcagtaccgacttccgtccatcaattgaggcccgccgatataaaggtagtggccgctctaggggactcactcactacagccgtaggcgcccggccaaacaactcctctgatctccctaccagttggaggggactgagctggtcaatcggaggcgatggcaacttggaaacccacaccacgctgccaaatatcttgaagaaattcaacccgtacctgctgggattcagcacaagcacatgggaagggactgctggtctgaatgtggcagcggagggagctagagcccgcgatatgccagcccaggcctgggatttagtggaaagaatgaaaaactctccagatataaacctcgagaaggactggaagcttgtcactctgttcatcggcgtgaatgatttatgccattattgcgagaatccagaggcgcacctggcaacagaatacgtccagcatatccaacaggcccttgacattctgtccgaggaacttcccagggcttttgtcaatgttgtggaggtgatggaattagcatcactgtatcaggggcagggggggaagtgtgctatgctggctgcgcaaaataattgtacctgtctgaggcattcccagtcttctctggagaagcaggagctaaaaaaagttaactggaatctacagcacggaatcagttcctttagctactggcaccagtatacacaacgggaggattttgccgtcgttgtgcagccatttttccaaaacaccctcacgccacttaacgagcggggcgatacagaccttacatttttttccgaggactgtttccacttctcagatcgaggacatgccgagatggcaatcgccctgtggaataatatgctggagcccgtgggtaggaaaaccacaagtaataacttcacacactctcgcgccaaactcaaatgcccatccccagagagcccgtatctgtatacactgcgcaatagtcgcctcttgcccgatcaggccgaagaagccccggaggtgttgtattgggccgtgccagtcgcggcaggcgtgggtctcgtggttggtataattggaactgtggtttggaggtgtaggagggggggccgacgcgaggacccaccgatgtccctccggacagtggccttatag

SEQ ID NO: 128689 - DNA, 1272 bp, synthetic construct
  misc_feature 1..1272: note = Description of Artificial Sequence: Synthetic coding sequence
  source 1..1272: mol_type = other DNA
atgcccataacttgcccaacccagaacgaacccttcttgcgaactccccggaatagcaactatacatatcccatcaagcccgccatcgaaaactgggggtcagactttctctgcactgaatggaaggcttccaacagtgtcccaacttccgtgcaccagctcagacccgcagatattaaggtagtagcagccctgggcgactcattaactacagccgtgggcgccagacctaacaattccagcgacttaccaactagttggaggggactgagctggtcaattggcggtgatggaaaccttgaaacccatacaacactgcctaacattctcaaaaagttcaacccgtacttgctgggcttctctacgtccacgtgggaaggtacagccggtctgaatgtagctgccgaaggggcacgggcacgcgatatgcctgcccaggcttgggatttggttgaacggatgaagaacagtcccgacatcaacctggaaaaggattggaagctggtgaccctttttatcggcgtgaatgatctctgtcactattgcgagaaccccgaagcccacctggctactgagtacgtgcagcacatccagcaggcacttgacatccttagtgaagaattgccccgagcatttgttaacgtggtagaggtcatggaactcgcctcgttatatcaaggccagggcgggaagtgcgccatgttagcagcacaaaacaactgcacatgtctacgacacagccagagcagtctagagaagcaagagttgaagaaggtgaactggaacctgcagcatgggatctcaagcttctcctactggcaccaatacacccaacgggaggatttcgccgttgtggtgcagcctttttttcagaacacactcaccccccttaatgagaggggcgacaccgatttaactttcttctcagaggattgctttcacttttccgatcggggccacgctgagatggctatcgcactctggaacaatatgctggagccagtgggacggaagactacgagtaacaattttactcatagtcgggcaaaacttaagtgtcctagccccgaatcaccatacctttacacactcagaaattccaggcttctccccgatcaggcagaagaggccccagaggtcttgtactgggccgtgccggtggccgccggagtcggacttgtagtcggaattattggcaccgtcgtctggaggtgtaggcgcgggggccgaagagaagacccaccgatgagcctcagaacggtcgctttgtag

SEQ ID NO: 128690 - DNA, 3504 bp, synthetic construct
  misc_feature 1..3504: note = Description of Artificial Sequence: Synthetic coding sequence
  source 1..3504: mol_type = other DNA
atggccggcgcccagcctggcgtgcacgccctccaactcgagccccctacggttgttgaaactcttaggcgcggtagtaaatttatcaaatgggacgaagagaaattaatgacagtggttagcggtcctgaccctgtaaacacagtctttctcaactttatggctgttcaggacgacactgcaaaggtctggtctgaggaactctttaagcttgccatgaatatcttagcacagaacgcatcaagaaatacttttctacgtaaggcttatacgaagctgaagctgcaggtgaaccaggacggtaggatccccgtgaaaaatatcttgaaaatgttttctgccgacaaaaaacgcgtagaaaccgctctcgaatcttgtggactgaaatttaacagaagtgagtccattaggcctgacgaattctctctggagattttcgaaagatttctcaacaaactgtgcttgcggcccgatatcgacaaaatactcctggaaatcggagccaaaggaaagccatatcttacattagagcagctgatggactttatcaaccagaaacagcgtgatccccgcttaaatgaggtcctgtacccacctttgaggccctcgcaggcaaggctccttatcgagaaatacgagcccaaccagcagttcctggagagagaccagatgtccatggagggattctccagatatctgggtggggaggagaacggcatcctgccattagaagccctcgatctgtccactgatatgactcagccactttccgcttacttcatcaattcgagccacaatacctacttaacagccggccaactggcgggcacctcttcggtggagatgtaccggcaggctctgctatggggctgccgctgcgttgaactcgacgtatggaaagggcgaccccctgaagaggaaccgtttattacccacgggtttaccatgacgaccgaggtacccttacgagacgtactcgaggctatcgcagaaaccgcctttaagaccagcccctaccctgtgatacttagtttcgaaaaccacgtcgactctgcgaaacaacaggctaagatggctgaatattgcagatccattttcggagacgccctcttgatcgaacccctagataagtatcctctggcccccggagtgccactgccgagtccgcaagacctgatgggtagaatccttgtgaagaacaagaagagacatagaccctccgctggcggtccagacagcgccggacgcaagaggcctcttgagcaatcgaactccgcactgtcagagtcatcagcagctacggagccctcctctccccagctcggcagcccatccagcgactcttgtccgggactatcgaatggtgaagaagtgggattggagaagcctagcttggaaccacagaaatctcttggagatgaagggcttaacagaggcccatatgttctgggacctgcagatcgggaggatgaagaagaggacgaggaggaggaggagcagacggaccctaaaaaacccacaacggatgaaggcactgctagtagtgaggtgaacgccaccgaagagatgagtaccctggtgaactacattgagcccgtgaaattcaaatccttcgaggcagcccgcaagaggaataagtgttttgaaatgtcttccttcgtggaaacaaaagcaatggagcaactgacaaagtctcccatggagtttgtggagtataacaagcaacaacttagtcggatttacccaaaaggcactagggtcgactcctcgaattacatgccacagctcttctggaatgtgggatgtcagttagtggctctaaacttccaaacactggatgtggctatgcagttgaacgccggcgtttttgagtataacggccgttctggatatttactgaagcctgagttcatgcggcggcccgataaaagtttcgaccctttcaccgaagtcatcgtcgacggaattgtcgccaatgccttgcgggtgaaagtgatatccggccagtttctgtcggaccgcaaagtggggatttatgtcgaggtggacatgtttggactgcccgtggacaccaggcggaagtatagaacccgcacctcacagggaaacagcttcaacccagtatgggatgaagagcccttcgactttccaaaggttgtacttccaacactggcgtcactccggatcgcggcctttgaggagggcggcaaatttgtcggtcaccgaatactcccagtaagtgctatcagatcaggttatcactatgtatgtctacgtaacgaggccaaccagccactttgcctccccgcacttctcatctacacagaggcctccgattacataccagacgatcaccaggactatgcggaggccctcatcaacccgattaaacacgtgtcgctaatggaccagagggccaggcaattggctgcgctgattggggagtccgaggcccaagcagggcaggagacgtgccaagatacccagagtcagcagctcgggtcccagccatcaagtaacccgacgcctagcccactagatgcctcccctagaagacccccaggacctaccaccagtccagcttctacttctctgtcctcaccagggcagagagacgacttgattgcgagcatcctgtcagaggtggcccccacaccactggacgaattgcgcggccataaagctctggtgaaactcaggtcacgccaggagcgggatctgcgcgaactgaggaagaagcaccagcgtaaagccgtgactctgaccaggcgtctcctggacggactcgcgcaggcgcaagcagaagggcgatgccggctaagaccaggcgccctgggaggcgcagccgatgtggaagacaccaaggaaggtgaggatgaagctaaacgctatcaagagtttcagaataggcaggtgcaatcccttcttgagttgcgtgaagctcaggtcgatgctgaggcccagcgaaggctggaacatttgagacaggcgttgcagagactgcgagaggttgtcctggacgcgaataccacccagttcaaacggttgaaagaaatgaacgagagagagaagaaggagctgcagaagatcttggatcgcaaacgccacaacagtataagtgaggcaaagatgagagataaacacaaaaaagaggccgaacttaccgagatcaatcggcgacacatcaccgaatccgtcaatagcatccgacgactagaggaagcccagaaacaaaggcatgatcgcctggtggctggccagcagcaggtcctgcagcaactggctgaagaagagccgaagctgttggcccaactcgcgcaggagtgtcaggagcagagagctcggttaccccaggaaatccgtcgttcattgctcggcgaaatgcctgaaggcctgggcgatggccctcttgtcgcctgcgcaagcaacgggcacgcccccggatctagtggtcacctatccggtgctgactccgaatctcaggaagagaacactcaactgtag

SEQ ID NO: 128691 - DNA, 3651 bp, synthetic construct
  misc_feature 1..3651: note = Description of Artificial Sequence: Synthetic coding sequence
  source 1..3651: mol_type = other DNA
atggctggcgcacaacctggcgttcatgccctgcagctgaagcctgtgtgcgtgtccgatagtttgaaaaaagggacaaaattcgtgaaatgggacgatgactccacaattgtaacccccatcatcttaaggacagatccacagggcttcttcttctattggactgatcaaaataaagaaacagaactgctggacctatcactagtcaaggacgcccggtgcggcaggcacgccaaggccccaaaggatcccaagctacgagagttactggatgttggcaacattggccgactggagcagcgcatgatcaccgtcgtgtatgggcccgatctcgtaaatatatcacacctgaacttggttgccttccaagaagaggttgccaaggagtggaccaacgaggtcttttcactggctaccaacctcctggcccagaacatgagcagggatgctttcttggagaaagcctacactaaactgaagttgcaggtgactccagaaggcagaattcctctgaagaacatctaccgcctgtttagcgccgatcgcaagagggtggaaacagcacttgaagcatgcagtctcccaagctccaggaatgattccattcctcaggaggacttcaccccagaagtgtatcgggtcttccttaacaatctgtgtccccgccccgagattgataatattttctcggagttcggcgccaagagtaaaccctacctgaccgtcgatcagatgatggactttatcaacctgaaacagcgcgatccaagattgaacgagatcctctatcctccactgaagcaagagcaagtgcaggtgttgatcgaaaagtacgaacctaacaattctctggctagaaagggccagatctccgttgacggcttcatgaggtacctctccggcgaggagaacggcgttgtctctccagaaaaactggatctaaacgaggacatgtctcagccccttagccactacttcatcaactccagccataatacctatttgaccgccggtcagctggctggtaattcgagcgtggagatgtataggcaggtgttgctcagcggatgtcgatgtgtcgagctggattgttggaagggcagaacagctgaagaagaaccggtgataacccacggtttcaccatgaccacggagatcagtttcaaggaagtcattgaagcaattgctgaatgtgctttcaagacatccccatttcccatcctgctgagcttcgaaaaccacgtggactcccctaagcagcaagcaaagatggcagaatactgtcgtttgatcttcggtgatgctctcctgatggagcctctggagaagtaccccctcgaatctggggtgccgttgccttctcctatggatttaatgtataagattctggtgaagaacaagaagaagtcacataagtcttccgaaggctcaggtaagaaaaaactgagtgaacaagcttctaatacctattcagactcttcctctatgttcgaacccagttcaccaggcgccggggaagccgataccgagagtgatgatgatgatgacgacgatgactgtaagaagagcagcatggacgagggcacagctggaagcgaggccatggccactgaagaaatgagcaaccttgtcaactacatacaacccgtaaaattcgagtcctttgagatttctaaaaagcgtaacaagagttttgagatgagctcatttgtcgagacaaaaggcctggaacagcttaccaagagtcctgtcgaatttgtcgagtataacaaaatgcaactctctagaatatacccaaaaggcacacgagttgactcctcaaactatatgcctcagctgttctggaacgctgggtgccagatggtagccctgaatttccagaccatggacttggctatgcaaattaatatgggcatgtatgaatacaacggaaaatcaggttaccgcctcaaacccgagttcatgcggaggcctgataaacacttcgatccttttacggagggaattgtggacggaatcgtggctaatacactgtcagtgaagataataagcggacagttcttaagtgataagaaggtaggtacatacgtagaggtcgacatgttcggattgcctgtggacacgcgtcgtaaggccttcaaaacaaaaacgagtcagggcaacgcagtcaatccggtgtgggaagaggaacctatcgttttcaaaaaagtcgttctgcccaccctggcatgccttcgcatcgctgtgtacgaagagggtgggaagttcatcgggcatcgaattctgccagtgcaagccattagaccaggataccattacatctgcctgagaaacgagagaaaccagccactgacactccccgccgttttcgtctatatcgaggtaaaggactacgttccggacacatacgcagacgtgattgaagcattatccaatcccatacgctacgtaaatctgatggaacagagagccaaacaactggcagctcttaccctggaagatgaggaggaggttaaaaaggaggcagaccccggagagacaccatctgaagcacccagcgaggcgcggactacaccggccgaaaacggggtgaaccacacaacaactcttacgcccaagccaccgtcgcaggccctgcatagtcagccagcgccaggatctgtgaaggcccctgcgaagaccgaggatcttatccagagcgtccttacggaggtagaagcacagacgattgaagaattaaagcaacagaaaagcttcgtaaagttgcagaaaaagcattacaaggagatgaaggatcttgtgaagcgtcaccacaaaaagactacagatttgattaaagaacatactactaagtacaatgagatccaaaacgactacctgcgacgcagggctgctctggaaaaaagcgcaaagaaagattctaagaagaaatcagaaccctcctcaccagatcacggctcttccacaatcgaacaggaccttgccgctctggatgccgagatgacccagaagcttattgatttgaaagataagcagcagcagcaactcctgaatcttcggcaagagcaatactattctgaaaagtaccaaaaaagagaacacattaaactgctcatacagaagcttacagatgtggcagaggaatgccagaacaaccaattgaagaagctgaaagagatttgcgagaaggaaaaaaaagagctgaaaaaaaagatggacaagaagcgccaggaaaagatcaccgaagcgaagtccaaagacaaaagtcagatggaagaggaaaaaaccgagatgatccgcagttatattcaagaagttgtccagtatataaagagacttgaagaagcccagtcaaaacgacaggagaagctggtggagaaacacaaagaaatccggcagcagatattggacgaaaagccaaagctgcaggtggagcttgagcaggagtatcaagataagttcaaacgactccccctcgaaatcctggaattcgtgcaagaggccatgaaggggaaaatcagcgaggacagcaatcacggatctgctccactgagtctctcgtcggaccccggaaaagtgaaccataagacacctagctccgaagagctggggggcgacatccctggaaaggaattcgacaccccactgtag

SEQ ID NO: 128692 - DNA, 672 bp, synthetic construct
  misc_feature 1..672: note = Description of Artificial Sequence: Synthetic coding sequence
  source 1..672: mol_type = other DNA
atgcgacgcccagataagcactttgacccttttacagagggaattgtagatggtatagtagcaaacacattatcagttaagataattagcggccagttcttgagcgacaaaaaagtggggacctatgtagaggttgatatgttcgggctccctgttgatacaaggcggaaggcattcaagacaaagacctctcagggcaatgctgttaaccctgtgtgggaagaggaacctattgtcttcaaaaaggtggtactgccaaccttggcatgcttgagaatcgctgtttacgaggaaggaggtaagtttattggacatagaatccttcctgtgcaggccataagaccaggataccattatatctgtcttagaaacgaacgcaaccagcccctgacattgcctgccgtgtttgtgtatatcgaagtgaaagactatgtccctgatacctacgccgacgtaatagaagccctctctaatcccattcggtacgtcaacctcatggaacagagagccaagcaactagcggccttaactttggaagatgaggaggaggtcaagaaggagggcggcttcctgcatgacgagattatgaggctaacacggaatactctggagaaacttatggctttgcccctcactcacgtcgtgccgatacagtcaaagatgctgtcatag

SEQ ID NO: 128693 - DNA, 3522 bp, synthetic construct
  misc_feature 1..3522: note = Description of Artificial Sequence: Synthetic coding sequence
  source 1..3522: mol_type = other DNA
atggctggcgcacagcccggggtccacgcgttacagctcaagccagtgtgcgtgtccgacagtctaaagaagggcaccaaatttgtgaaatgggacgatgatagcacaatcgtgacccccatcatccttcgtaccgatccacaagggtttttcttttactggactgatcagaataaggagacagaactgctggatctctctctggtgaaggacgcccgctgcggaagacatgctaaggctcctaaggacccaaaattacgggaactactcgacgtgggaaatatcggccgtctggaacagaggatgattacagtggtctacggccccgatctagtaaatataagtcacctgaaccttgttgcctttcaagaggaagtggccaaggaatggacgaatgaggtgttcagcctggcgactaatctgctggcgcagaatatgtcgcgggatgcttttctggaaaaggcttacactaaactgaagctacaggttactcctgagggtaggattcctctgaaaaatatctatcgcctgttttcagctgaccgcaagcgagtggaaaccgcactggaggcttgctcactcccgtccagtcgaaacgatagcattccccaggaagatttcactccagaggtttaccgagtgttccttaataacctgtgcccccggccagaaattgataacatttttagcgaattcggcgctaagtccaagccatacttaactgtggaccaaatgatggacttcataaatcttaaacagcgcgaccccagattgaatgagatcctttatccacctcttaagcaggagcaggtgcaagtgctgattgagaaatacgagcccaataattctctggctcgtaaaggccaaatcagtgtcgatggatttatgaggtacctgagcggagaggagaatggagtggtttcaccggaaaagctggacctaaacgaggacatgagccagcctctttcacactactttattaactcttcgcacaacacctacctgaccgctggccaattggccggaaactcttctgtggaaatgtaccgacaggtactcctgtctgggtgcagatgcgtggaacttgattgttggaaagggcgaaccgccgaggaggagccggtgattactcatggctttactatgacaacagagattagtttcaaagaagtgattgaagccatcgccgaatgcgcctttaagacaagccctttcccaattctcttatcctttgagaaccacgttgattcaccaaaacagcaggcgaagatggctgagtattgtcggttaattttcggggacgccctgctaatggaacctctggaaaagtaccccctggagagtggggtccccctgcccagcccaatggacctcatgtacaagatactggttaaaaacaagaagaaatcccacaagagcagcgagggctcaggtaagaagaagctaagcgagcaagcctctaatacttatagcgactcgtcttctatgtttgaacccagctctcctggtgctggggaggctgacactgagtccgacgacgacgacgatgatgacgactgtaaaaaatcatcaatggacgagggcacagctggctctgaggccatggccactgaagagatgtccaacctggtgaactatattcagccagtgaaattcgagtcttttgaaatttcaaagaagcgcaataagagcttcgagatgtcatcatttgtggagaccaaaggattggagcaactgacaaagagcccagtggagttcgtcgagtacaacaagatgcagctgagtcgcatttacccgaagggtactcgagttgatagctccaattacatgcctcagttgttttggaatgcgggatgtcagatggtggccctgaactttcagactatggatctggcgatgcaaatcaacatgggtatgtacgagtacaacggcaaaagtggttataggctcaagcctgagttcatgaggcggcccgataaacattttgaccctttcacggaaggcatcgtggacggaatcgttgccaacaccctgtccgtgaaaattatatctggccagtttttgtctgacaagaaagtgggcacttatgttgaagtagacatgttcgggttgccagtggacaccagacggaaggcttttaaaacgaaaacctcccaggggaatgctgtgaaccccgtgtgggaggaggaacctattgttttcaagaaagtggttcttcccactctggcttgccttagaatcgccgtttacgaagagggtggcaagttcatcggtcaccgaatactgccggtgcaagccatcagacctggataccactacatttgcttgaggaatgagcggaaccagccacttaccctgccggcagtctttgtttacatcgaagtgaaagactatgttcccgacacatacgctgacgttattgaggcgttgtccaatccaatccggtatgtcaacctaatggaacagagggcaaaacaactcgcagccctgacccttgaagatgaggaagaggtcaaaaaggaagctgatcctggagaaacaccttctgaggccccgtctgaggcacggactacacccgccgagaatggcgttaaccatacgaccaccctgacaccaaagcccccgtcccaggcgcttcacagtcaaccggccccaggtagcgttaaggccccagcaaagacagaagaccttatccagtccgtcttgactgaggtcgaggcccagaccattgaagaactcaaacagcaaaagagtttcgtcaaacttcagaagaagcattataaggagatgaaggatttggtaaagcgccaccacaagaagacaaccgaccttatcaaggaacacacaacaaagtataacgagatacagaatgattacctcagaagacgggcagcactggaaaagagcgctaaaaaagatagcaagaagaagagcgaaccttcctctcccgatcatggctcctccactatagagcaggacttggccgcgctggacgccgaaatgactcagaagctgattgacctgaaagataagcagcagcagcagctactgaacctgcgccaagagcagtactactcagagaaatatcaaaagcgagaacacatcaagctcttgatccaaaaacttactgacgtcgccgaagaatgtcagaacaaccaactgaagaaactcaaagaaatctgcgaaaaggaaaaaaaggagctaaagaagaagatggataagaaaaggcaagagaagattaccgaagccaaaagtaaggacaagagccagatggaagaggagaagacagaaatgatccggtcatacattcaagaggtggttcagtacattaagcgactcgaagaagcccagtccaaacggcaagaaaaattagtcgagaaacacaaagagatacggcagcaaattctggacgagaaaccaaaaggtgagggatcttccagctttctgagtgagacctgccacgaagacccttcagtgagccccaacttcacaccaccgaatccacaggcattgaaatggtag

SEQ ID NO: 128694 - DNA, 3522 bp, synthetic construct
  misc_feature 1..3522: note = Description of Artificial Sequence: Synthetic coding sequence
  source 1..3522: mol_type = other DNA
atggccggggcgcagccaggagtccatgccctccagctgaagcctgtgtgcgtatccgatagcttgaaaaaagggacgaagtttgttaagtgggacgatgactctaccatagtaacacctataattctccggacagacccccagggtttcttcttttattggactgaccagaacaaagagactgaacttctcgacctgtcactcgtgaaagacgcgcgttgtgggaggcacgctaaagcccctaaggacccaaagctgcgggagctgctggacgtgggcaacattgggagactggagcaaagaatgattactgtggtgtacggcccagacctagtcaacattagccacctcaatctcgtcgcgttccaggaagaggtcgccaaggagtggaccaacgaagtattctctctggccacgaatcttctggcccagaatatgagtagggatgccttcctggagaaggcctataccaaactcaagttacaggtgacaccggaggggcgcatccctctgaaaaacatatatcgccttttttcggccgaccgcaagagagtcgaaaccgcccttgaagcttgcagcctgcccagcagccgcaatgatagcattccccaggaagatttcactcccgaggtgtatagggtttttctgaacaatctttgcccccgcccagaaatagacaatatcttttccgaatttggagccaagagcaagccgtacctaaccgttgaccagatgatggactttattaatctcaagcagcgggatccccgcctgaacgagatcctctatccccccctgaaacaggagcaagttcaggtgttgatcgagaaatacgagccgaataactcccttgccagaaaaggccaaatatccgttgatgggttcatgaggtatctttcaggggaggaaaatggagtcgtctcccctgagaaacttgatctgaacgaggacatgagccaaccgctgtcccactattttattaacagctcacataacacatacctgactgccgggcagctggcaggcaacagctcagttgaaatgtaccggcaggtgctcctgtcggggtgtagatgcgtggagctcgattgttggaaagggcgtaccgccgaagaggagcctgttattacgcatggcttcacaatgacaactgaaatttcatttaaggaagtgattgaggccatcgcggagtgcgcctttaagaccagcccattcccaatacttctgtcattcgagaaccacgtggactcacccaagcagcaggccaaaatggcagagtattgtagactgattttcggcgacgcccttttaatggagccactggagaaatatcctctggagtctggcgtgccacttccctcccccatggatttaatgtataagatcctggttaagaacaagaagaagtcacataagtcatccgaaggcagtgggaagaagaaactatcagagcaggcttcaaacacttatagtgattcttctagtatgtttgaaccctctagccctggagccggagaggccgacacagagagcgatgatgacgacgacgacgatgactgtaaaaagagctctatggacgagggcaccgcaggatcagaagctatggctacagaagagatgagcaatctggtgaattacatccagcccgtaaagtttgagagcttcgagatcagtaaaaagagaaataaaagtttcgaaatgagtagctttgttgagacgaagggcctggagcagctgacgaaatcccctgtcgagttcgtcgagtacaataagatgcagctgtctcggatctatcctaaggggacccgagtcgactctagtaattatatgccacagctcttctggaacgcaggttgtcaaatggttgccctcaacttccagactatggatctggccatgcaaataaacatggggatgtatgaatacaacggcaagtccggatataggttgaagcctgagttcatgaggcgacctgataagcactttgatccttttacagagggaatagtggacggcatcgtcgccaacacgctttccgtgaagattatatctgggcagttcctatccgataaaaaagtgggcacttatgttgaggttgacatgtttgggttgccggtggacacgcggcgcaaagcctttaaaacaaaaacctcccaaggcaacgccgtgaatccagtatgggaggaagaaccgatcgtgtttaaaaaagtcgttttgccgactctggcttgtctgcgcatcgctgtgtatgaggagggcggtaaattcattgggcacagaatcctgcctgtgcaagccatccgccctggctaccattatatctgtctgcggaatgagcgcaaccagccgctgaccttgcccgccgttttcgtgtatattgaggtgaaagattatgttccggacacctatgctgatgtcattgaggccctgagcaaccccatccgctatgtgaatttgatggagcaacgagccaaacagcttgcagccctgacactggaggatgaagaggaagttaaaaaagaggcggaccctggcgaaacgcctagcgaggcacctagcgaggcccgcaccacccctgctgaaaacggggtgaatcataccacaacattgaccccaaagcctccctcacaagcgctgcatagccagcccgccccaggttccgtaaaagcaccagcaaagactgaggatctaatccagagcgtgctgactgaagtggaagcccagaccatagaggaattaaagcagcagaaatccttcgtgaaacttcaaaaaaaacactataaggaaatgaaggaccttgtgaaacgacaccataagaagacaacggacctgatcaaagagcacaccactaaatataacgagattcagaatgactatctcaggaggagggcagcacttgaaaagtccgcaaaaaaggactctaaaaagaagtctgagccttcctctcctgaccatggtagttctacgattgagcaggatctggcagctcttgacgctgaaatgacgcagaaactgatcgaccttaaggataagcaacagcagcaattgctgaatctccggcaggagcagtactacagtgagaaataccagaaacgggagcatatcaagctgctgattcagaagctcacagacgttgccgaagagtgccagaataaccagcttaagaagctgaaggaaatatgcgaaaaggagaaaaaagaactgaaaaaaaaaatggacaaaaaaaggcaggagaaaatcaccgaagctaagtctaaggataagagtcaaatggaagaagagaaaacagagatgatccggtcctacatacaggaggtggtgcagtacataaaacggctggaggaggctcaatccaagaggcaggagaagttggtggagaaacataaagagatcaggcaacagattctcgatgaaaagcctaagggagaaggatcctcgagctttctctcagagacctgccatgaagatccatcagtctctcctaacttcacccccccaaacccccaggcacttaagtggtag

SEQ ID NO: 128695 - DNA, 699 bp, synthetic construct
  misc_feature 1..699: note = Description of Artificial Sequence: Synthetic coding sequence
  source 1..699: mol_type = other DNA
gccggagctcagccaggggtgcatgcactgcagctcaagcccgtgtgcgtgagtgattccctgaaaaaagggaccaaattcgtcaagtgggatgacgacagtaccattgtgacccccattatactccggaccgacccgcagggatttttcttttattggaccgatcaaaataaggagactgagctcctcgacctctccctagtcaaagacgctcggtgcggaagacatgccaaggcaccaaaggatccgaaactcagggaattgctggatgtgggcaacattggtcggttagagcaaaggatgatcacggtggtgtacgggccagacctcgtaaacatttcccacctgaatttggttgctttccaggaggaggtcgctaaagaatggactaatgaagtcttcagcctggccacgaacctcctggctcagaatatgtcccgagacgcttttttagagaaagcttacaccaagctcaaactgcaggtgacacccgagggacgcatcccgctgaaaaatatttatagactgttcagcgcagaccggaagagagtggagaccgctctggaagcttgtagccttccatcttctcgggtggagaaggcgaacgaggcagcaaagtcagaacagagttgcggtaaggccccccccaagcatttccacctgcacttcataaaacagaacaaaatgctcgaaccctag

SEQ ID NO: 128696 - DNA, 93 bp, synthetic construct
  misc_feature 1..93: note = Description of Artificial Sequence: Synthetic coding sequence
  source 1..93: mol_type = other DNA
gaggaggcccagagtaagcggcaagaaaagctggttgagaagcacaaagagattcggcagcagatcctggatgaaaaacctaaggtaccttag

SEQ ID NO: 128697 - DNA, 591 bp, synthetic construct
  misc_feature 1..591: note = Description of Artificial Sequence: Synthetic coding sequence
  source 1..591: mol_type = other DNA
ataattagtgggcagtttctctctgataagaaggtaggaacttacgtagaggttgatatgtttggcctccctgttgacactagaagaaaagcattcaaaactaagacatcccaggggaacgctgttaatccggtatgggaggaggagcctatagtgtttaaaaaagttgtcctacccaccctggcctgcctccgcatcgcagtgtacgaggaaggcggcaagtttattggacataggatccttcctgtgcaggccatacggccaggatatcattacatatgtttgcgcaacgaacgaaatcagcctctcaccctccctgcggtgttcgtctacattgaggtaaaggactatgtgcccgatacatatgccgacgttattgaggccctgagtaacccaataagatacgtgaatttaatggagcaaagagccaaacagctcgcagctcttaccctagaagatgaggaagaagtcaaaaaggagggtgggttcctgcacgatgagattatgcgccttacaaggaatacacttgaaaagttaatggcattgcccttaactcatgtcgtcccaatccagtctaagatgctatcttag

SEQ ID NO: 128698 - DNA, 3411 bp, synthetic construct
  misc_feature 1..3411: note = Description of Artificial Sequence: Synthetic coding sequence
  source 1..3411: mol_type = other DNA
actcaggatccaaaactgagggagctcctcgacgtggggaacatcggtcgcctggagcagcggatgatcacggtcgtgtatggacctgatctggtcaacatcagtcatctgaatctggtggctttccaggaagaggtggctaaggagtggaccaatgaggtcttttccctggccaccaaccttcttgctcagaatatgtcccgagatgcattcctcgagaaagcctataccaagttaaaactccaggtgacacccgaggggagaattccgcttaaaaatatataccgcctgtttagtgctgataggaaacgggtggaaacagctctcgaagcttgctctctcccttccagcagaaacgactctatccctcaggaggacttcacaccagaggtgtatcgggtcttcttaaacaatctgtgtccgcggcccgagatcgacaatattttctccgagttcggggcaaagagtaagccatatctgacagtcgaccagatgatggactttatcaacctcaaacaacgcgaccctagactcaacgagatcctgtatccccctctaaagcaggaacaggtgcaggtgctgattgaaaaatatgagccaaacaactctcttgcaagaaagggccagatcagcgtggatggctttatgagatatctatctggagaggagaatggggtcgtgagtcccgagaagctggatctgaacgaagacatgagccaacctctgagccattacttcatcaacagctcccacaacacgtacctgaccgccggtcagctggccggaaactcttccgtcgagatgtaccgtcaggtgctcctctcagggtgtcggtgtgtggagctggattgttggaaaggaaggactgccgaagaagagcccgtcattacgcatgggttcactatgacgacggagatttcttttaaggaggttattgaagctatagctgagtgcgccttcaaaacatcaccttttccaatcttgctctccttcgaaaatcacgtggattctccaaagcagcaggcaaagatggccgagtactgccgtctgatttttggcgatgccctgttgatggagcctctggagaagtatcccctcgaatctggggtgccactgccttcacctatggaccttatgtataagatcttagtgaagaataaaaaaaaatcccataagtcatccgagggctctggtaaaaaaaaactgtctgaacaggcaagcaacacttattccgattcctcctccatgttcgaacccagcagtcctggagcaggcgaggccgataccgagtcagatgacgacgacgacgatgatgactgcaagaaatcctctatggatgaaggcactgccggttcggaggcgatggccacggaggagatgtccaacctcgtgaactacatccagccggtgaagtttgagtccttcgaaatctctaagaagagaaataagtcttttgaaatgagtagttttgtcgagaccaaagggctggagcagctcacgaagtctccggtcgagttcgtggagtataacaagatgcaactatctaggatctacccgaaaggcactcgcgtggacagctctaattacatgccgcagttattctggaacgctggttgtcagatggtggctcttaatttccagaccatggatctggccatgcagataaatatgggcatgtacgagtacaacggcaagtctgggtacaggctgaagccggaattcatgcgcaggccggataagcatttcgaccccttcactgagggcatcgtggacggaattgtagctaacacgctgtctgtgaaaattataagtgggcagtttctgtccgacaaaaaggttggcacatacgttgaagttgacatgttcggcctgcccgtcgataccaggaggaaggctttcaaaaccaagactagtcagggaaatgctgtgaatcctgtctgggaggaggagccaatcgtgtttaagaaagtggttctcccaacactcgcctgtctgcgtatcgccgtgtacgaggaaggtggcaagtttatcgggcaccgcatactgccagttcaggccattagaccgggataccactatatttgtctgcgtaacgaacggaaccagccattgacactccccgccgtgttcgtgtatatagaagtgaaagactacgtgcccgacacatatgctgatgtgatcgaggcactgtctaatcctattcggtatgtaaacctgatggaacagcgggccaagcagttggcagctctgactctcgaagatgaggaggaggtgaaaaaagaggccgatcctggagaaacccccagcgaggctccaagcgaggcccgcaccacccccgcggaaaacggcgtcaaccacacgacgacacttacacctaaacctccttcccaggcattacatagccagcctgcacccggaagcgtcaaggcccctgctaagactgaagacctgatacaatcggtactgactgaggtggaagcacaaaccatcgaagaattaaagcagcaaaagagtttcgttaagctccagaagaaacactataaggagatgaaggatctggtgaaaagacatcataagaaaacgactgacctgatcaaagagcacacaaccaaatataatgaaattcagaatgactatctgaggagacgagcggctttggagaagagcgcgaaaaaggactccaaaaagaaaagcgagccgtctagtcctgatcatggatcctctacgatcgagcaggatctcgcggcgttggatgccgaaatgacacagaaacttattgatctgaaggataaacagcaacaacagctgttgaacctccggcaagaacaatattattccgaaaagtatcagaagagagagcatatcaagctgttaattcagaaattaaccgacgtggcagaggaatgccagaacaatcagttgaagaagctgaaagaaatatgtgagaaagagaaaaaggagctgaaaaagaagatggataagaagaggcaggagaagattaccgaagccaaatcaaaggacaagtctcaaatggaagaagaaaagacagaaatgatacgctcctatatccaggaggttgtgcagtacattaaaagactggaggaggcacagtcaaagagacaggaaaagctggtcgagaaacacaaagagatccgccagcagatcctcgacgaaaagccaaagctgcaggtggaactggagcaagaataccaagacaaattcaaaaggttgcctctggagatacttgaattcgtccaggaggcaatgaaaggaaagatctctgaagacagtaatcatggcagcgcccctctcagtttatctagcgatcctggaaaggtgaaccacaaaacaccgagttccgaagaacttggtggtgatattcccggtaaggaattcgacacaccattatag

SEQ ID NO: 128699 - DNA, 3282 bp, synthetic construct
  misc_feature 1..3282: note = Description of Artificial Sequence: Synthetic coding sequence
  source 1..3282: mol_type = other DNA
actcaagacccaaagctgcgggaactgttggatgtaggcaacattgggagactcgaacagcgtatgatcacagtggtatatggcccagacctagtgaacatttctcaccttaacctggtagcattccaggaggaagtcgccaaggagtggaccaacgaagtcttttcgctggctacgaacttactggcccagaatatgagtcgcgacgccttcttagaaaaagcttacaccaagctgaagctgcaggtaactccagaaggccgtatccctctgaaaaacatctacagattattctctgcagacaggaagagggtggagaccgccctggaagcatgctcactgccaagcagcagaaatgattctattccacaggaagatttcacgcctgaagtctacagagtctttctcaacaacctgtgccctaggcctgaaattgataacattttcagtgaattcggcgcaaagtctaagccttatctgactgtggatcagatgatggattttataaatctgaagcaaagggaccctcgactgaacgagatcctgtatccacccttaaaacaggagcaggtgcaggtgctgatcgagaagtatgagcccaataacagcctcgctaggaaggggcagatctccgtcgacgggtttatgcgctacctcagcggagaagagaacggcgtggtgtctccagaaaaattggatctgaacgaggatatgtctcaacctttatctcactactttataaattcgtctcacaatacttatttgactgccggacaactcgctggaaactctagtgtggaaatgtaccggcaggtgttgctcagcggatgtcggtgtgtggagcttgattgctggaaaggtcgaacagcggaggaggagcccgttattacccacggcttcaccatgacgacagagataagttttaaggaggtgatagaggcaatcgcagagtgcgcatttaaaacctcacccttcccaattctactctcattcgagaatcacgttgacagtccgaagcagcaggctaaaatggctgagtactgccgtctcatctttggggacgccctactcatggagccattggagaaatatcctctggaatccggcgtgcctctaccttctcctatggatctgatgtataagattttggtgaagaataaaaagaagagccataagtcaagcgagggctctggaaagaagaagctgtccgagcaggctagcaacacctattctgactcgtcctcgatgtttgagccttctagtcccggtgccggcgaagcagacaccgaatcagatgacgacgatgacgacgacgattgcaagaaatccagtatggacgagggtaccgcgggcagtgaagctatggcgaccgaggagatgagcaatctcgtgaactatattcagccggtcaagttcgagagcttcgagatctccaagaagagaaataagtcttttgagatgagctcctttgttgaaaccaaggggctcgaacaattgaccaaaagccctgtggagtttgtggaatataacaagatgcaactgagccggatctatccaaaggggacacgcgttgacagctctaactatatgccgcagctgttctggaatgcaggatgccagatggtggctctgaacttccagaccatggacctggcaatgcaaattaatatggggatgtatgagtacaatgggaaatctggatacaggctgaaacccgagttcatgaggcgacctgataaacactttgacccttttactgaggggatcgtcgatgggattgtagcaaacacgctgtccgtgaagattatttccggccagttcttatccgataagaaggtgggcacctacgtggaggtggatatgtttggtctgcccgtggatacaagacgcaaggcatttaaaactaaaacctcgcaaggtaacgcagtcaacccagtgtgggaggaggagccaattgtcttcaagaaggttgttctgcccactcttgcctgcctcaggatcgccgtttacgaagagggaggtaagtttatcggccatcgtatcctaccagtgcaggccatccgcccaggataccattatatctgcctcaggaacgaacgaaaccagccactcaccctgcctgctgttttcgtttatatagaggtgaaagattatgtgcctgatacttatgcggatgtgattgaggcgttgagcaaccctatcaggtacgttaacctgatggagcagcgcgcgaaacaattggccgccctgactctcgaggatgaggaggaagtgaaaaaggaggccgatcccggagagacaccttctgaagccccttctgaggctagaacgacccccgctgagaatggtgttaaccacaccaccacactgactccgaaacccccttctcaagccctacacagccagccggcacctggatccgtaaaagctccagcaaagaccgaggacctgatccagagtgtgctgaccgaggtagaggctcaaactattgaagagctgaaacaacagaaaagcttcgtaaagcttcaaaagaagcattacaaagagatgaaagatctggtgaaacggcatcataagaagaccaccgatctcatcaaggagcacacaacaaagtacaacgaaatccagaacgactacctgagaaggagagccgcgctggagaaatccgcaaaaaaggactccaaaaaaaaaagcgaacctagcagtccagaccacggttcaagcaccatcgagcaggacctggccgcgctggacgccgagatgacccagaagctgattgacctaaaggacaagcaacaacaacagttgctcaacctccgtcaggaacagtattacagcgaaaagtaccaaaagcgggaacatattaaattgctgatccaaaagctaacggatgtggcagaggaatgtcagaacaatcagctgaagaagctgaaagagatttgtgagaaagaaaagaaagagttaaaaaagaagatggataagaaaaggcaggagaagattacagaagctaaaagcaaggacaagtctcagatggaggaagagaagaccgaaatgataagatcttatatccaggaagtcgtgcagtatattaaacgccttgaggaagctcagtcaaagcgacaggaaaagctcgtagagaaacataaggagatcagacagcagatattagacgaaaaaccgaaaggtgagggctcaagctcattcctcagtgagacctgccatgaggatccaagcgtctctccaaattttacacccccaaacccacaggcgttgaagtggtag

SEQ ID NO: 128700 - DNA, 3558 bp, synthetic construct
  misc_feature 1..3558: note = Description of Artificial Sequence: Synthetic coding sequence
  source 1..3558: mol_type = other DNA
atgtctctgctgaaccctgttctactgcctccaaaagttaaggcctacctttcccagggcgagaggtttatcaagtgggacgacgaaacaactgtggctagtccagtcatcctgcgggtcgatcccaaaggctactacctctattggacctaccagagtaaagaaatggaattcttggacattaccagcatccgggacacgcgctttggaaagttcgcgaaaatgccgaagtcccagaagctgagggatgtgtttaacatggactttcccgataactcttttctgttaaaaaccttgactgtggtaagcgggcctgacatggtggacctgaccttccacaacttcgtgtcctataaggagaacgtgggtaaggcctgggccgaagatgtgctggctttagtcaagcaccccttaacagcgaatgcctcacggtcaacatttctggataagatactggtcaaactgaagatgcagctgaacagtgagggaaaaatacctgtcaagaactttttccagatgttccccgccgaccgtaagcgcgtggaggcagcgctttcagcatgtcatcttcccaaaggcaagaatgatgctataaaccccgaggacttccctgagccagtctacaaaagtttccttatgtcactatgccccagacctgaaatcgatgaaatttttacatcttatcatgcaaaagccaaaccttatatgactaaggaacacctgaccaagtttattaaccagaagcagcgggactcaagattgaatagcctgttattcccacccgcacgacccgaccaggtgcaggggctcattgacaagtacgagccatcaggaatcaatgctcagagaggccagctctcgccggagggcatggtgtggttcctgtgcgggccagaaaattcagttctcgctcaggataagttattgctccaccacgacatgacgcagccattgaaccattactttataaattcatcacataatacctatttgacagcgggacagttcagcggactgtcaagcgctgaaatgtaccgccaggtcttgctctctggatgtcgctgtgtggagcttgattgttggaagggaaagccgcctgacgaggaacccataataacacacgggttcacaatgaccacggatatctttttcaaagaggctatcgaggcaatagccgagtctgctttcaagacttctccttatcccatcatcctgtcatttgagaaccatgtggattcgccacggcagcaggccaaaatggctgaatactgtcgaaccatcttcggcgatatgcttttgacagagcctctggagaaatttcctctgaagcctggcgtaccactgccttcacccgaggatctacgaggcaaaatactgattaaaaacaaaaagaaccagttcagcggacctacctcaagctcaaaagatacgggtggcgaggccgagggttccagcccccccagcgcccccgcgggggagggcacagtctgggctggtgaggagggtacggaactcgaagaggaagaagtcgaggaagaagaggaggaagaatcggggaacctggatgaagaagagataaagaagatgcagagtgacgagggcacggccggcctggaagtgacagcctatgaagagatgtccagcctggtcaactacatccagccgaccaaattcgtatcgtttgagtttagcgcccagaagaacaggtcttatgtgatcagctcctttaccgaattgaaggcatacgatctcttatctaaagcatccgtccagtttgtggactacaataaacgtcagatgtctcgaatctacccgaaagggacgagaatggacagcagcaactatatgccacaaatgttctggaatgcgggctgtcaaatggtggctctgaattttcagaccatggacctccccatgcagcagaacatggctgtttttgagttcaacggccagagtgggtatctcctgaagcacgaattcatgcgccggcctgacaagcagttcaatcccttcagtgtggatcgaatcgacgtggtcgtcgccacgaccctcagtatcacagtgatatcaggccagttcctgtcggagagatctgtgagaacctatgtggaggtggagctgttcggcctgcccggtgaccccaagcgccggtatagaaccaaactttcaccctcgacaaattccattaaccctgtatggaaggaagagccattcgtgtttgagaagatcctgatgcccgagctcgcctcactcagggttgccgtgatggaagagggaaacaagtttttagggcaccggataattcccatcaacgccctcaattcaggataccatcacctttgtctgcactcggagtccaacatgcccctcactatgccagcattgtttatattcctggagatgaaggactacatacccggcgcttgggcagaccttacggtggcactggccaaccccatcaagttctttagcgctcacgataccaagtccgtgaagttgaaggaggcgatgggaggtctccccgagaaacctttccctctcgccagccctgttgcaagtcaggttaacggagccctcgcgccaacatccaacgggagtcccgctgctagggcaggggcccgagaggaagcgatgaaagaggcagcagagccccggacagcctctctagaagagcttcgggaactgaaaggagtggttaagcttcagcgaagacacgagaaagagctgcgcgaattggaacggcgaggagcccgaagatgggaagaactgctgcagcgtggcgccgctcaactggccgagctcggccctcctggggtgggcggggtgggagcttgcaagctgggccccggtaaaggaagccgaaagaaacgcagtctgccaagggaagagtctgccggcgcagctccgggagagggccccgagggagttgacgggagagtgcgcgaattgaaggatcgcctggagttagaactccttcgacagggcgaggaacagtatgagtgtgttctcaaaagaaaagaacagcatgtggctgaacagatctctaagatgatggagctggctagagaaaaacaggctgccgagttaaaagcactgaaagagacatcagagaacgataccaaagaaatgaagaagaagctcgaaacaaaacgccttgaacggattcagggaatgaccaaggtcacaacagataagatggcacaagagaggctgaaaagagaaatcaacaattctcatatccaagaagtagtgcaggttataaagcaaatgaccgagaatctagaaagacatcaggagaaactggaagagaaacaggcagcttgcctcgagcaaatccgggaaatggagaaacagtttcagaaagaagctctcgcggagtatgaagccaggatgaagggcttggaagcggaagtgaaggagtctgtgcgggcctgtctgagaacttgcttcccgagcgaagccaaagacaaacctgaaagggcttgtgaatgtccccctgaattatgcgagcaagacccactgatcgcaaaagcagacgcgcaggaatcaagattgtag

SEQ ID NO: 128701 - DNA, 3546 bp, synthetic construct
  misc_feature 1..3546: note = Description of Artificial Sequence: Synthetic coding sequence
  source 1..3546: mol_type = other DNA
atgagtctattaaatccggtcctgcttcctcctaaggtcaaggcttatctttcacagggagaacggtttattaagtgggacgacgagactactgtggccagtcccgtcatcctgagagtagaccccaaggggtactacctgtactggacttatcagtcaaaggagatggaattcctggatatcaccagcattcgagatacaagatttggcaagtttgctaagatgcccaaatcccagaagctgcgcgacgtgttcaacatggacttcccagacaattcatttctgctgaagacactgacggttgtgtccggccctgacatggtcgacctcacttttcataatttcgtttcctataaggagaatgttgggaaggcatgggccgaggatgttctggcacttgtgaaacaccctctcactgccaatgcctcaagaagtaccttcctggacaagatcctcgtgaaactcaaaatgcagctgaacagcgaaggcaagattcccgtaaaaaactttttccaaatgtttcctgccgaccgtaagagggtggaggcggctctgagcgcctgtcatctaccgaagggaaagaatgatgcaatcaacccagaagattttcctgaacctgtgtacaagagcttcctgatgtccctatgcccccgacccgagattgatgagatctttacctcatatcacgctaaggctaagccgtatatgaccaaggagcacctcactaaatttattaaccagaagcagcgagacagcaggttgaattctcttttgtttcctccagctcgacccgatcaagtccagggccttatagacaaatacgaaccaagcggaattaacgcacaacgcggccagttgtctccagaggggatggtctggttcttgtgcggaccagagaattctgtactagcacaggacaagctcctgctgcaccatgatatgacccagccgctcaaccactatttcatcaatagctctcacaatacttacctcaccgccggtcagttttccgggctctctagtgcagaaatgtataggcaggttttgttgtcgggctgcaggtgcgtagagctggattgttggaaaggcaagccaccggatgaggaacctattatcacccatggcttcaccatgacaaccgatattttcttcaaagaggctatcgaggcaattgcagagtcagcgtttaagacctccccctaccctattatactgagctttgagaatcacgtggacagtcctcgccagcaggccaagatggccgagtactgtcggactatatttggagatatgctgcttacagagccactcgaaaaattccccctgaagccaggcgtaccactgccaagtcccgaggacctaagggggaagattcttatcaagaataagaagaatcagttttctgggcccacaagttcctctaaggatacaggtggcgaggcagaggggtcttcaccacctagtgctcccgccgtctgggccggagaggaaggcactgaattggaagaggaggaggtagaagaggaggaggaggaggaatccggcaatctcgacgaggaagagatcaagaaaatgcagtccgatgaaggcacagcgggtttggaagtcaccgcctatgaggaaatgagctcactcgttaactatatccagcccaccaaatttgtgtctttcgaatttagcgctcaaaaaaataggtcttatgtcatatcttcattcacagaactgaaagcgtacgatctgctgtctaaggcaagcgtgcagttcgttgattacaacaagaggcagatgtctcggatatacccaaaggggacccgtatggattcaagcaactatatgcctcagatgttttggaacgcaggatgccagatggtggcgctcaattttcagactatggatctgcccatgcagcagaacatggcagtgttcgagtttaatggtcaaagcggctacctgctgaagcacgaatttatgaggcgaccggacaagcaattcaaccctttttctgtagaccgcattgatgtggtggtcgccacgaccctgagcattacagtgatcagcggacaattcctcagtgagagaagtgttagaacgtatgtcgaggtggaattgttcggcctccccggcgaccctaaacgccgctaccgcacaaagctttctccctcgacaaactccattaatccagtttggaaggaagagcctttcgtattcgaaaaaattctcatgcccgagttggcctctttgagggtagcagttatggaggaaggaaacaaatttctgggtcatcgaataattccaataaatgcccttaattcagggtaccatcatctttgccttcactccgaatccaacatgcccctcaccatgcctgcgctattcatcttcttggagatgaaagactatatacctggagcatgggcagatctgactgttgctcttgccaatccaattaagtttttctccgcccacgatactaaaagtgttaagctgaaggaagcaatggggggcctgccagagaaaccctttcccctagcttccccggtggcgtcccaggttaatggggcactggcgcccacatccaatggcagcccagcggctagagctggagctagagaagaagccatgaaagaggcagcagagccccggaccgcgagtttggaggagctacgggagcttaaaggagtggtgaaacttcagcggcggcacgaaaaagaactcagggaactcgagaggagaggcgcacgccgctgggaagagctgctgcagcggggggctgcccagctggctgagctggggccaccgggtgttggcggggtgggcgcttgcaagctggggcccggcaagggcagccggaaaaagaggtcacttccaagggaagagtcggccggtgccgcaccaggagaaggaccggagggagtagacggaagagttagagagctgaaggacaggcttgagcttgagctgctgagacagggcgaagagcagtacgaatgtgtcctgaagcgcaaagagcagcacgtagctgagcagatcagtaaaatgatggaactggcgagggagaaacaagctgccgagctcaaggcactcaaggagacttcagagaacgacacaaaggaaatgaaaaagaagttggagacaaaaaggttggagcgcattcagggaatgacaaaagtgacgactgacaaaatggcccaagagcggctgaagagggagattaacaacagccatattcaggaggtggtgcaggtgatcaaacagatgacggaaaatctcgagaggcatcaggaaaagcttgaagagaaacaggccgcctgcctggagcaaataagggaaatggagaagcagtttcagaaagaggcactggccgagtacgaagctcggatgaagggattggaggccgaggtgaaagagtcagtccgcgcttgtttgaggacatgcttcccatcagaagctaaggacaaacccgaacgcgcctgtgaatgccctcccgagctttgtgaacaggaccccctcatcgctaaggccgatgcgcaagagtcacgcctgtag

SEQ ID NO: 128702 - DNA, 3705 bp, synthetic construct
  misc_feature 1..3705: note = Description of Artificial Sequence: Synthetic coding sequence
  source 1..3705: mol_type = other DNA
atggccggcgctcagccaggggtgcatgccctccagctagaacccccaacagtggttgagactctcaggcgagggtccaaatttatcaaatgggatgaagagaccagcagcagaaatctagtgacattaagagtagatcctaatgggtttttcctttattggaccggcccaaacatggaggtggacacccttgacattagctcaattcgcgacacccgcacagggcgatacgctcgactccctaaggacccgaaaattagggaagtgttgggttttgggggccctgatgctcggttagaggagaagcttatgacagtggtttctgggccagatcctgtaaacactgtctttctcaattttatggctgtgcaagatgacacggcgaaggtgtggagtgaagagcttttcaaactggccatgaacattctggctcagaatgctagtcggaatacgttccttcgtaaggcatacaccaagctgaaactgcaggttaatcaggacggcaggatcccagtgaagaacattcttaagatgttctcagccgacaaaaagagagttgaaacagcactggaatcttgtggactgaaattcaatcgctctgagtcaattcgacctgatgaattctctttagagatcttcgaacggtttctcaataaactgtgtctgcgacccgatattgataagatcttgctggagatcggtgccaaaggcaagccttatctgacactggagcagctcatggactttatcaatcagaaacagcgagacccacgacttaatgaggtgctgtaccccccacttaggccttctcaggcacgcttgttgatcgagaagtacgaacccaaccagcaatttctagagagggaccagatgtcgatggagggattttcccggtacctcggcggagaggagaatgggatcctgcctctcgaagccctcgatctgtccaccgatatgacccagccgctcagcgcctattttattaattctagccataacacctacctgaccgctgggcaattagccgggacaagctccgtggagatgtaccgccaggctcttctgtggggatgcagatgtgtcgaactcgatgtctggaagggtagacccccagaagaggaaccatttatcacccacggcttcaccatgacaaccgaagttccattaagagatgtgctggaggccattgctgaaaccgcatttaaaacttcgccctatcccgtaatactgtcctttgaaaatcatgtggatagcgccaagcagcaggccaagatggctgaatattgccgctcaatcttcggagacgctcttctgattgagccgctggataagtatccactggctcccggggttcctctgccaagtcctcaagacttgatgggccgcatcctcgtgaaaaacaaaaaaagacacaggccatccgccgggggtccagattcagcgggacgtaaaagaccgttagagcagagcaatagtgcattgtcagagagctcagcggctactgagcccagcagccctcaactggggtctcctagcagtgactcctgtcccgggctgagtaatggagaggaggttggactggaaaagccatcattggagcctcagaagtccctgggtgatgaaggactcaacagaggcccgtatgtgctgggccccgccgatcgagaagatgaggaagaagacgaggaagaagaggaacaaacagacccaaagaaaccaacgaccgatgaggggactgcttcctcagaggtcaatgctacggaggaaatgagtactctagtgaattacatcgagccagttaagtttaagagtttcgaggctgcccggaagcggaataaatgttttgagatgtccagttttgttgaaaccaaggcaatggagcaattgacgaagagtcctatggaatttgtggagtacaataagcaacaattgagcaggatctacccaaaagggacgagagtcgattcctctaattacatgccccaactattctggaatgtgggctgccagctggtcgcactaaatttccaaactttggatgtcgccatgcagctgaacgctggggtgttcgagtacaatggccgcagtgggtacttgctgaaaccggaatttatgcgtagacccgacaaatcctttgaccctttcactgaggtcattgtggatggaattgtagccaatgcactgagggtgaaagttattagcggccaattcctgtcagataggaaagtggggatttacgttgaggtggacatgtttggcttgcccgtggataccagacgtaaatacaggacacgtacaagccaaggtaacagcttcaaccctgtctgggacgaggagcccttcgacttcccaaaggtcgtcctacccactctggccagtctacgtatagcagcttttgaggaaggtggaaagtttgttgggcaccgcatattacctgtttctgccatcaggtcgggttaccactacgtgtgcctccgcaacgaggcgaatcaaccactgtgtctgcccgccctcttaatttatactgaagcgtcagattatatcccggatgaccatcaggactacgcagaggctctgatcaacccaattaagcacgttagcctgatggaccaacgcgcccgccagctcgcagctttgatcggtgagtctgaggcacaggccgggcaggagacgtgccaggacacacaatcacagcagctggggagtcagccatccagtaaccccactccatctcctctcgatgcgtcaccaagacgaccaccagggcccactacaagccctgctagcactagcctgtcgagccctggccagcgggacgatctgattgcctccattttatcagaagtagcaccaacaccgctggacgaactaagagggcacaaagccctggtgaaactgcgatcgcgccaggagagagacctgagagaactaagaaagaaacaccagagaaaggccgtcactctcactcgacggctcctggacggactggcccaagcacaggcggaggggaggtgcagattaagacctggagctttggggggcgcagccgatgtcgaagataccaaagaaggtgaggatgaagccaagcgctatcaggaatttcagaatagacaagtccaaagcctgctagaacttagagaagctcaggtagatgcagaggctcagcgaaggctggagcaccttcggcaggccctgcaaaggctgagagaagtcgtactggacgcaaataccacacagtttaaacgtttaaaagaaatgaacgaacgcgaaaagaaagagctccagaagatcctcgaccggaagcgtcataacagcatctccgaggccaagatgagggacaagcataaaaaggaggccgagctcactgagatcaatagaaggcacattactgagtccgtgaactctatacggaggctggaagaggctcagaagcagcgtcacgaccggctcgtggctggccagcaacaggtgctccagcaactcgccgaggaggagcctaaattgttggcccaactggcacaggagtgccaggagcagagagcccgcttgccccaggagatcagaagatccttgctgggagagatgccggaaggtctgggggacggtcccctggtcgcctgtgccagtaatggccacgcgcccggatctagtggccacctgagcggagctgacagcgaatcacaagaggaaaatacccaactgtag

SEQ ID NO: 128703 - DNA, 3705 bp, synthetic construct
  misc_feature 1..3705: note = Description of Artificial Sequence: Synthetic coding sequence
  source 1..3705: mol_type = other DNA
atggcaggggcccagcctggtgtacatgcgctccagctcgaaccccctaccgtggtcgaaaccttaaggagggggtccaagttcattaaatgggacgaagagacaagcagcagaaacctggtgaccttgagagtggacccaaatggctttttcttgtactggaccgggccaaacatggaggttgatactcttgacatcagcagtatccgcgatacaaggaccggtcgatacgcaaggctccctaaggatcccaagatccgggaagtgctcggctttgggggtccagacgctcggctggaggaaaagctgatgacagtcgtaagtgggcccgaccctgtcaacactgtattcctgaactttatggcagtgcaggacgatactgccaaggtgtggagcgaggagctcttcaaacttgcaatgaatatcctcgcccaaaatgcgtcacgcaacacttttctcaggaaggcgtatacgaagttaaaactgcaggtaaaccaagatgggaggattcccgtaaaaaacatccttaagatgttttcagctgacaagaaacgcgtggagaccgcactggagagctgcggcctgaagtttaaccgatccgagagtatccggcctgatgaatttagcctcgaaatatttgaaaggtttctcaacaaattatgtctgcgtcccgatattgataaaatcctcctggagattggagcaaaagggaaaccctacttgactctggagcaattaatggactttataaatcagaaacagcgggaccctcgactgaacgaggttctgtaccctccactgcgaccatctcaggcacgcctgctgattgagaagtacgaacctaatcagcagttcttggagagggaccagatgtccatggaggggttcagcagatatcttggcggcgaggagaacggcatcctacctctagaggctttagacctttctaccgatatgactcaacccttgtctgcatatttcatcaattctagccacaatacttatctgaccgccggccagttggccggcacctcctccgtcgagatgtatcggcaagccctgctgtgggggtgtaggtgtgtggaactcgatgtatggaaggggcgaccaccagaggaggaacctttcatcactcatggcttcacaatgactactgaagtccccctgcgagatgtactggaggctatcgcagagaccgcgttcaagaccagcccgtatcccgtaattctcagtttcgagaaccacgtggatagcgcgaaacagcaggccaaaatggccgagtattgccgcagtatattcggagacgctctgctgattgaaccccttgacaaatatccactcgcgccaggtgttcccctgcccagccctcaagacctgatggggcgcatcctggtgaaaaataaaaagcggcatagacccagcgccgggggccctgactcggcggggcgcaagcgacccctggagcagtccaattcagccctgtccgaatcttccgctgcaaccgagccttcttccccacaactggggagcccgtcttccgatagctgtccggggctgtcgaacggcgaagaggtgggcctggaaaaacccagcctagaaccccaaaaaagcctaggtgatgaagggctgaatcgcggcccctacgtgctggggcctgccgaccgtgaagatgaagaggaagatgaagaagaagaagagcagactgacccaaaaaaaccgacaacagacgaggggaccgcaagcagcgaagtcaatgccaccgaggagatgagcacacttgtgaattatattgagcctgttaaattcaagtccttcgaagcagccagaaaacgtaacaaatgctttgagatgagctcattcgttgaaacaaaggcaatggaacagctaacaaaaagccctatggagttcgtggaatataacaagcagcagctgagccggatataccccaagggtactcgggtggactcaagtaattacatgcctcagctattttggaatgtaggatgtcagctggtcgcgcttaatttccaaacgctggacgtggcaatgcagcttaacgcaggcgtcttcgagtataacggaaggagtgggtatctcctgaagcctgagtttatgaggcgcccggataagagcttcgatccttttacagaggtaattgtagacggaatcgttgccaacgctctgcgagtaaaggtgatctcaggccagtttctctcagatagaaaggtgggaatttacgtcgaagttgacatgtttggtctgccagtggatacaagaaggaaatataggaccaggactagtcaggggaactcctttaatcccgtctgggacgaagagcccttcgactttccaaaagttgtgctgcctacactcgcgtctttacggatcgcagcatttgaggagggcggcaagtttgtcggacaccgcatcctccccgtcagcgctatccggtccgggtaccattacgtgtgtctcagaaatgaggccaatcagccgctgtgtctcccagcccttttaatatacacagaagccagcgactacattccagacgaccaccaggattatgccgaagcccttatcaatccaatcaagcatgtttctctgatggatcagcgggcacggcagctggcggctctcatcggggaatccgaggcccaggctggacaagagacctgccaggacactcagtcacagcagttggggagccagccgtctagcaatcctacaccctcgcctcttgacgcctcacctaggaggccacctggtcctactaccagtccggcaagtacctctttgtcctcccccggccaaagagacgacctgattgccagcattctgagtgaggtggctcccacacctctggacgagctgagaggccacaaagctctggtcaaactgcggtcccgccaagagcgggatctcagagagcttaggaaaaagcaccaaagaaaggcagtcaccctgacacgaaggctcctggatggactggctcaggctcaggctgaggggcgatgtagattgagacctggcgccctcggcggagccgccgacgtagaagacacgaaggaaggcgaggacgaggcaaagcgttaccaggaattccagaaccggcaggtgcagtctttgctggagctgagggaggcacaagttgatgccgaagctcaacggcgtctggaacatttacgccaagcattacagagactaagggaggtggtactggacgcaaataccacccagtttaagagactgaaggaaatgaacgagcgggaaaagaaggagctgcagaagattctagaccgcaaaaggcataattcgattagcgaagccaagatgcgcgataaacataaaaaggaagcagagctgacggaaattaatcgccggcatatcaccgaatctgtgaattctattcgacgtcttgaggaggcacaaaagcagcgtcatgatagattggtggccgggcagcagcaggttctccagcagcttgccgaggaggagccaaagctccttgcccagctggcccaggaatgccaagaacaaagagcgaggttgccccaggagatccgcagatcgctgctcggagagatgcccgagggtctaggggacgggcccctggtagcctgcgcctcgaacggacatgcacctggctcctctggacacctgagcggtgccgatagcgagagccaagaggaaaatactcagctgtag

SEQ ID NO: 128704 - DNA, 3528 bp, synthetic construct
  misc_feature 1..3528: note = Description of Artificial Sequence: Synthetic coding sequence
  source 1..3528: mol_type = other DNA
atggccaagccctacgaattcaactggcaaaaggaggttcctagctttttacaagaaggcgccgtgttcgatagatatgaagaagagtccttcgtttttgagcctaactgtctgtttaaagtagatgagtttggattttttcttacctggcgttcagaagggaaagaagggcaggtcctagagtgctcacttattaactccatcaggtccggtgcgattcccaaggatccaaagattctcgctgctcttgaggcagttggcaagtctgaaaatgatctggagggccggatcgtttgcgtgtgttctggcaccgacctggtcaacatatcatttacctatatggttgcggagaatccagaggtgaccaagcagtgggttgaaggcctgcggagcatcattcataacttccgcgcaaacaatgtgtccccaatgacttgcctgaagaagcactggatgaaactggcctttatgactaacacaaacggcaagattcccgtcaggagtataaccagaacatttgcatctggcaagacggaaaaggtcatcttccaggctttgaaagagctgggactgccgtccggtaaaaacgacgaaatcgaacccactgctttctcctacgagaagttctatgagcttacacaaaagatatgcccacgcacggatatagaagacctgttcaaaaaaattaatggcgacaagacagactacttgactgttgaccagctggtgtcgttcctgaacgaacaccagcgggatccacgcctgaatgagatattgttccctttttatgacgctaagagggctatgcagatcattgagatgtatgaacctgatgaggatctgaagaagaaaggcctgatttccagtgatgggttttgtcgttacttgatgagcgacgagaatgcccccgtcttcctggaccggttagagctgtaccaggaaatggatcacccattggcccactacttcatttcatcatcacacaatacctacctcacgggccggcaattcggcggtaagtcctctgtggagatgtacaggcaggttctgttggctggttgccgctgcgtggagctcgactgctgggatgggaaaggtgaggatcaggagccaattatcacacacggaaaagctatgtgcacagatatcctgttcaaggacgtaattcaggccattaaggaaacagccttcgtcacctcagaataccctgtcattctgtcctttgagaaccactgctccaagtaccagcaatataaaatgtcaaagtactgcgaggacctgttcggggaccttttgcttaagcaagctctggaaagccatcctctggagccaggccgggcgctgcctagccctaacgatttgaagcgcaagattctgatcaaaaataaacgactgaagccagaggttgagaagaagcagctggaagccctgcggtctatgatggaggccggagaatccgctagccccgccaacattttggaggacgataacgaggaagagatcgagagtgccgatcaagaagaagaagcgcacccggaattcaaatttggaaatgaactctctgcggatgacctggggcacaaagaggcagtcgcaaacagcgtgaagaaagggctagtgacggtagaagatgaacaggcgtggatggcgagttacaagtatgtcggagccaccactaacatccacccctatttgtctactatgatcaattacgctcagccagtgaagttccagggttttcacgtcgccgaggaacgaaatatccactataatatgtcctctttcaacgagagcgtgggacttggctacctgaagacacatgcaatcgagttcgtgaactacaataaaaggcagatgtctcggatatacccaaagggcggcagggtggactcaagcaattacatgccacaaatattctggaatgcggggtgtcagatggttagtctcaattatcagacaccagacctggccatgcaactgaaccagggcaaatttgaatacaatggcagttgcggatacttgctgaaacctgactttatgagacgtccagatcggacctttgacccattttcggagacccctgtcgacggggttatcgccgctacctgctctgtgcaggtgatttctgggcagtttctaagcgacaagaagatcgggacgtacgtcgaggttgatatgtacgggctgcccactgacacaatcaggaaggagtttagaactagaatggtgatgaataatggattaaatccagtgtataacgaagaatccttcgtgtttcgtaaagtcatccttcctgacttagctgtactgaggattgctgtgtacgatgataacaacaaattgattggacagcgcatcctgccacttgatggtttacaggcaggataccgacatatttcattgcgtaatgaaggtaataagcccttaagtcttcctactatattttgcaatattgttcttaaaacatacgtgcccgatgggttcggggacatcgtggacgcgctgtcggatcccaagaaatttctgagcatcaccgagaaacgcgcagatcagatgcgggcaatgggaattgagacttccgacattgccgacgtgccctctgacacgagcaagaatgataagaaaggaaaagcaaatacagccaaggctaatgttactccgcagagtagcagcgaactgcgccccactaccaccgccgccctggctagtggagtcgaggctaaaaagggtatcgaattgatacctcaggtcagaatcgaggacctgaagcagatgaaagcctacctgaagcatctgaagaagcagcagaaagagctgaattctctgaaaaaaaaacatgccaaggagcattccactatgcagaaactgcattgtacccaggtggataaaatcgtagcccagtacgacaaagagaaatccactcacgagaagatcctggagaaggcaatgaagaagaagggaggaagcaactgtcttgagatgaaaaaggagactgaaataaaaatccagacattaacgtctgaccacaaaagtaaggtgaaagagatcgtcgcccagcacacgaaggaatggtctgagatgataaacacacatagcgccgaggagcaagagatccgcgacttgcacctgagccaacagtgcgagttacttaaaaaactcctgatcaacgcccacgaacagcaaactcaacagctgaaactcagccacgaccgcgagtctaaagagatgagggcccaccaggcgaaaatcagcatggagaattcaaaggccatcagtcaggacaaatccatcaaaaacaaagcagaacgggaacggcgggtgcgagaactgaatagttctaatacgaagaagttcttggaggaacggaaacgacttgctatgaagcaaagcaaagaaatggaccaactcaagaaggtccagttggaacacctggagtttctggagaaacaaaacgagcaggctaaggagatgcagcagatggtgaagctcgaagctgagatggacagaagacctgccacagtggtgtag

SEQ ID NO: 128705 - DNA, 3585 bp, synthetic construct
  misc_feature 1..3585: note = Description of Artificial Sequence: Synthetic coding sequence
  source 1..3585: mol_type = other DNA
atggctaagccttacgagttcaactggcaaaaggaagtaccgtccttcctgcaggagggagccgtcttcgacagatacgaagaagaaagtttcgtgtttgagcctaactgcctcttcaaggtggacgagttcggctttttcctcacatggaggtctgagggaaaagaaggtcaagttctggagtgttcccttatcaattcgatcaggtccggggccatcccgaaggatcctaaaatactggccgccctggaggccgtgggcaagagtgagaacgacctggaaggccggatcgtctgcgtctgctccggaactgacctggtgaacatctcattcacttatatggttgctgagaatcccgaggtgacaaaacagtgggtggaggggctcaggtccatcatccataatttcagggcgaacaacgtatcgccaatgacctgcctcaaaaagcattggatgaaacttgctttcatgactaacacgaacggaaaaatccctgttcgcagcataactcgtacgttcgccagcggtaagacagagaaagtcatttttcaggcgctcaaggagctaggactcccgtcgggaaagaatgatgagatcgaacccacagctttctcctacgagaagttctacgagctgacccagaagatatgtcccaggacagacatcgaagacctgtttaaaaagatcaacggagacaaaaccgattatttgacagtggaccaacttgtcagctttctcaacgaacaccaaagagacccccgactcaacgaaattttgttccccttctatgacgccaagcgggcaatgcagataattgagatgtatgagccagacgaagacctgaaaaagaagggactgatatcgtccgacggcttctgtcgatacctgatgtcagatgagaacgcccctgtctttctggacagactggaactgtatcaggaaatggatcatcccctggcccattatttcatcagctcatcacacaatacgtacctcacaggcaggcagttcgggggaaagtcctccgtggagatgtatagacaggtgctgctagccgggtgtagatgtgtggagttggattgttgggatggtaaaggggaggaccaggaacctatcattacccacggcaaagccatgtgtaccgatatcctcttcaaggatgtgatccaggctattaaggagactgcgttcgttacttcggagtacccagtcattctatcctttgaaaaccactgttctaaataccagcaatataagatgagcaagtattgtgaagatctttttggggatctccttctcaaacaggcactggagtcccatcccttggagcccggacgagcattgccatcaccaaacgaccttaagagaaaaatcctgataaagaataaacgcctgaagcccgaggtagagaaaaagcagcttgaggccttgagatcaatgatggaagccggcgaaagcgcttctcctgcgaacattctggaagatgataatgaagaagaaatcgagtccgccgatcaggaggaggaagcccatcctgagtttaagtttggaaatgaactgtctgctgatgacctaggtcacaaagaagccgtggccaactccgtgaaaaagggccttgtcaccgtcgaggacgaacaagcatggatggcaagctacaaatatgttggcgccacgactaacattcatccgtatctttcgaccatgatcaattatgcccagccggttaagtttcagggctttcatgtagccgaagagagaaacatccattacaatatgtcctcatttaacgagagcgtgggcctggggtacttgaaaacacatgccatcgagttcgtgaattacaataaaaggcaaatgagccggatctatccaaaggggggtagagtggactcctctaattatatgccccaaatattttggaatgctggttgtcaaatggtgagcctgaattatcaaactcctgacctggcgatgcagctcaatcaaggcaaattcgagtataacggttcttgcggctacttactcaagcctgactttatgcggagacccgacaggacttttgaccccttctcagagacccctgtggacggagtcatagcagcgacttgttctgtgcaggttatcagtgggcagttcttgagtgacaagaagattggcacctacgtggaggttgacatgtacggcttgcctacagacacaattaggaaagaattccgcacgagaatggtcatgaacaatggtcttaatccagtctataacgaggagagcttcgtgttcaggaaggtgatactccccgaccttgccgttctgcgaatcgcagtgtacgatgataacaataaactcattggccagaggatcctgccgctggacgggctgcaggctgggtaccgacacattagcttacgcaacgaggggaataagccgctgagcctgcccacgattttttgcaatatcgttctcaagacgtatgtccccgacggcttcggcgacatcgtggacgcattatccgaccctaagaaattcctgtccatcacagaaaagcgggctgaccagatgagagcaatgggtatagaaacatccgatattgcggatgtgccaagcgacacttctaaaaatgacaaaaaaggcaaagcaaacactgccaaggctaacgtcaccccccagtcatcatctgaactgcgccctaccacaactgccgctctggcctccggagttgaagctaaaaaagggatcgaattgatcccacaagttaggattgaggacctaaagcagatgaaggcttatttgaagcacctcaaaaaacagcagaaggagcttaactcgctcaagaaaaagcacgccaaggagcatagcactatgcaaaagctccactgcacccaggtggacaaaatcgtcgcccagtatgataaggaaaaaagcacccacgagaagatcttggagaaggcaatgaaaaagaaaggggggagtaactgcctggagatgaagaaggagaccgaaatcaagatccagacccttacgagcgaccataagagcaaggttaaagagattgtggcacagcataccaaagagtggagtgaaatgattaatacccactcagccgaggagcaggaaattagggatctgcatctttcacagcaatgtgagcttctgaagaaactgctcataaacgcccacgagcaacaaacacaacaactgaagctgagccatgatcgggagtccaaagagatgcgggcccaccaagccaagattagcatggagaactccaaagccatatctcaggacaaaagcatcaagaacaaagctgagagagaaaggcgcgttcgtgagttaaattcctccaacacaaagaaattccttgaagagagaaaacgcctggccatgaagcagtctaaagagatggaccaactcaagaaggtacaactcgagcatttggagtttctggaaaaacagaacgagcagttgctgaagagctgccatgcagtatctcaaacccagggggaaggtgatgccgcagatggggagatcgggtcccgagacggacctcagacatctaacagttccatgaagctgcaaaatgctaactag

SEQ ID NO: 128706 - DNA, 3564 bp, synthetic construct
  misc_feature 1..3564: note = Description of Artificial Sequence: Synthetic coding sequence
  source 1..3564: mol_type = other DNA
atggctaagccttacgagttcaactggcagaaagaggtgccctcttttttgcaggagggcgctgtcttcgatcgctacgaggaggagagtttcgtctttgaacccaattgtctgtttaaagtggacgagtttggcttctttctgacgtggagatccgaaggtaaggaagggcaagtgctcgagtgtagtctgattaacagcattcgctctggggctattcctaaggaccctaagatcctggcggctttggaagccgtggggaagtcagagaacgatctggagggcaggattgtatgcgtgtgcagcggcactgatcttgtgaacattagcttcacctacatggtggctgagaatcctgaggtgactaagcagtgggtggaaggcctccgttctattattcacaactttcgagccaacaatgtctctccaatgacgtgcctgaaaaagcactggatgaaacttgccttcatgactaacacaaacggaaagatacctgtccgtagtattactcgaaccttcgcctcagggaagaccgagaaagttatatttcaggcactgaaggaactgggtctgccctcaggaaagaacgacgaaatcgaacctacagccttctcctatgaaaaattctatgaactcactcagaaaatttgtcctcgcactgacatcgaggatctattcaagaagatcaatggcgataagacagactacttaactgtcgatcagctcgtgtccttcctgaacgagcatcaaagagatcccaggctcaatgaaatattattcccgttttatgatgcaaagagggctatgcagataatcgagatgtatgagccggatgaggatcttaaaaagaaggggctcatctcctctgacggattttgcagatacttaatgagcgacgaaaatgctcccgtgttcctggacaggctcgagctatatcaggagatggaccatccattggcacactatttcatctcaagctcccacaacacctatctcaccgggagacagtttggagggaaatctagtgtagagatgtaccgacaagtgcttctggctggatgtcgatgtgtggaactggattgctgggacggaaagggcgaagaccaggagcctatcattacccatgggaaggctatgtgcaccgatatcctattcaaggatgttattcaggcaattaaggaaacggcctttgttacttcagaataccccgttattctgtcctttgagaatcactgtagcaagtaccagcagtacaaaatgtctaagtactgcgaggacctgttcggggatctcctgctgaaacaggcactagaatcccaccccctcgaacccggaagagctctaccctcgcccaatgacctcaaaaggaaaatcttaattaagaataagcgcttgaagccagaagttgaaaaaaagcagcttgaggccttgcgctccatgatggaggcaggggaaagcgcttcaccggctaatattcttgaggacgacaatgaggaggaaatcgagagcgccgatcaggaagaagaggctcatccagagttcaagttcggcaatgagctcagcgccgatgacctaggacataaggaagctgtggccaacagcgtcaagaaagcctccgacgatctggagcatgagaacaataaaaaggggttggtgaccgtggaagacgaacaggcgtggatggccagttacaagtacgtgggggcaactaccaatatccacccttatctgtccacaatgatcaattacgcgcagcctgtgaaatttcagggatttcatgtcgctgaagaaaggaacatacactataatatgtcctcattcaacgaatctgtagggctggggtacctcaaaactcatgctattgagttcgttaattataacaaacgccaaatgtcccgaatctatcctaaaggtggaagggtagatagttccaactatatgccacaaattttttggaatgctggctgccaaatggtgtctttaaattaccaaacaccagacctcgccatgcagctgaatcaggggaagttcgagtacaatgggtcttgtggctatctgctgaagccggactttatgaggcggcctgatcggacgttcgacccattctcagagacacctgtggatggcgtgatcgccgcgacatgctcagtgcaggtgatttcaggacagttcctcagtgacaaaaaaattggtacttatgtggaagttgacatgtacggcttgccgacggacactatccggaaggaattccgaactagaatggtgatgaataatggactgaaccctgtgtacaatgaagaatcctttgtcttcagaaaagtaattctgcctgatttagccgttttgaggatcgctgtgtatgacgacaacaacaagttaattggtcagcgtatccttccactggacggactgcaggccggctaccgccacatctcattgaggaatgaggggaacaagccactcagccttcccacgattttttgcaatatcgtgttgaaaacatacgtcccagatgggttcggggacatcgtggatgccctgagcgaccccaaaaaatttctgtctattacagaaaagagggccgatcagatgcgggcaatgggaatcgagacaagtgacattgcagacgtccctagcgacacatccaagaacgataagaagggcaaggccaatactgctaaagccaacgtgacaccccaatcctcatctgaactcaggcccactaccaccgcagctttagcctccggagttgaagcaaaaaaagggatcgagctgataccccaggtgagaatcgaagacttgaagcaaatgaaagcctacctcaagcacctgaaaaaacagcagaaggagctgaatagtttgaagaaaaagcatgcgaaggagcatagtaccatgcaaaagcttcactgtactcaggttgacaagattgttgcccagtatgataaagagaagtcaacccatgaaaagatccttgagaaggccatgaagaagaaaggcgggagcaactgtctcgaaatgaaaaaggaaaccgaaatcaagattcagacgctcaccagcgaccataagagcaaagtcaaggagattgtggcgcagcatacaaaagaatggagcgagatgataaacactcactccgctgaggaacaggaaattcgcgacctccacctgagccagcagtgcgagctgctgaaaaagttgcttattaacgctcatgagcagcagacacaacagctaaagctgtctcacgaccgggaaagtaaagaaatgagggcccaccaggccaagataagcatggaaaactcgaaggccattagccaggataaaagcataaagaataaagctgagcgggaaaggagagtgcgggagcttaattcatccaacactaaaaagtttttagaggagcggaagaggctcgcaatgaaacaatctaaggagatggatcaactcaaaaaggtacagcttgagcacctggagttccttgaaaaacagaatgagcaggccaaggagatgcagcagatggttaaattggaagccgaaatggacaggcgacctgctactgttgtgtag

SEQ ID NO: 128707 - DNA, 3528 bp, synthetic construct
  misc_feature 1..3528: note = Description of Artificial Sequence: Synthetic coding sequence
  source 1..3528: mol_type = other DNA
atggccaagccatacgaatttaattggcagaaagaggtcccatcattcctacaggagggcgccgtgtttgacaggtacgaagaggagtctttcgtttttgagccaaattgcctgttcaaagtagatgagttcgggttttttctaacctggagaagtgaaggaaaagaaggacaagtcttggaatgttctctgataaactccattagaagtggcgcaattccgaaagaccctaagatactggccgccctagaggccgtgggaaaatccgaaaacgatctggaaggcaggatcgtgtgcgtgtgcagtggcactgacttggtcaatattagcttcacctacatggtggccgagaatcccgaggttacaaaacaatgggttgagggactgcggtccatcattcataacttccgggctaacaacgtcagtcccatgacctgtttgaaaaagcattggatgaaactcgctttcatgacaaatacaaatgggaaaatccccgttcgatcgatcacgagaacgtttgcgtcaggcaagacagagaaggtaattttccaggcccttaaggaattgggcctcccaagtggtaaaaatgatgagattgagcccacagccttctcctatgagaagttttacgaactgacccagaagatatgtcccaggacagatattgaagatctattcaagaaaattaacggcgataagaccgattacctcactgttgaccagttggtatcgttcttgaacgagcaccagcgggacccccgcctgaatgagatcctttttcctttctacgatgccaagagagccatgcaaattatcgagatgtacgaacctgatgaagacctcaagaagaagggtctgatcagtagcgatgggttctgccggtacctgatgagcgatgagaacgcccccgtcttcttagatcggctggaactatatcaggagatggaccacccccttgctcactattttatctcgtcctctcacaatacctatcttactggtaggcagttcggggggaagtcatctgtggagatgtacagacaggtgttactggctgggtgccgctgtgttgaacttgactgttgggacggtaaaggggaggaccaagagcccatcatcactcacggtaaagccatgtgtaccgacatactgttcaaggacgttatccaggccatcaaggaaaccgcctttgtcacgagcgagtatcccgtgatcttgtccttcgagaaccattgcagcaagtaccaacagtacaagatgtctaagtattgtgaggacctctttggcgacctgctgctgaaacaggcacttgaatctcaccctctggagcccggacgggccctgccatctcccaacgacctgaagaggaagattctaatcaaaaacaaacggctgaagcctgaggtggagaagaagcagctagaagctcttcggagcatgatggaagccggggaatccgcaagtccggctaacattttagaagacgacaacgaagaggagattgagtccgctgatcaggaagaggaggcacaccccgagtttaagttcggtaacgaactgtccgccgacgatcttggtcacaaggaagctgtcgccaattctgtcaaaaagggcctagtgaccgtcgaggacgaacaggcttggatggcctcttacaaatacgtgggagctaccactaacatccatccgtatctatcgacaatgatcaattacgctcagcccgtgaaattccaggggtttcatgtcgccgaggagcggaatatccactataacatgagctcatttaacgaaagtgttggcctgggctacctcaagactcacgcaatagagttcgtaaactataacaagcggcagatgtcacgcatttatccaaagggtgggcgtgtcgactcgtccaattacatgcctcagatcttctggaatgcagggtgccaaatggtttcactcaattaccaaacgcctgatctagctatgcagctgaatcaggggaaatttgaatacaacgggtcatgtggctatcttctgaagccagatttcatgcgtcgtcccgatagaacatttgatcccttctctgagacgcccgtggatggagtgatcgcagctacatgctcagtgcaggtgatttccgggcaatttctgtccgataagaaaattggcacctatgtggaagtggacatgtacggactgccaacggataccataagaaaggaatttaggacaagaatggtgatgaataacggacttaacccggtgtacaatgaagaatcattcgtcttccggaaggtgattctgccagacctggcagtactgcgaatagccgtgtacgatgacaataataaactaattggacagcgtattttgcccttagacggcctgcaggccgggtatagacatatctccttgaggaacgagggcaacaagcccctgagtctgcccacgatcttttgtaacatagtgctcaagacttacgtcccagacggatttggggatattgttgacgctctttctgatcccaaaaagttcctcagcatcacagaaaaaagggctgaccagatgagggccatgggcattgagaccagtgacatagcagacgtgccttccgatacttctaaaaatgataaaaagggaaaggccaacaccgccaaggccaatgtaaccccccaatccagcagtgagctgcgcccgaccacaaccgccgccctggcctcaggcgtagaagctaagaagggtattgaattgataccacaggttcgaattgaggacctcaaacagatgaaggcgtacttgaagcatctcaaaaagcagcaaaaggagctaaacagtctcaaaaaaaaacacgcaaaagaacactcaaccatgcaaaagctccactgcacccaggtcgataaaatcgtggcacagtacgacaaagaaaagtcaacccacgagaagatcctggaaaaagcaatgaagaagaagggaggttccaactgccttgagatgaaaaaggagacggagattaagatccagacccttacctcagatcacaaaagcaaagtcaaggaaattgttgctcaacatacaaaggaatggagcgagatgatcaatacacattctgcggaagaacaggaaatcagagatttgcacctgagtcagcagtgtgagctgctcaagaaacttttgattaatgctcacgaacagcaaacacagcagctgaaactgtcacatgatcgagagtcaaaggaaatgagggcgcatcaggcaaagatcagtatggaaaattccaaagccattagccaagacaagagcattaagaacaaagccgagagggagagacgggtacgtgagttaaactcatctaacactaagaagttcttggaggagcgcaagaggctggcaatgaagcaatccaaagagatggaccagctgaaaaaagttcaactcgagcatttagagtttcttgagaaacagaatgaacaggcaaaagaaatgcaacagatggtcaagttggaagccgaaatggatcgccgccctgctaccgtggtttag

SEQ ID NO: 128708 - DNA, 3585 bp, synthetic construct
  misc_feature 1..3585: note = Description of Artificial Sequence: Synthetic coding sequence
  source 1..3585: mol_type = other DNA
atggctaagccctacgaatttaactggcaaaaggaagtgccctctttcctacaggaaggcgcagtctttgaccgctatgaggaggagtcgtttgtgttcgagcctaactgtctatttaaagtggatgagtttggcttttttttaacatggaggtcagagggtaaagaaggccaagtactggaatgctctctgattaacagtattaggtccggggcgatccccaaggaccccaaaatcctcgccgcgctggaagccgtcggcaagtcagagaacgacctggagggacggattgtatgtgtctgttcagggacagacctagtaaatatctcttttacttatatggtcgccgagaaccctgaggtgacaaagcagtgggtggaggggctgcggtccattattcacaatttcagggctaataacgtctctcccatgacatgcctgaagaagcactggatgaagctggctttcatgactaacactaatggcaagattcccgtacgttccataacccggacattcgcgagcggaaaaactgaaaaagttatcttccaagctcttaaggaactggggctgccgtcagggaagaacgatgagatcgagcccaccgccttctcatacgaaaaattctatgagctgacacagaaaatctgcccccgcacagatattgaagatctttttaaaaaaatcaacggcgacaaaactgattatctgactgtggaccagcttgtgtcgttcttaaacgagcatcagcgggaccctagactgaatgaaattctgtttcccttttacgatgctaaacgcgcaatgcaaataatagaaatgtatgagcctgatgaagatctgaaaaaaaaaggactgatttctagcgatggcttctgccgttacctgatgagcgatgagaacgcccctgtcttccttgataggctggaactttatcaagaaatggatcaccctttggcccattactttatctctagctcccataacacttatctcaccgggcggcaattcggaggaaaatcttctgtcgagatgtatcgacaagtgctgttagctggatgtcggtgcgtcgagctggactgttgggatggcaaaggcgaagatcaagagccaatcatcacacacgggaaggcaatgtgtaccgacatcctgttcaaagatgtcattcaggcaattaaggaaaccgcctttgtgacgagcgaatatccggtgatactttcttttgaaaaccattgcagcaagtaccagcagtataagatgagcaagtactgtgaggacttatttggggaccttctgctcaagcaggcactagaaagtcacccattggagcctggacgggccctgccctctcccaatgatcttaaacgtaagatcttaattaaaaacaaacgcctgaagcctgaagtggaaaaaaaacagctcgaagctttgcgctccatgatggaggccggtgagtccgcctctcctgcgaatattctcgaggatgataacgaggaagagattgagagtgcagaccaagaagaagaagcccacccggagtttaagttcggaaacgagctgagcgcagacgaccttggtcataaagaagcagtcgccaatagcgtgaaaaaaggcctagtgaccgtggaggatgagcaggcttggatggcatcctacaagtacgtaggcgcaaccactaacattcacccctacctttctaccatgatcaattatgctcagccggtcaaattccaaggcttccacgtggcagaggaaaggaacatacactataacatgagctcgtttaatgagagcgtgggactgggttatttgaagacacacgcaattgaatttgtgaattataataaacgccagatgagcaggatataccccaaagggggccgggtggatagctccaattacatgccccagattttttggaatgccgggtgccagatggtcagcctgaactatcaaaccccagatctggcgatgcaactgaaccagggcaagtttgaatataatggatcctgtggctatctccttaagcccgacttcatgcgtcgccctgatcggacttttgaccccttcagcgagacacccgtggacggagtgatcgctgccacatgttcagttcaggttataagtggtcagttcctgtccgacaagaaaataggcacctacgtggaggttgacatgtatggcttgcccacagacacgatccgcaaggagtttaggacccggatggtgatgaacaacgggcttaatcccgtgtacaacgaggagagtttcgtgttccgcaaagtaatacttcctgacctggccgtactgagaattgcagtgtatgacgacaataataagttaattggacagaggatcctgccactcgacggactccaagcagggtacaggcacatttctcttagaaacgaaggaaataaacctctgtcactccccacaattttctgtaacattgtactcaagacgtacgtccctgacggtttcggtgacatcgtggacgctctgagcgatcctaaaaagttcctttcaataacagaaaaacgtgcagatcaaatgagagctatgggcatcgaaacatcagacatcgctgacgtgccctccgatactagcaagaacgataagaaggggaaagctaacacagccaaagcaaatgtcactccgcaatcaagctcagaattgcgcccaactaccactgcagccctggcaagtggcgtggaggccaaaaagggtatagagctgattccccaagtgcgtatcgaggacttaaaacaaatgaaagcctacctcaagcacctgaaaaaacagcagaaagagttgaattccctaaaaaaaaagcacgccaaggagcactccaccatgcagaagctgcactgtactcaggttgacaaaatcgttgcccagtatgataaagagaagtcaacccatgaaaagatcctcgagaaggcaatgaaaaagaagggaggatctaattgtcttgagatgaagaaagagacagagatcaagatccagaccctgacctctgatcacaagtcaaaggtcaaggagatcgtcgcgcagcatactaaggagtggtccgagatgattaacacccattcggccgaagagcaggagatccgcgatctccacctcagccagcagtgcgaacttttgaagaagcttctcatcaatgcccacgaacagcagacccagcagcttaaactgtctcatgatcgagaatcaaaggaaatgcgtgcacaccaggccaagatcagcatggaaaacagcaaggccatctcacaggataagtccatcaagaataaggcggagcgggaacgccgtgtgagggaactgaactcgtccaacaccaagaaattcctggaggagcgaaaacgactggcaatgaaacagtcaaaagaaatggaccaactgaagaaggtccaattagaacatctagaattcctggagaagcagaacgagcagctcttaaagagctgtcacgcagtgtcacagacacagggggagggtgacgccgcggacggcgagattggttctcgagacggaccacagactagcaattccagtatgaagctgcaaaacgctaattag

SEQ ID NO: 128709 - DNA, 342 bp, synthetic construct
  misc_feature 1..342: note = Description of Artificial Sequence: Synthetic coding sequence
  source 1..342: mol_type = other DNA
atggcaaagccttacgagttcaattggcagaaagaagtgccctcgttcctccaggagggtgccgtctttgatcgctacgaggaagaatcctttgtattcgaacctaattgcttgttcaaggtggatgaattcggcttctttctgacctggaggtctgagggcaaggagggacaagttttagagtgcagcctcattaactctatcagaagcggcgccattccaaaagacccaaagatccttgccgccctcgaggctgttggaaaatctgagaacgacctagaagggcgtattgtgtgcgtctgctctggaacagacttggtcaacatttccttcacgtattag

SEQ ID NO: 128710 - DNA, 3072 bp, synthetic construct
  misc_feature 1..3072: note = Description of Artificial Sequence: Synthetic coding sequence
  source 1..3072: mol_type = other DNA
ccggtgcgcagcatcaccaggaccttcgcttctgggaaaacagagaaagtgatatttcaggccctgaaagaactgggtttaccctccggcaaaaacgacgagatcgagccaaccgcattctcctacgagaaattctacgaacttacacagaaaatttgccctagaacagacattgaagacctgtttaaaaaaatcaacggcgataagactgactatctcacggtggatcagttggtgagcttcctgaatgaacaccagcgggacccacgcctgaacgagatcctatttccgttttacgacgcaaaaagagccatgcagattatcgagatgtatgagccagacgaggacttgaagaagaagggcctgattagttctgacggcttttgcagatatctgatgagcgatgagaacgccccagtgttcttggaccggcttgaactttaccaggaaatggatcatccgctggcccattactttatctcatccagtcacaatacatacctgacaggccggcagttcggaggaaagtcatccgtggaaatgtataggcaggtactgttagctgggtgtaggtgcgtagaattggactgctgggacggaaagggagaagaccaggagccaataataactcacggcaaggccatgtgtaccgacattctcttcaaggatgtaatccaagcaataaaagagaccgctttcgtgaccagtgaataccccgtcatcctgtcattcgaaaatcattgttccaaataccagcaatacaagatgtctaagtactgcgaggatttgttcggagatctgctcctcaaacaggctttggagagccacccgctggagccgggtcgggcactgccttcacccaacgacctaaagcgtaaaatcctgataaaaaacaaacgtctgaaacccgaggttgaaaagaagcaactggaggctctccggtctatgatggaggccggagagtccgcaagtcctgccaacatcctcgaggacgataacgaggaggagattgaatccgcggatcaggaggaagaggctcaccctgaattcaagtttggtaacgagctgtccgccgacgatctgggtcacaaggaggcggtggcgaattccgtcaaaaaggcctctgatgatctggaacatgaaaacaacaagaaaggcctcgtgaccgtcgaagacgagcaagcatggatggctagttataagtatgttggagctactactaatatacacccttatttaagcaccatgattaactacgcccagcctgtcaaatttcagggctttcacgtcgccgaggagaggaatatacactataatatgagttcctttaacgagagcgtaggtcttgggtacttaaaaacacacgccatagagttcgtcaattacaataaacgacaaatgagcagaatatatcctaaggggggacgcgtggactcttctaactacatgcctcagattttttggaacgctggttgccagatggtgtcactcaattatcagacgcccgacctggcaatgcagctgaaccagggcaaatttgaatacaatggcagctgcgggtacctgctgaaaccggattttatgaggcgccccgatcgcaccttcgacccattcagtgagacacccgtcgacggagttatcgccgccacatgctcggtgcaggtgataagtggtcaatttctcagtgacaaaaagattggcacctatgtggaagtagacatgtatggactccccaccgacacaatcagaaaggagtttagaacaagaatggtgatgaacaatgggctgaatcctgtatacaacgaagaaagctttgtgttccgaaaggtgattctgcccgacctggccgttttaaggatcgcagtgtacgacgataacaataagctcatcggccagcgtatcctgcctctggatggcctgcaggctggctaccgacatattagccttaggaatgagggcaataaacctcttagtttgccaactatcttctgtaacattgtgctgaagacatacgtccctgacggctttggcgacattgtggacgcactgagcgatccaaaaaaattcttgagcataaccgagaagcgcgcagatcaaatgagggctatgggaatcgagaccagcgacatcgccgacgtgccatcagacacaagtaagaacgataaaaaaggcaaagccaacacagccaaggctaacgtcactcctcaatcaagtagcgagctgagacccacaactaccgctgcactcgcttctggggtggaagccaagaagggcatagagttgatcccacaagtgcgaattgaggacttgaagcagatgaaagcctacctcaaacatctgaaaaagcagcagaaggagcttaatagcttgaagaagaaacacgccaaggaacattctaccatgcaaaagctacattgtactcaggtggataaaatagtcgctcagtatgacaaggagaaaagcacccacgagaagattctggaaaaggcaatgaaaaaaaagggcggtagcaattgcctggaaatgaagaaggagacagagataaaaatccagacattaaccagcgaccacaaaagcaaagtgaaagagatcgtggcgcaacataccaaagaatggtccgagatgattaatacacactctgctgaggagcaggaaatcagggacctgcatttatcacaacagtgcgagctgttgaagaaactgttgattaatgctcatgaacaacagacccagcagctgaagctgtcccacgatcgagagtctaaggagatgagggcacaccaggctaaaatttcgatggaaaactcgaaggctatcagccaggataagtccataaagaacaaggccgaacgggagaggagagtacgcgagctaaattctagtaatactaaaaagttcctcgaggagagaaaacggctcgctatgaagcaaagcaaggagatggatcagctgaaaaaagtccagctcgagcacctggagtttctggagaagcagaacgagcaggccaaagaaatgcagcagatggttaagctggaggcagagatggacaggagacccgctacagtggtgtag

SEQ ID NO: 128711 - DNA, 183 bp, synthetic construct
  misc_feature 1..183: note = Description of Artificial Sequence: Synthetic coding sequence
  source 1..183: mol_type = other DNA
atggctaaaccttatgagttcaactggcagaaagaggtgccaagttttctgcaggaaggcgctgtgtttgataggtatgaggaggaaagctttgtcttcgagccaaactgtctgttcaaggtcgatgaatttggcttcttcctcacttggagaagcgaagggaaggagggtcaggtcctatag

SEQ ID NO: 128712 - DNA, 246 bp, synthetic construct
  misc_feature 1..246: note = Description of Artificial Sequence: Synthetic coding sequence
  source 1..246: mol_type = other DNA
atggccaagccttacgaatttaattggcagaaggaggtgcctagcttcctgcaggagggagctgtgttcgatagatacgaggaggaaagctttgtcttcgaaccaaattgcctattcaaggtcgacgagtttggttttttcttaacctggagatcagaggggaaggagggccaggtgttagagtgtagcctgataaatagcatcaggtcaggcgccattccgaaagatcccaagattctcgcctag

SEQ ID NO: 128713 - DNA, 333 bp, synthetic construct
  misc_feature 1..333: note = Description of Artificial Sequence: Synthetic coding sequence
  source 1..333: mol_type = other DNA
atggcgaaaccttacgagttcaattggcaaaaggaagtgccctcatttttacaggaaggtgcagtgtttgacaggtatgaggaagagtcttttgtgttcgagccaaattgtctgttcaaagtagatgagtttgggttcttcctcacctggcggtcggaagggaaggaaggtcaagtcctagagtgcagtcttataaacagtatacgcagcggggctatcccaaaagaccctaagatcctcgctgcactcgaggccgtggggaagtctgagaatgatctcgaaggaagaattgtgtgcgtgtgctctggaaccgaccttgtcaacatttcatag

SEQ ID NO: 128714 - DNA, 2271 bp, synthetic construct
  misc_feature 1..2271: note = Description of Artificial Sequence: Synthetic coding sequence
  source 1..2271: mol_type = other DNA
atggactccgggagggactttctgactctgcacggactgcaagatgatgaggacctgcaggccttgctgaaaggcagtcaactgcttaaggtgaagtcttcgtcatggcgaagggaaaggttttataaactgcaggaggattgcaagactatctggcaggaatccaggaaggtgatgcggactcctgagtcccagctcttctccatcgaagatatccaagaggtccggatggggcatcgaactgaggggttggagaaattcgcccgagacgtgcctgaggacaggtgcttttcgattgtcttcaaggatcaacgaaatactctcgatctgatcgctccctcacctgcagatgcgcagcactgggtgttgggtctgcataagattatacaccactccgggtcgatggaccagagacagaagctccaacactggatccattcctgcttgcggaaagcagacaagaacaaagacaacaaaatgtctttcaaagagctgcaaaattttctaaaggagctaaatatccaggtggatgactcttatgctaggaagattttcagagagtgcgaccacagccagacagatagtttggaagacgaagaaattgaggccttctataaaatgctaactcagagagttgaaatcgacagaaccttcgctgaagcggccggaagcggggaaacactgtccgtcgaccagctggttacctttctgcagcaccaacagagagaggaagcggcaggacccgctctggccctctcgctcattgagaggtacgaacctagcgagacagctaaagcccagcgacaaatgacaaaagacgggtttctaatgtatcttttgagcgccgatggcagcgcctttagtctcgcccaccggcgagtgtatcaggacatgggccaaccgctttcccattacctcgtttcttcctcacataacacatatcttcttgaggaccagctggcaggtccctcatccacagaggcctacattcgggctctatgtaaagggtgccgctgtctggagttggattgttgggatggcccaaaccaagagccaattatctatcatggttatacatttacatctaaaattctgttctgcgatgttctcagagcaataagagattatgccttcaaagcctcaccttatccagtgatcttgagccttgaaaaccattgcactctggagcagcagagagtgatggcccggcatctgcacgccattctcggtccaatgctgctgaacaggcccttagatggagtcacgaactccctgccctcccccgaacagctgaagggcaaaattctcctgaaaggtaagaagctggggggcctcttaccgccgggaggtgaggggggtccagaagcgactgtggtgtccgatgaagacgaggcggcggagatggaagatgaggccgtgagatcacgcgttcagcataagcccaaggaggataaactcagacttgcccaggaattgtcagacatggtcatatactgtaaatcagtgcattttggcggcttttcgtcgccaggtacaccaggacaggccttttatgaaatggccagttttagcgagaacagagctctccgcttactccaagagagcgggaatggctttgtaaggcacaacgtcggccacctgtcaaggatctatcccgccggttggagaacggacagcagcaattattcgccagtagaaatgtggaatggaggttgtcagattgtggcattgaacttccagacacccgggcctgaaatggatgtctatcaaggacggtttcaggataatggggcatgcggctacgtgttaaaaccggcgttcttacgcgatcccaacggtaccttcaaccccagagctcttgcacaagggccgtggtgggcacgtaagagactgaacattcgagtgatttcaggacaacaattaccaaaggttaataagaacaagaacagtattgtagatccaaaggtgactgtggagatccacggtgtgtctcgcgacgtggcaagccggcagacagcagtgattaccaataacgggtttaacccctggtgggatacagagtttgccttcgaggtcgtcgttccagacctagcccttatccgttttctcgtggaagattatgatgccagctccaagaatgatttcatcgggcagtccaccattcctttaaattctctaaaacagggctaccggcacgtgcacctgatgtcaaagaatggcgaccagcatccgtcggccactctctttgttaaaatctctctgcaggattag

SEQ ID NO: 128715 - DNA, 2334 bp, synthetic construct
  misc_feature 1..2334: note = Description of Artificial Sequence: Synthetic coding sequence
  source 1..2334: mol_type = other DNA
atgcaatgcttgggaattcgcagcaggtcaaggtccagggagctctatctccaggaaaggtcactcaaggtcgcggcactaaatggccggaggcttggactgcaagacgatgaggatctccaagccctactgaagggcagccagttgctgaaggtcaagagctcttcatggcggagagagaggttctataagctgcaggaggattgtaagaccatttggcaggaatcacggaaggtcatgcgaaccccagaatcacagctgttttccatagaagacatccaggaagtccgtatgggtcaccgcacagagggtctggaaaagttcgcgcgcgatgtgcctgaagatagatgcttttcaattgtgtttaaggaccagcgcaacacacttgatctgatcgctccaagtccagctgatgcccagcattgggttcttggccttcacaagattatccatcattctgggtcgatggatcagcgtcagaaattgcaacactggatccattcatgcttacgcaaggctgacaaaaataaagacaacaagatgtcttttaaggagctgcagaatttcttgaaagaactgaacattcaagttgatgatagctacgcccgcaaaatctttcgagagtgtgaccactcccaaacagacagtctggaggatgaagagatcgaagccttctacaaaatgctgacacagagggtggagatcgatagaacatttgcagaagcggccggaagtggcgaaacactgtcggtggaccaactcgttacatttctgcagcaccaacagagggaggaggcagcagggcctgccctggcactgtccctcatcgaacgttacgaaccaagcgaaacagctaaggcacagagacaaatgaccaaagatggctttctcatgtatttgctgtctgcagacgggtctgccttctctcttgcccatcggcgcgtataccaggatatgggccagccactgtcccattatctcgttagttcctcgcacaacacttatctgctagaggatcagctagccggccccagttccaccgaagcctatatcagggcactttgtaagggatgtaggtgcctggagttggattgctgggacggacccaaccaggagcccatcatctatcatggttacacgtttacgtctaaaatcctgttttgtgacgttcttcgcgctattcgcgattatgcctttaaggcctccccctaccctgtgattctttcactcgagaaccattgtacattggagcaacaacgagtcatggcgaggcaccttcacgcaatactcggcccaatgctcctgaatcgcccattagacggtgtaacaaactccctgcccagtccggaacagttgaagggtaagatactgctcaaggggaaaaagcttggcggcttgctcccacccggcggtgaaggtggaccagaagccaccgtggtgtctgatgaggatgaggctgcagagatggaagacgaagctgtacgatcccgtgtgcagcacaagccgaaggaggacaagctgcggctagcccaggagctgtccgatatggtaatctattgcaaatcagttcactttggcggattcagctctcccggaacacctggccaggcgttttatgaaatggcctccttctctgagaatagagccctccgtctcctccaggaatccgggaatggattcgtaaggcataacgttggacatctttcccgtatctatcccgccggctggcgcacggactcaagtaactattcacctgtagaaatgtggaatggtggatgtcagattgtggcactcaacttccaaactccaggcccagagatggatgtgtaccagggccggttccaggacaatggggcttgcggctatgtattaaaaccagcattcctccgcgaccccaacgggaccttcaatccaagagctctagcccaaggcccttggtgggcaaggaagcggctaaacattagggtgatttccgggcaacagctgcccaaagtgaacaaaaataaaaatagcattgtggaccccaaagtcacagtggagatacatggggttagtcgtgatgtggccagtagacagacagcggttatcacaaacaacgggttcaacccctggtgggacaccgagttcgcatttgaggtagtggtaccagaccttgccctgattagatttttagtggaagactatgacgcctcttccaaaaacgattttattgggcagtcaaccatacccctcaactctctgaagcagggttacagacacgtgcacctcatgagcaaaaatggcgatcagcatccctcggctacactgttcgtcaagatctcattgcaggactag

SEQ ID NO: 128716 - DNA, 6909 bp, synthetic construct
  misc_feature 1..6909: note = Description of Artificial Sequence: Synthetic coding sequence
  source 1..6909: mol_type = other DNA
atgacctccgaagaaatgaccgcgtccgttttaatccccgtgacccaacgaaaagtggtcagtgctcaatccgctgcagatgagtcctccgaaaaagtaagcgacatcaatatctccaaagcacataccgtacgccgatctggtgaaacaagtcatactataagtcaactcaacaagttaaaggaagaaccaagcggaagtaatctgccaaaaatcctgtctatcgccagggagaaaatcgtctctgacgagaacagtaatgaaaaatgttgggagaaaattatgccggactcagcaaagaacctgaacatcaactgtaataacatcctccgcaatcaccagcatgggctgccacagcgtcagttttatgagatgtataatagcgtagccgaagaagacctttgtttagaaacgggaatcccaagcccgttggaacgtaaggtgtttccgggcattcagctggaattagaccgaccaagcatgggaatttcgccgttaggcaatcagagcgtaatcattgaaacggggcgagcacaccccgactcgcggagggccgttttccactttcactatgaggtcgacaggagaatgagcgacaccttctgcaccctctccgagaatttgatcttggacgactgtggtaactgcgtgccgcttcccggaggagaggagaagcagaagaaaaattatgtagcttacacctgtaagcttatggaattggctaagaactgtgataacaagaacgagcagttacaatgcgatcattgcgacacattaaacgataaatacttttgtttcgaaggtagttgcgagaaggtggacatggtatacagcggcgactccttttgccgaaaggacttcaccgattcacaggctgctaaaaccttcctgtcccactttgaagactttcccgacaactgcgacgacgtggaggaggacgcattcaagtcaaagaaagagaggagcactttgctcgttcgtcgattttgcaagaacgaccgcgaggtcaagaaatccgtttatacaggcacaagggccatagtacgcacactccctagcgggcacatcggcctcactgcttggtcttacatagaccagaagagaaatggtcccctcttgccgtgtgggagagtgatggagcctcccagcaccgtggaaattaggcaggatggtagtcaaagactctcggaagctcagtggtacccgatatataacgcagtcagaagagaagagaccgaaaataccgtcggctctttgttacacttcttgaccaaacttcctgctagcgagacagcacacgggcgtatttctgtgggaccatgtctcaaacagtgcgttcgggatactgtttgtgagtatagggccactttgcagcggactagtatttcccagtacattacagggtcactgctcgaagcaactaccagcctaggcgcacgatcagggctcctgtcaacctttgggggatcgacaggcaggatgatgttgaaagaacggcaacctgggccatctgttgctaacagtaatgccctcccatccagttctgccgggatcagcaaggagctgatcgatttgcagcctctcatccaattccctgaggaagtcgcttcaatcctgatggagcaggaacagactatctatcggcgggtgcttccagtggattatctttgtttcctgacccgtgatctgggcactcctgaatgccagtctagcttgccatgcttgaaggcctccattagtgcctccattctgactacccagaacggagaacacaacgccctggaggatctggtcatgaggttcaatgaagtgagttcctgggtaacctggctgattctgacagctgggtccatggaggagaaacgagaggtctttagttatcttgtccatgtggctaagtgttgctggaatatgggcaactacaacgccgttatggaattcttagccggcttaaggtcacggaaggtcctgaagatgtggcagttcatggatcaatccgacattgagacaatgaggagcctcaaggacgcaatggcgcagcatgaaagtagttgcgaataccggaaagttgtgacacgggccctgcatattccaggctgtaaggtagtgcctttttgcggagtcttcctgaaggaactgtgtgaagtactagacggggcctctgggcttatgaaattgtgcccacgatataactctcaggaagagacacttgaattcgtggccgattacagcggccaggataactttttgcagagagtcggacagaatggacttaaaaattctgaaaaagaatccaccgtgaactcaatatttcaagtaattaggtcatgtaatcgatctctcgagacagatgaggaagactctccatcagagggcaactccagcaggaaaagctcgctcaaggacaaaagccggtggcagttcattatcggagacttgctcgactccgataacgatatctttgaacagagcaaagaatacgacagccatggcagcgaggattcccagaaggcattcgatcacggcacagaactgatcccctggtacgtgctgagtatccaggcagatgtgcaccagtttttactccagggcgcaaccgtgattcactacgaccaggacactcacctgagtgctcgctgcttcttgcagcttcagccagataatagcacactcacatgggtaaagcccactacagcttctccagcatcaagcaaggcgaagctcggggttctgaacaacaccgctgaacctgggaaatttcctctgctgggtaacgccggattgtcttccctgacagagggtgtgctcgacttgttcgccgttaaggccgtttatatgggtcatcccgggatcgacattcacacggtctgcgttcagaacaaactgggtagcatgtttctctccgagacaggggtgactctgctctatggactgcagacgaccgataatagattgctgcattttgtcgcgcctaaacacactgctaaaatgctatttagtggccttctggagctgacacgcgccgtgcgcaagatgaggaagtttcctgatcagaggcagcagtggctccgaaaacagtacgtcagcttatatcaggaggacggccggtacgaaggtcccacacttgcccacgccgtggaattgttcggggggcggcggtggtcggccagaaacccaagtcctggaacaagcgctaaaaacgcggaaaaaccgaatatgcagcgaaacaataccctggggatctctaccaccaagaaaaaaaagaagatactgatgcgcggcgagagtggagaggtcacagatgacgagatggctaccagaaaagcaaaaatgcataaagagtgtcggtcgcgctcaggctccgacccacaggacattaacgaacaagaagaaagcgaggtcaacgcgatcgctaatcccccaaaccccctcccaagtcgccgagcccattctctcacaaccgcgggtagccccaacctcgccgcagggacctcttctcccatccgacctgtttctagccctgtgcttagcagctccaacaagagcccctcctctgcgtggagtagcagttcatggcacggtcggatcaaaggcgggatgaagggatttcagagcttcatggttagcgactccaacatgagcttcgttgagtttgtagagctgtttaaaagtttttctgtacgatctcgaaaagacctgaaggatctgttcgacgtgtacgccgtgccctgcaaccgctccggatcagaatcagccccactgtacactaatctgacaatcgacgagaatacctctgaccttcaacccgacctggatcttctcacccggaacgtcagcgacctgggcttgtttattaagtctaaacagcagctgagtgataaccagcgccaaatcagcgatgccatcgccgcagcctctattgttacaaatgggacaggtattgagtcaacgagtttagggatcttcggggttggtattctgcagcttaacgactttctggtgaactgtcagggtgagcattgcacatacgacgagattcttagcataatacagaaatttgaaccgagcatttccatgtgtcaccagggactgatgtcattcgaaggctttgcccggtttctcatggacaaggaaaactttgcctcaaagaacgatgagagccaagaaaatatcaaggagctgcaattacccctctcttattattatattgagagcagccataacacctacctcaccggccaccagctcaagggcgaatcgagcgttgaactgtactcccaagttttactgcaggggtgtcgctccgtggagctggactgctgggacggggacgacggaatgccgattatctaccacggtcataccctcaccacaaagattccttttaaagaggttgtggaggctattgacagaagcgctttcatcaacagtgatttgccaatcattattagcatcgaaaatcactgctcactgccccagcagcgtaagatggccgagatatttaagactgtgtttggcgagaaactggttactaaatttctgttcgagaccgatttcagcgacgacccaatgctgccttcaccggaccaactcaggaagaaggttctgttgaagaataaaaagctgaaggcgcaccagactcctgtcgatatccttaaacagaaagctcaccagttagcctctatgcaggtccaagcttacaatggtgggaacgccaatccccgacctgccaataacgaagaggaggaagacgaggaagacgaatatgactacgactacgaaagcctctcagacgataacatcttagaagaccgtccagaaaacaaatcctgcaacgacaaacttcagtttgagtacaatgaggagatccccaaacgcatcaagaaagcagataattctgcttgtaataaagggaaagtgtatgacatggagttgggagaagagttctatctcgatcagaacaagaaggagtccaggcaaattgcccccgaactctctgatcttgtaatatattgtcaggccgtcaaattccccggtctgtctacactgaacgccagcggcagctcccgtggaaaagaacgaaagagcaggaagtccatcttcggaaacaaccctggacggatgtcgccaggtgaaaccgcttccttcaacaagacatccgggaaaagttcatgcgagggcattcggcagacctgggaggagtccagtagcccactgaatcctaccacctctctcagtgcaattattcgcacccctaagtgctaccacataagttccctgaacgaaaacgctgcaaaacgcttgtgtcggcgatactctcagaaactaactcagcatacagcatgtcagttactgcggacctacccggcggcaacaaggatcgatagctccaaccccaaccccctgatgttctggctccacggtatccagttagtagcccttaactaccagactgacgacctgcctctacacctcaacgccgcaatgtttgaggctaacggcggttgcgggtacgtgctcaaacccccggtcttgtgggataaaaattgccccatgtaccagaagtttagcccactcgagagagacttagattccatggatccagccgtatattccctgactatcgtgagcggacagaatgtctgtccctctaattctatgggtagcccttgtatcgaggttgacgttctgggcatgcctctggatagctgtcatttcagaactaagcctatacatagaaataccttgaatcccatgtggaatgaacagttcctcttccacgttcattttgaggacctggtcttcttgaggttcgcagttgtcgagaataattcctccgccgtcacagctcagcgaatcattccactgaaggctttgaagaggggctatagacatctacaactgaggaacctgcacaacgaggtgcttgagatctcctccctttttatcaactctcgacgaatggaggaaaatagctccggaaataccatgtctgcgagtagtatgtttaacacggaggaacgcaaatgtctccagacccaccgcgtgacagttcacggagtccccggcccagagccatttacggtcttcactattaatggagggacaaaggctaagcagctgcttcagcagattcttactaatgagcaagacatcaaacccgtcacgacggattactttttaatggaggagaagtactttatatccaaagaaaagaacgaatgtaggaaacagccattccagcgcgccattggacctgaggaggagattatgcagatcctgagttcctggttccctgaagaaggttacatggggcgaatcgtcttgaaaacacagcaagaaaacctcgaagagaaaaatatcgtgcaagatgataaggaagttattctgagctcagaagaggagtcattctttgttcaggtccacgatgtatcacccgaacagcccaggactgtgattaaagcccctagggtgtccacagcacaggacgtcatccagcagaccctatgcaaggcaaagtattcttattcaatcctcagtaacccaaatcccagcgattacgtgttgctggaggaagtggttaaggacaccacaaataagaaaaccaccacaccaaaaagctctcagagggtgctactggaccaggagtgcgtcttccaggctcaatcaaagtggaaaggggccggtaagtttatcctgaagctgaaagaacaggtgcaggcatcccgcgaggataagaagaagggtatcagtttcgcttccgaactcaagaagctgacgaagagtaccaagcaacctcgtgggctgaccagcccgtctcagcttcttaccagtgaaagtattcagacaaaagaggagaagcctgtcggtggactgagctcctccgataccatggactacaggcagtag

SEQ ID NO: 128717 - DNA, 5985 bp, synthetic construct
  misc_feature 1..5985: note = Description of Artificial Sequence: Synthetic coding sequence
  source 1..5985: mol_type = other DNA
atggttagtgaaggcagtgctgctggcagagattttgctggaatggaggaggtcagacaactgcacgttcgtttttgcaaggggattaagatctggcaccaagcttggtttctgtgcagcctgctggggcgagagccgcaggagcgagaggcaggatgccaattatggctttgtactctgtctgctgtgctgaaggtgggctggctgttccccctgtcagaggtccctaactttacactgcttaaggatggctgtgggtgttggcgtctgaaagaagatcagatttacaatgcggtcagaagggaagagactgagaacaccgtcgggagccttctgcatttcctcactaagttgccagcttctgaaacggcgcacgggcggatttctgtaggtccttgtctcaaacagtgcgtgcgcgataccgtttgcgagtatagagctaccttgcagcgaactagcatctctcagtacattacgggctctttgctggaagccacgacatcgctaggggcccgctcggggctcctctctacatttggcggaagcactggtcgcatgatgctgaaggaaaggcagcccggaccctccgtcgccaacagtaacgctctcccttcttccagtgcaggaattagtaaagagctcatcgacctgcagcccctgattcagtttcctgaagaggtcgcttcaatcctgatggaacaggagcaaaccatctatagacgggtgctgcccgtggattatctatgtttcctgacgcgtgacttgggaaccccagaatgtcaatcttctctgccatgtttaaaggcgagtatctctgcttccattctaacaactcaaaacggcgaacacaatgccctggaggaccttgtcatgagattcaacgaagtgtcatcttgggtgacatggttgatcttaactgctggaagcatggaggagaagcgcgaggttttttcgtacctggtacatgtggccaagtgttgttggaacatggggaattataacgccgtcatggagttccttgcgggcctgagaagtcgtaaagtgctgaagatgtggcaattcatggatcagagtgatatagagaccatgcgatcactgaaggatgcaatggctcaacatgaatccagctgcgaatacagaaaggtggtcacaagggcgctacacattccgggatgtaaggtcgtccccttctgcggcgtcttcctcaaggagctgtgtgaggtgctggacggcgcgagcggactgatgaaactgtgtccacgttacaattcccaggaggaaacactcgaattcgtggcagactattccggccaggacaatttcctgcaacgcgtcgggcagaatggcctcaagaatagtgaaaaggagtccacagtgaattcaatctttcaagtgataaggtcttgtaacaggagtttggagaccgatgaagaggattcccccagcgaaggcaatagctcccggaagagctcattgaaagacaaatcccggtggcagtttataatcggtgatctcctcgactctgataacgacatctttgagcagtctaaggagtacgattcccatggatcagaggactcacagaaagcttttgatcatggcaccgagctaattccctggtacgttctaagtatccaggccgatgttcaccagtttttactgcaaggggcgacagtcatccattacgatcaggatacgcacttaagcgctcgatgttttttacaattgcagcccgataattctacactgacctgggtgaaaccaacaacagccagcccagcgtcatcaaaagccaaactgggtgtcttaaataatacagcagaaccgggcaagttcccactgttgggcaatgccggtctgtctagtctcactgaaggagtgctagacctcttcgcggtgaaggctgtgtacatgggtcatcccggaattgacatacatactgtttgtgtgcaaaataagcttggtagcatgtttctgagcgaaacaggggtcacattgctgtatggtctacagacaactgacaatagactcctgcacttcgtagccccaaaacacacagccaaaatgctgtttagcggtctgcttgagctgaccagagccgtgcgaaaaatgcgcaaatttcctgaccaaagacaacagtggcttcgtaagcagtacgttagcctgtatcaggaggatgggcgttacgaaggccctactttagctcacgccgtggagcttttcggcggcaggagatggtccgctagaaatcccagtcccggtactagcgccaagaatgctgagaagcctaacatgcagagaaacaatactctgggcatcagtaccaccaagaaaaagaaaaagatacttatgaggggagagtctggggaagtcacagatgacgaaatggctacccggaaagcgaagatgcataaagagtgccgaagcagatccggctcagatcctcaggacatcaatgaacaggaggagtctgaagtcaatgcaattgcaaatccacccaaccctttaccttcacgtagagcccattctctgacgactgctgggtctcctaatctggctgcgggcacgtcctcccccataagacctgtgagcagtcctgttctgtcatccagtaataagagcccgagttctgcctggtcatcaagcagttggcacggccgaatcaagggtggtatgaaggggtttcaaagctttatggtctccgattccaacatgagttttgtcgaattcgtggaactcttcaagtcattctccgttagatccagaaaggacctcaaagacctgtttgacgtctacgccgttccttgcaatcgaagcggcagcgagtccgctcctctctatactaatttgactattgatgaaaatacgagcgaccttcagcccgaccttgaccttctgacaaggaacgtctctgacctgggcctctttattaagtctaaacagcaactgtctgataaccagcggcaaatatcggatgctattgccgccgcttctattgtcaccaacgggacgggaatcgagagtacgagtctgggcatcttcggagtcggtatactgcagttgaacgattttctggtgaattgccagggcgaacactgcacctatgacgaaatactaagcatcatccagaagtttgagccatccattagcatgtgtcatcaaggcctcatgagttttgagggcttcgctcggttcctcatggacaaggaaaattttgcgagtaagaatgacgagagtcaggagaacatcaaggagctgcaactgccgctttcctactactatatcgaatcttcacataatacatatctgactgggcaccagttgaagggcgagtctagtgttgaattgtacagtcaggtgctgctgcagggctgcagatcagtcgagctggactgctgggatggagacgacggcatgccaatcatctaccacggccacacccttaccactaagatccctttcaaggaggtcgtagaggccatcgacaggagcgccttcattaactccgatctgcctattataattagcatcgagaatcattgctcgcttccacaacagcgcaagatggccgaaatcttcaaaactgtgttcggagagaaacttgtcaccaagttcctctttgaaacagattttagtgacgacccaatgctgcctagtcctgaccagcttaggaagaaggttctgcttaaaaacaagaagctgaaagctcatcagaccccagtggacattctgaaacagaaagcccaccagctcgcaagtatgcaggttcaggcttataacggcgggaatgccaaccccaggcccgctaacaacgaggaagaagaggacgaggaagatgaatatgattatgactatgagtccttgagtgatgacaacattttagaagaccgccctgagaataagtcgtgcaacgacaaactgcagtttgaatataatgaagagataccgaaacggatcaaaaaggccgacaattccgcctgcaataagggaaaagtatatgacatggaactgggggaggagttctatttagatcaaaataaaaaggagtcaagacagattgctcctgagctaagcgatcttgtgatttattgccaggccgtgaagtttccaggtttaagcacgttgaatgcctctggcagctcacgtggtaaagagagaaagagcaggaagagcatctttgggaataatccaggcaggatgtctcccggggaaacggctagtttcaataagacgagcggtaaaagcagctgcgagggcattcgccagacttgggaagagtcaagctcccctttgaatcctaccacatcactcagcgccatcatcaggacaccaaagtgctatcatatctcatccctgaatgaaaacgcagccaaacggctgtgccggcggtactcacagaagctcacccagcatactgcctgccagcttctgcgaacctaccctgccgctactcgtatcgattcgtccaaccccaacccgctcatgttctggctgcatgggattcagctcgtggctctcaattatcagaccgatgatctaccgctacatctcaacgctgctatgtttgaagccaatggaggctgtgggtacgtgttgaagcccccggtgctgtgggacaagaactgtcccatgtaccaaaaatttagccccttagagcgtgacctggacagtatggacccagccgtgtacagtctgacaatagtctcaggccagaatgtctgcccctcaaacagcatgggctctccttgtattgaggtcgatgtgctgggaatgcccctcgactcatgccatttccgtactaaacccattcaccgcaataccttgaatcccatgtggaatgagcagtttctgttccatgtgcactttgaagatctggtctttctgcgctttgctgtggttgaaaacaatagttcagcggtgacagcccagagaatcattccattgaaagccctgaaacggggctatcgtcatctgcagctacggaacttgcataatgaagtgctggaaattagtagcctctttatcaatagtcgacgcatggaggagaatagcagtggaaacacaatgtcagccagctccatgttcaatactgaggagaggaaatgtctccagacacacagggttacggtccatggagtgccgggaccagagccattcacagttttcacgatcaacgggggaacgaaggccaagcagcttctgcaacaaatacttacaaatgagcaggatatcaagcccgtaactactgactactttctgatggaagaaaagtatttcatttctaaagaaaagaatgagtgtagaaagcaaccattccaaagagcaataggacccgaggaggaaatcatgcagattctgtcctcgtggttccccgaagagggatatatggggagaatcgtcctgaaaactcagcaggagaacctcgaagaaaagaacattgtacaagatgacaaggaggtgatcctttcctccgaagaggagagtttttttgtccaagtgcacgacgtctcacccgaacaacctagaacggttatcaaggcccccagagttagtaccgcgcaagatgtgatccagcaaaccctctgcaaggctaaatactcatactctattctgagcaatccaaatccgtcagactatgtattgctcgaagaggtagtgaaagatactactaataagaaaaccaccacaccgaagagtagccaacgcgttctgctggaccaggaatgtgtctttcaggctcagagtaagtggaaaggggctggaaaattcattctgaaactgaaggagcaggtgcaagcatcccgggaggataagaaaaagggcatttctttcgcttccgagcttaaaaaactcaccaagtcgaccaagcagccccggggcctgacctccccaagccagctgctgacttctgagtccattcagacaaaggaagagaagcccgtaggcggactaagcagctcggacacaatggactacagacaatag

SEQ ID NO: 128718 - DNA, 6939 bp, synthetic construct
  misc_feature 1..6939: note = Description of Artificial Sequence: Synthetic coding sequence
  source 1..6939: mol_type = other DNA
atgacttcggaggagatgaccgctagtgttcttatacctgtcacccagcgtaaggtcgtgagtgcccagagcgccgcagacgagtcctctgagaaggtgagtgacattaatatttccaaagcccacaccgtgaggagatccggggaaacttcccacacaatttcacaactgaacaaactcaaggaagaaccatctggctccaacctgccgaagattctgagtatcgcgagggagaagatcgttagtgacgaaaattccaacgagaagtgttgggaaaagatcatgcctgactctgcaaaaaatctcaacataaactgcaataatatacttagaaaccatcaacatggactgccacagcgacagttttatgagatgtataattccgtcgcagaggaagatctgtgtttggaaactggcatccccagtccactggagcgaaaagtattcccagggattcagttagagctggaccgcccttccatgggaatcagtccccttggaaatcagagcgtgattatcgaaacaggtcgcgcgcatccagattctagacgggcagtgttccattttcactacgaagtcgataggcgcatgtcggacacattttgcacactgagcgaaaacctgattcttgacgattgtggtaactgcgttccactgccggggggggaggaaaagcagaaaaagaactacgtggcttacacctgtaaactcatggaactggcgaaaaactgtgacaataagaatgaacaactgcagtgtgaccattgcgacacactcaatgataagtacttttgctttgaagggagctgtgagaaggtcgatatggtgtacagcggagacagcttctgcaggaaggactttacggattcacaggctgccaagacattcctgagccattttgaggacttccctgacaactgtgatgatgtggaagaggatgccttcaagtctaaaaaggaaagatctactttactggtgcggagattttgtaaaaacgatagagaggtgaaaaagagtgtgtataccggtaccagggccattgtccgaacactgccgagcgggcatatcgggttaaccgcttggagttatattgatcaaaagaggaatggtcccctgctgccttgcgggagagtgatggaacctcccagcactgtggagattcggcaggacggcagccagcgtctgtcagaggcgcagtggtacccaatatataatgccgtgcgtcgcgaagaaaccgaaaacactgtcggctctctcctccattttctgaccaagctgccagcctccgagactgcccatggccgaattagcgtagggccttgcctgaagcagtgtgtgcgggacaccgtttgcgagtatcgagctaccctgcagcgcactagcatcagccagtacattaccggcagcctgctcgaagccacaacatctctgggagctagaagcgggctgctctctacattcggaggctctaccggtcgaatgatgctgaaggaacgacagccagggccctctgtcgctaactctaatgccctgccttctagttcagcaggcatatccaaggagctgatcgacctgcagcctcttatacagttcccagaggaagtcgcctcaatcctaatggagcaagagcagacaatttatcggcgtgtgttgcctgtggactatctctgctttctgacacgcgacctgggtacaccagagtgtcagtcatctcttccctgcttaaaagccagcatcagcgcttccattctcacaacccagaacggggaacataatgcactagaggacctcgtgatgcggtttaacgaagtgagtagttgggtgacttggttgatcttgaccgccggctctatggaggagaaaagggaagtttttagttatctggttcatgtggccaagtgctgttggaacatgggaaactataacgcagttatggaattccttgccgggctccgctcacgaaaagtgctgaaaatgtggcagttcatggatcagagcgatattgaaacgatgaggtcactgaaggacgctatggcgcagcacgaatcaagctgtgaatatcggaaggtggtgacacgcgctctgcacatcccagggtgtaaagttgtgcctttttgtggtgtttttctgaaagagctctgcgaggtcctggatggagcaagcgggttgatgaagctgtgtccgagatataattcacaggaagagacgctagaattcgtggctgactattcggggcaggacaacttcttgcagcgagtgggtcagaatggtctgaaaaactcagagaaggagtccaccgtcaactccatctttcaagtgataaggtcatgcaaccgatcacttgagaccgacgaggaggattcgccatccgaggggaactcttcccgaaagtcgagtctgaaagacaagagccggtggcagtttattattggagacttacttgatagtgacaacgatatttttgagcagtcaaaggagtacgactcccacggcagcgaggactctcagaaggcatttgaccacggaacagagctgattccctggtatgttttgagcatccaggcagacgtccatcaatttctccttcaaggcgcaaccgttattcactacgaccaggacacacatctgagcgcacggtgctttttacagttgcaacctgataacagcactctgacctgggtgaagccaacaacagccagtcccgcctcatcaaaggccaagctgggcgtcttgaacaacaccgcagaaccaggtaagttccctctgctggggaatgccggtctgtcttccctcacggaaggggtgctcgatttgttcgccgtcaaagcagtctacatgggacacccaggtatcgatatccataccgtctgcgtacagaataagctggggtcaatgtttctatcagagacaggcgttacactgctatacggcctgcaaaccaccgacaatagactgctgcacttcgtggccccaaaacacactgcgaagatgctgttcagcggactgttggagttgacacgggctgtgagaaagatgcgaaaattcccagatcagcggcagcagtggctcaggaagcaatatgtatcgctctaccaggaagacggacggtacgaaggacctacactggcacatgctgtggagctttttgggggccggaggtggtccgctaggaatccctcgccaggaacaagcgcaaagaatgctgagaaaccaaacatgcaaaggaataacacactgggaattagtactactaagaaaaaaaaaaagatactcatgcgcggcgaatctggagaagtgacagacgatgaaatggccacccggaaggccaagatgcataaagagtgcaggagcaggagcggcagtgacccccaagacatcaatgagcaggaagagtctgaggtgaatgcaattgcgaatcccccaaaccctctgccttccagacgggctcatagcctgaccaccgcaggaagccccaatcttgctgccggcacatcatcaccaatacgccctgtttccagcccagtgctgtcaagctccaacaagagtccgagcagtgcgtggagctcatcgtcctggcatggtcggattaaaggcggcatgaaagggtttcagtcatttatggtgtctgatagtaatatgagctttgtagaatttgtagaattattcaaaagcttctcagttcggtcaaggaaagatctcaaggacctgttcgatgtgtacgccgtaccttgtaataggtccgggtccgaatccgcccctctctatactaaccttacaatcgatgagaatacctcagatttacagccggacctcgacctgctcacgaggaacgtcagcgatctgggactgtttattaaatccaagcagcagctgtccgacaatcagaggcagatttcagatgcaattgccgcagccagtatcgttactaacggtaccgggatcgaaagcacctctttgggtatctttggggtcggcatcctccagctgaacgactttctggttaattgccagggcgagcactgcacttacgacgaaatcctgtctatcatccagaaattcgagcctagtatctcgatgtgtcatcaaggactgatgagtttcgagggcttcgctaggtttctgatggataaggaaaattttgcatcgaaaaatgacgaaagccaggagaacattaaggagttgcagctccctttatcctactattacattgaaagctcacataatacctacctgaccggccatcagctcaagggggaaagtagtgtagagttgtactcccaggtgctgctccagggttgcaggtccgttgagttggactgctgggatggggatgacgggatgccaatcatttaccacggccatacgttgactactaaaattcccttcaaggaggtggttgaagccatcgatcgctcagcttttataaacagcgacctgcccatcatcatctctatcgaaaatcattgcagccttccacaacagaggaaaatggccgaaatcttcaaaactgttttcggagagaagctggtcaccaagtttcttttcgagaccgattttagtgatgatcccatgctaccctcccccgatcagctgaggaagaaggttctgttgaagaataaaaagcttaaagcacaccaaacaccagtggacatccttaagcagaaagcccaccagctggccagcatgcaggtccaggcctataatggtggaaatgccaaccccagacccgcaaacaatgaagaagaagaagatgaggaggatgagtatgactatgactatgaaagcttgagtgatgacaacattctggaggataggcctgagaacaaaagctgtaatgacaaacttcagtttgagtataatgaggagataccaaaaagaattaagaaagctgacaacagtgcatgtaataaggggaaagtatatgacatggaactcggggaagagttctacctggaccaaaacaagaaagagtcccgccagatcgctccagaacttagtgacttagtgatatattgccaggctgtaaagtttcccggcttgtcaacattaaatgcctcaggttccagtaggggaaaggagcgcaagtctagaaagtctatcttcggcaacaatcccgggaggatgtcccctggcgagaccgcctccttcaataaaacctctgggaaatcatcgtgtgagggcattcggcagacgtgggaggaatcttcctctcccctgaaccccaccacttctctgtcagctatcatccgaactccaaaatgttaccatattagttccctgaatgaaaatgctgcgaaacgcttgtgtcggagatacagtcagaagttgacacaacataccgcatgtcagcttctgaggacctatcctgccgccacacggatcgattcatctaacccaaaccctcttatgttctggctccacggaattcagttagtggccctcaattatcagactgatgacctgccactccacctgaacgccgcaatgttcgaagccaacggagggtgcggatacgtcctgaagcccccggttctgtgggacaaaaactgtcccatgtatcaaaagttttctccgctagagcgcgatctcgatagtatggaccccgccgtctattctcttaccattgtgtctgggcagaatgtgtgcccttcgaatagcatgggatcaccatgcattgaagttgacgtgctgggcatgcctcttgacagttgccattttcggacgaaaccaatccaccggaatacactgaacccaatgtggaatgaacaatttctgttccatgtacacttcgaagatttagtgttccttagattcgccgtggtggaaaacaatagtagtgcagtcaccgctcagcggatcatcccactgaaggcattgaaacgcggatatcgacacctccagcttcgcaatctccacaatgaagtactcgagatttcttctctgtttatcaacagccgacggatggaggagaattcttctggaaatactatgtccgcctcatcaatgttcaacacagaagaacgaaagtgtttgcagactcatcgggttacagtgcacggtgtgccggggcctgaaccattcaccgtgttcaccataaatggaggcactaaggcaaaacagctgttgcagcagatactgaccaacgagcaggacattaagccagtgaccactgattacttcttgatggaagagaagtactttatctctaaggaaaagaacgagtgccggaaacagccattccagcgggctattggccccgaggaagaaataatgcaaattctgagttcttggttcccagaggagggctacatgggccgcattgtgctgaagactcagcaggagaacctggaggagaagaacatcgtgcaggatgataaggaggtgattctgtcctcagaggaggagagtttcttcgtccaagtccatgatgtgtccccagagcagcctcgtacagtcatcaaagctccaagagtgtcgaccgcccaggatgtgatccaacagaccttgtgtaaggctaagtacagctacagcatattgagcaaccccaacccaagtgactacgtgctgctggaggaagttgttaaggacactaccaacaaaaaaactactacaccaaagagctcacagcgcgtgctgctcgaccaggaatgtgttttccaggcccaatcgaaatggaagggggccggcaaatttatcctgaaactgaaggaacaggtccaggcaagcagagaggacaaaaagaaaggcatctcattcgcctctgagctgaaaaagctcacaaaatcgaccaagcagccacgcggattgacgtctcccagtcaactgttaacctctgagtctatccagactaaagaagagaaacccgtggggggacttagctctagtgacacgatggactatcgccaggtgaaaatctttaagcaggaagtgaaggaatag

SEQ ID NO: 128719 - DNA, 5985 bp, synthetic construct
  misc_feature 1..5985: note = Description of Artificial Sequence: Synthetic coding sequence
  source 1..5985: mol_type = other DNA
atggtgagcgaaggctctgccgcaggccgggacttcgcgggcatggaagaagtgagacagctacatgtgaggttttgtaaggggatcaagatatggcaccaggcctggttcctgtgcagcctcctagggagggagccccaggagcgagaggcaggttgtcagctgtggctgtgcactctttctgccgtgctaaaggtgggctggcttttccccctgtctgaggtgccgaattttacgctcttgaaagatggatgcggttgctggaggctgaaggaggaccagatttataatgctgtccgtagggaggaaacggagaatacagtggggagcttgctgcacttcctgacaaagctgcccgccagtgagacggctcacgggagaatttccgtcggcccctgtctgaagcagtgtgttcgcgacactgtgtgcgaatacagagcaaccctacagcgaactagcatcagtcagtacatcactggaagtctgctcgaggcgaccacctctctaggtgccaggagcgggttgctcagcacatttggcggcagcacaggcaggatgatgttaaaagaacggcagcctggaccatcagtggccaatagtaatgctctcccgtcatcttctgccggcattagcaaggagcttattgacctgcaaccactgatacaattccctgaggaggtcgctagcatcctgatggagcaggaacagaccatctacagaagagttttgccagtagactatctctgctttcttaccagagaccttggcacacccgaatgtcagtcgtctctgccatgcttgaaagcctcaatatctgcctcaattctgacaacccaaaacggggagcataatgccctggaagacctcgtgatgagatttaatgaggtatcgtcttgggtgacctggctgattctcactgctggctctatggaggaaaagagggaagtgttctcctatttagtccacgtggcaaagtgctgttggaatatgggtaattataatgccgtgatggagtttttggccggattacgcagtcgaaaggtccttaaaatgtggcaattcatggaccagtcagatatcgaaaccatgagaagtctgaaggacgccatggcacaacacgaatccagttgcgaatacaggaaggtagtcaccagagccctgcatatcccaggttgtaaagttgtcccgttttgcggggttttcctcaaagaactctgtgaagttctggatggggctagcggcctgatgaaattatgtcccagatataacagtcaggaagagacccttgagtttgtggctgactactcaggccaagacaacttcctacagagggtgggacagaacggtctgaaaaattctgagaaagagagcactgtaaactcaatttttcaggttattagatcatgcaatagatccctagaaacggatgaagaggatagcccaagtgagggtaatagctcacgtaagagctctcttaaagataagagtaggtggcagttcattatcggcgatctgctcgattcagacaatgatatctttgaacaatccaaggagtatgactcccatgggagtgaagatagccaaaaggctttcgaccacggaacagagctgattccgtggtatgtgctgtctatccaagccgacgtccaccagtttctcttgcagggcgcgaccgtcattcactacgatcaggacacccatctctccgcccggtgttttttacaactgcagcctgacaacagcactctgacatgggtgaagcctaccacagcctccccagcctcatccaaagcaaagctcggagttctaaataacaccgccgagccgggcaaatttccactcttagggaatgccggactctccagtttgacagaaggtgtgctcgatctcttcgcagtcaaggctgtgtacatgggccacccaggcattgatatccacactgtgtgtgtccaaaacaaattgggctccatgttcctatcagagactggtgtgacactgctgtacggactccagacgacagacaatagactgctgcattttgtcgcacccaagcataccgcaaaaatgctcttttccggcttacttgagctgaccagagctgtgcgaaagatgcggaagtttccagaccagcgtcagcagtggctccggaagcaatacgtatcactatatcaggaagacgggcgctacgaggggccaacactggcgcacgcagttgaactgttcggcgggcgccgatggagcgcccgaaaccccagtcctggaacaagtgccaaaaatgccgagaaacccaacatgcaaagaaacaacacactagggatttcgaccactaaaaaaaaaaagaagatcctgatgcgaggcgagagcggagaggtgaccgacgatgaaatggctaccagaaaagccaagatgcataaggagtgtcggtcccgatccggctcagatccacaggatatcaacgagcaagaggaaagcgaagtgaatgctattgccaatccacctaatccgctcccgtctcggcgggcccactcactaaccaccgctggttctcccaatctggccgccggcaccagctctcccatcaggccagtgtcctcccctgttttgtcctcctctaataaatctccgagcagcgcctggagttcttcttcatggcacggtagaatcaaggggggaatgaagggcttccagtcttttatggtgtctgatagcaatatgtcattcgtggaatttgtggagttgtttaagagttttagtgtgcggtcccgcaaagatcttaaagatttattcgatgtatacgcagtgccatgcaaccgcagtgggagtgaatccgctccgttgtacaccaatttaactattgacgagaataccagcgacctccagccagatctggatctcttaacgcggaatgttagtgacctcggcctattcattaaatcgaaacagcaattgagtgacaatcaaagacagattagcgacgcgatagcagccgccagtatcgtgaccaatggcactggaatcgaatccacatcactgggaatcttcggggtcggtattctacagctgaacgactttctggtgaactgccagggtgaacattgtacctacgacgagatcctgagcattattcagaagtttgaaccctccatctctatgtgccaccagggactcatgagcttcgaaggcttcgcgagattcttaatggataaggagaactttgcatcaaagaatgatgagagccaggaaaatatcaaagagttgcagctccctctttcctactactatattgagagcagccacaacacctaccttactggtcatcaactgaaaggggaatcttcagtagagctatacagccaggttttgctgcagggttgccgcagcgtggagctggattgctgggacggtgatgatggtatgccgatcatctaccacggccataccctcaccacaaaaatcccattcaaagaagtcgtcgaggcgatagaccgaagcgccttcattaactccgatcttcctataattatttccattgaaaaccactgtagtctgccccagcagcggaagatggcggagatctttaaaacagtctttggcgagaaactagtcaccaagttcctgtttgagaccgattttagcgacgaccctatgcttccttctcctgaccagctccggaaaaaagtgctactgaagaacaagaagttgaaggcccaccagacacccgttgacattctaaagcagaaagcccaccagctggcatcaatgcaagttcaggcatacaatggcggcaatgccaatcccagacccgccaataacgaagaggaggaagacgaagaggatgagtacgactatgattatgaaagcttgtcggacgataatatcttggaggatagacccgagaacaagtcctgcaacgacaaattgcagtttgaatataatgaagagatcccgaagcgcatcaaaaaggcggataacagcgcctgtaacaagggcaaggtgtatgacatggaactgggagaggagttctacctagaccagaataagaaggagtctagacagattgcgcctgagctgtcggatcttgttatttattgtcaggccgtgaaatttcccgggttatccaccctgaacgcaagtggtagctcccgaggcaaagaacgaaaaagtcgtaaatctatcttcggcaacaatccaggtagaatgtcccctggagagacggcctcatttaataagacgagcggcaaaagctcttgcgaagggatacgacagacctgggaggagtcgtcttcacctttgaaccccacaacctctctgagtgcaattattaggaccccaaaatgttatcacatctcgagcctgaatgaaaacgctgcaaagaggttatgtaggcgatatagccagaaattaactcaacacacagcctgtcagttgctccgaacgtatcctgctgctacaaggattgattccagcaaccctaatccattgatgttttggcttcacggcattcagctcgtggctcttaactaccagactgatgaccttccactacatctaaacgccgccatgttcgaggcgaatgggggatgcggctatgtcctcaaaccgcccgtcttgtgggataagaactgtcctatgtaccagaagttttcccctcttgaacgggatttggactctatggacccggccgtgtattctttgacaattgtaagcggccagaacgtctgtcccagtaatagtatggggagcccttgcatcgaggtggatgtattagggatgccactggactcctgccattttcgaaccaagccgatccataggaatacactcaaccccatgtggaatgaacagtttctctttcacgtgcactttgaggatcttgtgtttctccgcttcgcggtcgttgagaacaacagttctgccgtcacagcccagcgcatcatccccctgaaagccctaaagcggggttaccgacacctacaacttcggaatctccataacgaggtacttgagatctcctcactgttcataaattctagaaggatggaagagaacagtagtggaaataccatgtcggccagctccatgtttaacacagaggagcgtaagtgtctgcagacccacagggtgacggtccatggtgtgccagggcccgagcctttcactgttttcacgataaatggcggcaccaaagcaaagcagctcctgcagcagattcttaccaatgagcaagatattaaacctgtgaccactgattactttctaatggaggagaagtacttcatctccaaggaaaaaaacgagtgtcggaagcagccttttcagagggcgattgggcctgaagaggagattatgcagatcctgtctagttggtttccagaggagggctatatgggccgcatcgtgcttaagactcagcaagagaacctcgaagagaaaaacatcgtgcaggatgataaagaggtgattctgtcctcagaggaagagtcattttttgtccaggttcatgacgtaagccctgagcagcctcgcaccgttatcaaagccccaagagtgagtacggcacaggatgttattcaacagactctgtgtaaagcgaagtatagctacagcattctatccaacccaaaccccagcgactatgtcctgctcgaggaagtggtgaaagatactaccaataagaaaactacaactccgaaaagctcccagcgcgtcctgctcgatcaggaatgtgtctttcaagcgcagtccaagtggaagggcgcaggcaaatttatcttgaaacttaaagagcaagtgcaagcctctcgtgaggacaaaaagaagggcatcagctttgcctcagagctgaaaaagctcaccaaatcaactaagcaaccaagaggtctgacctcccccagccagctgctcacctctgagagtatccaaactaaggaggagaaacctgtcggaggtctgtcatctagtgacacaatggactacaggcagtag

SEQ ID NO: 128720 - DNA, 4968 bp, synthetic construct
  misc_feature 1..4968: note = Description of Artificial Sequence: Synthetic coding sequence
  source 1..4968: mol_type = other DNA
atgtccgtgatgcaatcaggtacacagatgatcaagttaaaacggggcaccaaaggtctggtgaggctgttctaccttgacgagcatcggacgcgcctgcggtggcgcccttcccgtaagagcgaaaaagctaagatcctcatagattccatttataaagtcaccgaaggtcgtcagtctgagatttttcacagacaagccgaaggaaacttcgaccctagctgttgtttcacaatataccatggcaaccacatggagtctttagacctgattacttccaaccccgaggaggcccgcacctggattacaggcctcaagtatcttatggccgggattagtgatgaggactctctcgcaaaacgtcagcgcacccatgatcagtgggtcaaacagaccttcgaggaggccgacaaaaatggcgacggcttgctgaatatcgaggagatccaccagttaatgcataaactgaatgtgaacctcccaagacgaaaggtgcgtcaaatgttccaagaagcggacacggatgagaaccaagggaccctgacttttgaagaattttgtgtgttctataaaatgatgtctctgaggagggatctctaccttctcctgctcagttactctgataagaaagatcatttgacggtggaagagcttgcccaatttcttaaggtggaacagaaaatgaataatgttaccacagattattgcctggacattatcaaaaaattcgaagtgtccgaagagaacaaagtgaaaaacgtgctgggcatcgagggattcacgaatttcatgagatcaccggcctgtgacatctttaaccctctgcaccacgaggtctaccaggacatggaccagcctttgtgtaactactacattgcgtccagccataatacgtacctgacaggagatcagctgctgagtcaatctaaggtcgacatgtatgcccgcgtgctccaggagggatgtaggtgtgtagaggtagactgctgggacggccccgatggcgaacccgtggtgcaccacggctacacactcaccagcaaaatactttttcgcgatgtcgtcgaaactatcaataaacatgctttcgtaaagaatgaatttcctgtgattctgtcgatcgagaatcattgcagcatccagcagcaaaggaaaattgcccagtatttgaaaggaatttttggagacaagctcgacctgagttctgtggataccggagaatgcaagcagctgccttcaccccaatctctgaagggtaagatacttgtgaagggcaagaagctcccatatcatcttggcgatgacgccgaggaaggggaggtcagcgacgaagatagcgccgatgagatcgaggacgagtgcaagtttaaactgcactactctaacgggaccacagaacatcaggtggaatcctttatcagaaaaaagttagagagtctgcttaaggagtcccaaattcgtgacaaagaagatcctgattcctttactgtgagagcgctgcttaaagctacccatgaaggcctaaatgctcatcttaaacaatcacccgacgtcaaagagtccggcaagaaatcacatggtaggtctctgatgactaactttggtaagcacaagaaaactaccaaatctcggagcaaaagttacagcaccgacgatgaagaggacactcaacagagcacagggaaggaaggcggacagctttaccgcctagggcggcgtagaaagaccatgaaactttgtagagaactgagtgatctggtggtatatacgaactcagttgccgcccaggatatagtggatgacggtactacaggcaatgtgctgagcttttccgagacccgcgcacaccaggtggtacaacagaagtcagaacagtttatgatttataaccaaaaacaactcacacgtatctacccttctgcctatagaattgacagtagcaattttaatcctctgccatattggaatgcggggtgccagctcgttgcccttaactaccagtcagaagggcgaatgatgcagctcaacagggctaagtttaaggcgaacgggaactgcgggtacgttctgaagccgcagcagatgtgcaaaggcacgtttaatccttttagcggggacccactgcccgcaaatcccaaaaagcagctgatcctcaaagtgatttccggccagcagctgcccaagccacctgattccatgttcggcgaccggggagaaattattgaccctttcgtggaagttgagattatcggcctgcctgtcgattgttgcaaggaccagactcgggtggtggatgataatggattcaatcctgtctgggaagagacattaactttcacggtgcatatgccagaaatcgcactggtcaggtttttagtctgggaccacgatcccattggcagagatttcgtgggtcagagaaccgttacattcagctcattagtacctggctaccgccatgtgtaccttgagggtctaacggaagcaagcattttcgtccacattacaataaacgagatttatggaaaaaaccggcagcttcaaggactgaaggggctgtttaataaaaaccctcgccattcaagctctgagaataacagtcattacgtgcgaaaaaggtcaatcggagataggatcctaaggaggactgcctcggccccagctaaaggaaggaaaaagtccaaaatgggctttcaagaaatggtggaaatcaaagattccgtatccgaagctaccagagaccaggacggcgtgctccgacgcactacgcgaagccttcaggctaggcccgtgagtatgcccgtagaccgcaacttgctaggagcattgtcccttcccgtctccgaaacagcaaaggatatagaggggaaggaaaattcgctcgccgaagacaaggatggccgtcggaaggggaaggctagtataaaagatccgcattttctgaatttcaataaaaagctgtcatcctcgagcagcgccctgctccacaaggacacttcccagggggacaccatagtttcaactgctcacatgagtgtgaccggcgaacagctaggcatgagcagcccgaggggtggaaggaccacgtctaacgccacttctaactgccaggagaatccctgtccaagtaagtcgctgtccccgaaacagcatctggccccagatcccgttgtaaatcctacacaggacctgcatggggtcaagatcaaggagaaaggaaatcctgaagattttgttgaaggtaaatctatcctatccggctcggtgctgtctcacagtaatttagaaattaagaatctcgagggcaatcggggaaagggtcgtgcagccacttctttctcgctgtccgatgtttctatgttatgttccgacattccggacctgcacagcaccgccatcttgcaggagagcgtgattagccaccttattgacaatgtgacgctgaccaacgagaacgaacccgggtcctcaatctctgctcttattggccagttcgacgaaactaacaaccaggccttgaccgttgtctcacatctccataacacgagcgtgatgtctgggcattgtcccctgccgagtctgggactgaaaatgcctattaagcacgggttttgtaaaggaaaatctaaatcttccttcctatgttcttcacccgagcttattgcactctccagctcagaaaccacaaagcatgccaccaacaccgtgtatgagacgacatgcaccccaattagcaaaaccaaaccagatgacgatctctctagcaaggccaaaaccgcagccctcgagagtaatcttccaggaagtccgaatacctcacgcggctggctgcctaagagcccaacaaagggagaggactgggagacgctgaaatcctgttcccccgcatcctctccagacctgacgcttgaagacgtgatcgctgacccaactctgtgttttaattcgggtgagtcttccctggttgaaattgatggcgaatccgaaaatctgtctctgacgacgtgcgaatacaggagggagggaacttcacagctggcatcgccattaaaacttaaatacaaccagggtgtcgtggagcattttcaacgaggacttagaaacggctactgtaaagaaacccttcggccttctgtgccagaaatcttcaacaatattcaggacgtgaaaacccagagtattagttacctagcatatcagggtgcaggttttgtccacaatcacttcagtgattctgatgccaagatgttccaaacttgcgtacctcagcagtctagtgcccaggatatgcacgtgccagtgccaaagcagctagcccatctgccgttgccagctttgaaactaccttctccttgtaagtccaagtctttgggagaccttacctccgaggatatcgcttgcaactttgaaagcaagtatcaatgcatcagcaaatcttttgtcaccacaggaatccgcgacaaaaaaggcgtcacagtcaagactaagtcacttgagccaattgatgctcttactgagcagcttcgaaagctagtctctttcgatcaagaagacaattgccaagttctctactcaaagcaggatgctaaccaactgcctcgtgcgctcgtccgcaaactctctagtaggtcccaaagcagagtgcggaatatagcctcaagggccaaagaaaaacaggaggctaataagcagaaggttcctaaccccagcaacggagcgggggtggtgctgcggaacaaacctagtgcaccaacccccgctgtgaacagacattccacaggctcttacattgctggataccttaagaatacgaagggtggcgggttggagggtagagggattcctgagggagcctgtaccgccctgcattacggccacgtagaccaattttgcagtgacaatagcgtgctgcagacagaaccttcatccgatgacaagcccgaaatctacttcttgctgaggttgtag

SEQ ID NO: 128721 - DNA, 5082 bp, synthetic construct
  misc_feature 1..5082: note = Description of Artificial Sequence: Synthetic coding sequence
  source 1..5082: mol_type = other DNA
atggccgacctggaggtttataagaacctatccccagagaaggtagaaaggtgcatgtctgtgatgcaaagtggaacccagatgatcaagctgaaacgcggaacaaagggcttggtcaggctattctaccttgacgaacataggaccaggctgcgttggaggcctagcaggaaatctgagaaagcaaaaattttgatcgactccatctataaagtgacggaaggccgtcagagcgagatattccacaggcaggcagaggggaatttcgatccctcctgttgtttcaccatttatcatggaaatcacatggaaagcttggatttaatcacgtccaatccagaggaggcgaggacttggatcaccggactgaaatatctcatggctggcatttctgacgaggactccttggcaaaacggcagcgcactcacgaccaatgggttaagcagacatttgaagaagccgataagaacggagacggacttctgaacatcgaagagatccaccagctcatgcacaaacttaatgtcaacttaccccgcaggaaagtcagacagatgttccaagaagcagatactgatgagaatcagggtactcttacgttcgaggaattttgcgtgttttataagatgatgtctctgaggagagacttgtacctcctgctgctttcatactccgacaaaaaggaccatctgaccgtggaggagctggcccagttccttaaggtggaacagaagatgaacaacgtcaccactgactactgccttgatattattaagaaatttgaggtgtctgaggaaaacaaggttaaaaacgtgctagggattgagggatttacaaatttcatgcgctctcccgcgtgcgacatctttaatccactacaccacgaagtgtatcaggacatggaccagccactgtgtaattattacattgcttcctcccacaacacataccttaccggagatcagttgctcagtcagtcaaaagtcgacatgtatgcccgcgtactgcaggagggttgtagatgcgtcgaggttgactgctgggacgggcctgacggagagcctgttgtgcatcatgggtatactcttacctccaagatcctgttccgcgatgtcgtggaaaccattaacaagcacgccttcgtgaaaaatgaattccctgtgattttatcaatcgagaatcattgctccatccagcagcagagaaagatcgcacagtatttaaaggggatcttcggcgataaactggatctgagtagcgtcgatacaggagagtgtaagcagctgcccagtccacaatccctgaagggcaaaattcttgttaaagggaaaaaattaccctatcatttaggagacgatgctgaggagggtgaggtttccgatgaagacagcgccgatgagattgaggacgaatgtaaattcaagctccattactcaaacggcactacagaacaccaagtggagtctttcattcgaaaaaagctggagtccttattgaaggaaagccagattcgtgataaagaagatccagattcatttacagttcgggcattacttaaggccacacacgagggtctgaatgcccacttgaagcagtctcccgacgtgaaagaaagtgggaagaagagccacgggcgttcactgatgaccaatttcggaaagcacaagaagacaacgaagtcaagatccaaatcttactccactgatgacgaagaagacactcaacagagtactggcaaagagggtggacagctctatcggctcggacggcggcgcaaaaccatgaaactgtgcagagagcttagcgatctcgttgtttatacaaatagcgtagctgctcaagacattgttgacgatggaacaacaggcaatgtgctgagcttctctgaaaccagggcacaccaggtcgtgcagcagaagagtgaacagttcatgatatataatcagaaacaactgacacggatctatccgagcgcctatcgcatagatagctctaacttcaaccccctgccatactggaacgctggctgtcagttagtcgctcttaactaccagagcgagggtcgcatgatgcagctgaacagagccaagttcaaggctaacggcaactgcggttatgttctgaagccccagcaaatgtgtaaggggacgtttaaccctttcagcggagaccctcttccagctaacccaaagaaacagctgatcctgaaggtgatctcggggcaacaattgcctaagcctcctgactcgatgtttggtgaccgcggcgaaattatcgaccccttcgtggaggttgagatcatcgggttacctgtggattgctgtaaagaccaaacacgggtggtagatgacaatgggtttaatccagtttgggaggagactctcactttcactgtgcatatgccagagatcgcactagtgcgcttcctcgtgtgggaccatgatcccattggtcgagatttcgtgggacagcgtacagtgactttttcttctcttgtccccggttatagacatgtttacctggagggccttaccgaggccagcatattcgtccacataaccattaacgaaatctatggtaagtggtcacccctgattctgaatcccagttacactatcctccacttcctgggcgcgaccaaaaaccgccagctgcagggcttgaagggtcttttcaacaaaaaccccagacacagctcctccgagaataatagtcattatgtgagaaagaggtcgatcggcgataggatcctgcgccgcactgcctcggcaccagccaaggggcggaaaaaatcaaaaatggggtttcaggagatggttgaaattaaggacagcgtgtctgaggccacaagagaccaggatggagtgctgaggcggaccacaagaagcttgcaggcacgacctgtcagcatgcctgtggataggaacctcctcggcgcactcagcctgccagtctccgaaaccgctaaggacatcgagggcaaagagaactctctcgccgaggacaaggacggccggaggaagggaaaggctagcattaaggaccctcactttcttaactttaataagaaactgagctctagcagcagcgctctgttacacaaggatacatctcagggggacaccatcgtgagcaccgcccatatgagcgtgacgggggaacagctcggcatgagctcacctcgggggggtagaacaactagtaacgccacaagcaactgccaggaaaacccctgtccaagtaagagtctcagcccaaaacaacacctggcccccgacccggtggtgaatccgactcaagatctgcacggagtgaagatcaaggagaaaggaaatccagaggatttcgtggaagggaaatctattctgtctgggagcgtgctctcgcatagcaacctggagatcaaaaacctggagggcaaccgaggtaaggggcgggccgccactagcttttccctttccgatgtgtctatgctgtgttctgatatccccgatctgcacagcaccgccatactgcaagagtccgtaattagccaccttattgataacgtgacacttacaaacgagaacgaaccaggttcatctattagcgcgctgatcggccaattcgacgaaacaaataaccaggctctgactgttgtttcccacttgcacaacacatccgtgatgagcggacactgccccttgccctctctggggctgaagatgcccattaagcacgggttctgtaagggtaagagtaaaagctcttttctgtgtagcagtcctgaactcatcgctctgtcatcttctgagaccactaagcacgccacaaacacggtatatgagactacatgcacacctatctccaaaaccaagccagatgatgacctctcctccaaagcaaagaccgcggcgctcgaaagcaatttaccaggttcaccgaacaccagtcgagggtggctccccaaaagtccgacaaagggtgaagattgggaaactctcaaatcctgctctcccgcttccagccctgacctgacactcgaagacgttattgccgatccaactctgtgcttcaattcaggagaaagctcactggttgagattgatggggaaagtgagaatctcagcctgactacctgtgagtataggagagaggggacctcacaactcgctagtccccttaaattaaagtacaaccaaggtgttgtcgagcatttccagagggggctccggaacggctactgtaaggagacgctgagaccgagcgtgcccgagatatttaacaatattcaagatgtgaagacccagtctataagttacctggcctatcagggtgccggcttcgtccacaaccattttagcgactcagacgctaagatgtttcagacgtgtgttcctcagcagtctagcgcacaggacatgcacgtaccagtcccgaaacagctggcccatctcccgctcccggcgctgaagctgccatctccatgtaaaagcaaatcactgggcgacctgacgagtgaagatatagcctgcaattttgagtccaaataccagtgtatttccaagagttttgtgaccaccggcatacgagataaaaaaggggtaactgttaaaactaagtctctggagcccatcgacgcactgaccgagcagctgcgtaagttagtgtccttcgaccaggaagataactgccaagttctgtatagtaagcaggacgcaaaccaattgccccgggcccttgtgagaaagttatcctctagatctcagtccagagtccggaacattgccagtcgagctaaagagaagcaggaagcaaataaacaaaaagtgcccaatccaagcaatggcgctggcgtcgtgctaagaaataagccttccgctcccacacccgcagtaaaccggcattcaacggggtcctacattgctggttatctgaagaatactaaaggaggtggactggagggcagagggatccccgaaggcgcttgcaccgccctgcactatggccatgtggatcagttctgcagtgataattcggtgcttcagaccgaacccagtagcgacgataagccggaaatctattttctcctcaggctatag

SEQ ID NO: 128722 - DNA, 4968 bp, synthetic construct
  misc_feature 1..4968: note = Description of Artificial Sequence: Synthetic coding sequence
  source 1..4968: mol_type = other DNA
atgagcgtgatgcagagcggaacacagatgattaagctgaagaggggcaccaagggcctggtgaggctcttctacctggacgaacaccgtactcgattgcggtggagacccagccgaaagagcgagaaggctaaaatcttaatcgacagcatctataaagtcaccgagggtcgccagtcagagatctttcacagacaggctgagggcaacttcgatccttcatgctgcttcaccatttaccatggaaaccacatggagagcctggatctgatcacgtccaatcccgaagaggctcgaacttggattacgggtttgaagtacttaatggccggtatttctgacgaggatagtttagcgaagcggcagcgaactcatgaccagtgggtcaagcagacattcgaggaggctgataaaaatggcgacggtctacttaatatagaagaaattcaccagttgatgcataaactgaatgtaaacctcccaagacgtaaggtcaggcagatgttccaggaggcggacaccgatgagaatcagggcactctgacctttgaggaattctgcgttttctacaaaatgatgtccttaaggagagacctgtacctgttgctcttgtcttattctgataagaaagaccatctgactgtggaagaactagctcaatttcttaaggtggaacagaagatgaataatgtgactacggattactgcctggacataataaaaaagtttgaagtcagtgaggaaaataaggtgaaaaatgtgctgggcattgaggggttcacgaattttatgaggtcccctgcatgtgatatcttcaatccactgcatcacgaggtgtaccaggacatggaccagccactatgcaattattatattgctagctctcataatacttacttgacaggcgaccagctgttatcccagtctaaggtcgatatgtatgcaagagtactacaggaaggctgtcggtgcgtggaagtagactgctgggatgggcctgatggtgagcccgtcgtccaccatggttacaccttaactagcaagatcctttttcgagatgtcgttgaaacaatcaacaagcacgcgtttgttaagaatgagtttcccgttatactatctatcgagaaccactgcagtattcagcagcagaggaagatagcccagtatctaaagggcattttcggggacaaactagatctcagttccgtcgatactggagaatgtaagcagctgccgagtccacagagtttgaaggggaagatactggttaaaggaaaaaagctgccatatcatctgggagacgatgcagaggaaggggaagtgtccgatgaagattcggcagatgaaatagaggacgagtgtaagtttaagttgcattactcaaacggaacaacagagcaccaggtcgagtcatttattcggaagaagctcgagtctctcctgaaagaatctcagattcgggataaggaagatcctgacagtttcacagtaagagctctgttgaaggcaacccacgagggactgaatgcacacctcaagcaatccccagacgttaaggagagtgggaaaaagagccatggcaggtcactaatgactaacttcggcaagcacaaaaaaacaaccaaatcaagatccaagagttactccaccgatgatgaggaggacacccaacaaagcaccggtaaagagggcggacagctctatagactgggtcgtaggcgaaaaacgatgaagttatgcagagaactgagtgatttagtcgtctataccaacagcgtggctgcacaagacatagtcgacgatggtactactgggaatgtgctttcattctccgagactagggcacatcaggtggtgcaacaaaaatctgaacagttcatgatctacaaccagaagcagcttactcgcatctatcctagtgcatacagaattgatagttcgaacttcaatcctctcccttactggaatgccggctgtcagctcgtagcattaaactatcagtctgaaggaagaatgatgcagttgaatcgtgctaagttcaaagccaacggcaactgcggatatgtcttgaagccccaacagatgtgcaaaggcacctttaacccattcagtggggacccccttcccgccaaccctaaaaagcagctgattctgaaagtgatttctggccaacagttgccgaaaccccctgactcaatgttcggcgatcggggcgagatcattgatcccttcgtggaggtcgaaattatcggcctgcctgtggactgttgcaaggatcaaactagagttgtcgacgacaatggattcaacccagtgtgggaagaaacacttaccttcactgtgcacatgcctgaaatagccctggttaggtttttggtatgggaccacgacccgatcggaagagactttgtgggccagcgcacagtgacctttagtagcctcgtccctggctaccggcacgtgtacctcgagggccttacagaagctagcatcttcgtccatatcaccatcaatgagatatacgggaaaaaccggcagctgcagggtctgaaagggttgttcaacaagaatcctagacacagctcttccgagaataattcacattatgtccgcaagcgtagtataggagaccggatactcaggaggaccgcctccgcccctgccaaaggacggaaaaaatcaaaaatgggcttccaggagatggtggaaataaaagacagcgtctccgaagctacacgggatcaagatggggtgttgcggagaacaacccggtccttgcaggcccgacccgtttcgatgccggtggatcgcaacctgcttggagccttgtcactgcccgtgtccgagactgcaaaggatatcgaggggaaggagaactctctggctgaagacaaagatggcaggcggaagggtaaggcttcgatcaaggacccgcactttttgaacttcaataagaagttgagctcctccagttccgcccttctgcacaaagacacgagccagggcgacaccatcgttagcacagctcatatgtcagttacaggtgagcagctcggcatgagctcaccccgaggagggcgcacgacctcaaacgctacctcaaactgtcaggagaacccttgccccagcaagagtctgtcacctaagcagcacctagcacctgatccagtggtaaatcctactcaggatctgcacggggtcaagatcaaagagaagggcaacccggaggatttcgtggaaggcaagtcaatcctatccggctccgtcttatcacactccaatctcgagattaaaaacctcgaaggcaaccggggcaaaggcagagcagcaacatccttctccctgtcggatgtgagcatgctttgctccgatatcccagatctccattctaccgcaatactccaggagtcagtcatttcccatttgatcgataacgtcacactgactaacgaaaacgagccggggagttcgattagtgctctgattggacagttcgatgaaacaaataaccaggctctgaccgtggtgagtcacctgcacaacaccagcgtgatgagcggccactgcccgctgcccagcctgggtctcaaaatgcccatcaaacatgggttttgtaagggtaagagcaagagttcattcctgtgttcttccccggagctcatcgccctctcctcctctgagaccactaagcatgcgactaataccgtgtatgagactacatgcacccccatcagcaaaacaaagcctgacgacgacctgtcaagcaaggcaaagactgccgccctggagagcaacctcccaggctctcccaatacctcccgcggttggctcccaaaaagcccaaccaagggagaggactgggagacgctcaaatcctgttcgcctgcttcctcaccagatctgaccctggaggatgtcattgcagaccctactctttgttttaactccggagagtcttcactagtggagattgacggcgagagtgaaaacctgtccctcaccacttgtgaataccgtagagaagggactagccagttggcctccccactgaagctgaaatataaccagggtgtggtcgagcattttcagcgcggtctgcgcaatggatattgtaaagaaaccctaaggccttcagtacccgagattttcaataacatccaggacgtgaaaacccaatccattagctatctcgcttaccagggcgcggggtttgtacacaatcacttcagtgattctgatgctaagatgtttcaaacatgtgtaccccaacagtcgtccgcgcaggacatgcacgttccagtgccaaaacagctagcccacctacctctccccgcactgaaactaccaagcccttgcaaatccaagagtctaggagacctaacctccgaggatatcgcatgcaactttgagagcaagtaccagtgtatcagcaagagcttcgtcaccacaggtattcgcgataagaaaggggtgaccgtgaagacaaagtccttggaaccaatcgacgctctgactgagcagctgcggaagctggtgtcctttgatcaggaagacaactgccaggtgctatatagcaaacaagacgccaaccaactgcccagagccctggtcagaaaactgtcctccagatctcaaagtcgcgttcgcaacatcgctagccgagcaaaagagaagcaagaagctaacaaacagaaagtgcctaatccttcaaatggcgctggagtcgtgctgcggaacaaaccttctgctcccacaccagctgtaaatcgacatagcactggtagttacattgcaggctacttgaagaacacaaagggcggcgggttggaaggacgaggcataccagaaggcgcctgtactgctctacattatggacatgtagaccaattctgtagcgataactctgtgctgcagacggagcccagcagtgatgacaaacctgagatctacttcctgctcagactgtag

SEQ ID NO: 128723 - DNA, 3009 bp, synthetic construct
  misc_feature 1..3009: note = Description of Artificial Sequence: Synthetic coding sequence
  source 1..3009: mol_type = other DNA
atggccgatctggaggtctacaagaatctgtcccccgagaaagtcgaacggtgcatgtccgtgatgcaaagcggcacacaaatgattaaattgaagcgcggcacaaaaggattagtcagactcttctacctcgatgaacaccgcaccagactacgatggaggcccagcaggaagtctgagaaggccaaaatccttatcgatagcatatacaaggtgaccgagggtaggcagtcagagatattccataggcaggctgagggtaatttcgacccgtcatgctgttttacaatctaccacggaaatcatatggagagtctcgatcttattacatctaaccccgaggaagccaggacgtggataaccggccttaagtatctgatggcaggcatcagcgacgaagattccctcgctaagcgtcagcggacgcacgaccagtgggtaaagcaaacatttgaggaggctgacaaaaatggagatggcttgcttaacattgaggagatccatcaattaatgcacaagctgaacgtgaatctgcctcgccgcaaggtccggcagatgttccaggaagctgacaccgatgaaaatcaagggacactaacctttgaagaattctgtgtcttttacaagatgatgtctctcaggcgcgacctgtaccttttgctcctctcttacagcgataagaaagaccatctgaccgtagaagagcttgcccaatttctaaaggtcgagcagaaaatgaataatgttactaccgactattgccttgatattatcaagaagtttgaggttagcgaagagaacaaggtgaaaaatgttctcggcattgaggggtttacaaacttcatgcggagccctgcatgtgatatcttcaacccgctccaccacgaagtttatcaggacatggatcagccgctctgcaactattacattgccagctctcacaacacttatctgacaggggaccagctgctgagccagtcaaaggtcgacatgtacgctcgcgtcctgcaagagggctgtaggtgcgtcgaggttgactgctgggacggcccggacggcgaaccagtcgtccatcacgggtataccttaacctcaaaaatcttgttcagagatgtagtggagactatcaataagcacgcttttgtaaaaaacgagttccccgtgattctgagcatcgagaaccactgctccattcaacagcaaagaaaaatcgcgcagtacctgaagggtatctttggggacaaattagacctgtccagtgtggatacgggggaatgcaagcagctgcccagcccacagtcactaaaaggaaaaatccttgtgaaaggaaagaagctcccctaccacctaggggacgacgccgaagagggcgaggtgtctgatgaggattccgccgacgagatagaggacgagtgtaagttcaagctccactactctaacggtacaacggaacatcaggtcgagagttttatccgcaagaaactggaaagcctgttaaaagagagccaaatccgagataaagaggacccagactcatttacagtaagagccctgttgaaggccacacacgaaggcctgaatgcccatctgaagcaatcccctgatgtcaaggaatcaggcaagaagagccatggtcgatccctgatgacaaattttggcaagcacaagaaaactacgaagagccgctccaagagttactccactgacgacgaggaggatactcaacaaagtacaggcaaggaagggggccagctgtacagattgggcaggcgacgtaaaaccatgaaactatgccgagaactctcagatctggtggtgtataccaatagtgtagccgctcaggacatcgtggacgatggtacgaccggaaatgtcctgtctttcagtgagacacgggcgcaccaggtggtgcagcagaagtcagagcaatttatgatttacaaccagaaacaactgaccagaatataccctagtgcttatagaatcgactccagtaatttcaatccccttccctattggaatgctggatgccaactggtcgccctaaattaccagtctgagggaaggatgatgcagctgaatcgcgccaagtttaaagctaacggaaactgtggatacgtattaaagcctcagcagatgtgcaagggcactttcaatccgttctcaggcgatccactgcccgccaaccccaagaaacaattgatcttgaaagtcataagcggccaacagctgccaaaaccaccagactctatgttcggcgaccgcggggagatcatcgaccctttcgtggaagtagaaattataggtctcccggtggattgctgtaaggaccagactcgtgtcgtggacgacaatggcttcaatcccgtctgggaggaaactctaactttcaccgtgcacatgcctgagattgctctcgtcaggttcctagtgtgggaccatgaccctattggccgggattttgtgggtcaacggacagtgacgttctcttccttggtcccgggctaccggcacgtttacttggaagggctaaccgaagccagtatttttgtccatataaccatcaacgagatttacggcaaatggagtccacttatcctgaatccatcctacactatcttgcacttcctgggcgcgacgaaaaatcggcagttgcagggtctaaaaggactgttcaacaaaaacccgagacactcttcttccgagaataattctcattatgtgcggaagcgttcaatcggcgatcggattttgcgtcggacagccagtgcccccgccaagggccggaaaaaatcgaagatgggatttcaagagatggtcgaaatcaaggacagcgtctccgaggccacgcgagatcaggatggcgtgctgcgccgtacgactagaagtctgcaggcccgccccgtgtcgatgccagtcgatagaaacttgttaggagctctgtcactgccggtgagtgagaccgccaaggacatagaaggaaaagagaattctttggtccaaatctag

SEQ ID NO: 128724 - DNA, 4968 bp, synthetic construct
  misc_feature 1..4968: note = Description of Artificial Sequence: Synthetic coding sequence
  source 1..4968: mol_type = other DNA
atgtcagttatgcagagcggaacccagatgattaagctgaagagaggaactaaaggccttgtgcggttattctatttggatgagcacaggactcgcttaaggtggcggccgtcccgtaagtcggaaaaggctaaaattctgattgacagcatctataaagtaactgaaggcagacagtccgaaatcttccatagacaagcggaaggaaacttcgatcccagctgctgcttcacgatctatcacggaaatcatatggagtctctcgatctgattacctctaatcctgaggaagcccgcacatggattacgggtttaaaatacttgatggcgggaatcagcgatgaggactctcttgctaaacggcagagaacccacgaccagtgggtgaaacagaccttcgaggaagccgacaaaaatggtgacggattgttaaacatcgaagaaattcaccagctcatgcacaagctgaatgtgaacctgccccggcgtaaagttcgacagatgttccaggaggctgacaccgatgagaatcagggcacactgacctttgaagagttctgtgtgttctacaaaatgatgtcgctgaggcgcgatttgtacctcctgctcctctcttactccgacaagaaggatcacttaacggtcgaagaactggcccagttcctcaaggtcgagcagaagatgaataacgtgaccactgattattgcctggatataatcaaaaaatttgaggtgagcgaagagaataaagttaagaatgtcttaggtattgagggattcacgaattttatgcggtcgccggcctgcgacatctttaatccgcttcatcacgaggtataccaggacatggaccagcctttgtgtaattattacatagccagctcccacaatacatacctcacaggcgatcagttgctcagccagagcaaagtcgacatgtatgctcgcgtgctgcaagaggggtgtcgctgcgtcgaagtcgactgctgggatgggccagacggcgaaccagttgtgcatcatggctacactctgacatctaaaatcctgttccgggacgtcgtagagacgattaataaacatgccttcgtcaagaacgagttcccagtcatactaagcatcgaaaatcattgctcgatccagcaacagagaaagattgcccagtacctgaagggcattttcggagacaagctggatctgagcagcgtcgatacaggcgaatgcaagcaactgccgagtcctcagtcacttaagggcaaaatccttgttaagggcaaaaagctaccttaccacttgggagatgacgccgaggagggtgaggtgtcggacgaggactccgccgacgaaattgaggacgaatgcaaattcaagttacactattcgaacggtaccactgagcatcaagttgaatctttcatcagaaaaaagcttgagtctttgctcaaggaaagccagattcgtgacaaggaggatcctgattcgttcacagtccgggctctactgaaagcgactcatgagggcctaaatgctcacctgaagcagtcccctgacgtgaaggaaagcggcaagaagtctcacggacgttcgctcatgacaaacttcgggaaacacaagaagacaactaagtccaggtccaagtcctactctaccgacgatgaagaggatactcagcagagcaccggaaaggaagggggacaactgtatcgcctaggccgaagaagaaagaccatgaaactttgtcgagaactgagcgacctagtggtttacaccaactccgtcgctgctcaagatatcgtagatgatgggacaactggaaacgtcctcagcttttccgagaccagggctcatcaggtcgttcagcagaagagtgaacagtttatgatctacaatcagaagcagctgacccgcatttacccttccgcctatagaatcgacagctcgaacttcaatcccctgccatactggaacgcaggttgtcagcttgtcgctctgaattaccagagcgaaggacgcatgatgcagctgaaccgcgccaaattcaaagctaacggaaattgtggctacgtgttaaagccacaacagatgtgcaaaggtaccttcaaccctttcagcggcgatcctctacctgcaaacccaaaaaaacagctgattctaaaggtcattagtgggcagcagttaccgaagccaccagatagcatgttcggcgaccgtggagaaatcatcgaccccttcgtagaagtcgaaatcatcggcctgcctgtggactgttgtaaagaccagactagggtcgtagatgacaacgggttcaacccagtttgggaggagaccctgacctttactgtccacatgccggagattgctctcgttaggttcctggtgtgggaccacgatcccattggcagagacttcgttggccagcgcactgtgacctttagttcgctggttccaggctatcggcacgtctacctcgaaggcctgaccgaggcatctatcttcgttcatattaccattaatgaaatctacgggaagaatcgacaactgcaaggattgaaaggcctgttcaacaagaatccgcgacattcctcttctgaaaacaattcccactatgtgaggaaacgctctatcggagaccgaatcttaaggagaacagccagcgctcccgctaaaggaagaaagaaatcaaaaatgggctttcaggaaatggtagagattaaggattcagtcagcgaggcaacccgtgatcaagatggggtcctgcggaggacgacacggtcgctgcaagcacggcccgttagcatgccagtggacaggaatttgttgggcgccttgagcctgcccgtgagcgagacagctaaagacatagaaggcaaggagaattccctggccgaagacaaggacgggcggaggaaaggaaaagcaagcattaaagacccccacttcctcaactttaacaagaagctgtcatcaagcagctccgccctgctgcacaaagacacaagtcagggtgacacgatcgtcagcacggctcacatgtccgtgacaggtgaacagcttggaatgagcagcccccggggtggcaggaccacaagcaacgccacctctaactgtcaggagaacccttgcccttcaaagagcctctcacctaaacagcatcttgcacccgatcccgttgtcaaccctacccaggacctacatggagtgaaaatcaaggagaagggcaatcccgaggattttgtcgagggaaagtctattctgtctggctccgtgctgagccactctaatctggagatcaaaaatctcgaggggaatagagggaagggtcgcgcagctacctctttttccctgtcagatgtgtccatgctgtgttcagacatccccgaccttcacagtaccgccatcctgcaggagtccgtgataagccacctgatcgataatgtgaccctgactaacgagaacgagcctggctcttcgatttccgctctgatcggacagtttgacgaaactaataatcaggcactgacagtcgttagtcatctacacaatacttctgtgatgtctggacactgtccattgccctcattaggtttgaaaatgcctatcaagcatgggttctgtaaggggaagtctaaatcatcgtttctctgtagcagccctgaactgattgctctgagctccagtgaaactacaaagcatgccacgaatacggtatatgagacaacatgcactccaatatcaaagactaaaccggacgatgatctcagttcaaaagcaaagaccgcggcactggagagtaacttaccaggtagcccgaatacatcacgtggttggctccccaagagcccgacgaagggcgaggactgggagacactgaagtcctgctctcccgcctcctcaccagacctgacactcgaagacgtgatcgccgaccctaccctgtgctttaacagcggagagtcctccctggtcgagattgatggtgagtctgaaaatttgagcctgaccacttgcgagtacaggcgcgagggcaccagccagttagcgtcccccctgaagctgaagtataatcaaggcgtggtcgaacattttcagcgcggtttgagaaatggatattgcaaggagacactcagaccctcagtgcccgagatcttcaacaacatccaggacgtgaagacgcaaagcatcagctacctggcatatcagggcgcagggttcgttcacaatcatttttccgattctgacgccaaaatgttccaaacttgtgttccacagcagtccagcgcccaggacatgcatgtccccgttcccaaacaactcgcacaccttcccctgcctgcgctaaagctgcctagcccctgcaagagcaagagtctcggcgacctgacatccgaagatattgcttgcaatttcgagtcgaagtaccagtgtatttccaagagcttcgtcacaactggcatacgagataaaaaaggcgtgacagtgaagaccaagtcactcgaaccaatcgatgcactcaccgaacagctgagaaaattagttagctttgaccaagaagacaactgtcaagtcctttattccaagcaagatgctaatcagctcccaagggcgttggtgaggaagctgtccagtcggagccagagtcgcgttcggaatattgcatcccgggcgaaagaaaaacaagaagccaacaaacagaaagtaccaaacccgtcaaatggcgccggtgtagtcctgcgcaacaagccatccgcccccacacccgcggttaatcggcattccacgggctcctatatcgccgggtatttgaaaaacactaagggcggcggactcgaagggcggggcattcctgagggagcctgtaccgccctgcactatgggcatgttgaccagttctgttcagacaattccgtgcttcaaacagagcccagctccgacgacaagcctgagatctacttcctgctacgtctctag

SEQ ID NO: 128725 - DNA, 3045 bp, synthetic construct
  misc_feature 1..3045: note = Description of Artificial Sequence: Synthetic coding sequence
  source 1..3045: mol_type = other DNA
atggcagatctcgaagtgtataaaaatctcagcccggagaaagtagaacgctgcatgagcgtgatgcaaagtggaacccaaatgatcaagctcaaacgagggaccaaggggctggtccgcctcttctacttggacgaacatcgcacccgcctacgttggaggccctcaaggaaaagcgaaaaggccaagatacttattgatagtatctataaggtaactgaggggcggcagtctgaaatcttccatcgtcaagctgaaggaaacttcgatccatcttgctgttttacaatttatcatggtaatcacatggaaagtctggatctgataactagtaatcctgaggaggccaggacatggattacagggctgaaatatctaatggcgggcatctcggacgaggacagcctcgccaaacgccagcgaacacacgaccagtgggtcaaacagacattcgaggaggcagataagaacggggacggtctcctgaacattgaagagatacaccagctgatgcacaaactgaatgtgaacctgccgcgtcgtaaggttagacagatgttccaggaagctgacacggatgagaatcaggggacactgacatttgaggagttctgtgtgttttataagatgatgtcgttacggcgggacctgtacctgcttctgctgtcttattccgataaaaaggaccacctcacggtagaggagttggctcagttccttaaggttgaacagaagatgaacaatgtaacgaccgattactgcctcgatatcattaaaaagttcgaagtgagcgaagaaaataaggttaaaaacgtgcttggcatcgagggcttcaccaatttcatgagatccccagcctgtgatattttcaaccctctgcaccatgaagtctaccaagatatggaccagccactttgcaattattatatcgcaagctcccataatacctatttaacaggggatcagttgctgagccagtcaaaggtcgatatgtacgcgcgcgtcttgcaggagggctgccgctgcgttgaggttgactgctgggatggacctgatggcgagcccgtagtgcaccacggttatacgctgaccagtaaaatcctctttcgggacgttgtggagaccattaacaagcatgccttcgtgaagaacgagttccctgttatcttgtctatagaaaatcactgctcaatacagcagcagagaaagatcgcgcagtaccttaaagggatctttggagataagctggatctctcatcagtcgacacaggagagtgtaaacaattgcccagcccacagtctctaaagggaaagattctggttaaaggaaagaaattaccgtaccacctcggggacgacgcggaagagggtgaggtatcagatgaggattcagcagatgagatagaggacgaatgtaaatttaaactccactacagtaatggtaccaccgaacaccaggtcgagtcgtttatccggaagaagctggagagcctcctgaaggaaagccagatacgggataaagaggatccagacagctttactgtgagggcactgctcaaagcaacccatgaaggcctcaatgctcatctgaaacagtctccagatgtgaaagaatctggcaagaaatctcatggccgtagcctgatgacaaacttcggaaagcataagaaaactaccaaaagcagaagtaagtcctactccacagacgacgaggaggacacgcagcagagcaccgggaaggagggggggcagctatatcggttgggccgcagaagaaagacaatgaaactctgcagggagctctccgacctggtagtgtacacaaactctgtcgcggcacaggatatcgtggacgacgggacaaccggtaatgtcctctctttcagtgaaacaagggcgcatcaggttgtccaacagaagagcgagcagtttatgatttacaatcagaaacagttgacgcgtatttacccctccgcttataggatcgattcctcaaacttcaacccactgccctactggaacgccggctgccaactagttgccctgaattatcagagtgagggtcgtatgatgcaactcaatcgcgccaagttcaaggctaatggtaactgcggctatgtcctgaaaccccaacagatgtgcaaggggacctttaatccgttcagtggtgaccccctgcccgctaaccctaagaagcagctgatccttaaggtcattagcggacagcaactccctaaaccacctgattctatgtttggcgacaggggtgagatcattgatccttttgtggaagtcgagatcataggattgcctgtagactgctgcaaagaccaaactcgtgtggtggacgacaatggcttcaacccggtgtgggaggagactctcacgtttaccgtacacatgcccgaaatcgccttagtgcgctttttggtttgggaccatgacccaattggcagagatttcgtaggccaacggacagtcaccttctctagcctggttcctggctaccgtcatgtctatctggaaggtctgaccgaggcatccatctttgtccacatcacgattaatgaaatatatggtaaaaatcgacagttacagggactaaaaggattgtttaacaaaaatcctagacactctagttcagagaataacagtcattatgtcagaaaaaggtcaatcggggaccgtattttacgccggactgcctctgcccctgctaagggtagaaagaaaagcaaaatggggttccaggaaatggttgaaattaaggattcagtaagtgaggcaacacgggaccaggacggcgtgctgagacggacgacccgatcattacaggcacggcctgtgtcgatgccagttgatcgaaacttgctgggggcacttagcctgccagtgagcgagactgcaaaagacatcgaggggaaggaaaattcccttgatagtagcttttgccggccaacagagcaggccaaagcggaaatgtgtaaggtgccttttcctcggcaattagagtgcgtgatgaagatggaaatctccgagacatag

SEQ ID NO: 128726 - DNA, 3507 bp, synthetic construct
  misc_feature 1..3507: note = Description of Artificial Sequence: Synthetic coding sequence
  source 1..3507: mol_type = other DNA
atgttccgcgaagccgacacggatgatcaccaagggaccctgggctttgaagaattctgcgccttctataagatgatgtctacacgccgagatctttacttactgatgctgacttactctaatcataaggaccatctggatgcggcttctctgcaaagattcctgcaggtagagcagaagatggccggcgtgacactggagtcgtgtcaagacatcatcgaacagtttgagccgtgtcccgagaataaatcaaagggcctgctgggaatcgatggttttactaactatactaggagccccgcaggtgatatctttaatccagagcaccatcatgttcaccaagatatgacccagccacttagccactattttatcacatcaagtcataatacatatttggttggagaccagctcatgagtcagagtcgagtagatatgtacgcgtgggtgttgcaagctggctgtagatgcgtggaagttgattgctgggatggtccagacggagagccgatcgtgcatcatgggtatacactgaccagcaaaattcttttcaaagacgtgatcgagactattaataaatacgctttcatcaagaacgaatacccggtgattttaagtattgagaaccactgctccgtcattcaacagaaaaagatggcccaataccttacggacattttaggagacaaactagacttatcatccgtgtcgtctgaggatgctacaactctaccctcacctcagatgttgaagggcaaaatcctcgtgaaagggaaaaaactacccgcgaacatcagtgaagatgcagaagaaggcgaagtgtctgacgaggactcagctgacgaaatcgatgatgattgcaagttactgaatggagatgcgtccaccaacaggaaacgagtagagaatacggctaaacgcaaacttgactccctgattaaggaatccaagatcagagattgcgaggacccgaataatttttctgtctcaaccctgagcccctcaggcaaattaggccgtaaatccaaggcagaagaagacgtggagtcaggcgaggacgccggtgcaagcaggagaaatggaagactcgtggtgggatctttcagtcgacggaagaagaaaggaagcaagcttaagaaagccgcaagcgtggaggaaggtgatgagggacaggattctccaggaggccagagccgcggcgccacaaggcaaaagaagactatgaagttatcacgcgccctgtccgacttagtgaaatatacaaagagtgtggcaacacacgatatcgagatggaggccgcttctagctggcaggtgtcttctttctcggagacaaaggcacaccagattctgcagcagaagcccgcccagtaccttcggttcaaccagcagcagctttcacggatctacccctcctcgtatcgagttgatagtagcaactataatccacagcctttctggaacgcaggatgccagatgggagtgttcaatcctaattctgaagaccccttgcccggacagctcaagaaacaacttgtgttacgcattatttccggccagcaactgcccaagcctcgtgactccatgctcggcgatcgtggtgaaattatcgatccgttcgttgaggtcgaaattatcgggcttcctgtcgattgttctcgggaacagacaagggtggttgatgacaacgggtttaaccctacttgggaagaaaccctcgtattcatggtccacatgccagaaatcgcacttgttcggtttctcgtctgggaccacgaccccatcgggcgggatttcatcggacagagaaccttggccttcagttcgatgatgcccggctatcgtcatgtttatctagaagggatggaggaggcctcaatctttgtgcatgtcgcagtgagcgatatttctggcaaagtcaagcaggccctgggtttgaagggcctcttcttgcgaggacccaaacccggcagccttgattcgcatgcggccggacgaccaccagcacgcccttctgtgagtcagagaatcttgaggcggactgccagtgcacccacaaaatctcagaagcctgggcgtcgtggctttccggagctggtgttggggactcgggatacaggctctaagggcgtcgctgatgatgttgtgcccccaggaccgggtccagctccagaggctcctgcccaggaaggccccggatctggttccccacgcgacactagaccattgtccacccagagaccgttaccgccactatgctccctcgagactatcgccgaagagcctgcccccggcccaggtccgcccccccccgctgcggtgcccacgtcatcttctcaggggcgccctccttaccctactggcccaggggcaaacgtggcgagcccgttggaagatacagaggaaccacgagactctcggcctagaccctgcaatggtgaaggagctggtggcgcttacgaacgcgcgcccggttctcagaccgacggcagaagccaacctcgaacacttgggcacttgcccgtgatccgcagggtgaagtcggaaggacaggtgccaacggaacctctggggggatggaggccgctggctgctcctttccccgctcccgccgtttacagcgatgctactggcagtgatccactctggcagaggctcgagccatgtggtcacagggattctgtgtcatctagttcctccatgagctctagtgacaccgtaatcgacctttcactgccatctctcggcttaggcagatcaagggaaaatctggccggagcccatatgggaagactgcccccccgacctcactcagcttcagccgctcgtcccgacctgccccctgtgactaaatctaaatctaatccaaacttgcgagcaacaggacagcggcctcctattccggatgagttacaacctaggtccttagcccctaggatggctgggctgccctttcgtcccccatggggttgtctctcactggtcggtgtgcaggactgcccagttgctgccaagagcaaatctctcggtgacctgaccgcagacgacttcgcgccctcgttcgaaggtggctcgaggagactgtctcactcccttgggttgcccggggggactagaagagtgtcaggtcctggagtgcgacgtgacacacttaccgagcagctacggtggttgaccgtgttccagcaggccggagacattacctctccgaccagccttggacctgcaggagagggggtcgcaggaggtccggggttcgtaaggcgaagctctagcaggtctcatagcagagttcgcgcaatcgcatcccgtgctcgccaggcccaggaaagacagcaacggctccagggactgggccgacaaggtccacctgaggaggagaggggcactcctgaaggagcttgttccgtgggccacgaaggctcagttgacgctcccgcaccctctaaaggagcactggggcccgcctcagctgccgccgagaacttagttttactgaggctgtag

SEQ ID NO: 128727 - DNA, 1500 bp, synthetic construct
  misc_feature 1..1500: note = Description of Artificial Sequence: Synthetic coding sequence
  source 1..1500: mol_type = other DNA
atgggcgctatgcaggaaggtatgcaaatggtcaaactacggggcggcagtaagggcctcgtgcgcttttattacctggatgagcaccggtcctgtatacggtggcgacccagtcgcaagaatgagaaggctaagatatcaatagactcaattcaggaggtgtcagagggtcggcagagcgaggtctttcagcgctaccctgacggctcctttatcatcgatccctttgtagaggttgagattatcggtctgccagttgattgcagccgagagcaaacacgggtggtcgacgacaacggtttcaaccccacttgggaggagactctggtgttcatggtccatatgcctgagattgccctggtccgcttcctggtgtgggatcacgacccaatcgggcgcgatttcataggacagcgcacactggccttctcttcgatgatgcccgggtataggcacgtgtacctggagggaatggaagaagcctcgatctttgtccatgtggcagtcagcgacatttcaggcaaagtgaagcaggccctggggctcaagggacttttcttgcgcggaccgaaaccaggttcattggattctcatgccgcggggaggccaccggcacggccctccgtgagtcagagaatcctgcggcggacagcaagcgcacccaccaagagccagaagcctggccggcgtggtttcccggaattagttctaggaaccagagatactggctcgaaaggagttgcagatgacgtggttcctccgggaccaggtcctgctcccgaggctcccgcccaggaagggcccggctctggaagcccaagaggcaaggcaccggcagccgtcgcagaaaaaagccccgtgcgagttaggcccccccgggttctcgatgggcccggccccgcagggatggcagctacctgtatgaagtgcgtagtcggctcttgcgcgggggtgaacaccggtggtctccaacgagagaggccacccagtcccggcccagcctctagacaagccgcaatccgccagcagccgcgggcacgcgcagactctcttggagccccatgttgcgggctcgacccacatgccatacccggccgatctcgggaggcaccgaaggggccaggagcctggcgccaggggcctggaggatcaggctccatgtccagtgactcatcgtctcctgacagtcctggaatccctgaacgttcacctaggtggccagaaggcgcatgcaggcagccgggggctctccagggcgaaatgtcggcccttttcgcccagaagctggaagagatccgatctaagagccccatgtttagtgctgggaagcctctcctcccgtgtgtggtgttgccacacgcccccggaatggccggccctggtagtcctgcggctgcgtccgcctggaccgtgtccccacgggttttagttctggtcgccttatacccgtggcattgccttaggggaacactgctgccgtggctggcctgcggtccttag

SEQ ID NO: 128728 - DNA, 3177 bp, synthetic construct
  misc_feature 1..3177: note = Description of Artificial Sequence: Synthetic coding sequence
  source 1..3177: mol_type = other DNA
atggccgggatctctgacgaggactcactcgcgagacgccagaggactcgggatcaatggctgaaacagactttcgacgaagccgataaaaacggtgacgggtctctatctattggggaagtgttgcagctcctgcacaagctgaacgtgaacctgcctcgccagagagtgaaacaaatgttccgggaagctgataccgacgatcatcagggcacactaggctttgaggagttctgcgccttctataaaatgatgtcgactagacgagatctctatctgctgatgctcacttactcaaatcacaaagaccacttagacgccgcatcccttcagcgatttttacaagtagaacagaaaatggccggtgttaccttggagagctgccaggacatcatcgaacagttcgagccctgtccggaaaacaagagcaaaggtctcttggggattgacggcttcaccaactacacccgcagtccagccggtgacatttttaaccccgagcaccatcatgtccaccaagatatgacccaaccgttgtcacactatttcataaccagttctcacaatacatacctggtgggcgatcagctgatgtcacagtctagagtcgacatgtacgcgtgggtgctccaggcagggtgtcggtgtgttgaagttgattgctgggacggccctgatggggaacccattgtacatcacgggtacaccctgacctctaagattctctttaaagacgtgatcgagactattaacaaatacgccttcatcaagaatgaatatcccgtgatcctctctatagagaatcactgctccgtcatccagcagaaaaagatggcccagtatctgaccgatatcttaggcgataagcttgatctcagctccgtgtcatctgaagacgccaccactcttccttctccacagatgcttaaagggaaaattttggttaaaggtaagaagctgcccgctaatatctccgaggacgccgaggagggagaggtatccgatgaggacagtgctgacgaaattgacgatgattgcaaactactgaacggtgacgcctcaaccaaccgcaagagggttgaaaacacagcaaaacggaaactggactccctgattaaggagagcaagatcagagactgcgaagaccctaataacttttctgtatctactttaagtcccagcggaaagctgggcagaaaaagcaaggcagaggaggatgtcgaaagtggcgaagatgccggtgcttcccgccgcaacggcaggctggtagtagggtccttctcgaggagaaagaaaaagggctctaaacttaagaaggccgctagtgtcgaagaaggagatgaaggccaggatagcccaggcggccagtccagaggagcaaccaggcaaaaaaagacgatgaagctctccagagcgctgagcgatctcgttaagtacacgaagagtgtggctacccacgatatagagatggaagccgcctcctcatggcaggtgagctccttctccgagaccaaagcgcaccaaattctccagcagaagccagcccagtatcttcggtttaatcagcagcagttgtctagaatttacccctccagttaccgcgtagatagctcaaactacaaccctcagcctttttggaatgctggctgccaaatggttgcactcaattatcagtcagaggggcgaatgctgcagctgaaccgggccaagttctcggccaatggaggatgtggatatgtgctgaaacctgggtgcatgtgccaaggtgtgttcaatcccaactccgaagacccactgccaggccagttgaaaaaacagctggtgctgaggatcatcagtgggcaacagctgcctaagccacgagactctatgcttggggaccgtggagaaatcatcgacccctttgtcgaagtggagattatcggcctgccggttgattgttctagagagcagactcgggtggtggatgacaacgggttcaaccctacatgggaggaaactttggtctttatggtgcacatgcctgagatcgcgttagtgagatttctcgtatgggatcacgaccccatagggcgcgattttatcggccagcgtaccctcgctttttccagtatgatgcccggctaccggcacgtttatctggagggcatggaggaggctagcatttttgtacatgtggctgtgtcggatatatccggcaaggtcaagcaggcactagggttgaaggggcttttcctcaggggcccaaaacccggttctttggacagtcacgccgcagggcgcccacccgctcggccgtccgtgtcccagaggatcctgcgaaggaccgccagcgctccaaccaagtcacaaaaacccggccgcagaggcttcccagaactggtgcttggtactagggacaccggctccaagggcgttgcggacgatgtcgtgcccccaggccctggacccgcacctgaagcacctgctcaggagggtcctggcagcggcagcccccgcgggaaagcacccgctgctgtcgccgagaagtctcccgtgagggtgcgccctccccgtgttctggatggacccggtccggcaggcatggccgcgacctgtatgaaatgtgtggtcgggagctgcgccggtgtgaatacgggaggactccaacgagagagacccccttcccctggaccagcaagccggcaagcagcaattcgtcagcaacctagggcccgagcagactcactgggcgcgccgtgctgtggactggatccccatgcaatccccggaaggtcaagagaagcgccaaaggggcctggggcgtggagacagggacccggcggcagcggatctatgagttcggactcctcctctcccgactccccaggtatcccagaacgcagccccagatggcccgaaggggcttgcaggcaacccggcgctttgcaaggcgaaatgtccgcactgtttgctcagaagttagaggaaattcggtctaagagccctatgttcagcgcaggaaagcccctgttgccctgtgtggtcctccctcacgcccctgggatggcagggcctggctcacccgcagcagcatcagcctggactgtgtcacctcgtgtcctggtgcttgtagcgctgtacccatggcattgcctccggggaaccttgctgccatggctggcctgtggcccatag

SEQ ID NO: 128729 - DNA, 1494 bp, synthetic construct
  misc_feature 1..1494: note = Description of Artificial Sequence: Synthetic coding sequence
  source 1..1494: mol_type = other DNA
atgggcgctatgcaggaaggaatgcagatggtcaaactaagaggagggagcaaggggctggtccgattctactacctggacgagcatcggagctgcattcgatggaggccaagtcgcaaaaacgagaaggccaaaatatccattgactccatacaagaggttagcgaaggccggcaaagcgaggtttttcaacgttaccccgacggatcatttgacccgttcgtagaggtggagataatcggactgcccgtggactgttcccgcgagcagacgagagtggtcgatgataatggatttaatccaacctgggaggagaccctggtatttatggtgcacatgccggagatcgctttagttaggttcttagtctgggaccacgaccctattggccgagactttatcggacagcgtaccctggcattcagttccatgatgcccgggtacagacacgtttatctagaggggatggaggaggcttcaattttcgtgcatgtggcagtttccgatatcagcggaaaggtcaagcaagccttagggctgaagggccttttcctcaggggtccaaaaccagggagccttgatagtcacgctgcgggccggccccctgcaagaccttcggtgtcacagagaatcttgcggagaactgcgtctgctcctactaaaagtcaaaagcccggtcggcggggattccctgaacttgtgttgggcacgagagacaccggttctaagggcgtggcagatgatgttgttcctccaggtcctggtccggcccctgaggccccagcccaggagggtcccgggtcgggatccccccgcggaaaagcacccgccgcagttgcagagaaatcccccgtgcgtgtcaggccaccgcgggtgctggatggtcccggtcctgccggcatggccgccacttgtatgaagtgcgtggtgggaagctgtgccggtgtcaacaccggcggtctacaacgggagagaccacccagcccaggacccgcgtctaggcaggccgctattcggcagcagcctcgagccagagcggattcgctgggagcaccctgctgcggcctggatcctcatgccatacccggccggtctagagaggcccccaagggacctggggcctggagacaaggtcccggcgggtccggcagtatgagttcagactcctcctcccctgattcccctggcattccagaaaggagccccaggtggcccgaaggggcctgcaggcagccgggagccctgcagggcgaaatgtccgccttatttgctcagaaactagaagagatccgaagtaagtctcctatgttctctgccggtaagcctctgctcccatgcgtagtgctgcctcatgcccccggcatggcaggacctgggagcccagctgcagcttctgcgtggaccgtctccccccgggtcctggtgctggttgccctctatccctggcactgcctccgcggaacactcctcccctggctggcctgcggcccgtag

SEQ ID NO: 128730 - DNA, 4251 bp, synthetic construct
  misc_feature 1..4251: note = Description of Artificial Sequence: Synthetic coding sequence
  source 1..4251: mol_type = other DNA
atgagtgggccttggccatctcctgacagcagaacaaagggcactgtagcatggctggcggaggtattactctgggtgggtggttctgtggtgctgtcttcagaatggcagttaggcccgcttgtcgagaggtgcatgggagctatgcaggaggggatgcaaatggtgaagctcaggggagggtccaaaggcctggtccgtttctattaccttgatgagcaccggagttgtattagatggagacctagccggaaaaatgagaaagcgaagatctctatcgacagtattcaagaggtttccgagggacggcagtcagaggtctttcaaagatacccagacggatcctttgacccgaattgctgctttagcatctaccatggctcccacagagaatccttggatctggtgagtacctcatctgaggtcgctcgaacgtgggtcacaggcctgcgatacctcatggcaggaatcagcgatgaggacagcctggctaggagacagagaactagggatcagtggttaaaacagacctttgatgaagctgataagaacggcgatggttctctctctattggggaagttttgcagttactccataagttgaatgtcaacctccctcgtcagcgcgtcaaacagatgttcagagaggccgatactgatgaccaccaaggcaccctgggctttgaggagttctgtgccttttataagatgatgagtacccgcagggacctgtacttgttgatgcttacatatagtaatcacaaagaccacctggatgctgcctcattgcaacgcttcctgcaggtggagcagaaaatggcgggagtgaccctcgagtcatgccaggacatcattgagcagttcgagccatgtcctgagaacaagagcaaaggactgcttggaattgacggtttcactaactacacccgatctccagctggcgacatcttcaatccagaacaccatcacgttcaccaagatatgactcaacctctgtcccattacttcattaccagttctcataacacttacctggtgggggatcagctcatgtcacagtcccgagtagacatgtacgcatgggtgctgcaggcaggatgtagatgcgtggaggtagattgctgggacgggcccgatggagagccgatagtccaccacgggtacaccctaactagcaagatcctgttcaaagatgtcattgagactatcaacaaatatgcgtttattaagaacgagtatcccgttatcctgtctatcgaaaatcactgttcagtgattcagcagaagaaaatggcccagtacctgactgacatcctcggtgataaactcgatctatcatccgtatccagcgaagatgccacaactttgcctagcccgcaaatgcttaaaggaaagatcttggtgaagggcaagaagctccctgctaacatctcagaggacgctgaggagggcgaggtcagcgatgaggactctgctgatgagattgacgacgactgtaagttacttaacggcgacgcatctacaaatcgcaaacgtgtcgaaaacacagccaaaaggaaattggattctctgattaaagaatcaaagatacgtgattgtgaagatcccaacaattttagtgtgagtactctctctccgtcagggaagttagggagaaagtcaaaagcagaggaggatgtcgagtccggagaggatgctggtgcaagcaggcgaaatggacgtcttgtcgtaggaagtttcagccggcggaagaagaaagggtccaagcttaaaaaagccgcatccgtggaggagggtgacgaaggccaggattctcccgggggacaaagccggggggcaactcggcaaaagaagacaatgaaattgtcaagggcactgtcagatctggtaaaatatactaaatccgtagcaacccatgatatcgagatggaggcggcttcttcttggcaagtcagctccttctccgaaactaaggcgcatcaaattctgcaacaaaagcctgcacagtatttaagattcaatcaacaacagctgtctcgaatctacccatcctcctatagggttgacagtagcaattataacccccagccattttggaacgcgggctgtcagatggttgctttaaattatcagtcagaagggagaatgttacagttgaatcgcgcaaagttctcagccaatggcgggtgcggttacgtcttaaagcctgggtgtatgtgtcagggtgtctttaacccgaattcggaagatccattaccaggccagctgaaaaaacagctggtgttacgtatcatttctggtcagcagctgccaaagcccagagatagcatgctaggggataggggcgagatcattgatccgttcgtggaggttgaaattattggtctaccagtggattgctctcgggaacagaccagagttgtcgacgataatggatttaatcccacatgggaagaaacgctggtgttcatggtacacatgccggagatagcactggtcagattcctggtatgggaccatgaccctattgggcgagactttatcggccagaggaccttggccttctcttccatgatgcctggctacagacacgtgtatttagagggcatggaagaggcaagtatatttgtccatgttgccgtgtcagacattagtggtaaagtgaaacaggctttggggcttaagggactctttcttagagggcccaagcccggtagcctcgattcacacgcagccggaagacccccagcccgcccatcggtgagccagcggatcctgcgacgcaccgctagcgctcccaccaagtcccagaaaccgggccggaggggcttcccagaactggtgctggggacacgtgatacaggctcaaagggtgtagcagatgacgtcgtgccgccaggaccggggccagcccctgaagcacctgcccaggaggggccaggctccggctcacccagggacacacgacctctgtctacccagagaccattgccgccactgtgcagcctcgagaccattgctgaggaaccagccccaggacctggtcccccccctcccgccgccgtccctacatcttctagtcagggaaggccgccatatccaacaggacccggcgccaacgttgcatcccccctggaagacactgaagagcctcgcgacagtaggccacggccatgcaacggcgagggcgctggcggtgcttacgagagagccccaggatctcagacagacggcagatcacagcctcgcactctcggtcatcttccagttatccggagggtcaagtcggagggtcaggtacccactgaacctcttggtgggtggcggcctcttgccgcgcctttccctgctcccgccgtgtactccgatgccaccgggtccgatccattgtggcaaaggctggaaccctgcggtcaccgggatagtgtttctagcagtagttccatgtcctcaagcgataccgtgatagacctctccctcccctccctcgggctcggccggtcgagggaaaacctggctggcgcgcatatggggcgactgcctccacggccacatagtgcgagtgccgcacggcccgatttacctcccgtcactaagtccaagtcaaaccctaacctacgggccacaggtcagaggccccctattccggatgagcttcagccaagatcgctggccccccgcatggctggcctgccttttaggcctccatgggggtgcctcagcctggtgggtgtgcaggactgcccagtggctgccaagtcaaaatcccttggggatctaaccgcggatgacttcgcgccaagctttgaaggtggaagcaggagactgtctcacagcttgggtctcccaggggggacccgccgcgttagtggtccaggggtgaggcgggacactctgactgaacagctcaggtggctcacagtgttccagcaggctggggacattaccagtcctacatctctcggacctgcaggtgaaggggtggcaggggggccaggcttcgttaggaggtccagttcgagatcccatagtcgggttagggccattgcttcccgagctcgccaggcacaggaacggcaacagagattacagggactcgggagacaaggtccccctgaggaagagagagggacccccgagggtgcttgtagcgtgggccacgagggctcggttgatgctccagctcctagtaagggagctctggggcccgcctccgcggccgctgaaaacttggtgctcctccgtctttag

SEQ ID NO: 128731 - DNA, 4143 bp, synthetic construct
  misc_feature 1..4143: note = Description of Artificial Sequence: Synthetic coding sequence
  source 1..4143: mol_type = other DNA
atgagcgggccatggccttccccggatagccggacaaaaggaacagtcgcatggctagcagaggtgctgctctgggttggagggagtgttgtgctgtcgagtgagtggcaactggggccactcgtggaacgttgcatgggggcgatgcaggaggggatgcaaatggtgaaactgcgcggtggatctaaggggttagtgcgattctactacctcgatgaacatcggagttgcatcagatggcggccttctcgaaagaatgagaaagccaaaatatctatcgactctattcaagaagtgtccgaggggagacagagtgaggtgtttcagcggtaccctgatggtagcttcgacccaaactgttgcttttccatctaccatgggagccacagagaaagtctggacctggtctcaacttcttccgaggttgccaggacttgggtgactgggctccgctacttgatggctggcatcagcgacgaggactctttggcccgtcgacagagaacccgtgaccaatggcttaaacagactttcgacgaagcagacaaaaatggggacggatcgctctccatcggtgaagtcttacaattactccacaagttgaatgtcaatctgcccagacagcgcgtgaagcagatgttccgggaggccgatacagatgaccatcaggggaccctcggtttcgaagagttttgcgccttctacaaaatgatgtccacccgtcgcgatctgtacctgctgatgctcacatacagtaaccacaaggaccatctcgacgccgctagccttcagcgcttcctgcaggtcgagcagaaaatggctggggtcaccctggagtcctgccaagatattattgagcaattcgaaccatgtcctgagaataagagtaaaggcctgctcggaatagatggttttacgaattacactaggtcccccgccggcgatattttcaacccagaacatcatcacgtacaccaggatatgacacagcccttgagtcactactttataacttccagccacaacacatatttggtgggggatcagctcatgtcacagtcccgggtggatatgtatgcctgggttcttcaggccggatgccgctgtgtcgaagtagactgttgggacggcccggatggagaacccatcgtccaccacggttacaccctcacttcgaagattttatttaaagatgtcatcgagacaatcaacaaatacgcgtttataaaaaatgagtatcccgtgatcctttctattgagaatcattgctctgtcatccaacagaagaaaatggcccagtacctgaccgacattctgggggacaagctggatctgtctagcgtgagtagcgaggatgccactacgctcccttcaccgcagatgctgaagggcaaaattctggtaaagggcaagaaactccccgctaatatcagtgaagatgcagaagagggagaggtgtctgatgaggattccgcagatgagatcgatgatgattgcaagctgttgaacggtgatgcaagcaccaaccggaaacgcgtggaaaacactgccaagcgaaaattggacagtctgataaaggagtccaaaatcagggactgcgaggacccaaacaatttctcggtatcaaccttgtctccgagcggaaagcttggtcggaaaagtaaggcagaggaggacgttgaaagcggagaggacgccggcgcctctcggcgcaatggaaggctcgtggtcggaagtttctcgcggcggaagaaaaaaggatctaaactcaagaaagctgccagtgtcgaggagggtgatgagggacaagactcaccgggagggcagtcccggggtgccaccagacagaagaagacgatgaagctaagccgagctttgagtgatctggtgaaatatactaagagtgtggcaacccacgatatagagatggaagctgctagctcatggcaagttagctcgttctcagaaaccaaggcacaccaaattctgcaacagaagcccgctcagtacctacggttcaatcaacagcaactttcccgcatctacccttcatcctaccgtgtggactcctccaattacaaccctcagcccttttggaatgcaggttgccagatgggagtgttcaaccccaattcagaagatccgttacccggccagctgaagaaacagctggttctaaggatcatctcgggtcagcagcttccaaaaccccgggactcaatgctgggagacagaggggagattatcgatcctttcgtggaagtggagattatagggctacccgttgactgcagccgggaacagaccagagttgtagacgacaacggatttaacccaacttgggaagaaaccctcgtgtttatggtccacatgcccgagattgcactggtgaggtttctcgtttgggaccacgacccgattggcagggacttcatcggtcaacgcacattagccttttcaagtatgatgccaggctatcggcacgtgtatctagaaggcatggaagaagcgagcatattcgtccacgtggcagtgtccgacatctccggcaaagttaaacaggcccttggactgaaaggtcttttcctaagggggccgaagcctggttccttggattcccacgctgccgggaggccccctgcccgtccatcagtgtcacagcgtatcctgagaagaaccgcttcagcccctaccaaatcacagaagcctgggaggcggggttttccagagctcgttctcggtacacgcgatacaggaagcaagggggtggctgatgatgtagtaccccccggccctggaccggccccagaggcacctgcccaggagggcccagggagtggttcaccacgggacaccagacccctgagtacccagaggcccctgcctcctctatgttctttagagacaatagcggaagaacctgcaccggggccgggccctccaccaccagccgcggttcctaccagttcatcacaggggcgacccccatatcctaccggccctggcgccaacgtcgcttctccactggaggacaccgaggaacctcgggactcccgacctaggccctgtaatggtgaaggtgcagggggcgcttacgagagagcccccgggtcccaaactgatgggcggagtcaacctagaactcttgggcacctgcccgtaatacgacgtgtaaaatcggaagggcaggtacccaccgagccgttaggaggatggcggcccttggcagccccttttccagcacctgctgtttactctgacgcaacaggctctgacccactgtggcaaaggttggagccttgtgggcaccgggattccgttagttcctccagtagcatgagcagcagcgatacggtgatagatttgtcactgccttcactcggtcttggtcgaagccgggagaacctagcgggggcccacatgggtcggctaccccccagaccccattctgcatcggctgcacggcccgatctgcctcctgtgacgaaatctaaatccaatcccaacctgcgcgctactggacagcgaccccccatccctgacgaattacaacctaggagcttagcccccaggatggccggcctgccattccgccccccctggggttgcctatcactggttggagtgcaagattgccccgtggccgctaagtcgaagtccttaggtgatttgactgcagatgactttgctccatcctttgagggtggcagtagaaggctctcccatagcctcggtctccccggggggacgagacgggtgtcaggtccgggggtaaggagagataccttgacagagcaattacgctggctgacagtgtttcagcaagccggagatattacctcccccacttcattgggcccagccggtgaaggcgtggcgggggggccaggctttgtgcggcggtcctcatctcggtcacacagccgggtacgggccattgcttcccgcgcacgccaggctcaagaaaggcaacagaggctacaaggcctgggcagacaaggcccccctgaagaggagaggggaacaccggagggagcctgtagcgtgggccacgaaggttccgttgatgccccagcaccttccaagggcgcgctgggccccgcctccgccgctgccgaaaacctggtgctattacggctctag

SEQ ID NO: 128732 - DNA, 2136 bp, synthetic construct
  misc_feature 1..2136: note = Description of Artificial Sequence: Synthetic coding sequence
  source 1..2136: mol_type = other DNA
tgagcattaaactaccagtctgagggaagaatgcttcagcttaatagggctaagttctcggctaacggtggctgcggttatgtcttgaaacctggctgcatgtgtcagggggtgtttaatccaaacagcgaagatcctctgcccggccagctgaagaaacagttagttctccgaatcatcagcggccaacagcttcccaaacctcgcgacagcatgctgggagatcgtggcgagattatcgatccatttgttgaggtggagattatcggcctaccagtggactgcagccgagagcagacacgtgtggtcgatgacaatggatttaacccaacctgggaggaaacactcgtgtttatggtgcacatgcctgaaattgcgcttgtcaggttcctggtgtgggaccatgaccctatcggccgagactttatcggccaaagaaccctggccttctcttcgatgatgcccgggtatcgtcatgtgtatctggaaggaatggaggaagccagcatcttcgtgcatgtggcagtaagcgacatcagcgggaaagttaagcaagctttgggcctgaagggcctgttcctcagagggcctaaaccgggctctcttgactcccacgcagcaggccgtccacctgcgaggccctcggtgagccaaaggattttgcgacgcaccgcctcggcccccactaaatcacagaagcccggcagacgtggcttccctgagttagtgctgggtacgcgcgacaccggctccaaaggggtggcggatgatgtggtgccaccaggtccagggcccgcgccggaagcccctgctcaagaggggcccggttcaggctctcccagagatactcgacctttgtccacacagcgcccactcccgccactgtgttccttggagacgattgcggaggagcccgccccgggcccaggtcctcccccccccgccgctgtaccaacttccagtagccaaggacgacctccttaccctactggcccaggagccaacgtggccagcccactggaagacactgaggaaccccgcgattctcgcccccggccatgtaacggcgaaggcgctggaggcgcttacgagcgagcccctggtagccaaacagatggacggtcccagcctcgcactctgggccacttacccgtaatcagaagagtgaagagcgaaggccaagtgcctactgagcccctgggaggttggaggcctctcgctgcaccctttccagcccccgcagtctattctgatgccaccggatctgaccccctgtggcaacgactcgaaccctgtggacaccgggatagcgtctcgagcagttcaagcatgtcaagtagcgacaccgtgatcgatctgagcctgccgtccctgggcctcgggagatcaagggagaatttggcaggggcccacatgggtcgcctgcctccccgcccacactccgcatccgctgctcgccccgatctgccgcccgtcacaaaaagtaaatcaaatcccaatctgcgggcaacgggccagaggcccccaatcccagacgagctgcagccgcgtagcctggcccctcgtatggcaggactgccctttcgtcccccgtggggatgtctaagcctggtcggcgtgcaggactgcccagtcgccgcaaagtctaaatctctgggagatctcaccgccgacgacttcgctccgtcgttcgaaggaggtagcagacgactttcccacagtttgggtctgcctggcggaacaaggagagtgtctggcccgggggtccggagggatacactgactgagcagttaaggtggctgacagtgtttcagcaggcaggcgacatcacgagcccaaccagcttgggaccagctggtgaaggggtggcaggcggccccggtttcgttcgccgctcgtccagtaggtcacacagccgagtccgcgcaattgccagtagagctcggcaggcccaggagaggcaacagcgtttacagggcctcggccgacagggtccgcccgaagaggagcggggcacccccgagggcgcgtgcagtgtggggcacgagggctctgtggatgctccagcgccgtccaaaggcgcccttgggcctgcatcagccgctgctgagaacctggttctcctgaggctgtag

SEQ ID NO: 128733 - DNA, 3390 bp, synthetic construct
  misc_feature 1..3390: note = Description of Artificial Sequence: Synthetic coding sequence
  source 1..3390: mol_type = other DNA
atggaggagcctggccccccgggtggcctcagccaggatcaagttgagcgatgcatgggcgccatgcaagaaggaatgcaaatggtgaagctgagaggcggcagtaagggacttgtgcggttttactacctggatgaacataggtcgtgtatcaggtggcggccttcgcggaagaacgagaaggctaaaatctcgatcgatagcatccaagaggtgtcagaaggccgtcagagtgaagtcttccagcggtatccagacggatccttcgatcctaactgctgtttcagtatttatcatggatctcatagggaatctctggatctggttagtacgagcagcgaagtcgctaggacatgggtcactggcttgcggtacttgatggccggcatctctgatgaggattcactggctagacgccagcggactagggaccagtggctgaagcaaacatttgatgaagctgataaaaatggcgatggatcactaagtatcggcgaagttctacaactgctccacaagttaaatgtgaacttgcctagacaacgggtgaagcaaatgtttagggaggccgatacagacgaccaccagggaacgctggggttcgaagagttttgtgccttctataaaatgatgtccaccaggcgcgacctttacctgttgatgctgacctactcaaaccataaggaccacttggatgcagctagcttgcaaagattcctgcaggtggagcaaaaaatggccggtgtgactttggaatcttgccaagacataatcgagcagttcgagccgtgcccagagaataagtccaagggtctgttgggtatagatggcttcactaactacactagaagtccagcgggcgatatttttaatcccgaacatcaccacgtacaccaggatatgactcagccactatctcattacttcattacctctagccacaatacctatctcgtaggagaccagctgatgtcacaatcccgagttgatatgtacgcctgggtgctgcaggccggctgcaggtgcgttgaagtggattgttgggatggcccagacggtgaaccaatcgtgcatcacgggtatacacttacgagtaagatactgttcaaggacgtcatagagaccatcaataaatacgcgtttatcaagaacgagtacccagtcattctgagcatcgagaaccattgcagcgttattcagcagaaaaaaatggctcagtacctcaccgacatactgggcgataaactggacctgagttcggtttctagcgaggatgctacaacattaccatccccacaaatgctgaaaggtaaaatcctggtcaaagggaaaaaactcccagctaatatttccgaggacgcagaggaaggggaagtttcagacgaagattcagcggacgagatcgacgacgactgtaaactgctcaatggcgacgcatctactaaccggaaaagggtggagaatacagcaaagcggaaactcgatagtctgattaaagaatctaagatccgagattgtgaggatcccaataacttctccgtttcaaccctttccccaagcggcaaactggggcgcaagagcaaagctgaagaagatgtagaatccggggaggatgccggcgcgagtcgccggaatgggaggttggtagtcggcagtttttctaggcggaagaaaaagggctctaagctcaagaaggcagccagcgtggaggaaggcgacgaaggccaggattcacccggtggtcagtctcgcggtgcgactcggcagaaaaaaaccatgaagttaagccgtgctctgagcgaccttgtgaaatacacaaagtcagttgctacacacgacatcgaaatggaggcagcctcttcctggcaagtgagctccttctcagagaccaaagcgcaccaaattctgcagcagaagcccgcccagtacctgagattcaatcagcagcagctcagcagaatttacccctcaagctatcgcgtggattcatccaattataaccctcaacctttctggaacgccggttgtcagatggtagccctcaactatcagtctgaagggcgcatgcttcaactcaacagagccaaattctcagccaatggtggctgcggctacgtgctgaaaccagggtgtatgtgccagggggtttttaatcctaactctgaggatccattacccggccagttaaagaagcagctcgtcttgcggattatctcaggtcagcaactaccgaagcccagggatagtatgttaggtgatagaggagaaattatcgatccctttgtcgaagtcgagatcatcggactgccagtggactgttctcgtgagcagacacgggtcgtcgatgacaacgggtttaatccgacatgggaggagaccctcgtattcatggtccacatgcctgagatcgccctagtccgctttctggtgtgggaccacgaccccattggacgcgacttcatcggacagcgtactctggcgttctcctctatgatgcctggttatcgccacgtctaccttgaaggcatggaggaagccagcattttcgttcacgttgcagttagtgatataagtggtaaagtcaagcaagccctgggcctcaagggtcttttcttgcgaggaccgaaaccagggagtctagactctcatgcggccggtcggcctcctgctaggcccagtgtgtcccagcgaattctgagaagaacagccagtgcccctacgaaaagtcaaaaaccgggcaggcggggcttcccagaactggtgctgggcacaagagatactggctcaaagggagttgcagacgacgtggtgccccctggcccaggtccagcgccagaggctccggctcaagagggccccggctccggatcaccaaggggaaaagctccagccgccgtggcagagaaatccccagtaagagtgagaccccccagggtacttgacggacccgggcccgctgggatggccgccacatgtatgaaatgcgtcgtggggtcttgtgcgggagtgaatacaggcggactccagcgagagcgcccaccaagtcctggccctgcgagtcggcaggcagcgatccggcagcaaccaagagccagagccgattcactcggcgcgccgtgttgcggcctggacccccatgctatccccggcaggtccagagaagcacccaaggggcctggtgcctggcggcagggcccaggcgggtctggatcaatgtctagtgattcgtcgagtccagacagcccagggattccagagcggagccctagatggcctgagggcgcatgcagacaaccaggagcattgcaaggagagatgagcgcgctctttgcccagaaactcgaggaaattagatctaagtccccgatgttctcagccgtgagaaactag

SEQ ID NO: 128734 - DNA, 1827 bp, synthetic construct
  misc_feature 1..1827: note = Description of Artificial Sequence: Synthetic coding sequence
  source 1..1827: mol_type = other DNA
atggaaatgaggtggttcctgagcaagattcaggatgacttcaggggcggaaaaattaatctggaaaaaacgcagagacttctagaaaagcttgatattagatgtagctacatccacgtgaaacagatttttaaggacaatgacagactgaagcagggtagaatcaccattgaggagtttcgggctatttacaggattataacccaccgggaggagatcatagagatctttaacacatatagcgaaaataggaaaatcctgctggcgtccaacctcgcccagtttttgacgcaggaacagtacgccgccgaaatgtcaaaagccatagcatttgaaataatacagaagtacgagcctattgaggaggtccgcaaggctcaccagatgtcactggaggggttcacacgatatatggacagccgcgagtgcctgctctttaagaacgagtgccggaaagtgtatcaggatatgacgcatccactgaacgattactttattagcagctctcacaacacttatctggtgtcggaccagctcttaggtcctagcgatctgtgggggtatgtcagtgcgttggtcaaggggtgcaggtgtctggaaatagactgttgggacggagcccaaaatgagcccgttgtctatcatggatatacgctgacatcaaaactgcttttcaaaaccgtgatccaggcgatccataagtatgcatttatgacttccgattaccccgttgtgttgagcctggagaaccactgttccaccgcccaacaagaggtaatggccgataacctgcaagctacattcggagagagccttctgtctgatatgctggatgattttcctgatacacttccaagcccagaggcattaaaattcaagatcctggtaaagaacaagaagatcgggacattaaaagagacccatgaacggaagggatccgacaaacggggcgataaccaggataaggaaaccggcgtgaaaaaactgcccggcgtaatgctttttaagaagaagaagactaggaagctgaaaatcgccttggccctctctgaccttgtgatctataccaaggccgagaaattcaagagttttcagcattctcggctctaccaacagttcaacgaaaacaattctattggtgagacccaggccagaaagttgtctaagctgcgggtgcatgagtttatttttcataccagaaagttcatcactcgcatttacccaaaggcgactagggccgatagctctaattttaacccacaggagttttggaatattggatgccagatggttgctttgaacttccagactcccggactgccaatggatctacagaatgggaagtttttagataacgggggttctgggtatattctgaagccacattttctccgcgagtctaaatcgtactttaaccctagtaacattaaggaaggtatgcctataaccctcacgattaggctgatatctgggatccaattacctcttacacattcttcgtccaacaagggtgactctctggtgatcatcgaagttttcggcgtgcctaatgaccaaatgaagcagcagactcgggtcatcaagaagaacgcgtttagcccaaggtggaatgaaacttttacttttatcattcatgtgccggagctggccctgattcgcttcgtggtggaaggacaggggttgattgccggtaatgagtttctgggccagtacacccttccacttctgtgcatgaataaaggatatcgacgaatcccccttttctcaaggatgggagagtccctggagcccgcctctctattcgtatacgtgtggtacgtgcgatag

SEQ ID NO: 128735 - DNA, 1242 bp, synthetic construct
  misc_feature 1..1242: note = Description of Artificial Sequence: Synthetic coding sequence
  source 1..1242: mol_type = other DNA
atgcggtggtttttaagtaaaattcaggacgatttccgcggcggcaaaatcaacttggaaaaaacccagcgtctgctggagaagcttgacatacggtgcagttatattcacgtcaaacagatctttaagacaagcgactatcctgtcgtgctttctctcgaaaaccattgcagcacggctcagcaggaggttatggccgacaacctccaggccaccttcggagaatcactgctgtccgatatgctagacgattttcccgacacgcttcccagccccgaggctttaaaatttaagatattggtgaaaaacaaaaagatcggaaccctcaaagaaactcatgaacggaagggatctgacaaaagaggtgacaaccaggataaggaaactggagtgaagaaactgcctggggtgatgttgttcaaaaaaaagaagactaggaaactcaaaattgctcttgccctgagcgatctggtcatatatactaaagcagaaaagtttaaaagtttccaacattcacggctgtaccagcaattcaacgaaaataacagtattggtgaaactcaagcacgaaagctgagcaagttgagggttcatgagttcatcttccatacacggaagtttataacccggatttaccctaaggccacacgggctgacagttccaatttcaatccccaagagttctggaatatagggtgccagatggtcgcattaaacttccaaaccccaggcttacctatggacctgcaaaacggcaagttcttagataatggaggttcggggtatatcctcaagccccacttcctccgggagagtaagtcttacttcaacccaagcaatattaaggagggaatgcctattactctaacaatacgccttattagcggaatccagctcccactgacacacagttctagcaacaaaggtgatagccttgtgatcattgaagtcttcggggtgcccaacgatcagatgaagcaacaaacacgggtaattaagaaaaatgccttctcgccacgatggaatgaaacgtttacgtttattatccacgtgccagaactggcactcatcagattcgtcgttgagggacagggactcattgcaggtaacgagttcttaggccagtataccctgcccctgttatgtatgaacaagggctatcggcgtattcccctgtttagcagaatgggagagtcactcgaacctgcaagcctgtttgtttatgtttggtacgttcgatag

SEQ ID NO: 128736 - DNA, 1821 bp, synthetic construct
  misc_feature 1..1821: note = Description of Artificial Sequence: Synthetic coding sequence
  source 1..1821: mol_type = other DNA
atgaggtggttccttagcaagatacaggatgattttcggggcgggaaaatcaacctggagaaaacccaacgcctcctggaaaagcttgatatcagatgcagctacattcacgtgaaacagatattcaaggacaacgataggctcaaacaaggaaggataaccattgaggaattcagagcaatttaccgaatcatcacacatcgggaggagattatagaaatatttaacacctatagcgagaacagaaagatacttcttgcgagcaatcttgcccagttcctgacccaggaacagtacgccgcagagatgtccaaagctattgcattcgagatcatccaaaagtacgaacccatcgaggaggtgaggaaagcacatcagatgtccctagagggctttacccggtatatggactccagagaatgtcttctgttcaaaaacgaatgcaggaaagtttatcaggacatgacccacccacttaatgactactttatttcatcgtcccacaacacctatcttgtttctgatcagctcctgggcccgtccgatttatggggctacgtgagcgcactggtgaaaggatgtcgatgtttggagatcgattgttgggatggagcccagaatgaaccagtcgtgtatcacggctacactcttacttctaaactgttgttcaagaccgtgattcaggccattcataaatatgccttcatgacctcagattaccctgtggtgctgtcattagaaaaccactgctcgactgcacagcaggaagtgatggccgacaacctgcaggcgacatttggagagtccctgcttagcgacatgctggacgacttcccagatactctgccctcccctgaggcactcaaattcaagatccttgtgaaaaataagaaaataggcacgcttaaagagactcacgagcggaaaggatccgacaagcgtggggataatcaagacaaagaaacaggtgtgaagaagttacccggtgtgatgctgtttaagaaaaaaaagacccgcaagctgaaaattgccttagccctctctgacttagtcatttacaccaaggccgaaaaatttaaaagcttccagcattctcgattgtaccagcaattcaatgaaaataacagcattggcgagactcaagcccggaaactgtccaagctcagagtgcacgaattcatctttcacactaggaagttcatcacaagaatttatcctaaggctacacgcgccgacagttccaacttcaacccccaggaattttggaatataggttgccagatggttgctctgaacttccagacccccgggttgccaatggatctccagaatggcaaattcctggataatggtggatccgggtacattttaaagccacactttttaagggagagcaaatcatactttaatcccagtaacataaaagagggaatgccgatcaccctgacgattcgcctgatctcaggaatacaattacctctcacacacagtagtagtaacaagggagactccctggtgatcatcgaggttttcggggtccctaatgaccagatgaaacaacagacacgcgtcatcaagaaaaacgcatttagccctagatggaacgagactttcacctttattatccacgtgccagaattagccttgatcagatttgtggtggaggggcaaggactgatcgctgggaacgaatttctgggtcagtatacactccccctgctgtgcatgaataagggctaccggcgtattcctttgttctcccgcatgggggagagcctggaaccggcctctctattcgtgtacgtttggtacgtccggtag

SEQ ID NO: 128737 - DNA, 1248 bp, synthetic construct
  misc_feature 1..1248: note = Description of Artificial Sequence: Synthetic coding sequence
  source 1..1248: mol_type = other DNA
atggagatgcggtggttcttgtctaagattcaggacgatttccgcgggggaaagatcaacctcgaaaagacgcagcgactcctggagaaattagacatccggtgttcctacattcacgtcaaacaaatattcaagacttctgattatcccgtcgtcctcagcctggagaatcattgttccacagcccagcaagaagttatggccgataatcttcaagcgaccttcggggagagcctgctgtcggacatgctagatgattttcctgacactcttccaagccctgaggccctgaagttcaagattttggtcaaaaacaagaaaataggcacactcaaggagactcacgagcggaaaggctccgacaagcggggcgataaccaggataaggaaacaggcgtcaagaagctcccaggcgttatgctcttcaaaaagaagaagacacgaaagctaaagattgccctggccctctcagacctcgtaatctacacgaaggctgaaaagtttaaatccttccagcattcccgactttatcagcagtttaatgagaataacagcattggcgagactcaggcgcgtaaactgagcaaactgcgagtccatgagttcatctttcatactagaaagttcatcacccggatctacccgaaagccacacgggccgattcttctaacttcaatccacaagagttctggaatatcgggtgccagatggtggcacttaactttcagacccctggattaccaatggacttgcagaatggaaaattcttggacaacgggggaagcgggtatatcctgaaaccacacttcctacgcgaaagcaagtcatactttaacccaagtaacatcaaagaggggatgcctatcacactcactataagattgatttctggcatccagctgccactgactcacagcagttcaaataagggggactccctagtgatcatcgaggtgtttggcgtgcccaacgatcagatgaaacagcagaccagagttatcaagaagaacgcatttagccctagatggaacgaaactttcacctttattattcatgtgcccgaactcgctcttatccggtttgttgtcgaggggcaggggctcattgctggtaacgagtttctcggacagtatactctccctttactgtgtatgaacaagggctacagacgaattcctctcttctcccgaatgggggagtctttggaacccgcatcacttttcgtatacgtgtggtatgtccggtag

SEQ ID NO: 128738 - DNA, 1212 bp, synthetic construct
  misc_feature 1..1212: note = Description of Artificial Sequence: Synthetic coding sequence
  source 1..1212: mol_type = other DNA
atggacagcagggaatgtctgttgtttaagaacgaatgcagaaaggtctatcaggacatgactcatccactgaacgactactttatcagcagtagtcacaacacatatctggtttccgaccaactgctgggcccctctgacctctgggggtacgtgagcgcacttgtcaaaggatgccgctgccttgagattgactgctgggatggggcacagaacgagccagtagtgtatcacggttacacgctaacctctaaattgctctttaaaaccgtgatccaggcgatccataagtatgcctttatgacaagcgactaccccgtcgtgttatctctggagaatcactgctccactgcgcagcaagaagtcatggccgacaatttgcaggccacgttcggcgagagtctgttgtccgatatgttggatgattttcctgacaccctgccaagccctgaggcccttaagttcaagatccttgtgaagaacaaaaagattggcaccctgaaagagacacacgagcggaagggatccgacaaaaggggcgataatcaagataaagagaccggtgttaagaagttacctggagtgatgttgttcaaaaagaagaagacgcgcaagctgaagattgcacttgcgctttcagacttggtgatctacacgaaggccgagaagttcaaaagttttcagcacagcaggctctatcagcagtttaatgagaataattccataggggagactcaggcccggaagttgagtaagctacgggttcatgagttcatctttcatactagaaaatttatcacacggatataccccaaggccacgcgggccgactctagcaatttcaatcctcaggagttctggaacatcggatgccagatggtggccttgaatttccagactccgggactgcccatggatttgcagaatggaaagtttctggacaacggtggctcaggatacattctcaagcctcatttcctccgggagagtaagtcatactttaacccatccaacattaaggaaggcatgcctatcacactcacaatcagactaatctctggaatccagctgccactcacacattcctccagcaacaagggtgattccttggtcatcatcgaggtgttcggcgtccccaatgaccagatgaaacagcagacgagagttatcaagaagaacggccagggaaacatggtgattatacccgcctag

SEQ ID NO: 128739 - DNA, 3387 bp, synthetic construct
  misc_feature 1..3387: note = Description of Artificial Sequence: Synthetic coding sequence
  source 1..3387: mol_type = other DNA
atggcagactgcgtccgtggatgggccgccgtgggcggtgcattaccaacgtctcccggaccaagcctgggagctaagggagccctcaaagcgggcgtgggcgaggatggcgtgggaggaggaaggctggttcacggtagagcaagatatgattctggaggggttagcaatggggattgtagcctgggagtttcaggtgatgaagcaagggcttcccccacaaggggaccacgcggagttgcactcgcccctaccccttccgccgtcgtgtgtactctcccccgagagtccaaacccgggggtctgccaagacgtagttcaatcattaaagacggaacaaagcagaagcgtgaacgcaagaagacagttagtttctcctcaatgcctactgagaagaaaatttctagcgctagcgattgtatcaactctatggtggaagggtccgaactgaagaaggttcgatcaaacagcagaatctaccatcgctattttctgctggacgctgatatgcagagtttgaggtgggaacctagcaagaaagactctgagaaggcaaagatcgatattaaatcaatcaaggaggtgcgcacgggcaaaaatactgatattttccggtctaatggaatttccgatcagatttccgaggactgtgcattcagcgtgatctacggcgaaaactatgagtctctggacttagtggcaaacagcgcagacgtggccaacatctgggtaacaggtctcagatacctgatcagctatggcaagcatacactggatatgctggagtcgagtcaggataatatgcggacaagctgggtttctcagatgtttagtgagatcgatgtcgataatctggggcacatcacattatgtaatgcggttcaatgtattcgcaatctgaatcctgggctgaaaacttccaaaattgagcttaaattcaaagagttacacaagagcaaagacaaggccggaacagaagtcactaaagaagaattcatagaagtgttccatgagctgtgtacacgacccgagatctattttctgctggtgcagttcagcagtaataaggaatttttggataccaaagatctcatgatgttcctcgaggctgagcaaggggttgcgcacatcaatgaggagatctcgctcgaaattatacacaagtatgagccctctaaagaaggacaggagaaggggtggctatcaatcgatggctttacaaactacctgatgtctccagattgctatatctttgacccggagcacaagaaggtgtgccaggacatgaagcagccattgtcccactactttatcaactcatctcacaacacctacctcatcgaagatcaatttaggggaccaagtgacatcaccggttatatacgcgccctgaaaatggggtgcaggagcgttgaactagacgtctgggacggtccagataacgagcctgtgatctacaccggccacacgatgacttcccagatagtgttccgctcagtgattgacatcataaacaaatacgctttctttgcaagcgagtatcccctcattctctgcctcgagaatcattgctcaatcaaacagcagaaggttatggttcaacatatgaaaaagttattgggggacaaactgtataccacttctccaaacgtggaggagagttacctcccatcgccagatgtactcaaaggaaaaatcctgatcaaggcaaagaagctttctagcaattgtagtggggtcgagggagatgttactgatgaggatgaaggtgcagagatgagccagcgaatgggaaaagaaaacatggaacagcctaataacgtgccagttaagcgctttcagttgtgcaaagagctttctgagcttgtatcaatctgcaagtccgtacaattcaaggaatttcaggtttccttccaggtgcagaagtactgggaagtgtgcagttttaacgaggttctagcaagcaaatacgccaatgagaacccgggtgacttcgtgaattacaataaacgcttcttagcaagggtatttcctagccctatgagaattgatagctccaacatgaatccccaggatttttggaaatgtgggtgtcagatcgttgcaatgaattttcaaacccctggccttatgatggatttgaatattggatggtttaggcagaacggaaactgcggctatgtgctacgcccagctattatgcgcgaagaagtgtctttcttcagcgctaacactaaggactctgtgcctggcgttagcccccagctactgcatattaaaattattagtggccaaaatttccctaaacctaagggttcaggagccaaaggcgacgttgtggacccctatgtctatgtggagattcacggtattcccgccgattgtgccgaacagagaaccaagacggtgcaccaaaatggcgatgcccctatttttgatgaatcgtttgaattccaaatcaatctaccggagctggcgatggttcggtttgtcgtgctcgatgacgactatatcggcgatgagtttatcggccagtatacaattcccttcgagtgtctgcagacaggatacagacatgtgcccctacagtctctgacaggagaagtattggctcatgcttcactgttcgtgcatgtggcaatcaccaaccgtcgtggtggtggaaagcctcataagaggggtctgtctgtgaggaaaggcaaaaaaagccgagagtacgcgtccctacgcactctgtggattaagactgtggatgaggtgttcaaaaacgcccagcccccaatccgggacgcaaccgatctgcgtgaaaatatgcagaacgcagtggtgagtttcaaagagctatgcggacttagctccgtggccaatctgatgcagtgtatgctggctgtaagtccaaggtttctcggcccggacaatacgcctctcgtggttctcaacctgtctgagcagtaccccacaatggagctgcaggggattgtgccagaagtattgaagaagatagtgaccacgtatgacatgatgattcagagcttaaaggctttaatagaaaatgccgatgccgtgtacgaaaagattgtccattgccagaaagccgcaatggaatttcacgaacaccttcacagcatcggcaccaaagaggggcttaaggagagaaagcttcagaaggccgtagaatcgtttacttggaacatcactattctcaagggtcaggcggatctgctgaaatatgcaaagaatgaaacattggagaacttgaagcagattcattttgccgctgtgtcttgcggactaaataagcctgggacagaaaatgctgacgtccagaagccacgcaggagtctggaggtgattcctgagaaggccaatgacgagacaggagagtag

SEQ ID NO: 128740 - DNA, 2883 bp, synthetic construct
  misc_feature 1..2883: note = Description of Artificial Sequence: Synthetic coding sequence
  source 1..2883: mol_type = other DNA
atgccaaccgaaaagaaaatatcgagcgcttctgactgcattaatagcatggtggagggatcagagctgaagaaagtgaggagcaacagcagaatctatcacaggtattttctgctcgatgcggatatgcaatccctccgatgggaaccctccaagaaggacagtgagaaggctaagatagacatcaagtccattaaggaagtgcgcactggcaaaaataccgacattttccgaagcaacggtattagcgatcaaatttccgaggactgtgccttttctgtcatttatggagagaactacgaaagcctggacttggtcgccaacagcgccgatgtggctaatatttgggtgactggcctgcggtatctaatctcttacggcaaacatactctggacatgctggaatccagccaggacaacatgcgaactagctgggtttcccagatgttcagcgaaatcgatgttgacaatctgggccatattacgctgtgcaatgcagtccagtgcattcggaatctgaaccccggtctgaagacctccaaaattgaactcaaattcaaggaactgcataagtcaaaggacaaggccggcactgaggtcacaaaggaggagttcatcgaggtttttcatgagctgtgtacacggcccgaaatttatttcttattagtgcaattttcctccaataaggagtttttggacacaaaagacctgatgatgtttctggaggcagagcaaggcgtggctcatattaacgaagagatttccctggagatcatccacaaatacgaaccctccaaggaagggcaggagaaaggatggcttagtatagatggatttacaaactaccttatgtcccccgattgttatatattcgaccccgaacacaagaaggtgtgtcaggacatgaagcagcccctgtcacattattttatcaacagtagccacaatacctatctgatcgaggatcagttccgcgggcctagcgacatcacaggatacatccgtgccctgaagatgggctgccgtagtgtggaactggacgtgtgggatggccctgacaacgagcccgtgatctataccggtcacacgatgacttctcagatcgtgtttaggagcgtgatagatatcattaacaagtatgccttctttgcctccgagtaccctctcattttgtgcctcgagaatcattgctctatcaaacagcagaaggttatggtccagcacatgaaaaagctactaggcgacaagctgtacaccacttccccaaatgtcgaggaatcatatctgccatcccccgatgtgctcaagggcaagatcctcattaaggccaaaaaactgtcatctaactgttctggcgtggagggcgacgtaacagatgaagatgagggggccgagatgagccagcgaatgggcaaggaaaacatggaacagcccaacaatgttcccgtgaagaggttccaactgtgcaaggaattatcagagttggtgagcatatgtaaatctgtgcagttcaaggagtttcaggtttccttccaggtacagaagtattgggaagtctgcagctttaatgaagttctggcgtctaaatatgccaatgaaaaccccggggattttgttaactacaataagagattccttgcaagggtattcccgagccccatgagaatcgattctagcaatatgaatccacaagatttttggaagtgtggctgtcagatagtcgccatgaatttccaaactcccggcctgatgatggatctgaatatcggctggttcagacaaaatggtaattgcgggtatgtgctgaggcccgcgatcatgcgggaagaagtttccttctttagcgctaacacaaaggattccgtgccaggagtcagcccccaactgctccacattaagatcatttccgggcaaaacttccctaagccaaagggcagcggggcaaagggggacgttgtagatccctatgtttatgtggaaatccacggcatcccagcagactgcgccgagcagcggaccaagacagtacaccaaaacggagatgcacccatttttgatgaatccttcgaatttcagattaacctccccgagctcgctatggtgcgcttcgtcgtcttggacgatgattacatcggagacgagttcatcggccagtatacaatcccgttcgagtgcctacaaactggatatcgccacgtgcccctgcagtctctgacaggcgaggtgttagctcacgcctctctctttgtccatgtagcaatcaccaaccgacgaggcggcggtaagccccataaaagaggcctgtcagtacgtaaaggcaaaaagtctcgggagtacgcgagcttgcggaccttgtggatcaaaactgtggatgaggtgttcaaaaatgcacaacccccaattcgagacgccacagacttaagagagaacatgcagaatgcggtggtatccttcaaagagttgtgcggtttgagctccgttgccaatttaatgcagtgtatgttagctgtgtcaccacggttcttgggacccgataatactccactggtggtgctgaatctgtccgagcagtatcctacaatggaactacaaggaattgtgcccgaggtgctgaagaagatagtcactacttacgatatgatgattcagagcctgaaagccctgattgagaacgccgatgccgtttacgaaaaaatcgtgcactgtcaaaaggctgcaatggagttccacgaacaccttcacagcattggaaccaaggaagggctgaaagagaggaaattgcagaaagctgtggagagctttacatggaatatcactatcctcaagatcaggaagacaggccggaggtcaatatttgttccccagacacctattatggtgtag

SEQ ID NO: 128741 - DNA, 3006 bp, synthetic construct
  misc_feature 1..3006: note = Description of Artificial Sequence: Synthetic coding sequence
  source 1..3006: mol_type = other DNA
atgcccacagagaagaaaatttcatccgcaagcgactgtatcaactctatggtcgagggttccgagctcaagaaggtccgctcgaatagtcggatctaccataggtatttcttgctggatgcggacatgcagtccctccgctgggagccttctaagaaggatagcgaaaaggccaagatcgacataaaaagcatcaaggaggttcgtactggcaagaatactgatatttttcggtctaacgggataagcgaccagatttcagaggactgtgcatttagcgtgatctatggggagaattatgaatccctcgatctagtcgccaattcggctgatgtcgccaacatctgggttaccggactgcggtatctcataagttacggaaaacacacacttgacatgctggaatcttcacaggacaacatgcggacaagttgggtgtcacagatgttcagcgagatcgatgtggataacctgggccacatcacattgtgcaacgcagtccaatgcattcgcaacttaaaccccgggcttaaaacatctaagatcgagttaaagttcaaggagctgcacaaatccaaagataaagctggaacagaagttacaaaagaggagtttatcgaggtctttcatgagctctgcactcgaccagagatttactttctcttagtacaattctccagtaacaaggaatttttggacaccaaggatttgatgatgtttctggaggccgaacaaggggttgcccatataaacgaggagatcagtctggaaatcattcataagtatgagccatctaaggagggacaggaaaaagggtggttgtccattgatgggtttaccaactacttaatgagtccagactgttacatcttcgacccagagcataagaaagtctgccaggacatgaagcagcctttaagtcattatttcataaatagctctcataacacctacctgatcgaagatcaattccgcggcccatcggacattaccggctacatccgggctctcaagatggggtgtcggagtgtagaactcgacgtatgggacgggccggataatgagccagtgatttacactggtcacactatgacctctcagatcgttttcaggagcgtcatagacattattaacaaatacgccttcttcgcctccgagtatccccttatcctgtgcctggaaaatcactgtagcataaagcagcagaaggtgatggtgcagcatatgaaaaaactgcttggagacaaactctataccacttcccctaatgtggaagaaagctaccttccttctcccgacgttctgaagggcaagattctaattaaagccaagaagctcagtagtaattgttctggggtggagggagatgttacagatgaggacgagggagcagaaatgagtcagcggatgggtaaggaaaacatggaacaacctaacaatgtccctgtgaagagatttcagctttgtaaagaactgagtgagctggtttccatatgtaaatccgtacagtttaaagagttccaggtctccttccaagttcagaagtactgggaggtttgctcatttaatgaagtccttgcatccaagtacgccaacgagaaccctggcgattttgtaaattacaataagcgcttcttggctcgtgtgtttccttctcctatgcggatcgattcaagtaatatgaacccacaggatttctggaagtgcggctgccagatagtggcgatgaattttcagacccctggacttatgatggacctcaatattgggtggtttcggcaaaatggtaattgtggctacgtcttaaggccagcgattatgagagaggaggtaagcttcttttctgcaaataccaaagattccgtccccggggtctctccacagctcctgcacattaaaattatcagtgggcaaaactttcctaagccaaaggggtctggggccaaaggtgacgtggtggatccctacgtctatgtggagatacacggcatccccgccgattgtgccgagcagcgaacaaagaccgtgcatcagaatggcgacgcccctattttcgacgagagttttgagttccagatcaatcttcccgaacttgctatggtgcggttcgtggtcctcgacgatgactatatcggggacgagtttataggccagtatactatccctttcgagtgtctgcagaccgggtacaggcacgtacctttacagagccttacaggcgaggtcctcgcccatgcatcactctttgtgcacgtggcgatcaccaaccgtaggggcggggggaagcctcacaagagggggttgtcagtgcgcaaagggaaaaagtcccgcgagtacgccagcctgcggacgctatggatcaagaccgttgacgaagtgttcaagaacgcccaaccacctatcagagacgcaactgacctgcgggaaaatatgcagaatgccgtggtcagttttaaagaactgtgtggactgtcatccgtggcaaacctcatgcagtgtatgctggctgtcagcccgaggttcctcggtcccgataacaccccactagttgtattgaatctgagtgaacagtaccctactatggaactccagggcatcgtgcctgaagtgctgaaaaaaatcgtgactacttatgacatgatgatccagtcgctgaaggctcttattgagaacgccgacgctgtctacgaaaagatagtccactgtcaaaaagcagctatggaattccatgagcacctgcattccattggtacaaaagaaggactgaaggaaagaaagctgcagaaggcagtagagtcatttacatggaacatcactatcctgaagggacaggctgaccttctgaagtacgccaaaaacgagacccttgaaaatcttaaacagatccactttgctgccgtctcatgcggcctgaacaaacctggaacggagaacgccgacgttcagaaaccaaggcggagcctcgaggtcattcccgagaaagcaaacgatgaaactggagagtag

SEQ ID NO: 128742 - DNA, 3006 bp, synthetic construct
  misc_feature 1..3006: note = Description of Artificial Sequence: Synthetic coding sequence
  source 1..3006: mol_type = other DNA
atgcccacagaaaagaaaatttcgtccgcatccgactgcataaacagcatggtagagggctcagagcttaagaaggtgcgatccaactctaggatttatcacagatacttcttgctggacgccgacatgcagagtctgaggtgggaaccgagcaaaaaggactcagaaaaggccaagatcgatatcaagagtattaaagaggtccggaccggcaagaatacagacattttcaggagcaatgggatctctgatcaaatttctgaggattgcgccttctctgtgatctacggagagaattacgagtccttggacctggtggcaaacagcgccgacgtggctaacatctgggtcaccggcctgcggtacctcatatcttacgggaagcatacactcgacatgctggaatctagccaagacaatatgaggacaagttgggtttcacagatgttctctgaaatcgatgtcgacaacctgggccacatcaccctctgtaatgccgttcagtgtattagaaacctgaaccctggactgaagactagtaagatcgagttgaaattcaaggagctacataaaagcaaggacaaagcaggcaccgaggtcacgaaagaggagttcatcgaagtcttccatgagttgtgtacaagaccggagatttacttcctgcttgtccagttctcatccaacaaggagtttctggataccaaggacctcatgatgttcttagaagcggagcaaggcgtcgctcacattaatgaggaaatctctcttgaaataatccacaaatacgagccaagtaaggagggtcaggaaaagggatggctgagtatcgacggattcacaaactatctaatgtcccccgattgctacatttttgacccagagcacaagaaagtgtgtcaggacatgaaacagccattatcgcactattttatcaattcttctcataacacctatcttattgaggatcaattcagaggaccttcggacattaccggttacattagagccctgaagatgggatgccgaagcgtcgaactggatgtgtgggacgggccagacaatgagccagtgatttatacaggccatacaatgacgagtcagatcgtcttccgctctgtcatcgacataatcaataaatacgcattctttgcttccgaatatcctttaatactgtgcctggagaaccactgctccattaagcaacagaaagtaatggtgcagcatatgaagaagttgcttggagataagctatatacaacttcacccaacgttgaagaatcttacttaccgtcacccgatgttctgaaaggaaagatcctgattaaagccaaaaagctgagcagcaactgctcaggggtcgaaggagacgtgacagatgaggacgaaggcgctgagatgtcacagagaatgggtaaagagaacatggagcagcccaataatgtccccgtaaagagattccagctgtgcaaggagctctccgaactcgtcagcatctgcaagtctgtgcaattcaaagaattccaggtcagttttcaagtccagaagtattgggaagtgtgctcgtttaatgaggtcttggcttccaaatatgccaacgagaacccaggagactttgtaaactataataagaggttcttagccagagtctttccttctcccatgcgcatcgacagttcaaacatgaacccccaagacttctggaagtgcgggtgtcagattgttgcaatgaatttccagaccccaggacttatgatggaccttaatataggctggtttcggcagaacggaaattgcggctacgtattgcgaccggcgatcatgcgggaagaggtgtcctttttctcagccaataccaaggactctgtgcctggagtgtcgcctcaattgctccacataaaaattattagtggacagaactttcccaagccgaaaggatccggcgccaaaggcgatgttgtggatccctacgtttacgtcgaaatccacggtatccctgccgactgcgctgagcagaggacgaagaccgtccaccagaatggagatgcaccaatattcgacgagtcatttgagttccagattaatctaccggagctggctatggtccggtttgtggtcctggatgatgactacatcggggatgaattcattgggcagtacaccattccattcgagtgcctgcagacaggctaccgccacgtgcccctgcaatctctaactggagaagttctagcacacgcaagcctctttgtgcacgtcgcaatcactaacagaagggggggcggcaaacctcacaagagaggactctccgtccgaaaaggaaaaaaaagtcgagaatacgcatccttacggaccctatggatcaagacagtggatgaagtgttcaagaacgcgcaaccaccgattcgtgatgcgactgatctcagagagaatatgcagaacgcggtggtgagcttcaaggagctctgcggactctccagtgtggccaatctaatgcagtgcatgctcgcagtcagccccaggttcttggggccggataacacgccgctcgtagtgctcaatctgagcgagcagtaccccacaatggagttgcaaggaattgtgccagaggttctgaaaaaaatcgtgactacatacgatatgatgattcagagtctcaaggcattaatcgaaaatgcggatgcagtgtacgagaaaatcgtacactgtcagaaagccgccatggaatttcacgaacacctacactccatcgggaccaaggaaggtctaaaggagaggaagttacagaaagccgttgaaagtttcacttggaacatcactatactaaaagggcaggctgatttgctgaaatacgccaaaaatgaaacactcgaaaatctgaagcagatccatttcgcagctgtatcctgcgggttgaacaaacccggtactgaaaacgccgatgtgcagaaacctcggcgaagtctggaagtcatcccagaaaaggccaatgacgaaacgggcgagtag

SEQ ID NO: 128743 - DNA, 2802 bp, synthetic construct
  misc_feature 1..2802: note = Description of Artificial Sequence: Synthetic coding sequence
  source 1..2802: mol_type = other DNA
atgactgctactccagagagcctctttcctacgggcgatgagctggactcatctcaactgcagatggaaagtgacgaggtggacactctgaaggaaggcgaagatcccgctgataggatgcacccattcttggcaatctacgagttgcagtccctgaaagtgcaccctctggtgttcgcacctggcgtaccagtaactgcccaggtggttgggactgagcggtatacctcaggcagcaaggtgggtacttgtacgctgtattctgtacggctcactcatggcgatttcagttggactacaaaaaagaaataccgtcatttccaagaactccacagggatctgttgcgacataaggtgctgatgtctctcctgccacttgcccgcttcgccgtggcgtacagccctgcaagggatgcagggaacagagagatgccaagtctccctcgtgccggccccgaggggagcacccgacacgctgcatctaaacagaagtatttagaaaattatctgaatagattgttaacaatgagcttctaccgcaattatcacgccatgacagagtttctagaggtgagccagctgtcttttatccccgacctgggccgcaaggggctcgagggcatgatacgaaagagatctgggggtcatagagtccctggactgacctgttgtggccgtgaccaggtgtgctaccgttggagtaagagatggttggtcgttaaagacagttttctgctgtatatgtgcctggagaccggtgcaatctcattcgttcaattgttcgacccagggttcgaagtgcaggtgggaaaaaggagcaccgaggcacggcacggagtccggatcgacacatctcatagatctctgatccttaaatgcagcagctataggcaggctcgatggtgggcccaggagattaccgaacttgcacagggcccagggcgggacttcctgcagctgcaccgacacgattcttatgcaccacctcgcccaggaacactagccaggtggttcgtaaatggggctggctatttcgccgccgtcgccgacgcaattttgcgcgcacaggaggagatttttataacggactggtggctctcaccagaagtgtatctgaaacgcccagcgcacagcgatgattggcggctggatatcatgttaaaaaggaaggcggaggagggggtacgagtgagtattctgctgtttaaggaggtggaattagccttgggcattaacagcggctattctaaaagagctctgatgttgcttcatccaaatatcaaggtgatgcggcaccccgaccaggtgactctgtgggcacaccacgaaaagctgctcgttgtggatcaggttgtcgcattcttggggggtctagatcttgcctatgggcggtgggacgacctgcactacaggctgaccgacctcggggactcaagtgaaagcgctgcctcacagcctcctaccccgcgtccagactctccagccacaccagacctttcccataatcaatttttttggttagggaaagactatagcaatctcataacaaaagactgggtgcagctggaccggccatttgaggacttcattgacagagagacaaccccccgcatgccttggcgcgatgtgggtgtggttgtgcacgggcttccagcacgcgatcttgccaggcattttattcagcggtggaacttcaccaaaacgacaaaggcaaaatataagacgccaacttatccctacctgcttccaaaaagcacatccacggccaaccagttaccctttaccttacccggtgggcagtgtaccacagtccaggtgttacggtccgttgacagatggagtgccggcaccttggaaaactcaattctgaacgcgtacctgcacacaatcagagagagtcagcattttttgtatattgagaaccagttcttcatcagctgcagcgatggccgcaccgtgttgaacaaggttggggacgaaattgtggaccggattcttaaggcgcataagcaagggtggtgctacagagtatacgttctccttcccttactcccgggttttgaaggggacatctctacaggcggaggcaacagcatccaggctatacttcatttcacctacagaaccctctgtcgcggcgagtactcaatcttacacagattgaaggccgccatgggcactgcgtggcgcgactatatttctatctgcggcctgagaacacacggggagttaggtggccatcctgtgtcggaactgatttacatccatagcaaagtgcttatcgccgatgatcgcacggtgattatcgggtctgcaaacatcaacgaccgttccctcctgggcaagcgggactcagagttggccgttctcattgaggataccgagacggaaccttcccttatgaacggcgctgagtatcaagcaggcaggttcgccttgtccctgagaaaacactgcttcggggtgattcttggagcaaacacaagaccagatctggatttacgtgatccaatttgtgacgattttttccagttgtggcaggatatggccgagagcaatgcaaatatctatgagcagattttccgctgtctcccatctaacgcaacccgatcgctgcgaaccttgcgagagtatgtggcggtcgagccccttgccacagttagccctccactagcaagatccgagcttacacaagtgcaaggccatctggtacattttccactgaaatttttggaagacgagagcttacttccccccctgggttctaaagaggggatgatcccgctggaagtctggacctag

SEQ ID NO: 128744 - DNA, 2769 bp, synthetic construct
  misc_feature 1..2769: note = Description of Artificial Sequence: Synthetic coding sequence
  source 1..2769: mol_type = other DNA
atgactgcaaccccagagtctttattcccaaccggtgacgagctggactctagtcaattgcagatggagagtgacgaggtcgataccctgaaggaaggagaagatccggccgatcgaatgcaccccttcctggcgatttatgaactgcagagcctcaaggtacaccctcttgtgtttgctcctggcgttcctgtgactgctcaggtggtgggaaccgaacggtacacatctgggtccaaagtgggaacctgcaccctttatagcgttcgactgacccacggggacttctcttggactaccaagaagaaataccgacacttccaggagctgcatcgcgacctattgaggcacaaggtgctgatgagcctcctgccacttgcgcgctttgccgtagcatactctccagcacgggacgcaggcaatcgcgagatgccttcgctgccacgagccggccctgagggctccaccagacatgccgccagcaagcagaagtacctggaaaattatttaaaccgcctgctgactatgtccttttatcgaaattatcatgctatgaccgagttcctggaagtgtctcagctgagtttcatacctgaccttggaaggaaggggctggagggaatgatcaggaaaagaagcgggggccaccgggtgccaggactgacctgttgcggcagggatcaggtgtgctatagatggtcgaagagatggctagtggtgaaggattccttccttctgtatatgtgtttggaaactggtgctatctctttcgtgcaactcttcgatccaggatttgaagtacaggtgggtaaaagatccaccgaggcgcgccacggtgtgcggattgacacgagtcataggtcactgattctcaagtgttctagctataggcaagcaagatggtgggctcaggaaatcaccgaactggcacagggccctggccgcgatttcttgcagctccacagacatgatagttatgccccccctcgtcctggaaccttggctaggtggtttgtcaatggcgccggatatttcgcagccgtggctgacgccattctacgggcccaggaagagattttcatcactgactggtggctgagccctgaggtctatcttaaacgcccagcccattcagacgactggcgcctggatattatgttaaaaaggaaggctgaagaaggtgtccgcgtctctatactcctgtttaaggaggttgagctcgccctagggataaactcaggttacagcaagagagccttaatgctcttgcatccaaacattaaagtcatgaggcaccccgaccaggttactctgtgggcccatcacgagaaattgctcgttgtggatcaggtcgtggcttttctcggagggcttgatttagcctacggccgctgggatgatctgcattacagactcactgatttgggagatagctctgaaagcgcagcgtctcagccacccaccccgcgtccggattcccctgccaccccagatctgtcccacaaccagtttttttggctcgggaaggattatagtaatttgataacaaaagattgggtgcagctagatagaccgttcgaggattttattgatcgggagactacgcctaggatgccatggagggacgttggggtagtggtccacggtcttccagcccgagaccttgcaaggcacttcatccaaaggtggaacttcaccaaaaccaccaaagctaagtacaaaacccccacctatccttacctcctgccaaagagcacatccaccgctaaccagttaccttttaccctccccggggggcagtgcaccactgtacaggttctgcggtctgtagaccgttggtcggcaggaactctcgagaactcaattctgaacgcctacctgcacaccatcagagagtcacagcatttcctttacattgagaaccaattttttattagctgctctgatggcagaacagtcctcaataaggtcggtgacgagatcgtggaccggatcctcaaagcccacaaacagggctggtgctaccgcgtttatgtactgctaccactactgcccggatttgagggtgatattagtacagggggaggaaattccatccaggctatcctgcactttacctaccgcactttgtgtaggggagagtactcgatcctgcataggcttaaggccgcaatgggaactgcttggcgggactacatttccatatgcggactccggacacacggcgagttgggcggacatcccgtttcggagctgatttacattcatagcaaagtactcatcgccgacgatagaacagtaattattggttcagccaatattaacgaccggagtttgctgggtaagcgggattccgagctcgctgtgttgatcgaggatactgaaactgagccaagtctgatgaatggggccgagtaccaggctgggagtgtaatactgggcgcaaatacccggcccgacttggatctgcgggatccaatttgcgatgatttctttcagctgtggcaggacatggccgaatccaacgctaacatctatgaacaaatctttcgctgtctgcccagcaatgctacgagatcgctgaggactctcagagaatatgtagccgttgagcctttggcgacagtgagcccgccgctggcccggtctgaactcactcaagtgcaaggccacctcgtccactttcccctgaaattcctcgaagatgagagcttgctccctcccctgggttccaaggagggcatgatcccgctggaggtttggacatag

SEQ ID NO: 128745 - DNA, 957 bp, synthetic construct
  misc_feature 1..957: note = Description of Artificial Sequence: Synthetic coding sequence
  source 1..957: mol_type = other DNA
atggataagcaaaattctcagatgaacgccagtcatcccgagaccaatttgcccgtcggatatcctccacaataccctcccacagcctttcagggaccccctgggtactctggttacccaggacctcaggtctcctaccctccaccaccggccggacacagcggtcccgggccagccggcttccctgtgcctaatcaacctgtgtacaatcagccagtatataaccagccagtgggagccgcgggggtgccctggatgcctgctccgcagccgcctctgaactgtcccccaggactcgaataccttagtcagatagatcagattttaattcaccagcaaatagaactcctcgaggttttgactggcttcgagacgaacaacaagtatgagattaagaactcctttgggcagcgggtctatttcgccgcggaagacaccgactgctgtacccggaattgctgtggcccctccagaccctttactcttagaattattgacaatatgggccaggaggtgattaccctcgaacggcctctgcgctgttcgagctgttgctgtccctgctgcctccaggaaatcgaaatccaggctcctcccggggtcccaatcgggtacgtgattcagacttggcacccttgcctgcctaaatttactatacaaaatgagaaacgcgaagatgttctgaagatatctggcccctgcgttgtatgcagctgttgtggtgatgtggactttgagataaaatctctggacgagcaatgtgtcgtgggcaagataagcaagcattggaccggaatcctcagagaagcattcaccgacgccgacaatttcgggattcagttcccattagacctggacgtcaagatgaaggctgtcatgatcggagcgtgttttctgatcgatttcatgtttttcgagtcaacaggcagtcaggaacagaagagtggggtctggtag

SEQ ID NO: 128746 - DNA, 93 bp, synthetic construct
  misc_feature 1..93: note = Description of Artificial Sequence: Synthetic coding sequence
  source 1..93: mol_type = other DNA
atgaaggccgtgatgattggcgcctgcttcctgatcgattttatgttctttgagtccaccggaagccaagagcagaagagcggcgtctggtag

SEQ ID NO: 128747 - DNA, 750 bp, synthetic construct
  misc_feature 1..750: note = Description of Artificial Sequence: Synthetic coding sequence
  source 1..750: mol_type = other DNA
atggacaaacagaacagccagatgaacgcaagccaccctgagacaaacctccctgtcggctaccccccgcagtatccccccacggcttttcaagggcctccaggatacagcgggtatcccggtccccaggtttcctacccaccacctcccgcaggacactccggaccaggccccgccggctttccagtgcctaaccagccagtctacaaccagcctgtgtataatcagcctgtcggagctgcaggagtcccatggatgcctgctccgcagccacctctcaactgtcctcctggcttagaatacttaagccagatagaccagatcctgatccaccagcaaattgagttacttgaggtgctgacaggctttgagacaaataacaagtacgaaatcaagaacagctttgggcagcgcgtctatttcgccgctgaagatactgactgctgtacacggaattgctgtggaccatcacgcccttttacactcaggatcatcgacaatatgggacaagaggttattaccctcgaaaggcccctcagatgtagctcctgctgttgcccttgttgcctccaggaaattgagattcaggctccgcctggcgttccaattgggtacgtaattcagacatggcatccctgcttgcccaagtttacgattcagaacgaaaaaagagaagacgtgctcaagattagcgggccatgcgtcgtatgttcatgctgtggcgacgttgacttcgaaataaaatcatag

SEQ ID NO: 128748 - DNA, 675 bp, synthetic construct
  misc_feature 1..675: note = Description of Artificial Sequence: Synthetic coding sequence
  source 1..675: mol_type = other DNA
atgccagctccccctccccctctgaactgtccccctggtctcgagtacctgtcacaaatagacatgatattgatacatcagcagattgaactgctggaggtgttattctcatttgagtctagtaacatgtacgagattaagaatagttttgggcagcggatctacttcgccgcagaggatacaaatttctgcatcagaaattgctgtggccgctcacgaccgtttacgttgagaatcaccgataatgttggcagagaagtaattacacttgagaggcctcttcggtgcaactgctgctgctgtccatgctgtctgcaggaaatagaaatccaggctccccctggtgtcccagtgggctatgttacccagacgtggcacccatgcctgaccaaattcactatcaagaatcagaaacgcgaggacgtgcttaagatctcaggcccttgtatcgtctgcagttgcattgccggggttgattttgagatcacatcactggatgagcaaatcgttgtaggacgaatctccaagcattggtctggttttctccgagaggcttttacagacgctgacaactttggcatccagttccccagggatctcgacgtgaaaatgaaggccgtgatgattggagcatgcttcctgatagattacatgttcttcgagaggacacggtag

SEQ ID NO: 128749 - DNA, 486 bp, synthetic construct
  misc_feature 1..486: note = Description of Artificial Sequence: Synthetic coding sequence
  source 1..486: mol_type = other DNA
atgcccgcccctccccccccactgaactgcccccctgggctggagtacctgtctcagatagatatgatcctgatacaccagcagattgaactgctggaagtactattctcctttgaatccagcaacatgtatgaaattaaaaacagttttggccagagaatctacttcgccgcagaggacacaaacttctgcatccgcaattgctgtggtcgctcccggccattcacccttaggatcacagacaacgttggccgcgaagtgattacgctcgagcgcccactgaggtgtaactgctgttgttgcccatgttgcctacaggagatagagatacaggccccccctggagtgcccgtggggtacgttactcaaacgtggcacccctgtttaaccaagtttaccattaagaaccaaaaaagagaagatgtgctgaagatcagtggcccttgcatcgtgtgctcttgtattgccggcgtagacttcgaatag

SEQ ID NO: 128750 - DNA, 894 bp, synthetic construct
  misc_feature 1..894: note = Description of Artificial Sequence: Synthetic coding sequence
  source 1..894: mol_type = other DNA
atgcgttcttggaattctttattttgcctcaactcctctcgccccccaggtcacattgtctatcctaagcaccaagcggggcacacagggaaacaggcggatcacctcggctcgcaagctttttatcccggcaggcagcatgactacctggtgccgccagccggtacagcaggcatccccgtgcagaaccaacctggcagacccgaaggagtgccttggatgcctgctccaccaccacccctgaattgccccccggggctggaatatctgagccaaattgatatgatattgattcaccagcagattgagctgctggaggtcctgtttagttttgagtccagtaatatgtatgaaattaaaaattcctttggacagcgcatctattttgctgctgaggacacaaatttctgcatcagaaattgctgcggacgatctcggccttttactctgagaatcacagacaatgttggtcgcgaagtgattactttggaacgaccgctgcggtgtaactgctgttgttgtccttgttgcctgcaagaaattgagatccaggctccgcctggagttccagtgggctacgtgacacagacttggcatccttgtttaacaaagtttacaatcaaaaaccagaagagggaggacgttttgaagatttctgggccctgcatcgtgtgctcatgcatagcaggcgtcgactttgagatcacctcgttagatgagcagattgtcgttggaaggataagcaaacattggtctgggtttttgcgggaggcttttacagatgcggacaactttggcattcagttcccccgtgatctggatgtgaagatgaaagcggttatgataggggcctgctttctgatcgactatatgttttttgagaggaccaggtag

SEQ ID NO: 128751 - DNA, 951 bp, synthetic construct
  misc_feature 1..951: note = Description of Artificial Sequence: Synthetic coding sequence
  source 1..951: mol_type = other DNA
gtgtcagctcatctgcgcttttttctggccatcattctgagagattccggcctgtgggccgaatggcgcatgaagccgtttcagatccatctgcctggtccccccggacacatcgtttatcctaagcatcaggctggtcacaccggaaagcaagctgatcacctgggatctcaggccttctaccccgggaggcagcatgattaccttgtgcccccggctggtactgcggggatccccgtccaaaaccagcccggcaggccggagggtgttccctggatgccagctccgcccccgcccctgaactgtcctcctggcctagaatacctaagccaaattgacatgattctgattcaccagcaaattgagctgctcgaggtactgttctcgtttgagtccagcaatatgtacgaaatcaaaaacagctttggccagaggatctactttgcagcagaggacacaaacttctgcattcgcaattgctgtggtcgcagcagacccttcacactgcgcatcacggataacgtgggccgtgaggtcatcacactcgaaagacctcttcgctgcaattgctgttgttgtccctgctgcttgcaagagattgagattcaggcccctcccggcgtgcccgttggctatgtaactcagacctggcacccctgtctgaccaaattcacaatcaagaaccaaaagagggaagacgttctcaagatatcgggcccttgcattgtgtgcagctgtattgccggtgttgattttgagattacaagcttggacgaacagatcgtggtcggcaggatttccaagcactggtcaggctttttgcgagaagccttcacagacgccgataactttggtatccagttcccccgtgaccttgacgtgaagatgaaggcagtgatgattggggcttgcttcctcatagactacatgttcttcgaaagaacgcgttag

SEQ ID NO: 128752 - DNA, 888 bp, synthetic construct
  misc_feature 1..888: note = Description of Artificial Sequence: Synthetic coding sequence
  source 1..888: mol_type = other DNA
atggccggatatctgcctccgaaagggtacgccccatccccgccccccccttatcctgtcacacccgggtaccccgagccagcattacaccctggtcccgggcaggcccccgtgcctgcacaggtccccgccccagctcccggattcgctctgtttccttcaccgggacccgtcgccctcggcagcgccgcaccatttttgcccctgcctggcgtcccgtctggtctcgagttcctggtacagatagaccagatccttattcaccagaaagctgaaagggttgaaaccttcctaggttgggagacatgcaatcggtatgaactgaggagcggggccggccagcctttaggccaggctgctgaggaatccaactgctgcgccagattgtgctgcggcgccagacgaccccttagggtgcgcctcgccgacccaggggatcgggaggtgctacggctcctgagaccgttgcactgcggttgtagttgctgtccttgcggcttacaggagatggaggtccaggccccacccggaactacgatcgggcatgtgctgcagacgtggcatccgtttctgcccaagtttagcatccaggacgccgacagacaaacagtgctaagggttgtcgggccctgttggacctgtgggtgcgggaccgataccaacttcgaggtgaagacacgcgatgaatcacgatctgtgggccgtatttcgaagcagtggggaggattggtccgcgaggcccttacggacgcagacgacttcggactccagttccccctggatctagatgtcagagttaaagctgttctgttaggtgcaacatttctaatcgattacatgttcttcgagaagcgtggcggcgccggaccatcagccgtgacatcctag

SEQ ID NO: 128753 - DNA, 672 bp, synthetic construct
  misc_feature 1..672: note = Description of Artificial Sequence: Synthetic coding sequence
  source 1..672: mol_type = other DNA
atggcaggctacctcccacccaaaggatatgcaccttcgcccccgccgccttatccagtgacgccaggttaccccgaacctgccctgcaccccggacctggccaggccccagtgcccgcacaggtcccggctccagctcccggcttcgcgctgtttccttccccaggccctgtagctttgggcagcgcggccccattcttacccctccccggcgtcccttcaggattggaattccttgtacagatcgaccagattttaattcaccagaaggcagaacgggtcgagacatttctgggctggaggcctgtgattggaatgaactgcgctctaggcccgggatccccatgggtgagacgcccaaggcgggccaccgctgccccagtctgcgccgtcgctcccgcagggagatgcgtgagcgcctggcctacccccggaacagtgaggtgttgtgtttgttccgcccggtgcacggtggcagcagcagccgcacctgtggcctccaggagatggaagtacaggctgcaccaggctccgcctttggcgacatgctatcgacctggtatcccctcatctccaagttccccttcacgtatgccgatcgcccgccaatcgtgtgaatggtggggaccagctgggcctgtggcggttgcgcagacccctactctgcggtag

SEQ ID NO: 128754 - DNA, 888 bp, synthetic construct
  misc_feature 1..888: note = Description of Artificial Sequence: Synthetic coding sequence
  source 1..888: mol_type = other DNA
atggctggttacctccccccgaagggatatgcacccagtccacctcctccgtaccccgtgacccccgggtatcctgaacccgccctacacccagggccaggccaggcaccagtgcctgctcaggtcccggctcctgctccaggatttgcgttattccccagccctgggccggtcgccctgggctcagccgcccccttcctgccactaccaggggtgccaagcggactggagttcctggttcaaattgaccagattttaatacaccaaaaggcagaacgcgtggaaacctttctcgggtgggagacttgcaacagatatgagctccgctccggagccggccagcccctggggcaggccgctgaagagagcaattgctgtgcccgcctttgctgcggtgccagacggcctttacgagtgcgcttggcggaccccggcgaccgggaggtcttgcgcttactacgcccactgcactgtgggtgtagttgctgtccctgcggtctgcaggagatggaggtccaggctcctcccggcacgaccattggacacgttttacagacgtggcatccctttctgccaaagttctccattcaggatgccgaccgccagacagtacttcgcgtggttggaccctgctggacttgcggatgcggtacagatactaattttgaagtgaaaaccagagacgaatcaaggagtgtgggaagaatttccaaacagtggggggggctggtgagagaggcgttgactgatgcggacgatttcggactccagtttccactggatcttgacgttcgggtcaaggcggtccttctgggagcaacatttctaatcgactatatgttctttgagaagaggggaggggccggcccaagcgccgtgacctcttag

SEQ ID NO: 128755 - DNA, 888 bp, synthetic construct
  misc_feature 1..888: note = Description of Artificial Sequence: Synthetic coding sequence
  source 1..888: mol_type = other DNA
atggcagggtatctgccccctaaaggatatgccccatcacccccaccaccttatcccgtgacccccggttacccagaaccggcgttgcaccccggaccaggccaggccccagtacctgcccaggtgcctgcccccgcccctggatttgccctgtttccttctccaggaccagtggctctgggctccgccgcgcccttcctgcccctgccaggggtaccatctgggttggagttcctggtgcaaatcgatcaaatactgatccaccagaaagccgagagagttgagacttttctggggtgggagacttgtaataggtatgaactcagatccggggctggccaaccgctcggccaggcagctgaggagagcaactgttgcgctagactgtgctgtggcgcgcgtcggcctcttcgcgtgagactcgctgatcctggcgatagggaagtgctgagactgcttcgtccacttcactgtggatgttcatgctgcccctgtggcctccaggaaatggaggtccaggcccccccaggcactaccataggtcacgtgctgcagacctggcacccctttttgcctaagtttagcatccaggacgcagaccggcaaaccgtgctccgtgtggtgggcccatgctggacatgtggatgtgggacagatacaaactttgaggtgaaaactagagatgagtcacgctccgtgggaaggatttcaaagcagtggggggggttggtgcgagaggctctgacggacgccgacgatttcggcctgcagttccccctggacctggatgtgcgggttaaagctgttctgcttggagctaccttcctgatcgattatatgttttttgagaagagggggggcgccggaccgtctgcagtgactagttag

SEQ ID NO: 128756 - DNA, 990 bp, synthetic construct
  misc_feature 1..990: note = Description of Artificial Sequence: Synthetic coding sequence
  source 1..990: mol_type = other DNA
atgtcgggggtggtgcctaccgcccccgaacagccagcaggcgaaatggaaaaccagactaagccacctgatccccgacctgatgccccgcccgagtacaatagccacttcctcccgggaccacctgggacagcagtgcctccgcctactggctacccaggtgggcttccaatgggctactactccccccagcagccctcgaccttcccactataccagcctgtcggggggatccatccggtaagataccaacctgggaaataccctatgccgaaccagtctgtgcctatcacctggatgcctggtcccacacctatggccaactgtccccccggactggagtaccttgtccagctcgataatatccatgtcctccaacattttgagcccttagagatgatgacatgtttcgagacaaacaataggtatgatatcaagaataattcggatcagatggtgtatattgtgactgaggacacggacgattttacccggaatgcttaccggacacttaggccttttgtactgcgagtcaccgactgtatgggccgcgagattatgactatgcaacgcccctttcgctgcacatgctgttgcttttgctgcccgagcgcacggcaggagctagaagtccaatgtcccccaggcgtgacaataggatttgtagctgaacactggaatctgtgtcgtgccgtgtactcaatacagaatgaaaagaaggagaatgtgatgagagtaagagggccctgctctacctatgggtgcgggtcagacagcgtgttcgaggtcaagtccttggacggcatttcaaatatcgggtccattatccgaaagtggaatggtctgctaagtgctatggccgacgcagaccactttgacatccacttccccctcgaccttgatgtgaagatgaaagcaatgatctttggggcttgcttcctgatagactttatgtatttcgaaaggagcccgccccagagaagtcgctag

SEQ ID NO: 128757 - DNA, 720 bp, synthetic construct
  misc_feature 1..720: note = Description of Artificial Sequence: Synthetic coding sequence
  source 1..720: mol_type = other DNA
atgagcggagtcgtgccaactgcgcctgaacagcccgccggggagatggaaaaccaaaccaaaccacccgaccctagacccgacgctcccccagagtataatagccatttcctccccggccctcccgggacagcagtccctccccctaccgggtatcctggcggactcccaatgggctattatagtccacagcaaccttcaaccttccccttgtatcaacctgtgggtgggattcatccagttcgctaccagccaggcaaatacccgatgccaaaccaatcagtgccaattacctggatgccgggaccaacccctatggcaaactgcccacccgggctggaatatctggtgcagctcgaagtgcagtgcccccccggggtcacaatcggtttcgttgctgagcattggaatctctgccgggccgtgtacagtatccagaatgaaaagaaggagaacgtgatgagagtgcgcggaccgtgcagcacctatggttgtggtagtgattcagtatttgaggtgaagagcctggatggcatatctaatatcggctcaatcatcagaaaatggaacggactcctgagcgctatggctgacgccgaccattttgatattcattttcccctggacctcgacgttaagatgaaggcgatgatttttggcgcgtgctttttaatcgacttcatgtacttcgaacgctcccctccccagcgaagcagatag

SEQ ID NO: 128758 - DNA, 990 bp, synthetic construct
  misc_feature 1..990: note = Description of Artificial Sequence: Synthetic coding sequence
  source 1..990: mol_type = other DNA
atgtcaggggtggtccccaccgccccagagcagcccgcgggtgaaatggaaaaccagacaaagcctcctgacccaaggccggatgcgccccccgagtataattcccatttcctgcccggcccgcctggaacagctgtgccgcctccaaccggctaccctggcggcctgcccatgggttactattcaccacagcagccaagcacctttcctctttatcagcccgtgggtgggatccaccccgttcgatatcagccgggcaaataccccatgccaaatcagtccgtgcccatcacctggatgcccggccctacacccatggcaaactgccccccgggactggaataccttgtgcaacttgacaatatacacgttttacagcatttcgaaccactggagatgatgacctgtttcgaaactaataaccgctatgacatcaagaataattctgatcagatggtctatattgttacggaagacacggacgacttcacccgcaacgcctataggactttgagacctttcgtattgcgagtgaccgattgcatgggtagagaaattatgacgatgcaacgcccctttaggtgcacctgctgttgcttctgttgcccctccgcccggcaagaactcgaggtccagtgtccaccaggagtaaccattggcttcgtggccgagcattggaacttatgcagggccgtgtattccatccagaatgaaaagaaagaaaatgttatgagagtgagaggtccatgcagtacgtatggctgtggttcagatagtgtctttgaagtgaagagcttggacgggatctcaaacattgggtcaattattcgcaagtggaacggattgctgtcggctatggccgatgccgaccactttgacattcattttcccttagacctggatgtgaagatgaaggctatgatttttggtgcctgcttccttatcgatttcatgtacttcgagcgctcccctccccagcggtcgaggtag

SEQ ID NO: 128759 - DNA, 789 bp, synthetic construct
  misc_feature 1..789: note = Description of Artificial Sequence: Synthetic coding sequence
  source 1..789: mol_type = other DNA
atgtctggcgttgttcctacagcgcccgaacagccagccggggaaatggagaaccagacaaaaccaccagatcctaggcccgacgctcctcccgagtataattcacacttcctgcccggtcccccaggaaccgccgtcccaccacccacgggatatcctggcggcctgccaatgggctactactccccccagcagccatctacttttccactctaccagccggtgggcgggatccaccctgtgaggtatcagccgggcaagtaccccatgccaaatcagagcgtgccgattacatggatgcccgggcccaccccaatggccaattgtccacccggcctcgaatatttggtccaactggataatattcatgtcctacagcatttcgaacccctagagatgatgacatgtttcgagaccaataacaggtacgacattaaaaataactcagatcaaatggtttacattgtgaccgaagacaccgacgacttcactcgaaatgcttatagaacattaaggcccttcgtgctgcgtgtgaccgactgcatgggtagggagattatgactatgcagcggcctttccggtgcacatgttgctgcttttgctgcccctccgcccgtcaggagctggaggtgcagtgtcccccaggggtgactataggcttcgtcgctgaacactggaatctgtgtagggcagtgtattccattcagaatgaaaagaaagagaacgtcatgcgggtaagggggccctgttctacctacggctgtgggagcgactcagtatttgaatag

SEQ ID NO: 128760 - DNA, 627 bp, synthetic construct
  misc_feature 1..627: note = Description of Artificial Sequence: Synthetic coding sequence
  source 1..627: mol_type = other DNA
atgagcggcgttgtcccaacagccccagaacaaccagccggggagatggagaatcagactaaaccccctgatcctaggccagatgctcctcctgagtacaacagccatttcctgccaggccccccaggcacggccgtgcctccccctacaggctaccctggaggacttcccatggggtattactcgccccagcagccctcaacctttcctttgtatcaacccgtggggggcattcatcccgtccgataccaacccggcaaataccccatgcccaatcagtcagtgcccatcacatggatgcccgggcccaccccaatggctaactgcccacctggcttagaatacctggtgcagctcgataacatccatgttctccagcacttcgaaccactcgagatgatgacatgttttgaaactaataatagatatgatatcaaaaacaatagtgatcaaatggtgtacattgtcacggaggataccgatgacttcacacggaatgcttatagaaccttgcgtcccttcgtactgcgggtgacagattgcatgggccgagagatcatgaccatgcaacgcccttttcggtgtacctgttgctgtttctgctgtccaagtgcgcggcaggagtag

SEQ ID NO: 128761 - DNA, 429 bp, synthetic construct
  misc_feature 1..429: note = Description of Artificial Sequence: Synthetic coding sequence
  source 1..429: mol_type = other DNA
atgagtggggtagttcccacagcacccgagcagcccgctggggagatggaaaaccagacgaagcccccagaccccagacctgacgcgcctccagagtataatagccacttcctgcccgggccgcctggcacggccgtgccccctcctacagggtaccctggtggcctgcctatgggctattattccccacagcagccatctacattcccattataccaaccggtgggaggaatccaccctgtgcgttatcagcctggaaagtaccctatgcctaatcagagcgtccccatcacttggatgccgggaccaaccccaatggccaactgccctccaggactggagtacttagtgcagctagataatatccacgtgctccaacatttcgagccattggaaatgatgacttgcttcgaaactaataatagatag

SEQ ID NO: 128762 - DNA, 990 bp, synthetic construct
  misc_feature 1..990: note = Description of Artificial Sequence: Synthetic coding sequence
  source 1..990: mol_type = other DNA
atgagcggcgtggtgcctactgctcccgaacagcccgctggagaaatggagaatcagacaaaaccccccgacccgcggcccgatgcgccacccgagtacaacagtcacttccttcccggccctccaggcaccgcagttcctccgcctacaggataccctgggggacttccaatgggctattatagccctcaacagccgagtacttttccgctgtaccaacccgtcggcggaattcatccggtcagataccaaccggggaaatacccaatgccaaaccagtccgtgcccataacatggatgccaggaccaacgcctatggctaattgcccccctggactagagtacctcgtacaactagataatattcacgtgctgcagcactttgagcccctcgagatgatgacgtgcttcgagaccaataatcgctatgacatcaagaacaattctgaccagatggtttatatcgtgaccgaggacacagacgactttacccgcaacgcttatagaaccttgagacccttcgttctcagagtcacagactgtatggggagggagataatgacaatgcagcgcccgtttaggtgtacatgttgctgcttctgctgtccttctgccagacaggaattggaggtgcagtgtccccccggcgtaactattgggttcgtcgccgagcactggaatctatgccgcgcagtctacagcatccaaaatgagaagaaagagaacgtaatgagagttagaggcccttgctccacctatggatgtgggagtgacagtgtatttgaagtgaaatctctcgatggcatctccaacatagggtccatcattcggaagtggaatggccttctaagtgccatggccgatgcagatcatttcgatatacacttccctctggacctggatgtaaaaatgaaagctatgattttcggtgcttgctttctgatcgactttatgtactttgagcgttcgcctccccagcgaagcagatag

SEQ ID NO: 128763 - DNA, 297 bp, synthetic construct
  misc_feature 1..297: note = Description of Artificial Sequence: Synthetic coding sequence
  source 1..297: mol_type = other DNA
atgtcaggagtggtccccaccgcacctgaacagcctgccggagagatggagaaccagaccaaacctccagacccaagacccgacgctcctcctgagtataactcccactttctgccaggacctcccggcactgcagttcctccaccaactggatatccagggggccttccaatgggatactacagccctcaacaacccagcaccttccctctgtatcaaccagtgggtggaattcaccctgtgaggtatcagcccggaaagtacccgatgccgaaccagagtgtccctattacctag

SEQ ID NO: 128764 - DNA, 675 bp, synthetic construct
  misc_feature 1..675: note = Description of Artificial Sequence: Synthetic coding sequence
  source 1..675: mol_type = other DNA
atggagaaccaaacgaaaccccccgatccgaggcccgacgcccctccagagtacaactcccacttcctcccaggccctccaggcacggccgtgccacctccaaccggataccctggggggctgccaatgggctattatagccctcaacaaccttccactttcccgctgtaccaaccagttggaggcatccatcccgtccgctatcagcccggtaaatatcccatgcccaaccagtcagtgcctattacatggatgccaggcccaacccccatggccaactgcccaccggggctggaatatctcgtccagctggaggtccagtgtcctcctggagtgactattgggttcgtggccgagcattggaacttgtgcagggccgtatacagcatccagaacgaaaagaaagagaatgtgatgagggtcaggggcccctgctctacctacgggtgcggaagcgactcagtcttcgaggtgaagtctctcgacggcatctccaacatcggtagcataatccgcaaatggaatggcctcctttctgccatggcggacgcggatcatttcgatattcatttccctctggatctcgacgttaagatgaaagccatgatctttggggcttgtttccttatcgactttatgtacttcgagagatctccgccacaacgtagccgatag

SEQ ID NO: 128765 - DNA, 1326 bp, synthetic construct
  misc_feature 1..1326: note = Description of Artificial Sequence: Synthetic coding sequence
  source 1..1326: mol_type = other DNA
atggccctgtttggagcactgttcttagccctcttagccggagcacacgccgagttccctggatgcaagatcagggtaacttcgaaagccctggagctagtgaaacaggaaggattaagattcctggaacaagaactcgagactatcaccatccctgatctgcgagggaaggaaggtcacttctactacaatatctcagaagtcaaggtaacagagctccagctgacctcttctgaactcgacttccaaccacagcaggaacttatgttgcagattacaaacgcctctttggggctgagatttcgacggcaattgctttactggttcttaaaagtgtacgattttctgtccaccttcatcactagcgggatgagattcctcttgaaccagcaaatctgcccagtgttataccatgcaggaactgttttgttaaatagcctcttggacactgtgcccgtgcgtagtagcgtggatgaactggttggaatcgactacagtttaatgaaggatcccgtggcgtccacctcgaatctggacatggactttaggggggccttttttcctctaacagagagaaactggtctctcccaaaccgagccgtagagccgcagttgcaagaggaagaaaggatggtttacgtggcattctccgagttcttttttgacagtgcgatggagagctacttccgtgccggggctttacagctactgctggtaggggataaggtaccacacgacctggatatgctactccgagctacatatttcggcagcatcgtgctgttaagccccgcagtgatagactcccccctcaagctcgagctaagggtcctggcaccgccccgatgtacaatcaagccctctggcaccaccatctctgtgaccgcttcagttactatagccttagtgccccccgatcagcctgaggttcaactgtctagtatgacaatggatgctcgcctgtcagccaaaatggccctcaggggcaaagctctccgaacccaactggatctccggcggttccgaatctattcaaaccacagtgcccttgagtcactcgctctcatccctctccaggccccactgaagaccatgcttcaaattggcgtgatgcctatgctgaacgagcgtacgtggcgcggcgtgcagattccattgccggaaggaataaacttcgtgcatgaagtcgttactaatcacgcgggtttcctgacaattggcgcagaccttcatttcgccaagggcctgagggaggtcatcgagaagaaccgtccagccgacgtgcgcgcctccacggctcccaccccatccacagcagcagtgtag

SEQ ID NO: 128766 - DNA, 1482 bp, synthetic construct
  misc_feature 1..1482: note = Description of Artificial Sequence: Synthetic coding sequence
  source 1..1482: mol_type = other DNA
atggctctgttcggcgccctttttctagccttactcgcaggggcccacgctgagttccctgggtgcaagattagagtgacgagcaaggctctggaactggtaaaacaggaaggcctccggtttctcgagcaggagctggagaccataacaatcccggacttgagagggaaggaaggtcacttctattacaatatcagcgaagtgaaggtcaccgaactgcagctcacttcctccgaactggacttccagccccagcaggagctgatgctccagataacaaatgcatccctgggccttcgattccgccgccaactactgtattggttcttctatgacggtggctacattaacgcaagtgctgagggtgtcagcatcagaactgggctggaactctcccgggatccggccggcagaatgaaagtgtcaaacgtgtcttgccaagcgagtgtgtcaagaatgcacgctgcgttcggggggacgtttaagaaagtttacgatttcctctctacatttatcacctccgggatgcgcttcctgctcaaccagcagatttgtccagttttataccacgctggcactgtgctcttgaacagccttctggataccgttcccgtgcgttcatcggtggacgaattagtcggtatcgactactccctgatgaaagatcccgtagcgagtacctctaatctggacatggacttcagaggcgcctttttccctttgaccgaacggaactggtccttaccgaaccgtgctgttgaaccccaattgcaggaggaggaacgaatggtatatgtcgcattcagcgagttcttcttcgattccgcaatggagtcatattttcgagcgggagcgctgcagctgctgttggtcggggacaaggtcccacatgatctggacatgttactgagagcaacatacttcgggagtatcgtccttctgagccccgccgttatcgacagccctctgaaactggagctccgggtgctggctccccctcgctgcacaatcaagccttcaggcacaactatctccgtcaccgctagcgtgaccatcgcacttgtgcctcctgatcagcctgaggtacagttgagctctatgacgatggatgcaagactgagcgcaaagatggccctgagggggaaggccctgagaactcaactggacctccgaaggttccggatctactccaatcattccgccctcgaatctctggcgctcatcccactgcaggctccactcaagacaatgctgcagattggagtgatgccaatgctcaacgagagaacctggcgcggtgtgcagatccccctacccgagggcattaattttgtccacgaagtcgtgaccaaccatgcaggctttttaaccattggggccgatctgcactttgcgaaaggtttgcgggaagtgatcgaaaaaaaccgccctgctgacgtcagggcctccaccgccccaacgccttctaccgcagctgtctag

SEQ ID NO: 128767 - DNA, 1482 bp, synthetic construct
  misc_feature 1..1482: note = Description of Artificial Sequence: Synthetic coding sequence
  source 1..1482: mol_type = other DNA
atggcattgtttggcgcgctgttcctcgcattgctggcaggagctcacgcggaattcccagggtgcaagattcgcgtgaccagcaaggcacttgagcttgtcaagcaggaaggtctgaggttcctggagcaggaactggaaacaataactattcctgacctgagaggcaaagaagggcacttctactataatatttccgaagtgaaagtgacagaactgcaactgacctctagtgagcttgactttcagcctcagcaggaattgatgctccagattacaaatgcctctctaggactgcgcttccgaaggcagcttttatactggttcttttacgacggcggctatataaatgcaagcgccgaaggagtatcaatccggacggggttggagctgtcaagagatcccgcgggcaggatgaaagtgagtaatgtgtcttgtcaggcgagcgtttctcggatgcatgctgcctttggcggcactttcaagaaggtgtacgactttctcagtacatttattaccagtgggatgcgattcctgctcaaccagcagatttgtccggtgttgtatcatgctggcacagtgctacttaactccctcttggacaccgtgccggttagaagctctgtggatgagctggtagggatcgactactcgttgatgaaggatccagtggcctccaccagcaatctggacatggacttccgcggagcattcttcccgttgactgaacggaattggtccctgcctaacagagccgtggaaccacaacttcaagaggaagaaaggatggtgtacgttgctttctccgaatttttcttcgattctgccatggaatcctacttccgcgccggagcactacaactcctgctggtgggagacaaggtgccacacgatttagatatgctgttgcgggccacatattttggatctatcgtgttactgagtcctgccgtgattgattctcctttaaaattagagcttcgggttctggccccacccagatgtactattaagccctccggcactactatttccgtaactgcaagtgtcacaatcgccttagttccccctgatcagccagaggtacagctgagtagtatgactatggatgccaggctttccgctaaaatggccctacgcggtaaggccttgcggacacagctcgacctccgcagatttcggatatactctaaccattctgcactggaatccctggcattgatccccctgcaagcaccgctcaaaaccatgctgcagattggcgttatgccaatgctaaacgagcggacttggaggggagttcagatccccctgcccgagggtatcaatttcgtgcatgaagtggtgaccaatcacgccggcttcctgaccattggggcagatttacactttgcaaagggcctgagggaggttatcgagaaaaacagacccgcagacgttcgcgccagtactgcacctaccccgtccacagccgccgtgtag

SEQ ID NO: 128768 - DNA, 1542 bp, synthetic construct
  misc_feature 1..1542: note = Description of Artificial Sequence: Synthetic coding sequence
  source 1..1542: mol_type = other DNA
atgggtctgagtggttctgacaatagctgtgatccgaccccacctcccggcccactggccatggctctgtttggtgccctctttctggctctacttgccggcgctcacgccgagtttcccgggtgcaagatccgcgtgacttccaaggccttggagctagtgaaacaggaaggccttaggtttctcgaacaggagctagaaacgatcacgatccctgatctccggggcaaagaggggcacttctattataatatcagtgaggttaaggtcaccgagctacaattaacgagctctgagcttgattttcaacctcagcaggaactgatgctgcagattaccaatgcaagtctgggcctaagatttcggagacagttactgtactggtttttttacgacggtggctacattaatgcttctgcagagggggtgtccatcaggactgggttggagcttagccgagatcctgccggccgaatgaaggtgagtaacgtcagctgtcaggcgtccgtaagtagaatgcacgccgctttcggaggaactttcaagaaggtttacgattttctctccactttcataacatcggggatgcgatttctgctgaatcagcagatctgtccagtgctctatcacgccgggacggtgctcctaaactccctgttggataccgtgccagttaggtcctcggtggatgagctggtcggcattgattactccttaatgaaggaccccgtggcatctacttccaacctggatatggacttccggggtgcatttttccccctgaccgagaggaattggtccttacccaaccgagccgtggaaccacagttgcaggaggaagagcgcatggtatacgtggctttctccgaattcttcttcgattctgcgatggagagctatttccgggccggagctctgcagctcctcctggttggagacaaagtgccacatgatctggacatgctcctgagggcaacatattttggttccattgtacttctttcccctgccgtgatagattctcccctgaaactcgagctgagggttttggctccgcccaggtgcacgatcaaaccgagcggcactactatctctgtgaccgcaagcgtgactattgctctggtcccacccgaccagcccgaggtccagcttagttcaatgacaatggatgccaggctcagcgccaagatggcactgcggggaaaagcgctgcggacccagctggacttgcgaaggtttcgcatatactccaaccactctgccctggagagcctggccctgatcccgttgcaggcgcccctgaaaaccatgctccagattggcgtaatgcccatgctcaatgagcgaacgtggcgaggagtacagatccccttgcccgaggggatcaactttgtacacgaagtcgtgaccaaccatgctggatttctcacaatcggggcggatctccacttcgccaagggtttgcgggaagttatcgaaaagaaccggccagctgatgtgagagcttctaccgcccctaccccgagtacggccgcagtgtag

SEQ ID NO: 128769 - DNA, 1218 bp, synthetic construct
  misc_feature 1..1218: note = Description of Artificial Sequence: Synthetic coding sequence
  source 1..1218: mol_type = other DNA
atgctgcaaattaccaacgctagtctcggcttgcgctttcggagacagctattgtactggtttttctacgacggcggatacatcaacgccagcgcagagggagtttcaatacgcaccggcctcgaactgagtagagatccagccggacgtatgaaagttagcaatgtgtcatgccaggccagtgtgagtcgaatgcacgcggcttttggtgggacatttaaaaaagtttacgatttcttgagtacctttattacctctggcatgaggtttctacttaaccagcagatctgtccagtgctgtatcatgcagggactgtgctcctgaatagcctgcttgacacagttcccgtgaggagctcagtcgacgaattggtggggattgactattctctgatgaaagatccagttgcctctacaagcaacctcgatatggactttcgcggagcatttttccccctcaccgaacgcaattggagtctgcccaaccgggcagttgagcctcaactgcaggaggaggaaaggatggtgtatgttgctttcagtgaattctttttcgatagtgctatggagtcttactttcgcgccggtgcattgcagttgctgctggtaggggacaaagtaccacatgatctggatatgttacttcgcgctacatattttggctccatagtcttactgtctcctgctgtgatcgactctccacttaaactggaattacgggtgctggctccacctagatgtacgattaagccctccggaaccaccatctcagttaccgcctcggtgaccatcgcccttgtccccccagaccagcccgaggtgcagttgtcatctatgacaatggacgcacggctcagtgccaaaatggccctcagaggtaaagcccttcgaacccagcttgacctgcgtcgattcagaatctacagcaatcactccgccctcgaatctctcgcactgatacctctgcaggcccctctcaaaacgatgctgcagattggtgttatgccaatgcttaacgagaggacatggaggggagtgcagatccctcttcccgagggaattaacttcgtgcatgaggttgtgactaatcatgcaggctttcttactatcggcgctgacctgcacttcgctaagggattacgtgaggttatagagaaaaatcgacccgctgacgtaagggcatctactgccccaacacctagcacagccgctgtgtag

SEQ ID NO: 128770 - DNA, 1197 bp, synthetic construct
  misc_feature 1..1197: note = Description of Artificial Sequence: Synthetic coding sequence
  source 1..1197: mol_type = other DNA
atggctctgttcggagccttgttcctggccctacttgccggagcccacgctgagttccccggatgtaagatccgcgtaacttcaaaagcgctggagcttgtaaagcaggagggactgaggtttctggagcaagagctggaaacaattacaatccctgatctaagaggcaaagagggacacttctactataatatatctgagaaggtctatgactttctgtctactttcatcaccagcggaatgagattcctcttgaaccagcaaatatgccctgtcctgtatcacgccgggacagtactcttgaattcacttctggatacagttcctgttagaagctcagtggacgagctcgtcggaatcgattacagtcttatgaaagatccggtggcatcaacgagcaatcttgatatggattttcgcggcgcattttttccactcacagaaaggaactggtcacttccaaatagagcagtggaacctcagctgcaggaggaggaacgcatggtgtacgtcgcattctctgagttcttttttgacagtgcgatggagtcttattttagagctggtgccctccagttactgctagtcggggacaaggtgcctcatgatttggatatgttgctgagagccacttactttggcagcattgtgctgttgtcacccgccgttatcgattctccacttaaactggaactacgagttctcgcaccgccacgatgtacgatcaagccctcgggcactacaatctccgtgacggcctctgttaccatcgctctggttccacctgatcagcccgaagtccagctctcctctatgacaatggacgcaaggctatccgccaagatggcactccggggcaaggccctgcggacgcagcttgacctgcgaaggttcagaatctactctaatcattcagccctggagtccttggccctgattcctctccaggcccccctcaagaccatgctgcaaattggggtgatgcccatgctgaacgagcgcacctggagaggcgttcagatccccctgcctgaaggcataaactttgtgcatgaagtggttaccaaccatgctggcttcctgacaatcggtgccgacctacactttgcaaaaggactccgcgaagttatcgaaaagaaccgtcccgctgatgtgcgggccagcaccgcacctacacctagcaccgctgcagtctag

SEQ ID NO: 128771 - DNA, 2343 bp, synthetic construct
  misc_feature 1..2343: note = Description of Artificial Sequence: Synthetic coding sequence
  source 1..2343: mol_type = other DNA
atggcaccttactcattgttggtaacacggctgcagaaagccctgggggtgcgccagtaccacgtggcgtccgtgctttgtcagagagccaaggttgcaatgagccacttcgagccaaatgagtacatccattacgacctactggagaagaacatcaatattgtcagaaagcgtctaaacaggcccttgacactgtccgaaaaaatcgtctacggccacctggacgaccctgcaagccaggagatcgaacggggcaagagttacctgaggttgcgtccagacagggtcgcaatgcaagatgctacagcccagatggctatgctccagtttattagttctggcctgagcaaggtcgccgtgccctccacgatacactgtgatcatttaatcgaagctcaggtggggggagaaaaggacctgcgacgggcaaaggatatcaaccaagaagtctacaacttcttggctacagctggcgcgaagtacggggtgggattctggaagccagggtcaggaatcattcaccagatcatattagaaaactacgcttatccaggcgtactgcttataggcaccgactctcacaccccaaacggcgggggtctgggagggatctgcataggcgtcgggggggccgacgccgtggatgtgatggcaggtattccgtgggaacttaagtgtcccaaagtgatcggcgtgaaactaaccgggagcttgtctggctggtcatcccccaaagacgtgatcctgaaagtggcggggattctgactgtcaaaggcggcacaggtgctattgttgagtatcacggtcctggtgtggatagtatcagctgtacgggtatggctaccatctgtaatatgggggcggaaattggtgctacaacttctgtgttcccctacaaccacagaatgaagaaatacctgtctaaaaccggaagggaagatatcgccaacttagctgacgagttcaaggatcatctggtgcctgaccctggatgccactacgaccagctcatcgaaataaacctctcagagctcaagccacacataaatggaccatttacacccgatttggcccatccagtggccgaggtcgggaaagtggcagagaaggaagggtggccattggacatccgagtgggactgataggctcttgcacgaactcaagctatgaagacatgggccggagcgctgccgttgccaagcaggcactggcccatggccttaagtgcaagagccagtttacaattactcctggtagcgagcaaattcgggccaccatcgaaagggacggctacgctcagattctgcgtgacctgggaggcatcgtgctcgccaacgcatgcgggccttgcatcggtcagtgggatcgcaaagacatcaaaaaaggcgagaaaaacaccattgttacatcctataaccgtaacttcaccggtcggaacgatgcaaatcctgagactcatgcattcgtaacgtcaccagagatcgtgaccgcactcgccatcgccgggactcttaaattcaacccggagacagattatctaactggaacggacggaaagaagttcaggctcgaagcacccgacgcagacgaactcccaaagggtgaattcgacccagggcaggatacataccagcacccccccaaagatagctctgggcaacacgttgacgtgtctccaacttcgcagcgcctgcagctcctagagccgtttgacaagtgggacggaaaggatctagaagacctgcagatcctaatcaaggtcaagggcaaatgtacaacagaccacatttctgccgctgggccctggctgaagtttagaggacatctcgacaacatatcgaacaacctccttattggagcaattaacatcgaaaatgggaaggccaacagcgtaaggaatgctgtcacccaggaatttggacccgtccctgatacggcccgatattataaaaaacacggtattagatgggttgttataggggatgagaattatggagaaggatcgtcaagggagcatgcggccttggagcctcggcaccttgggggtcgagcaatcataactaagtccttcgcccggatacacgagaccaacctgaaaaagcaagggctcctgcccctgactttcgctgatcctgccgactacaataaaattcaccccgtggataaactcacgatccagggactaaaggactttacgcctgggaagccactcaaatgcattattaaacatccaaacggtacgcaggagaccatcctgctcaaccacaccttcaatgaaacccaaattgaatggtttcgcgctgggtccgctttaaataggatgaaagagctccaacagtag

SEQ ID NO: 128772 - DNA, 741 bp, synthetic construct
  misc_feature 1..741: note = Description of Artificial Sequence: Synthetic coding sequence
  source 1..741: mol_type = other DNA
atggctgcccctggaccagccctatgtttgtttgacgttgatggtacactgaccgctcctcgccaaaaaatcaccaaagaaatggatgacttcctccagaaactccgacaaaaaatcaaaattggtgtcgttggcggctcagacttcgaaaaggtgcaggagcagctggggaatgacgtggtcgagaaatacgattatgtatttccagaaaatggcttggtagcttataaggacgggaagctgctgtgccggcagaacattcagtctcacttgggcgaggcccttattcaagatttgatcaattactgcctttcctacatcgcaaaaatcaaactccccaagaagagaggcacttttatagaattccggaatgggatgctgaacgtgtctccaattggacgttcctgtagccaggaggagcggatcgaattttatgaactggataagaaagagaatatccgacagaaatttgtcgccgacctgcggaaagagtttgccggtaaggggctgacattcagtatcggcggccagatttcttttgacgtgtttccagacggatgggataagagatattgcttacggcatgtggaaaatgatggctacaagacgatctattttttcggcgataagactatgcccggtggcaacgaccacgaaatttttaccgacccaaggacaatgggctatagcgtgactgcccctgaggacaccaggaggatctgcgaactgttgttcagctag

SEQ ID NO: 128773 - DNA, 366 bp, synthetic construct
  misc_feature 1..366: note = Description of Artificial Sequence: Synthetic coding sequence
  source 1..366: mol_type = other DNA
atgctcaatgttagtcccatcggacggtcgtgctcccaggaagagagaatcgagttttacgagctggataagaaggaaaacattcgacaaaagtttgtggccgatctgagaaaggaattcgcgggtaaaggtctaacattttcaattggtggtcagattagctttgacgtgttccccgatggatgggacaaaaggtactgtcttcgccacgtagagaatgacggttataagaccatctatttcttcggggataagaccatgccaggcgggaatgaccatgaaatcttcacagacccaaggactatggggtattccgttacggcaccagaagatacccgcagaatctgcgagttactgttttcctag

SEQ ID NO: 128774 - DNA, 492 bp, synthetic construct
  misc_feature 1..492: note = Description of Artificial Sequence: Synthetic coding sequence
  source 1..492: mol_type = other DNA
atgatgaatattcagtctcaccttggagaagcccttatccaggatctcattaattattgtctgagctacattgccaaaataaagcttccgaaaaagaggggcacatttatcgaatttagaaacgggatgcttaacgtgtctccgatcgggcggtcgtgctctcaagaggagcgaatcgaattctacgagctggataaaaaagagaatatcaggcagaaattcgtggccgatctgcgcaaggaattcgccggaaagggcctgacgtttagcattgggggtcaaatcagctttgatgtgtttccagacgggtgggacaagcgctactgtttacggcacgtcgaaaacgacgggtataaaactatctacttttttggtgacaagaccatgccaggggggaacgaccatgaaatatttacagatccaaggaccatgggatactctgtgacggcaccagaggacacccgtagaatctgtgaattgcttttcagctag

SEQ ID NO: 128775 - DNA, 579 bp, synthetic construct
  misc_feature 1..579: note = Description of Artificial Sequence: Synthetic coding sequence
  source 1..579: mol_type = other DNA
atggctcctttggggggagccccacgcctcgtcctgctcttttctggaaagcggaaatcaggaaaagactttgtaactgaggctctgcagtcgcgactcggtgccgacgtttgcgccgtgctgcgtttgtcaggccccctcaaggagcagtacgctcaggagcatggcctcaatttccagcgcctcctagacacttcaacatacaaggaagcttttcgcaaagatatgatacgctggggagaggaaaagcggcaggctgacccaggatttttctgtaggaaaatcgtagagggcatttcccagccaatctggctggtgagcgacacaaggagggtcagcgacattcagtggttcagggaggcttacggagccgtcacccagaccgtcagggtggtagcgctggaacagagccggcaacagaggggttgggtgttcacccctggggtggacgatgccgaatctgaatgcggactggataatttcggggatttcgattgggtgatagagaatcacggcgtagaacagaggcttgaagaacagctagaaaatttaattgaatttattagatctagattgtag

SEQ ID NO: 128776 - DNA, 615 bp, synthetic construct
  misc_feature 1..615: note = Description of Artificial Sequence: Synthetic coding sequence
  source 1..615: mol_type = other DNA
atggaacccaaagcctcctgcccagcggccgcccctttgatggaaagaaagtttcacgttttggtcggcgtcacaggatctgtggcagctctaaaactgcctttactcgtctcaaaactgcttgacatccctggtctcgaagtagccgtcgttacaaccgaacgagccaaacacttctactcaccccaggacatcccagtcacgttgtattctgatgcagatgaatgggagatctggaagagtcggagcgaccccgttttacacattgatcttagacggtgggctgatctcttgctggtggcccctttagacgctaacacgcttgggaaagtcgccagcggcatctgcgataacctactcacctgcgttatgcgcgcctgggacagatctaagccgcttctcttctgccccgccatgaacacagcaatgtgggaacatccaatcaccgctcaacaggtggaccagctgaaagcctttggatacgtggagatcccctgcgtggctaagaagctggtttgtggagacgaagggttaggtgcaatggccgaagtgggtaccatcgtggataaggtaaaagaggtcctgtttcagcattctggtttccaacagtcctag

SEQ ID NO: 128777 - DNA, 171 bp, synthetic construct
  misc_feature 1..171: note = Description of Artificial Sequence: Synthetic coding sequence
  source 1..171: mol_type = other DNA
atggctgagatggaccccgtcgccgagtttcctcagcccccaggagctgcccggtgggctgaagctctgcttcgatgctttacctggttgcgtctgtgtcagatctcaatgtttttgtctctgaaatgcctcaatactcgtagttcccacttaggcgctcattgtcgctag

SEQ ID NO: 128778 - DNA, 642 bp, synthetic construct
  misc_feature 1..642: note = Description of Artificial Sequence: Synthetic coding sequence
  source 1..642: mol_type = other DNA
atggctgaaatggaccctgtagcggaatttcctcaaccacctggagctgccaggtgggcagaggtgatggcaagatttgccgcgcggctcggagcacagggccgtagggtggttctagtcacctccggtggaacaaaggtgccactagaggccagaccagtgcgcttcctcgataacttctcatctggacgacgcggggctacgtccgccgaagccttcctggctgctgggtatggagtcctgttcctgtaccgagctaggagcgcctttccttacgcacaccggtttcctccacagacctggctgtccgccttgcgtccatcaggcccggctctctcaggactactgagcttggaggcagaagaaaacgccctgccaggattcgctgaggcactgagatcctaccaagaggccgccgctgctgggacatttcttgcggtggaattcacgacactcgctgactatctgcatctgctccaggccgccgcccaagccctcaacccactgggcccatctgccatgttttatctggccgctgccgttagcgacttctacgtgcctgtgtctgagatgcctgaacacaagatccagagcagtggcggacctttacaggtgatgggagcctctttacccgagatttag

SEQ ID NO: 128779 - DNA, 936 bp, synthetic construct
  misc_feature 1..936: note = Description of Artificial Sequence: Synthetic coding sequence
  source 1..936: mol_type = other DNA
atggccgagatggacccggtggctgaatttccccagcccccaggcgctgctcgctgggctgaggtaatggctaggtttgcggcgcgcctgggcgcccaaggcagaagggtggtattagtgacttccggcggcacaaaggtccccctcgaggcaaggcccgtgcgatttcttgataatttttcctctggcaggcggggcgccacgagcgccgaagccttcctggcagccggctacggcgtgctattcttatacagagctaggagcgccttcccttatgcgcatagatttcctccacagacttggctgtcagctttgagaccttcaggccctgctcttagtgggttgttgagtttagaggccgaggagaatgcgttacccggctttgctgaggcactccgtagttaccaggaagcggccgccgccgggacctttctggccgtggagttcacaacactggccgactatcttcatctgttacaagccgccgctcaggcactgaaccccctgggaccctcggctatgttttacctagccgcggctgtgtctgacttttacgtgcccgtcagcgaaatgcctgagcacaagatacaaagtagcggaggacccctccaaatcacgatgaagatggtccccaaactgttgtcaccgttggtgaaagactgggcgccaaaagcgttcataatttctttcaagttggaaactgacccagctattgtcattaacagagctaggaaggctctggagatctatcaacaccaggtcgtggtcgctaacattctcgaaagccgacagtctttcgtcttcattgtaacaaaggactccgagactaagctgcttttgtccgaggaggaaatcgaaaagggcgtcgagatcgaagaaaagatcgtggacaatctacaatctcggcataccgcctttattggagaccgaaattag

SEQ ID NO: 128780 - DNA, 417 bp, synthetic construct
  misc_feature 1..417: note = Description of Artificial Sequence: Synthetic coding sequence
  source 1..417: mol_type = other DNA
atgttttacttggccgcagcggtgtcggacttttacgtcccggtgtccgagatgcctgaacacaagatacagagtagcgggggaccactgcagataactatgaaaatggtcccgaagctgctgtccccgctcgtaaaggattgggcccctaaggccttcataatctcattcaaacttgaaacagacccagccattgtgattaacagagctaggaaggcccttgagatctaccaacatcaagtggttgtggcaaacatcctggaaagtcgccagtcttttgtttttatcgtcactaaggactctgagacaaagcttctgttatcagaggaagagattgaaaagggcgtggaaatcgaagaaaagattgtcgataacctgcagtcaaggcacacagcttttattggcgaccggaactag

SEQ ID NO: 128781 - DNA, 417 bp, synthetic construct
  misc_feature 1..417: note = Description of Artificial Sequence: Synthetic coding sequence
  source 1..417: mol_type = other DNA
atgttctatcttgcagccgccgtatcagatttctacgttcctgtgagtgagatgcctgagcataaaatccagtcaagcgggggcccactgcagatcacaatgaagatggtcccaaaactgcttagcccactcgtcaaggattgggcgcccaaggccttcatcatttcattcaaactggagacagatcctgcaattgtcattaatcgtgcccgaaaggcgctggaaatctaccagcatcaggtggtcgtcgccaacatccttgaaagcaggcagtcatttgtgttcatcgtgacgaaggatagtgagaccaagctgctgctgagcgaggaggaaatagagaagggggtagaaatcgaggagaagatcgtggacaacctacagtcaagacatacagccttcataggagaccgaaattag

SEQ ID NO: 128782 - DNA, 393 bp, synthetic construct
  misc_feature 1..393: note = Description of Artificial Sequence: Synthetic coding sequence
  source 1..393: mol_type = other DNA
atggccgagtatggcaccctgctgcaggacctgacaaataacattacgctcgaggatctcgaacagcttaagagcgcttgtaaagaggacattccatcagagaaaagtgaggaaatcacaaccggatccgcatggttttcttttctcgaaagccacaacaaactcgacaaagataatctgagctacattgagcacattttcgaaatttctcgtcgccctgatctgcttactatggtggtggattatcgaacccgtgtgctgaaaatatccgaggaagatgagcttgataccaaattgactcgcatcccatcagctaaaaaatataaagacatcataaggcagccttctgaggaagagatcatcaagctcgctcccccacctaaaaaagcctag

SEQ ID NO: 128783 - DNA, 456 bp, synthetic construct
  misc_feature 1..456: note = Description of Artificial Sequence: Synthetic coding sequence
  source 1..456: mol_type = other DNA
atggaagatgagggcaacaaactttgccaagctcccccctggcccggacaaacgtctccagttatggctgagtacggtaccctgcttcaggatctcactaacaacatcactctcgaggacctggagcagttgaagtccgcttgtaaagaggacattcctagtgaaaaaagtgaagagatcaccacgggatcagcctggttcagtttccttgagtcacacaataagttggacaaggataacctgtcatatatcgaacacatctttgagatcagtcggcggcccgatctgctcaccatggtggtggactaccggaccagggttctaaaaattagcgaagaagatgagctcgacacaaagctcacacggatcccctccgccaagaagtacaaggatattattcgtcagcctagcgaagaggagattattaagctggccccaccacccaagaaggcttag

SEQ ID NO: 128784 - DNA, 327 bp, synthetic construct
  misc_feature 1..327: note = Description of Artificial Sequence: Synthetic coding sequence
  source 1..327: mol_type = other DNA
atggcggagtacggtactctgttgcaagacctgactaataacatcacactggaggaccttgaacagctaaagagtgcatgcaaagaagacatcccatccgaaaagaataacttgtcatatatcgagcacatatttgaaatatcccgccggccagatcttttgactatggtggtggattataggacaagagtgctcaaaatctctgaggaggatgagctcgataccaagctgaccagaatccctagcgcaaaaaagtacaaagacattatcagacaacccagtgaggaggaaatcataaaattggcaccacctccaaagaaagcctag

SEQ ID NO: 128785 - DNA, 1554 bp, synthetic construct
  misc_feature 1..1554: note = Description of Artificial Sequence: Synthetic coding sequence
  source 1..1554: mol_type = other DNA
atggagctggaggaactcggaataagagaggaatgtggcgtgtttgggtgtattgcgtctggcgagtggcctactcagctcgacgtccctcacgtgatcacattggggctggtgggcttacagcaccggggacaggagagcgccggcattgtaacaagtgacggaagttcagtccctaccttcaagtcccacaagggcatgggtctcgtgaaccacgtgtttaccgaagataatctgaaaaagctgtatgtaagtaatctagggattggtcacacacggtacgctaccactggcaaatgtgagctggaaaactgtcaaccatttgttgtcgaaaccctgcacggcaagattgctgtcgctcacaacggagagttggtgaatgcagctcgcctgagaaagaaactactgcgccacggaataggattgtcaaccagcagcgatagcgaaatgataactcagttactggcatacacaccacctcaggagcaagacgatacacctgactgggtggccaggattaagaacctaatgaaagaagctccaacagcttactccctgctaatcatgcatagagatgtgatatatgctgttcgggatccatacgggaatcggccactgtgtatcgggaggttgattcccgtttctgatatcaatgataaagaaaagaagacctctgagacagaaggatgggtagtgagttcagagtcctgctcgttcctgtctattggtgcacggtactatcgcgaagtactcccgggggagattgtggaaatctcgagacataacgtgcagaccctggatattatcagccgctcagagggcaatcccgttgctttttgtatttttgagtatgtctactttgctcggcctgactctatgttcgaggatcagatggtgtacacggtcaggtaccggtgtggacagcagcttgcgatagaggccccggtggacgctgatctggtgagcacagtcccagaatcagcgacacctgcagccctcgcttacgcaggtaagtgtggcttaccctacgtcgaagtcctatgcaagaaccggtatgtaggccgcacttttatacagcccaacatgaggttgagacagcttggcgtggcgaaaaagtttggtgtcctgtctgataacttcaaaggaaagcgaattgtcctggtggacgacagcattgtccgggggaacaccataagccctataattaagctcttgaaagaatctggtgcgaaagaagttcacatacgggtcgcaagccctcccattaagtatccctgttttatgggaatcaatattccaaccaaagaggagctgattgctaacaagccagaattcgatcatctggccgaatatttgggcgccaattcagtcgtctacctctcagtggagggactggtttcctccgtgcaagaagggataaaattcaaaaagcagaaggagaagaaacacgacattatgatccaggagaatgggaacggactggagtgtttcgaaaagtctggtcattgtaccgcttgcctgaccggtaagtatcctgtggagctggaatggtag

SEQ ID NO: 128786 - DNA, 657 bp, synthetic construct
  misc_feature 1..657: note = Description of Artificial Sequence: Synthetic coding sequence
  source 1..657: mol_type = other DNA
atggaactgctgatcatgatcaatgcctgcaaaattgcctctgcatctagagtaaccgcagtgattccttgcttcccgtacgctcgacaggacaagaaagataaggggtttttcgatatacctgtggacaatctgtatgcggagcccgccgtcctcaagtggatccgcgagaatatttcagaatggcgcaattgcacaattgtgagccccgatgcgggcggagcaaaacgtgtcacttccatagctgaccgtctgaatgtcgatttcgcgttgatacataaagaacggaaaaaggctaacgaggtggataggatggtgctagtaggagatgtcaaggatagggtcgcgattctggttgatgacatggccgatacttgcggcaccatctgccatgcggccgacaaactactgagcgccggcgcaacacgagtttacgcaattttaacccacggcatatttagcggacccgccataagccgcattaacaacgcttgctttgaggcagtggtggtgacgaatacgatccctcaggaggacaaaatgaagcattgcagcaagatccaggtcattgatatctcaatgatattggccgaagccatccgcagaacacacaacggtgaaagcgtctcgtaccttttttctcacgtaccactttag

SEQ ID NO: 128787 - DNA, 507 bp, synthetic construct
  misc_feature 1..507: note = Description of Artificial Sequence: Synthetic coding sequence
  source 1..507: mol_type = other DNA
atgccaaacattaagattttttctggttcctcacatcaggacctgtctcaaaagatcgccgaccgcctgggccttgaactgggaaaggtggtgactaaaaagttcagcaaccaggaaacatgtgttgagatcggcgaaagcgtacggggtgaggacgtgtacattgtacaatccggatgtggtgaaataaacgacaatctgatggagctcttgattatgatcaacgcttgcaagattgcgtctgcgtctcgcgtgaccgccgtgatcccttgttttccttacgccaggcaggacaaaaaggacaagagccgcgccccgatcagcgccaaactggtggcgaacatgttatccgtggctggcgctgaccacatcattacaatggacttgcacgcctcacagattcaggtgtctgtcgaggccaaatactggtgcttgaaagggggacgcaaggggctaatgatgctcaaaaccgccgagaagcccaaaattatgcccaagtacatctag

SEQ ID NO: 128788 - DNA, 756 bp, synthetic construct
  misc_feature 1..756: note = Description of Artificial Sequence: Synthetic coding sequence
  source 1..756: mol_type = other DNA
atggagctactaatcatgataaatgcctgcaagattgcttccgccagcagggtgaccgccgtcatcccatgtttcccttatgctcggcaggacaagaaggataagagccgcgccccaatcagtgccaagcttgtggcaaatatgttatctgtggcaggtgcagatcacatcatcactatggatctgcacgcctctcaaattcagggattttttgacatccctgtggacaatctctacgccgagccagccgttttgaagtggatacgtgagaatatcagcgagtggcggaactgcacaattgtctcacccgacgccggaggcgcaaagagagtgacgtctatcgctgacaggctgaacgttgactttgccttaatccacaaagagaggaagaaggccaatgaagtagatcgtatggtactggtcggtgacgtgaaggatcgggttgctatcctcgtggacgacatggccgacacctgtgggaccatatgccatgctgccgataagttactttccgcaggagcaacccgggtgtatgccattctgacacacgggatcttttcagggcctgctatcagccggattaacaatgcatgtttcgaggctgtcgtggtcaccaacactatacctcaggaggacaagatgaagcattgttcgaaaattcaggtgatcgatatatccatgatcctggcagaggcaatacggaggacacacaatggggagtcagtgagttatttgttctctcatgtgccgctgtag

SEQ ID NO: 128789 - DNA, 957 bp, synthetic construct
  misc_feature 1..957: note = Description of Artificial Sequence: Synthetic coding sequence
  source 1..957: mol_type = other DNA
atgcctaacatcaaaatctttagcggttcgtcccaccaggacctgtcccagaagattgcagatcgattaggcctcgagctcgggaaggttgtcacgaagaagttttcaaaccaagagacctgtgtcgagattggggagtccgtgcgcggagaagacgtctacattgttcagtcgggctgtggggagattaatgacaaccttatggagctgctgatcatgataaacgcctgcaagattgcaagtgcttcgagggtgacagctgtgattccctgtttcccatacgctcggcaagataagaaggataaatcaagagctcccatctctgccaagctggttgcaaatatgcttagcgtggccggcgccgatcacattattacgatggatctccatgcctctcagatccaggggttttttgacatccctgtggacaatctgtacgctgaaccagctgtcttgaaatggatccgagagaacatctcggagtggcggaattgtacgatcgtttcaccggatgccggcggagccaaaagggtgacttccattgccgacaggctgaatgtcgactttgctttgattcacaaagaacgcaaaaaagcaaatgaggtcgacaggatggtgctcgttggcgacgtgaaggaccgggtggcgatactcgttgacgatatggcagacacgtgtggcactatatgccatgctgcagacaaactactgagtgcgggggccacgagggtgtatgccatccttacgcatgggattttttcgggaccagctatttcccgcatcaacaacgcgtgtttcgaggccgtggtcgtgaccaatacaatcccccaggaggacaaaatgaaacattgcagtaagatacaggtcattgacatttccatgatattagctgaagccatccgacgaactcacaacggcgagagcgtgagctatctgtttagtcacgtacccctttag

SEQ ID NO: 128790 - DNA, 957 bp, synthetic construct
  misc_feature 1..957: note = Description of Artificial Sequence: Synthetic coding sequence
  source 1..957: mol_type = other DNA
atgcccaatatcaagatattctcaggatccagtcaccaggacctgtcccaaaagattgcagaccggctgggtcttgaactgggcaaggtggtgacaaagaagtttagcaatcaagagacatgcgtggagatcggcgaaagcgtgagaggtgaggacgtctatatagtccagagtggctgcggtgagatcaacgataacttgatggaattactgattatgataaatgcgtgcaaaatcgcaagtgcctcaagggtgactgccgttatcccttgcttcccttatgctaggcaggataagaaggataagtctagagcgcccatcagcgctaagcttgttgccaatatgttaagtgttgcgggcgctgatcacatcattacaatggacttacatgcaagtcagatccaaggatttttcgatatccctgtcgataatctctacgcagagcccgccgtgcttaagtggattagagagaacatttcagaatggaggaattgcaccatcgtgtctcctgacgctggtggagccaaacgtgtgacgtcaatcgcggaccggcttaatgtagatttcgccttaatccacaaggaacggaaaaaggccaacgaagtggaccgaatggtgcttgtaggagacgttaaggaccgcgtcgccatccttgtagacgacatggccgacacttgtggtacgatatgccacgccgcagacaagttgcttagtgccggggctactagagtgtacgccatcctgacacacggtatcttctcaggcccagcgatctctcggattaacaatgcttgttttgaggctgtggtggtcaccaacacaatacctcaggaggataaaatgaagcactgtagtaaaatccaagtgattgacattagcatgatattagcagaagcaattcgaagaactcacaacggtgaatctgtgtcttacctcttttcgcacgtgcccctgtag

SEQ ID NO: 128791 - DNA, 957 bp, synthetic construct
  misc_feature 1..957: note = Description of Artificial Sequence: Synthetic coding sequence
  source 1..957: mol_type = other DNA
acccctaatattaagatcttttctggatcctcccatcaagacctgtcccaaaaaatcgccgatcgactgggcttggagcttggtaaggtggtgactaagaagttttccaatcaagaaacatgcgtggaaatcgacgagagtgtcaggggcgaggatgtgtatatcgtgcaatccggctgcggagagataaatgatagcctgatggagctgctcattatgatcaacgcctgcaagatagcgagcgcctcccgagtgaccgccgtgatcccatgttttccctacgcccggcaagacaaaaaggacaagtctagatcaccaatcagtgctaaactggtagccaacatgctgagtattgccggcgcggatcatattatcaccatggacttgcacgcttcacagatacagggatttttcgatatccccgtcgataacctgtatgccgagccaactgtgcttaagtggatcagggaaaatatccctgaatggaagaattgcatcatcgtctcccctgacgccggaggcgccaaaagggtgacatccatcgcagaccagttgaacgtagactttgccctgatccataaagagcgaaaaaaggctaacgaggtagattgcatcgtgctggtgggggacgttaacgaccgggtcgctattttagtggatgacatggctgatacctgcgtgacaatctgcctcgccgccgacaaattgctcagtgccggggctaccagagtttacgccattctgactcatggcatcttttccggacctgccatcagcaggatcaacacagcttgtttcgaagctgtggtcgttacgaacacgatccctcaggacgagaaaatgaaacactgtagcaagatcagggtcattgacatctccatgattcttgcagaagccatacggcgaacccataacggcgagagcgtgagctacctgttttcccacgtgcctctctag

SEQ ID NO: 128792 - DNA, 957 bp, synthetic construct
  misc_feature 1..957: note = Description of Artificial Sequence: Synthetic coding sequence
  source 1..957: mol_type = other DNA
atgcccaatatagttctgttctccgggtcctcgcaccaggatttgtcccaacgggtggctgacaggctgggtttagaactcgggaaggttgtcacaaagaagttttccaaccaagagacctcagtggaaatcggcgagtcagtccgcggcgaggacgtgtacatcattcagagtggctgtggcgagattaatgataacctgatggaactgctcatcatgattaatgcttgcaagatcgcgtcatcttctcgcgtgaccgctgtaattccatgcttcccctatgcaagacaggataaaaaggataagtcccgagcccctattagcgcaaagcttgtcgctaacatgctgtcagttgccggtgccgatcacattattacgatggatcttcatgcttcccagatccaggggttcttcgacatcccggtggataacctgtacgcggagcctgccgtcctgcaatggatccgcgagaacatagctgaatggaaaaactgtattatcgtcagtccagacgccgggggtgcaaagcgcgtcactagcattgctgacaggttaaacgtagaatttgccctgatccacaaagagaggaagaaagccaacgaagtcgatcgcatggtgctggtgggcgatgtcaaggacagggtagcaattctggtagacgatatggccgacacctgtggcacgatttgccacgccgcggataagctcttatcggctggggcaaccaaagtgtacgctatactgacgcacggcatcttcagtggtcctgctatatctaggatcaataacgcagcttttgaggccgtggtagtgacaaacactatcccacaggaagacaaaatgaagcactgtaccaagatccaggttatcgacatcagcatgatcctggcagaggccatccggagaacacataacggggaatcggtgtcgtatctgttctctcacgtgccgctgtag

SEQ ID NO: 128793 - DNA, 966 bp, synthetic construct
  misc_feature 1..966: note = Description of Artificial Sequence: Synthetic coding sequence
  source 1..966: mol_type = other DNA
atgccaaatatagtgttattcagcggaagttctcatcaggatttgagccagagggtagcagataggttgggattggagttagggaaggtggtgacaaaaaagtttagcaaccaggagacgtctgtggaaataggcgaatctgtgcgcggagaagatgtgtacattattcaatccggctgtggggaaataaacgataacctgatggagctcctgataatgataaatgcctgcaagattgcctcatcatcgcgggttactgctgttattccctgttttccttacgccaggcaggacaaaaaagataaggtgggcgagtcccgggcgccaatcagcgccaaattggtggctaacatgctatctgtggctggggccgaccacattataactatggacctgcatgcctcacaaatccagggcttcttcgacattcctgtagacaatctctacgcagaacctgccgtccttcagtggattcgggagaacatcgccgagtggaaaaattgcatcatagtcagccccgatgccggcggcgccaaacgcgtgacctccattgctgaccgcctcaatgttgagtttgctttaatacacaaagaaagaaagaaggcaaatgaggtcgatcgtatggtgttagtcggtgacgtcaaagaccgagttgccatattagtcgacgatatggccgatacttgtggtactatttgtcacgcagccgataagctgcttagcgccggtgcaaccaaagtttacgctatcctgacccatggtatcttctcggggccagctataagtcgtattaataacgccgcattcgaggccgtcgtggtcactaataccatcccacaggaagacaagatgaaacactgcacgaagattcaagtcatcgacatcagcatgatcctcgccgaggctattagaagaacacataatggagagtccgtgagctacctgttctcccatgtacctctttag

SEQ ID NO: 128794 - DNA, 849 bp, synthetic construct
  misc_feature 1..849: note = Description of Artificial Sequence: Synthetic coding sequence
  source 1..849: mol_type = other DNA
atggaactgctgattatggcatacgctttaaagacagcgtgtgctcgaaatataattggcgtgataccatacttcccatactccaagcagtcaaagatgagaaagcgagggagcatcgtgtgtaagcttctggcgagtatgctagccaaagccggcttaactcacatcatcaccatggatctgcaccagaaagaaattcagggattcttcagctttcccgtggataacctgcgtgcttccccatttctcctgcaatatatacaggaagagatccccaattaccgcaatgcagtcatagtagccaagtcccccgatgcagcaaaaagagctcaatcctacgcagagaggctccgccttggccttgcagtaattcacggggaagctcaatgcacggaactcgatatggacgacgggcgacactctcccccgatggtgaaaaatgccacggtgcatcctggactcgaattacctttaatgatggctaaggagaagcctcctatcactgtggtcggagatgtaggcgggcgaatcgccataatcgtcgatgacattatcgacgacgtggaatccttcgtggccgcggccgaaatcctgaaagagcggggagcctacaagatttacgtcatggcaactcacggtattctgtcagcggaagcaccaagactgatcgaggagtccagtgtcgacgaggtagtggtgaccaatactgtcccgcacgaagtgcagaagctgcagtgtcccaaaataaagaccgttgacatttcactgatcctgtcggaggccattcggaggatccacaatggcgagtcaatggcgtatttgttccgaaacatcacggtggacgactag

SEQ ID NO: 128795 - DNA, 1158 bp, synthetic construct
  misc_feature 1..1158: note = Description of Artificial Sequence: Synthetic coding sequence
  source 1..1158: mol_type = other DNA
atgccaaaaaagctgctgctactgcctccaccgtcagcttcaagcgctttccgggtgccccgggctcggcccgtgcccccgccggctatgaatgctgcccggaccgggtatagagttttcagcgcaaacagcactgcagcttgcacagaactcgcaaagcgcatcactgagcggctgggcgccgagctgggcaagtccgtggtctatcaggaaactaatggcgagactagggtggaaattaaggaatctgtgaggggacaggacattttcatcattcaaaccatcccccgagacgtcaatacagcagtgatggaactcctcatcatggcttatgcccttaaaacagcttgcgcaagaaacatcatcggggtcataccgtactttccttacagcaaacaaagcaaaatgaggaagcggggctcaatcgtgtgtaagctccttgccagcatgctggcgaaggcaggcctcactcacatcatcacaatggacctccatcaaaaagagatacaaggtttctttagcttccccgtggacaacctcagagcgtcccctttcctgctgcaatacattcaagaggagatccctaattacaggaacgcagtgatcgtagcaaaatctcctgatgccgccaaacgcgcacagtcttacgcagaacgcctgcgcttgggcctggccgtgattcatggtgaggcccagtgcacggagcttgacatggatgacgggaggcacagtccccctatggtgaaaaacgctaccgtgcatccaggcttggaattgcccctgatgatggccaaagaaaaacctccaatcaccgtggtgggtgatgttggggggcgaattgccatcatcgtggacgacattattgacgatgtcgagagttttgttgcagccgctgagatcttgaaagagagaggcgcatataaaatttatgtgatggcaactcacgggatcctgagcgcagaggcccccaggctgatcgaggagtctagtgtggatgaggtggtggtgaccaacaccgttcctcatgaggtgcagaagcttcaatgcccaaaaatcaaaactgttgatatctcactcatccttagcgaggccattcggagaatccacaacggggaatctatggcttacctgttccgcaacataactgtggacgactag

SEQ ID NO: 128796 - DNA, 1110 bp, synthetic construct
  misc_feature 1..1110: note = Description of Artificial Sequence: Synthetic coding sequence
  source 1..1110: mol_type = other DNA
atgttttgcgtcaccccaccagagctcgagaccaagatgaacatcacaaaaggaggcctggtcctgttttcagcgaacagcaacagtagttgcatggagctttcgaagaagatagctgaaaggctgggtgtggagatgggaaaagtgcaagtataccaggagcccaatcgggagacccgcgtgcagatacaggaatcagtgagaggaaaagatgtgtttattatacagaccgttagcaaagatgtgaataccaccatcatggaactgttgatcatggtgtatgcctgcaaaacatcttgcgccaagagcattatcggggtcatcccctactttccttacagcaaacagtgcaaaatgaggaaacggggttccatagtttctaagctgttagcttccatgatgtgcaaagcaggcttaacacacctgattacaatggacctgcaccaaaaagagattcaggggtttttcaacatccccgtcgataatctgagggcaagccccttcctgctgcagtacatccaagaagagattcctgactaccggaacgccgttatcgtcgctaagtccccagcatcagccaagcgagctcagtcttttgccgagcggttaaggctggggattgccgttattcacggagaagcccaagacgcagagagcgatctggtcgatgggagacactcccctccaatggtcaggtctgtggcagcaattcaccctagcctcgagatcccaatgctgataccaaaagaaaaacccccaattacagttgttggtgacgtgggcggaaggatcgctattatagttgatgatataatcgacgacgtggacagctttctcgccgccgcagaaactctgaaggaaagaggcgcatacaaaatctttgtgatggccactcacggccttctatcttcagacgcgccgcgacgaattgaggagagcgctatcgatgaagtggtagtgaccaacacaatcccgcacgaagtgcagaagcttcaatgcccaaagattaaaacggtagatatttctatgattctgtccgaggccattcggcgcattcacaatggtgagtcaatgtcctatctcttccggaatatagggctggacgactag

SEQ ID NO: 128797 - DNA, 1110 bp, synthetic construct
  misc_feature 1..1110: note = Description of Artificial Sequence: Synthetic coding sequence
  source 1..1110: mol_type = other DNA
atgttttgtgtgactccgcctgagctcgagaccaagatgaacatcaccaaaggcggactggtgcttttcagcgccaattccaactcttcttgcatggagcttagcaagaagatcgctgagagactgggcgttgagatgggcaaggttcaggtgtatcaagaacctaatcgggaaacgcgggtgcagatacaggagtctgtgcgcggaaaggatgtgttcattattcagactgtatccaaggatgtaaacacaacaatcatggaactgctgatcatggtctatgcctgtaaaacgtcgtgtgccaaaagcattatcggagtgattccttacttcccctattctaagcagtgcaaaatgcgcaagcgtggatccatagtcagcaagctgctcgcttccatgatgtgcaaggccgggttgacccatctgattactatggaccttcatcagaaagaaatccagggtttctttaatattcccgttgacaacctaagggcttctccttttctgctgcagtacatacaggaggagattcctgattatcggaatgctgtgattgtggctaagagccccgcctccgctaagcgagcacagtcattcgctgaacgcctgaggttgggtattgctgttatccacggcgaggcccaggatgccgagtccgatctggtggacggtcgccacagtccccctatggtgcggagcgtcgctgcgattcatccttcactggaaattcccatgctgatccccaaggagaaaccgcctataactgtcgtgggggacgtaggcggtaggattgccattatcgttgatgatattatcgacgatgtcgacagcttcctagcagccgcagagacattaaaagagagaggggcctacaaaatttttgttatggcaactcacggcctcctaagtagtgacgcaccacggcgaatagaagagagcgcgatagacgaggttgtcgtcacaaataccatcccccacgaggttcagaaactccagtgccccaagatcaaaaccgtggatatttcaatgattctctcagaggccattagacgaatccacaacggcgagagcatgagctacttgttccgaaacatcggccttgacgactag

SEQ ID NO: 128798 - DNA, 807 bp, synthetic construct
  misc_feature 1..807: note = Description of Artificial Sequence: Synthetic coding sequence
  source 1..807: mol_type = other DNA
atgttttgcgtgactccccccgagctggaaaccaagatgaacatcacaaagggcggccttgtgttattctctgcaaatagcaatagtagttgtatggaactgtcaaagaagatcgccgagcgtctcggcgttgaaatgggtaaggtgcaggtctaccaggaaccaaatagagaaacaagggttcagatccaggaaagcgttagagggaaggatgtgttcatcatccagacggttagcaaggacgtcaacactaccatcatggaacttcttattatggtgtacgcatgcaaaacctcttgtgcgaagtcaataataggagttatcccatacttcccctactctaagcagtgcaagatgcgaaagcgcgggagcatcgtctctaagctcctggctagcatgatgtgcaaggctggccttacacacctgataacaatggacctgcaccagaaggagattcaaggcttcttcaatattccagtggataatctgagagcttccccttttctccttcaatacatacaggaggagattcctgattaccgaaatgcagtgatcgtggcgaagagccccgcctcggccaaacgtgcccagtcgtttgccgaacgcctgagattggggatcgctgtaattcacggggaagctcaggatgcagaatcggacctcgtggatggaagacatagcccgccaatggtcaggtcagtggcagccatccacccttctctggaaatccctatgttgatcccgaaagaaaaaccccccataacagtggtaggcgacgttgggggtaggatcgctatcattgtctag

SEQ ID NO: 128799 - DNA, 585 bp, synthetic construct
  misc_feature 1..585: note = Description of Artificial Sequence: Synthetic coding sequence
  source 1..585: mol_type = other DNA
atgttctgcgttacaccccccgaactggaaacaaagatgaacattactaagggcggactggtgctgttttcagccaatagcaacagttcatgtatggagttgagtaaaaagatcgcagagcgattgggcgtggaaatgggaaaggtacaggtgtatcaggagccaaaccgcgagacccgggtgcaaattcaggaaagtgttcgcgggaaagacgtcttcattatccagaccgtttctaaggacgtcaataccaccatcatggagttgctgattatggtgtacgcctgtaaaacctcttgcgccaagtcaattatcggagtcattccatactttccttacagcaaacagtgcaaaatgcggaaaagagggtcaattgtctcgaaactactcgcttcgatgatgtgtaaagccgggctcacgcacctgatcaccatggatctccatcaaaaggaaatccagggcttctttaacattcccgtggataatctccgtgccagcccatttctgttgcaatacatccaggaggaaatcccagactatcgcaacgcggtgatcgtcgccaaaagccctgccagcgcaaaatag

SEQ ID NO: 128800 - DNA, 990 bp, synthetic construct
  misc_feature 1..990: note = Description of Artificial Sequence: Synthetic coding sequence
  source 1..990: mol_type = other DNA
atgttttgtgtgactcctccagaactcgagactaaaatgaatatcacgaaaggtggactggtgctctttagcgctaactctaatagcagctgcatggaactttctaagaaaatcgccgaagacgttaacacaaccatcatggagctgttaattatggtgtatgcctgcaaaactagttgcgcaaagagtatcataggggtcataccctattttccctacagcaaacaatgtaaaatgagaaagcgggggtctatcgttagcaagttgctcgcgagtatgatgtgtaaagctggcctcactcacttgattaccatggacctgcaccagaaggaaattcaggggttctttaatatccccgtcgataacctgcgcgccagcccatttctgctccagtatatacaggaagagattcccgactaccgaaacgcggtcatcgtggcgaagagtccggccagcgctaagcgagctcaatcatttgcagagcggctacgcctgggcatagcggtcatccatggcgaggcgcaggacgcggaatccgatctggtggacggaagacactctcctcctatggttaggtctgttgctgcgattcatcccagcctcgaaatccctatgctgatccctaaggagaaacctcctatcactgtcgtcggtgacgtcggaggtagaattgctataattgtcgatgacatcatagatgatgtcgatagctttttggccgctgcagaaactctgaaggagcgcggagcctacaagatctttgtgatggctacccacggattgttgtctagcgatgccccacgccgaattgaggagagcgccattgacgaggtagttgtgacaaacacaatcccccacgaagtacagaagctgcagtgcccaaaaattaaaactgttgatattagtatgatactgtctgaagctattagaaggatccataatggtgaatcaatgtcctatctgtttaggaacatcggcctggatgattag

SEQ ID NO: 128801 - DNA, 531 bp, synthetic construct
  misc_feature 1..531: note = Description of Artificial Sequence: Synthetic coding sequence
  source 1..531: mol_type = other DNA
atgttttgcgtcaccccacccgaactagaaactaagatgaatatcaccaagggcggactcgtgctgttttctgctaacagtaactccagctgtatggagttatccaagaaaatagccgaacggctgggagtggagatgggcaaagtgcaggtctaccaggagccaaaccgagaaactcgggtgcaaatccaggagagcgttaggggcaaagatgtgttcataattcaaactgtgtctaaggacgtgaatactactatcatggaactgctaataatggtgtatgcctgtaaaacaagctgcgccaaaagtatcattggagtcatcccatacttcccttactctaaacagtgcaaaatgcggaagcgagggtcaattgtatcaaagctgcttgcatccatgatgtgtaaggcaggtcttacacatctaatcacgatggatctccaccaaaaggagatccaggggtttttcaatattcctgttgataatttgcgcgccagtccattcctccttcagtacatccaggaggagtag

SEQ ID NO: 128802 - DNA, 735 bp, synthetic construct
  misc_feature 1..735: note = Description of Artificial Sequence: Synthetic coding sequence
  source 1..735: mol_type = other DNA
atgttttgcgtgaccccccccgagctggaaacaaaaatgaatattactaagggaggtcttgttctgttctctgccaattcgaactcctcatgtatggagcttagtaagaaaattgccgaacggctgggcgtggagatgggtaaagtgcaggtataccaagagcctaatcgtgagacgcgcgtccagatccaggagtcagtacgcggcaaagacgtgtttatcatccagacggtgtcaaaagatgtgaataccacgattatggaactgctcataatggtctacgcctgcaagactagctgtgccaaatctatcatcggcgtgatcccatacttcccctatagcaaacaatgtaagatgcggaaacgggggtccatcgtttccaagcttctggcttctatgatgtgcaaagcagggctcactcacttgatcaccatggaccttcatcagaaagaaattcaaggatttttcaatatacccgttgacaacctgcgggcatcaccctttctcctgcagtacatccaagaggaaattcccgactatagaaacgccgttatcgtcgccaagtctccggcgagcgcaaaaagggcccagagtttcgccgagaggctgcgactcgggatcgcagttattcacggcgaggcacaggatgccgagtctgatttggtggatggtagacattccccccccatggtgcgaagcgtcgctgccatccatcctagcctggagatcccctag

SEQ ID NO: 128803 - DNA, 135 bp, synthetic construct
  misc_feature 1..135: note = Description of Artificial Sequence: Synthetic coding sequence
  source 1..135: mol_type = other DNA
atgttttgtgtgactcccccagaactcgaaaccaaaatgaatatcacaaaaggtggcctggtgctgttcagtgccaactctaacagcagctgtatggaactgtctaaaaagattgcagagaggctgggcgtttag

SEQ ID NO: 128804 - DNA, 807 bp, synthetic construct
  misc_feature 1..807: note = Description of Artificial Sequence: Synthetic coding sequence
  source 1..807: mol_type = other DNA
atgttttgtgtgacaccccccgagttggagacaaaaatgaatatcactaaaggtggtttggtgctattttctgccaattcaaactcctcctgcatggagctttctaaaaagattgcagagcggctcggggttgagatgggaaaagtgcaggtgtaccaggaacccaatcgcgagaccagggttcaaatccaagaatcggtgcggggtaaggatgtgtttatcattcagactgtgtcaaaggacgtgaacaccactatcatggagctgctgatcatggtgtacgcatgcaagacatcatgcgcaaaaagcatcattggagtgataccttacttcccctattcgaagcagtgcaagatgagaaagcgggggagcattgtttctaagctgttagcctccatgatgtgtaaagctggtctgacacatctcatcacaatggacttacatcagaaggagatccagggcttctttaacattcccgtggataacctacgggcaagtcctttcctgctgcagtatatccaggaggagatccccgattacaggaacgcagttattgtggccaaaagccccgcttccgctaaaagggcccagtccttcgctgagcgtctacgcctcgggattgctgtaatccacggtgaggcccaagacgcagaaagcgacctcgtagacggtcgtcactctcccccaatggttaggtctgtggcagctattcacccatctctggaaattcctatgctgattcctaaagaaaagcccccgatcacagtggtgggtgatgttggaggaagaattgcgataatcgtttag

SEQ ID NO: 128805 - DNA, 423 bp, synthetic construct
  misc_feature 1..423: note = Description of Artificial Sequence: Synthetic coding sequence
  source 1..423: mol_type = other DNA
atgttctgcgtgactcctccagaactggagaccaagatgaacatcactaaggggggtttggtactgttctccgccaattctaatagctcatgtatggagctgagtaagaagattgccgaacggcttggcgtggagatgggcaaggtccaggtctaccaggagcccaatagagagactagagtccagatccaggagagcgtgaggggcaaggacgtatttatcatccaaacagtcagtaaagacgtcaataccaccataatggagctccttattatggtctacgcgtgcaagacttcatgtgctaaatccatcatcggtgtcataccatactttccttatagcaagcagtgcaagatgaggaagcggggctcaattgtgtccaagttgctggccagcatgatgtgtaaagccgggctaacctag

SEQ ID NO: 128806 - DNA, 807 bp, synthetic construct
  misc_feature 1..807: note = Description of Artificial Sequence: Synthetic coding sequence
  source 1..807: mol_type = other DNA
atgttttgcgtgacaccacccgaactcgaaacaaagatgaatattaccaaaggcgggttagttttattctccgccaactcaaattcatcttgtatggagctgtcgaagaagattgccgagagattaggtgttgaaatgggaaaggtgcaggtttatcaggagcctaatcgggagactcgggtacagatacaggaaagcgttagagggaaggatgtgtttattatacagaccgtgagtaaagacgtgaatacgaccatcatggagttacttataatggtgtacgcctgcaagacatcgtgcgccaagtctattatcggagttattccctactttccctactcaaaacagtgtaaaatgaggaagcggggctccatagtttccaagctcctggctagcatgatgtgcaaggccggactgacacatctgatcactatggacctgcatcagaaggaaatccagggcttcttcaatattcccgtagataatctgcgagcgtctccattcctgctccagtacatacaggaagaaattcccgactacagaaatgcagtgatcgtggccaagagcccagccagcgcgaagagggcccagtcatttgctgaacgtctgcggctggggatcgccgtcattcacggcgaagcccaggatgccgagtctgaccttgtcgatggcagacactcccccccgatggtgcggtccgtggctgccattcacccctctctggagattcccatgctcattcccaaggagaagccgcctattacagtggtgggcgacgtgggaggtagaattgccatcatcgtttag

SEQ ID NO: 128807 - DNA, 852 bp, synthetic construct
  misc_feature 1..852: note = Description of Artificial Sequence: Synthetic coding sequence
  source 1..852: mol_type = other DNA
atggagctgcttatcatggtttatgcttgcaagacctcctgcgcgaagtctatcatcggggttatcccttattttccgtatagtaaacagtgtaagatgcgaaagaggggcagcatcgtatctaagttactggccagcatgatgtgtaaggctggtttgacccacctaataacaatggatctgcatcaaaaggagatccaaggcttctttaatattccggtggacaatctgcgggcaagcccatttctgctccagtacattcaggaggagatccctgattaccgcaatgcagtaatagtggccaaaagccctgcaagcgccaaacgcgcacaaagctttgcagaaagactgcggcttgggattgccgttatccacggagaagcacaggacgccgagtcggacttagtcgacggacgacactccccgccaatggtccgttcagttgctgcgatccacccttctctggagatacccatgctgataccaaaagaaaaaccaccgattactgtcgtgggagatgtgggcggccgtatcgcaattattgtggatgatattattgacgatgtggatagttttttggctgctgctgagacactaaaggagcggggggcatataagatattcgtgatggctacacacggactactctcctctgatgcccccagacggattgaagagagcgcaattgacgaggttgtcgttactaacacaatcccccacgaagtacagaagctccagtgccctaaaatcaaaacagtcgatattagtatgatcttgagtgaggctatcaggcggatacacaacggcgagagtatgtcatatctcttcagaaatattggcctcgacgactag

SEQ ID NO: 128808 - DNA, 963 bp, synthetic construct
  misc_feature 1..963: note = Description of Artificial Sequence: Synthetic coding sequence
  source 1..963: mol_type = other DNA
atgttttgtgtgaccccacccgaactggaaaccaagatgaacatcactaagggcggtctggtgctgttctccgcgaattccaactcatcgtgcatggagttgtctaagaaaattgccgagagactcggggtagagatgggcaaagtgcaggtttatcaggaacctaaccgggagacacgcgttcaaatccaggagagcgtgcgcggcaaagacgtgttcatcatccagaccgtctctaaagacgtgaataccaccattatggaactacttatcatggtctacgcatgcaagacatcatgcgcgaaatctattataggagtcattccctactttccctatagtaaacagtgtaagatgcgcaaaaggggaagcatagtttccaaattactggctagtatgatgtgtaaggccggcctaacacaccttatcaccatggacctccaccagaaagagattcagggattcttcaatatccccgtagataacctcagggcgagtccttttctgctgcaatacatacaagaagagattccagactatagaaatgccgtcattgtggccaagagccctgcaagtgccaagagggcccaatcatttgccgagaggttacggctgggcatcgccgtgatccacggcgaagcccaggatgctgagtctgatctggttgacgggagacattcccctcccatggtgcgaagcgtggccgcaattcacccaagcctggaaattccgatgcttatcccaaaagagaagccaccaatcactgtcgtcggcgacgtaggagggcgtatagcaataattgttgtagtggttaccaataccatcccccacgaagttcagaagcttcagtgccccaaaatcaagaccgtggacatcagcatgattctgagtgaggctatccggcgtatccataacggagagtcaatgtcttacctctttcgcaacattggcctggacgattag

SEQ ID NO: 128809 - DNA, 237 bp, synthetic construct
  misc_feature 1..237: note = Description of Artificial Sequence: Synthetic coding sequence
  source 1..237: mol_type = other DNA
atgttctgcgtcacccccccagagctcgagacaaagatgaacataacaaagggggggttagtgctcttctcggccaattcgaactccagttgcatggagctgagcaagaaaatcgcggagaacaagtctaccaacagtagagtgtgtgaagggaagcgctgcttccatcaccccaattgtttcgagggccgggaacaccatcaccatggggcgccagatcatggcgtatgtatgtag

SEQ ID NO: 128810 - DNA, 678 bp, synthetic construct
  misc_feature 1..678: note = Description of Artificial Sequence: Synthetic coding sequence
  source 1..678: mol_type = other DNA
atggcgggatcttcggaggaggccccagattacgggagaggcgtggtgatcatggatgactggcctggctacgacctaaacctgttcacctatccacagcactactatggggacctagagtatgttctgatcccacacggaattattgtggataggatagagagactggcaaaagatatcatgaaggatataggatactctgatatcatggtgttgtgcgtgctaaagggaggttacaaattttgcgccgacctggtagagcaccttaagaacatctcgaggaacagtgaccgcttcgtgtccatgaaggtggactttatcaggctcaaatcctacagaaacgaccagagtatgggagagatgcagattattggcggcgacgatctgagcacactggcgggtaagaatgtactcatcgtcgaggatgttgttggtacaggacgcacaatgaaggcactcctcagcaacattgagaagtataagccgaacatgataaaagtcgcatctttacttgtgaaaaggacttcacggagtgacgggtttcggcccgattacgccggctttgaaattccgaaccttttcgttgtcgggtatgcactcgattataacgagtacttccgggatctcaaccacatatgtgtcatcaacgagcacggtaaggaaaaataccgggtttag

SEQ ID NO: 128811 - DNA, 573 bp, synthetic construct
  misc_feature 1..573: note = Description of Artificial Sequence: Synthetic coding sequence
  source 1..573: mol_type = other DNA
atggccggatccagtgaagaggcccctgattatggcaggggtgtagtgattatggatgactggcctggctacgacctaaacctctttacctatccgcaacattactacggggatcttgaatacgtactgataccacacgggataattgtcgacagaattgaacgtcttgccaaggacataatgaaagacattggctattcagacatcatggttctttgtgtcctcaaagggggctataaattctgcgctgacctggtcgaacatctaaaaaatatctccaggaacagcgaccgcttcgtgagtatgaaagtggacttcatccgactcaagtcctatcgaaacgatcagagcatgggggagatgcagataattggcggagatgatctgagcactctggcaggaaagtctgtgctgtttgccaaagacgtggtaggtaccgggcgcactatgaaggctctgcttagcaatatcgaaaaatataagcccaacatgataaaagtagccagccttctggtgaaacgaacaagccggtctgacggcttcaggccagatagtcatatgaggcaccagtag

SEQ ID NO: 128812 - DNA, 522 bp, synthetic construct
  misc_feature 1..522: note = Description of Artificial Sequence: Synthetic coding sequence
  source 1..522: mol_type = other DNA
atggccggctcgagcgaagaggccccagactatggacggggggtagtcattatggacgattggccggggtatgacctgaatttgttcacatacccccagcactattacggtgacctggaatacgtgctgattcctcacgggattatcgtggacaggattgagagattggccaaagatattatgaaggacattggatattctgacataatggtactgtgcgtgctgaagggaggatacaaattctgcgcagacctggtggaacatctgaaaaacattagccgcaatagtgataggtttgtcagcatgaaggttgacttcatcagacttaagagctaccggctcagagcacggctcaaacgcacaacaatatgcgatcgcggggggctcgctttcagccaaggatacatgtcctcatgcgcccccctgcaggagagtccaaacaccctgtggcgcggttacctccaggtgctcattccttgtttccacatcaggttccagctaccacgtagtgagcagaactag

SEQ ID NO: 128813 - DNA, 573 bp, synthetic construct
  misc_feature 1..573: note = Description of Artificial Sequence: Synthetic coding sequence
  source 1..573: mol_type = other DNA
atggcaggttcctctgaggaggcccccgactacggccggggggtggttatcatggacgactggccaggttacgacttgaatctgttcacgtatccgcaacactactacggcgatctggaatatgtactcatcccccacggaatcatagtggatcggattgaaagactagcaaaggatatcatgaaggacatcgggtatagcgacatcatggtcttgtgtgtgcttaagggaggatacaaattttgcgccgatctggtggagcatctgaaaaatatctccagaaactcagaccgctttgtctccatgaaggtggattttatcagacttaaaagctatcgaaatgaccagagcatgggagagatgcagatcattggaggcgacgatctgtctacactggctgggaaaaacgttctcattgttgaggacgtggtgggaacgggaagaacaatgaaagccttactgtccaacattgaaaagtataaacccaacatgattaaagttgcctccttgttagtgaaacgcactagccggtctgatggcttccggcccgactcacacatgaggcatcagtag

SEQ ID NO: 128814 - DNA, 1299 bp, synthetic construct
  misc_feature 1..1299: note = Description of Artificial Sequence: Synthetic coding sequence
  source 1..1299: mol_type = other DNA
atggccactgccgaagtacttaatatcggcaagaagttatacgaggggaagacaaaggaagtatacgaactccttgactcccctggaaaagtgctgctacaatccaaggatcaaatcactgctgggaatgctgccaggaaaaatcatctcgagggaaaggcagccatctccaacaaaatcacatcatgtattttccagcttctgcaggaggctgtgacaagctataaaagcaataggattaaaacagcctttaccagaaaatgcggtgaaacagcttttattgctcctcaatgcgaaatgatccccatcgaatgggtctgcaggcggatcgctaccggctccttcctgaaaaggaacccaggagtaaaagagggatacaaattttatcctcccaaagtcgagttgttttttaaggacgacgccaacaatgacccccagtggagtgaggagcaactgatcgcagccaagttttgcttcgctggcctgcttatcggccagacagaagtagacattatgtcccatgccactcaggccattttcgaaatcctggaaaaatcgtggctcccgcagaactgtacactggttgatatgaaaattgagtttggcgttgacgtgacaaccaaagagattgtgctggctgatgtaattgacaatgattcttggcgcctttggcctagcggggaccggtcacagcagaaggataagcagtcatacagggacctgaaagaagttacacccgagggcctgcaaatggtcaaaaagaatttcgaatgggtggccgagagggttgaactcctgttaaagagcgagagccagtgccgggtggtcgtcctcatgggctcaacaagtgatctaggacattgcgagaagattaagaaagcatgtggaaacttcggcataccatgcgagctgcgcgtgactagcgcccacaagggccccgacgagactctccggatcaaggccgagtacgagggtgacggaatccccaccgtgtttgtggccgtggctgggcggagcaacgggctgggtcctgtgatgtccggaaacacagcatacccagtgataagttgcccacccctgacacccgactggggcgtccaggatgtgtggtcttccctaaggttgccttcaggcctcgggtgctccacagtgctgagccccgagggctccgctcagtttgctgcacaaatcttcggcttatctaaccatctcgtctggtccaaactccgggcaagcatattgaatacctggatctctcttaagcaggcagacaagaaaataagagagtgcaatctatag

SEQ ID NO: 128815 - DNA, 1278 bp, synthetic construct
  misc_feature 1..1278: note = Description of Artificial Sequence: Synthetic coding sequence
  source 1..1278: mol_type = other DNA
atggctaccgctgaggtacttaatatcggaaagaagctctacgaggggaagaccaaagaggtgtacgaactgctagattctcctgggaaagtgctcctgcaatctaaagatcagatcactgccggaaatgccgcaaggaagaatcacttagagggcaaggccgcgatatcaaataagataacaagctgtatattccaacttcttcaagaagctgggataaagacagcttttacaaggaaatgtggggaaactgcctttatagctccacagtgtgaaatgattcctatcgagtgggtttgcagaaggattgccacaggctccttcctcaaaaggaaccccggagtgaaggaaggctacaagttttatccaccaaaggttgaactgttctttaaggatgacgccaataatgatccccagtggagtgaagaacagctgatagccgccaaattctgctttgccggactactcattggccagactgaggtggatatcatgagtcacgcaacccaggcaatttttgaaatcctggaaaaatcatggttaccacagaattgtaccctcgttgacatgaagatcgagttcggggtggatgtgacgactaaagaaattgttttagccgatgtgatcgacaatgactcatggaggctgtggcccagcggcgataggtcacagcagaaggataagcagtcctacagagacctcaaagaagttacacccgaggggctgcagatggtcaagaaaaacttcgagtgggtggccgagcgtgtcgaactgcttctgaaatcggagagtcaatgcagggtggttgtgctcatgggtagtacctcagacttgggccactgtgagaaaatcaaaaaggcatgcggcaatttcgggattccctgtgaactgcgagtgacaagcgctcataagggaccagatgaaactctcagaatcaaagccgaatatgaaggcgatggaataccaaccgtgtttgtcgcagtggcaggtcggtcaaatggactgggacctgtcatgtctggtaacacagcctatccagttatttcatgcccccccctcacgcctgattggggtgtacaggacgtctggtcctctctcaggctaccctccggcctgggctgcagcactgttctgtccccagaaggatccgctcaattcgcagctcagatctttgggctttcgaatcacctcgtgtggtctaagctgcgcgcctccatcctgaacacatggatcagcttgaaacaagcagacaagaagatcagagaatgcaatctatag

SEQ ID NO: 128816 - DNA, 1278 bp, synthetic construct
  misc_feature 1..1278: note = Description of Artificial Sequence: Synthetic coding sequence
  source 1..1278: mol_type = other DNA
atggctaccgctgaagttctcaacatcggcaaaaagctttacgaaggcaagacaaaagaggtgtacgagcttctggatagcccgggcaaggtgctgcttcagagcaaagatcaaataacagctggcaacgccgcccgaaaaaatcacttagagggtaaggcggcaatttccaataaaatcacatcttgtatatttcagctgctacaggaggcaggcatcaaaaccgcgttcacaaggaaatgcggtgagacagctttcatcgcaccgcaatgtgaaatgatcccaattgaatgggtttgccggagaatcgctaccggttcttttttgaagagaaaccccggcgtgaaggaaggatacaaattctacccccccaaagtcgagctattctttaaagacgacgcgaacaacgatccccaatggtccgaagagcaactgattgccgcaaaattctgtttcgctgggctcctgattgggcagactgaggtggatatcatgtcccatgcgactcaagcgatctttgagattctcgaaaagagctggctgccacagaattgtacactcgtagatatgaaaattgagtttggcgtggatgtgaccacaaaagaaattgtgctcgccgatgtgatcgataacgacagctggcgcctatggccgagcggtgatagatcccagcagaaagacaagcagtcttacagagacctgaaagaggtcacccccgagggtctccaaatggttaagaaaaacttcgaatgggtggcagagagggtggagctcctcttgaagtccgagtctcagtgccgagtagtggtcttgatgggatccacaagcgacctggggcattgtgagaagattaagaaagcttgcggcaatttcggcattccatgtgagctgcgtgtgacatccgcgcacaagggtccagatgagacgttgaggataaaagccgaatatgagggtgatgggataccaacagtgtttgtggctgttgctggacgcagtaatggtctgggtccagtcatgtcaggaaatactgcgtacccagttataagttgcccacctctaaccccagattggggagtacaggatgtgtggtcatctctgagattgccatccgggttaggctgctcaacggtactgagtcccgaaggatctgcgcagtttgccgcccagatctttgggctttctaatcatctggtgtggtctaagctgagagccagcatcctgaacacctggatctccctgaaacaggcagacaagaaaattagagagtgcaacctgtag

SEQ ID NO: 128817 - DNA, 4017 bp, synthetic construct
  misc_feature 1..4017: note = Description of Artificial Sequence: Synthetic coding sequence
  source 1..4017: mol_type = other DNA
atgtcccctgtgctccatttttacgtgcggccctccggccacgagggcgcggcacctggccatactcgccggaagctgcagggcaaattacccgagttgcaaggggtggagactgaactgtgttacaacgtcaactggacagccgaggctctcccatccgcagaggagactaagaaactgatgtggctgttcggatgcccactgctgttagacgacgtagcccgtgagtcttggctgttgccgggctccaacgacctcctgttagaggtgggccccaggctgaatttcagtaccccaacaagcacaaacatcgtgtccgtttgtcgggccactgggctcggtccagtagatagagtggaaacaacccgtcggtaccggctctcatttgcgcacccaccatctgccgaagttgaggcgatcgcactggctaccctgcacgaccgtatgactgagcaacactttcctcatcccatacagagtttttccccagaatccatgcctgagccactcaacggcccgattaatatcctgggtgagggccgtctcgctctggagaaggcaaatcaggagctgggcctagcccttgattcttgggatctggacttttatacgaagcgattccaggaattgcaaagaaacccttcaactgtggaggcattcgacctggcccagtcaaatagtgagcactctagacactggttcttcaaagggcagcttcatgtggatgggcagaagctcgtccactctctcttcgaatcaatcatgagtacccaggagtcaagcaaccctaataacgtactgaagttttgtgacaatagctccgccatccaggggaaggaggtgagattcttacgcccggaggacccaacgcggcccagtaggttccagcagcagcaggggctgagacacgttgttttcacggcagaaactcacaacttcccgacgggtgtttgcccgttttccggagcaacaaccggcacaggaggccgaatcagggacgtgcagtgcacagggcgcggggcgcacgttgttgccgggacagctggctactgtttcggcaatttacacatcccgggatacaatttgccctgggaagacccctcatttcagtaccctgggaacttcgcacgcccattggaggttgcaatcgaggctagcaacggggcctcagattatggtaacaagtttggcgagccagtcctagctggctttgcaaggtctctgggcttgcaattgcctgatggccaaaggcgcgaatggataaaacccatcatgttttcaggtgggatcggttcgatggaagccgaccacattagcaaggaggcgccagagcccggaatggaggtcgtgaaagtggggggcccagtgtaccgcatcggggtcggaggcggagccgctagctccgtacaggtacaaggcgataacacctccgacctggattttggcgccgtccagagaggagatcccgaaatggagcagaaaatgaacagggttatccgagcctgtgtggaagctcccaagggcaatcctatatgttccttgcacgatcagggagcaggcggaaatgggaacgtgctaaaagaactgtctgacccggcaggcgcaattatctacacaagccgtttccaacttggtgatcctacattgaacgcactggagatttggggagccgagtatcaagagagtaacgcactgcttctccgcagtccaaaccgcgacttcctcacccatgtcagcgctagagaacgatgccctgcatgcttcgtcggcactatcacgggcgacaggcgaattgtgcttgttgatgaccgagaatgcccggtaaggagaaatggccaaggcgacgcacccccaacccctctccctactccagttgatctggaactggaatgggtcctgggcaagatgccccgcaaggagttttttttacagaggaaaccccccatgttgcaacccctggccttaccccccggactctcagtccatcaggccctcgaaagagtgcttaggctcccggccgtagctagcaaaaggtacttgaccaacaaggttgaccgctcggttggcgggctggtggcccaacaacagtgcgtgggtcctttgcaaacaccccttgctgatgttgctgtcgtggccctgtcccacgaagagctgattggtgctgcaaccgccctgggagaacagccagtgaaaagcctgctggatcccaaggtggcagcccgacttgcggtggccgaggccctaaccaatttggtgttcgctctggttacagacctgagagacgtgaagtgctccggaaattggatgtgggccgcaaagctgccaggagaaggcgcagctctcgctgatgcttgtgaagccatggtagctgtcatggcggcccttggcgtggccgtggatggcggaaaggactcactctctatggctgcccgggtgggcacagagaccgttcgagctcctgggagcctggtcatcagtgcatacgcggtgtgtcccgatatcacagccacagtgactccggatctcaaacatcccgaggggaggggacacttgctatatgttgctttatcgccgggccagcatcggctgggcgggaccgcactagcccaatgttttagccagctaggggagcatccaccagatctggacctgccggaaaacctcgtgcgcgccttcagcataacacagggactgctgaaagacagactgttatgctctggccatgacgtttccgatggggggctggtcacttgcctgcttgaaatggcattcgccggaaactgcggcctccaggttgacgtgccagtgcccagagtggacgttttgagcgtgctgtttgcggaggaacccgggctggttcttgaagtccaggagccggaccttgcccaggtgcttaaacggtatagggatgccggtctgcactgcctggaactcgggcatacaggcgaggccggtccacatgctatggtccgggtgtctgtgaacggagccgttgtcttggaagagcccgtgggcgaactccgagctctttgggaggaaacaagctttcagctcgacagactacaggctgagccacgttgtgtggccgaggaggagcggggattgcgcgaacggatggggccatcctactgtctaccgccaacattcccaaaggcctcggttcccagagagcctggcggcccttcacctcgcgtggcaattctacgggaggaggggtctaacggtgacagagaaatggccgacgcattccatctggcaggttttgaggtgtgggacgtgactatgcaagacctctgttccggcgccattggactagatacttttcgcggggtagcgtttgtgggtgggttctcctacgccgatgtactgggcagcgcaaaggggtgggccgccgcagtcacgtttcacccacgcgctggggctgagctgaggcgttttcgcaagagacccgacaccttttcgctgggggtgtgcaacggttgccagttgttggcattgctgggatgggtcggcggagatccaaacgaggacgccgccgaaatgggccctgattcacagccagccaggcctggactactactgcgacataaccttagcggaaggtacgagtcccgctgggcgtccgtgcgcgtcggccccggccccgccctgatgctcagggggatggaaggtgctgtgttacctgtgtggagtgcccatggcgagggatacgtcgctttcagcagccctgaacttcaggcacagattgaggcccgtggcctcgcgccattacactgggccgacgacgacgggaaccccactgaacaatatcctctgaatccaaatgggagtccagggggggttgccggtatatgttcatgtgacggccgacatctggcagtgatgccccacccagaaagagcagtcagaccttggcagtgggcctggagacctccgccttttgacacgttgactacaagtccttggctccagctgtttattaacgcccgcaattggacactagagggttcttgctag

SEQ ID NO: 128818 - DNA, 2745 bp, synthetic construct
  misc_feature 1..2745: note = Description of Artificial Sequence: Synthetic coding sequence
  source 1..2745: mol_type = other DNA
atgttcagcggtggaatcggatctatggaggccgaccatattagtaaagaggccccagagcctggtatggaagtagttaaggtgggtggcccagtttacaggattggcgtgggtggtggcgctgccagctcagttcaggttcaaggcgacaacacttcagatctggacttcggtgccgtccagcgtggcgatcccgaaatggagcagaaaatgaacagagtcattagggcatgcgtcgaagcccctaagggtaatccaatctgttcattacacgatcagggtgctggtggcaatggaaatgtgttgaaggagctgtctgaccccgccggtgccattatatatacatcccggttccagctgggcgaccctactttgaatgctctggagatctggggcgcagagtaccaggaaagtaacgccttgctgctgagatcccctaacagagatttcctcactcacgtcagtgccagagagcgctgtcccgcctgcttcgtgggcaccatcactggcgacagaaggatcgtcctcgtcgacgaccgcgagtgtcccgttcggcggaacggacaaggggacgcccctcctactcctctccccacccccgtcgatcttgaactagagtgggtcttgggcaagatgccccggaaagaatttttcctacagcgcaagccgcccatgctgcaacctctggcccttcctcccggactgtctgtgcatcaggctctcgagagagtgcttagactgcccgccgtagccagtaagagatacttgaccaacaaagttgacagaagtgtggggggcctagtggcccagcagcagtgcgtgggacctcttcagactcctctagccgacgtggccgttgtcgctcttagccacgaagagttgataggggccgccactgctctcggagagcagccagtgaagtctcttcttgaccctaaagttgcagcacgcctcgccgtagcagaggcactgaccaatttagtcttcgcgctggtaactgacttacgcgatgtcaagtgttcaggtaattggatgtgggcagccaagttacccggcgagggcgccgccctggccgacgcctgcgaggccatggtagcagtcatggccgctctgggggtggccgtcgatggaggtaaggattcccttagtatggcagcccgagtggggaccgagactgttagggctcccggctctttagtgatttctgcatacgctgtgtgtccagacattacagccaccgtcacaccagacctcaaacacccggagggtaggggacaccttctatacgtcgcgctgtcaccaggccagcatcggttaggcggcacagctctggcccagtgttttagccagttaggggagcacccgcctgacctcgacctccccgagaatctggtcagggctttttcaatcactcagggactgttgaaagatagactattgtgttctgggcatgacgtgagcgatgggggactggtaacatgtctgttggagatggcattcgcaggcaactgcggactccaagtggatgtacctgttccacgagtggacgtcctgtcagtcttattcgccgaagaaccaggactcgtgctcgaggttcaggaaccagatcttgcccaggttctgaagcgttacagggatgctggcctccattgtctcgagctcgggcacacgggggaagctggaccgcacgcaatggtgagggtttccgtgaatggagccgtcgtcctggaggaacctgttggcgagctccgagcactctgggaggagacttcatttcaactcgatcggttacaagctgaacctcggtgcgtcgccgaagaggaacgcggtctcagggaacgtatgggcccttcatactgtctgccgccaacatttcctaaagcatccgtacccagggaaccaggtggaccaagcccacgagtggcgatcctccgcgaggagggcagcaacggagatcgggaaatggccgacgcatttcaccttgcaggatttgaggtgtgggacgtcacgatgcaggatctgtgtagcggggctatagggctggacaccttcagaggggtcgcgtttgtgggcgggttcagctatgctgacgtcctagggtcagctaagggttgggcagctgcagtgacttttcaccctcgggccggcgccgagcttaggaggtttagaaagcgccctgacactttttctctaggtgtgtgcaacggttgccaactgctcgccctgctaggctgggtcggaggtgatcccaacgaagatgccgccgaaatgggaccagactctcaaccggcaagaccaggtctgctgcttcggcataacctctccggccggtatgaaagccgttgggcatcagtgagagtcggtcctgggcctgccctcatgctccgggggatggagggagcggtgttgcccgtgtggagcgctcatggggaaggctacgtggcatttagtagtcctgaactgcaggcccaaattgaggcccgcgggctcgcccctctccattgggctgatgacgatggcaatccaactgagcagtacccattgaacccgaacggctctcccggcggagtggccgggatctgttcatgtgatggtcgtcacctggcagttatgcctcaccccgagcgggcagtccggccatggcagtgggcttggcggcccccaccatttgatactctcaccacctctccatggctccaactgttcatcaacgcgcgtaattggacactggagggcagctgctag

SEQ ID NO: 128819 - DNA, 2244 bp, synthetic construct
  misc_feature 1..2244: note = Description of Artificial Sequence: Synthetic coding sequence
  source 1..2244: mol_type = other DNA
gtgaaaggcgagagacgcatagttcttgtcgatgacagagaatgtcctgttcgccggaatggccagggggatgcccctcccacgccgctcccaactcccgttgaccttgaactcgagtgggtgctggggaagatgccccggaaggagttttttctgcagcgcaaaccccccatgttgcagcctttggcgctgcctccaggattgtcagtgcaccaggcactcgaacgcgttttgaggttgcctgccgtagcttctaagagatatctgaccaacaaggtcgatcggtctgttggtggcctggtggcacaacagcagtgtgtcggccccctgcagacacccctggcagatgttgccgtggtggcactttcacacgaagaactcatcggtgcagccacggccctcggggaacagccagttaaaagtctcctggatcccaaggttgccgcccgcctagccgtcgccgaggccctgacaaaccttgtgttcgctttggtcactgacctccgggacgtcaagtgctccggaaattggatgtgggcagcaaaactgccaggggagggagcagccctggccgatgcttgcgaggccatggttgcggtgatggcagcactcggggttgcagtggatggagggaaagactcgttatcaatggccgccagggttggcacagagactgtgcgtgctcccggcagcctggtgatatccgcttacgcagtatgccccgacatcacggcgacggtgacccccgacctaaagcatcccgagggccggggacatctactatacgtcgcactttcaccaggacagcaccgattagggggtacagcccttgctcagtgcttctctcagctgggagaacacccccctgacctggacctgcctgaaaatctggtgcgggccttttcgataacgcaaggcctgttgaaggaccgtctgttgtgctcaggacatgatgtgtcagacggcggcctggtcacatgtttattagagatggcttttgctgggaactgtggtcttcaagtcgacgtgccagtgccccgcgttgatgtcctcagcgtcctgtttgccgaagaacctggattggtgctcgaagtgcaggaacccgatctggctcaagtcctcaagcggtacagggatgccgggctgcactgtctggagctcggccatacaggagaggctggccctcacgcaatggtgcgggtgtccgtcaatggtgccgtagtcctagaagaaccagtcggagagctgagagctctctgggaagaaacctctttccagctcgatcggcttcaggcagaaccccggtgcgtggcagaagaggagaggggactcagggaaaggatgggaccttcgtactgcttgccccccacctttcccaaagcctccgtgcctcgtgaacccggcggtccaagtcctcgggtggctattctgcgggaagaaggaagtaacggggaccgtgagatggccgacgcatttcacctggccggctttgaggtgtgggacgtgacaatgcaggacctttgcagcggggctatcggattagatacttttcgcggggtggcattcgtgggtggtttctcatatgccgatgtgttgggcagcgccaagggctgggccgccgcagtcacttttcaccccagggccggagccgagttacgccgattccggaagcggcctgacactttctctctgggcgtctgtaatggctgtcagctcttagccctcctcgggtgggttggaggagatccgaacgaggatgcagccgaaatgggacctgattctcagcccgccaggccaggactgcttctcaggcataatctgtccggtcggtatgagagtcggtgggcctcggtccgggttggtcctggacctgctctgatgctccgcggaatggagggcgctgttctacccgtttggagtgcgcacggtgagggctacgtggcattctctagccctgaattgcaagcgcaaattgaggcacgcggccttgcgccactccattgggcggatgatgacggtaaccccaccgagcagtacccgcttaaccccaatgggtcaccaggcggggtggcagggatctgctcctgcgacggcaggcacttggcagtcatgccccatcctgagcgtgctgttcggccatggcaatgggcgtggaggccccccccatttgataccctcacaacgagcccttggctgcaattgttcattaatgcgagaaattggacccttgaaggcagttgttag

SEQ ID NO: 128820 - DNA, 1302 bp, synthetic construct
  misc_feature 1..1302: note = Description of Artificial Sequence: Synthetic coding sequence
  source 1..1302: mol_type = other DNA
atggccgcccgagtgctgatcattggaagtggcgggagggagcataccctggcctggaagcttgcccagtcacaccacgtcaagcaagtactcgtggccccaggcaacgccggaacagcatgcagtgaaaagatcagcaacactgccatatcaatttccgatcacacagcactggcacaattctgcaaagagaagaagatcgaatttgtcgtcgtcgggccagaagcgccgctggcagccggtattgtgggcaatcttaggagcgcaggagtacagtgctttggaccaaccgccgaggctgcccagctggaatcaagcaagaggttcgcaaaagaatttatggatcgtcacggaattccaaccgcgcagtggaaagcatttaccaagcctgaagaagcctgcagctttatattgtctgcagacttcccggccctggtggtaaaggcgtctggtttggctgccgggaagggagtcattgtagctaaaagcaaggaggaggcctgcaaggcggttcaggagataatgcaggagaaggctttcggcgccgcaggagagacgattgtgattgaagaattgttggatggagaagaggtttcatgcctgtgtttcaccgatggcaaaaccgtggctcctatgcctcctgcgcaggaccataagaggctgctcgaaggagatgggggccctaataccggtggcatgggcgcctattgccccgctccccaggtcagcaacgacctgctgctcaaaattaaagacacagtgcttcagcgcacagtggacggcatgcaacaagaaggtaccccttacacagggattttatacgccggtatcatgcttacaaagaatggccccaaagtgctggagtttaattgccggttcggagaccccgagtgtcaggtgattctcccattattgaagagcgacttatacgaagttatccaaagcaccctcgatgggctgctgtgtacctccctcccggtctggttagagaaccacaccgcattaaccgtagtgatggcttcgaagggctatccaggggactacacaaagggggttgagatcactggttttcccgaagcgcaggccctgggcctagaggtttttcatgccgggaccgcactgaagaatgggaaagtggttacacacggaggcagagtcctggcagtgaccgccatccgggagaacttgattagtgcattggaggaggccaagaagggcctcgcagctatcaaatttgaaggagcaatttaccgcaaggacgtgggcttcagagccatcgcctttctgcagcaacccaggtag

SEQ ID NO: 128821 - DNA, 3033 bp, synthetic construct
  misc_feature 1..3033: note = Description of Artificial Sequence: Synthetic coding sequence
  source 1..3033: mol_type = other DNA
atggccgctagggtgttaatcatcgggagtggtggcagagagcacacattagcatggaaactggctcagagtcaccacgtaaagcaggtgctggtcgctcccgggaatgcggggacagcttgcagcgagaagattagtaacactgcaatcagtatctctgatcacactgctcttgcccaattctgcaaagaaaaaaagatcgagtttgtggtcgtggggccagaagcccctttagcagccggcattgtgggaaatctgcgatctgccggcgtgcaatgtttcggccctacagctgaggccgcacaacttgagtcctccaaacggttcgctaaagaatttatggaccggcatggcattcccaccgctcagtggaaagcatttacaaaaccagaggaggcatgcagtttcatcctaagtgctgatttcccggcccttgtcgtgaaagcctcggggctcgccgccgggaaaggcgttattgtggccaagtccaaggaggaagcctgtaaggcggtgcaggagattatgcaggagaaagctttcggcgctgccggcgagaccatcgtaatcgaggagctgctagacggcgaagaggtgtcttgcctgtgttttacagacggaaaaaccgtcgcccccatgcccccagctcaagatcacaagaggctgctggaaggggatggcggccctaatacgggtgggatgggtgcttattgcccagctccgcaggtgtccaatgatctgctgctcaaaatcaaggacactgtcctgcagcggacggtggacgggatgcagcaggagggcaccccatacacaggcattctgtacgcagggatcatgctgacaaaaaatggaccaaaagtcctcgagtttaattgtaggtttggagacccagagtgccaggtgattctgcccctgctcaagagcgacttgtatgaagtgattcagagcacccttgatggcctgctttgcactagcctgccagtgtggctcgaaaatcacactgcattgactgtagtgatggccagtaaaggctaccccggcgattacaccaagggcgtcgagatcaccgggttccccgaggcccaggccttggggttagaggtttttcacgctggcactgcactcaagaatggtaaggtggtgacccacggggggagagtgctcgcagtaactgctattagagagaatctaatttctgccctggaggaggcgaaaaaagggctggccgcaatcaagtttgagggggcaatctacagaaaagatgtggggtttcgcgccatcgcctttttacagcagcccaggagcctgacctacaaagaaagcggcgtcgatatcgccgctggcaatatgttggtgaaaaaaattcagcccctggccaaggctacttcacgatctggttgcaaagtggatctcggcggattcgccgggctgtttgatctgaaggccgccggctttaaggacccgctcctggcatccgggaccgatggcgttggtactaaattaaagatcgcacaactgtgcaataagcatgatacaatcgggcaagacctggtggccatgtgtgtgaacgacattctcgctcagggcgcggagcctttattttttctggactatttctcatgtggcaaactcgacctgagcgtcaccgaggcggtcgtggccggcatcgcgaaggcttgtggaaaggccggctgtgccctgttaggcggcgagacagcagagatgcccgacatgtaccctcccggtgagtacgacctggctgggtttgcagtcggggcgatggaaagggatcagaaacttccccatctggagaggatcactgagggagacgtagttgtgggcatcgcgagctctggcttacattcaaacgggttcagcctggtacggaaaatcgtagctaaatcctccttgcagtactcatcgccagcacccgacggctgtggggatcagacacttggggatctcctcctgacacccacccgcatctatagccacagtctgctcccagtgctgcggagcggccacgttaaggccttcgctcatatcacgggcggaggcttactggagaatatccctcgtgtgctgccagaaaaactcggagttgatctagacgcgcaaacatggagaatcccacgggtgttctcttggctgcaacaagagggccacttaagcgaagaggagatggctagaacatttaattgtggagtgggggctgtgcttgtcgtgtcaaaggagcagaccgagcagatccttagagacatccagcaacacaaagaagaggcttgggtcatcggctccgttgtagcacgcgccgaaggatccccacgtgtgaaagtgaagaatctaattgagtcaatgcagatcaatggatctgtgctcaaaaatggttccttgaccaaccacttttccttcgagaagaagaaggcccgcgtcgctgtgctgatctccgggactggttctaacttgcaggccctgatcgactctactcgggagcccaatagtagcgcccaaattgacatagtcatcagtaacaaggccgctgtggcgggattagacaaggccgaaagagccgggatacccaccagagtcataaatcacaagctctacaaaaaccgggtggagttcgactccgccatcgacctggtgctggaggaatttagtatcgatatcgtgtgccttgcaggtttcatgcggatcctgagcggccctttcgtgcagaaatggaacggcaagatgttgaatatacatcctagcctgctacccagttttaaaggctctaacgcacatgagcaagccctagaaaccggcgtcaccgttaccggttgtaccgtgcactttgttgccgaggacgtagatgctggacagattatcctacaggaggcagtgccagtgaaaaggggcgatacggtggctacattgagcgaaagggttaagcttgccgagcacaagatttttcctgcagcacttcagttggttgccagtgggacagtacagttgggggagaatggcaagatatgttgggttaaggaggagtag

SEQ ID NO: 128822 - DNA, 3033 bp, synthetic construct
  misc_feature 1..3033: note = Description of Artificial Sequence: Synthetic coding sequence
  source 1..3033: mol_type = other DNA
atggctgctcgtgtgctgatcatcggtagtggcgggagggaacatacgctcgcgtggaagctggctcagtcacatcatgtgaaacaggtgttggtcgccccgggcaatgcaggcactgcgtgctctgagaagatctccaacactgcaatttcgattagtgaccataccgctctcgcccaattttgtaaggaaaaaaagatcgaattcgtggtggtgggacctgaggcccctctggccgccgggatcgtgggaaatttacgttcagcgggggtccagtgctttggccctacagccgaagctgcacagctggaaagttccaagcgattcgcgaaggagtttatggatagacacggcatacccaccgcacaatggaaggcttttacgaagccagaggaggcctgttcttttatcctgagtgctgattttccagcacttgtggtcaaggcttcaggcctggccgcggggaagggcgtaattgtagcaaagagcaaagaggaggcctgtaaagccgtacaggagattatgcaggagaaggcctttggggctgcaggcgaaaccatcgtcatcgaggagctcttggatggtgaggaggtcagctgcctgtgtttcactgacggtaagactgtggcccccatgccgcccgcccaggatcacaagcgcctactggagggtgatggcggccccaataccggcggtatgggcgcctactgcccggccccacaggtcagcaacgacctgcttctgaaaatcaaagacaccgtgttgcagcgtactgttgacggcatgcagcaggagggtaccccctacaccggtatcttatacgcaggaataatgctcacgaagaacgggccgaaggtacttgaatttaactgtagatttggggatcccgaatgtcaggtgattctccctttgcttaaatcagacctatacgaggtaattcaatcaactcttgatgggctcctatgtacaagtctgcccgtctggctcgaaaatcataccgctttgaccgtagtgatggccagtaagggttaccctggagattatactaagggcgtggagatcaccggcttccctgaagcccaggcactcggtctggaggtgtttcatgccggcacagctctcaagaatgggaaagtcgttacgcatggcgggcgggtgctcgcagttactgcgataagggaaaacctgatcagtgccttggaggaagccaagaaagggcttgccgcgataaagtttgagggtgcgatctataggaaggacgtggggttccgggccatcgcatttcttcaacagcctaggagcctgacatataaggaatcaggggttgatattgcggctggaaatatgcttgtcaagaaaattcagccactggccaaggctacaagtcgctcaggctgcaaagtggatcttggcggcttcgccggactttttgacttaaaagcagctggattcaaagaccccctgctcgcttctggaaccgacggggtaggaacaaagctgaaaattgcccaactgtgtaacaagcatgatactatcggacaggatcttgtggccatgtgcgtcaacgacatactggctcagggcgcggaacccctgttttttctagactattttagctgcgggaagctggatctgtccgtgaccgaggcggttgtcgccggtatagcgaaggcctgtgggaaggccggctgtgccctcttgggaggcgagaccgccgagatgccggacatgtatcctcctggcgaatacgacttggccgggtttgccgtgggggcaatggagagggatcagaagctgccacatctggagcggattaccgaaggcgacgttgtcgtcggaatcgcaagcagtggcttacattccaatgggttttcccttgtgcgcaagatcgtggccaagagttcgctgcagtatagcagtcctgctccggatgggtgcggcgaccagacactgggggatctgttactcacccccacacgcatttattcacattccctgctccctgttcttcgatcaggtcacgtgaaagcctttgctcatatcacgggaggaggtttattggaaaacatcccacgagtgttgccagaaaagctgggggtggacctggatgcgcagacctggcgtatcccgcgagtgttcagttggttacagcaggagggacatttgtcagaagaggaaatggccaggacctttaattgcggggtgggagccgtgctggtagtgagtaaggaacagaccgagcagatcctacgggatatccagcagcacaaggaagaggcctgggtgattggatcagtagtggcccgcgccgaaggttcaccccgtgtgaaagtgaaaaacctcatcgagtcaatgcaaattaatgggagtgtcctaaaaaacggttcactgacgaaccacttctccttcgaaaagaaaaaggctagggttgctgtgctgatcagtgggacaggttcgaacctgcaggctcttatcgatagtacccgagagcccaattcctctgctcaaatcgacatagtcataagcaacaaagcggctgtggccggactcgacaaggctgagcgggccgggatacctactcgggtcatcaaccataagctttataagaatagggtggagttcgactctgccatagatcttgtcctagaagaattcagcattgatatcgtgtgcctcgccggctttatgcggatcctctctggaccttttgtgcagaaatggaacgggaaaatgctgaatatacacccaagcctcctaccttcctttaaaggtagtaacgcccacgaacaggcgctcgagaccggcgtgacagtgactggttgtaccgtccattttgtcgccgaggacgttgacgcagggcagattatcctgcaggaagcggtaccagtaaagcggggcgatacagtggccacgctttcagagagggtgaagcttgctgaacataagattttcccagcggcacttcagctcgtggcctctggtacagttcaactcggagagaacggtaaaatttgctgggtcaaagaggagtag

SEQ ID NO: 128823 - DNA, 3033 bp, synthetic construct
  misc_feature 1..3033: note = Description of Artificial Sequence: Synthetic coding sequence
  source 1..3033: mol_type = other DNA
atggctgcgagggtgctgattattgggtcaggaggccgggagcacaccctagcctggaagctggcccagagccatcacgtcaaacaggtactggtcgctcctgggaacgctggtaccgcgtgcagcgagaagattagcaacactgctatcagcattagtgatcatacagctcttgcacaattttgtaaggagaagaagatcgaattcgtggtcgtggggccagaggcaccgctggccgctggcatcgtggggaatttgcgctcagccggcgtccaatgctttggaccaacagcagaggcagcacagttagagagcagcaagcggttcgcgaaggagtttatggaccgccacggaatcccgaccgcgcagtggaaggcattcaccaaaccagaggaagcctgcagttttatactctccgccgacttcccggccctggtagttaaggcctcaggcctagcagccggtaaaggcgttattgtggccaaatcgaaagaagaggcctgcaaagccgtccaggagattatgcaagagaaagccttcggagctgctggcgagactattgtgatcgaagaactgctggacggcgaggaagtctcttgtctgtgcttcacagatggaaaaactgttgccccgatgccgcctgcacaggatcacaaacggctgctggagggagacggaggaccgaataccggcggcatgggcgcctactgcccagcccctcaggtgtcgaacgatctgcttctaaaaattaaggacactgtcctgcagagaactgtagacgggatgcagcaggaaggcaccccgtatacgggaatcctctacgccggcatcatgcttaccaagaacgggcccaaggttcttgagttcaactgccggttcggggatcctgaatgtcaagtgatattgcctttactgaaatccgacctatacgaggtgatccaatcaactcttgatgggctgctatgtactagcctaccggtctggctcgagaaccacactgctttgactgtggtgatggcatccaagggctatccaggagattacaccaagggcgtcgaaattaccggtttcccagaagcccaggctctggggctggaggtgttccacgccgggaccgctctcaaaaacgggaaagtcgtgacacacggaggacgggtactcgccgttacagcaatacgagaaaatctgatctccgcactggaggaagccaagaaaggcttggccgctatcaagtttgagggcgccatttaccggaaggatgtggggttccgggccatcgccttcctgcaacaacctagaagtttgacatacaaagagtctggggtagatatcgcggccggcaatatgttggttaaaaaaattcagccactggccaaggcaactagtagaagcgggtgcaaggtagacctgggaggctttgccgggttgttcgatcttaaggccgctggctttaaggatcccttgctggccagcggcactgacggcgtgggcacgaaactgaaaatagcccaattatgcaacaagcacgacaccattggtcaggacctggtcgcgatgtgtgtcaatgacatcctggcccagggggcggaacccctcttcttcctggattattttagttgcggcaagctggacttgagtgtaactgaagcagtcgttgctgggattgccaaggcatgtggcaaggccggctgcgccctactgggaggagaaaccgcagaaatgcccgacatgtatccaccaggcgagtacgacctggcaggatttgccgtcggggcaatggaaagagaccagaagttgccacatctcgagcggatcaccgagggagatgtggtggtggggatagcctcttcaggcttgcactcaaatgggttctcactggtgcgcaaaattgtggcgaaaagttctcttcagtactccagccccgcacccgatgggtgcggagatcagacactgggcgacctacttctgactccaaccaggatctacagccactctctcttgcccgtgttaagaagcggacacgtgaaggcgtttgcgcacattaccggagggggactgctcgagaatattcccagggtgctgcctgaaaagctgggcgtcgatctagatgcccagacgtggcgcatacccagggtcttctcctggcttcagcaggaaggccatctgtccgaggaggagatggccagaacattcaactgtggagtgggggccgtccttgtggtgagcaaggagcaaacagaacagattctaagggatatccaacagcataaagaggaggcttgggtcatcggtagtgttgtcgccagagcagagggttccccacgggtgaaggttaagaatctgattgaatccatgcagatcaatggctcagtcctgaaaaatggtagcttaacaaaccatttcagcttcgagaagaaaaaggctcgggtagccgtgttaatctctggaacaggttctaacttgcaggcactaatcgactcgacccgagagcccaacagctcagcacagattgacatcgtgatcagtaacaaggccgctgttgcaggccttgataaagctgagcgggccgggatccctacgcgcgtgatcaaccataagctgtataaaaaccgtgtggagttcgatagcgcgatcgatctggtgctcgaagaattctctattgatatcgtctgtttggccgggttcatgagaatactgagcggccccttcgtgcaaaaatggaatgggaaaatgctgaatattcatccatccttgctgccatcctttaaggggtccaatgcccacgagcaagcgcttgagacaggcgtcaccgttacaggctgcacggtacatttcgttgcagaagatgtcgatgcaggccagattatcctgcaagaagcagtccctgtaaagcggggcgatacagtagccactctgtcagaaagggtgaagcttgctgaacataaaatctttcccgccgccctacagcttgttgcctccggcacagtgcagctgggggagaacggaaagatctgttgggtgaaagaagaatag

SEQ ID NO: 128824 - DNA, 699 bp, synthetic construct
  misc_feature 1..699: note = Description of Artificial Sequence: Synthetic coding sequence
  source 1..699: mol_type = other DNA
atggccgccagagtcttgataatcggatccggtggccgcgaacacaccctggcctggaaattggcacaatcacaccatgtcaaacaggtgctggtcgccccaggaaacgccggcactgcctgttccgaaaaaatctcaaatacagcaatctccatttcggatcacactgcactagcacagttttgcaaggagaaaaagatagagttcgtggtggttggccccgaggcccccctcgccgcagggattgtcgggaacctgcggtcagccggcgtgcagtgttttggacccacggctgaggccgcccagttggaatctagcaagcggttcgcgaaagagtttatggaccggcatggaatccccacagcccagtggaaggcctttaccaagccagaagaggcctgcagctttattctgtctgccgatttccctgccctagttgtgaaagcctccggactggcggccggtaaaggcgtgatcgtggctaagagcaaagaagaagcttgcaaagcagtgcaagaaatcatgcaggaaaaagccttcggagccgctggtgaaacaatcgtgattgaggagctgttagatggagaagaggtgagctgtctttgtttcaccgatgggaaaactgttgctccaatgcccccggcccaagaccacaagagactgcttgagggggatggcgggcctaacaccggaggatag

SEQ ID NO: 128825 - DNA, 726 bp, synthetic construct
  misc_feature 1..726: note = Description of Artificial Sequence: Synthetic coding sequence
  source 1..726: mol_type = other DNA
atggcggcgcgggttcttatcatcggaagcggtggcagagaacacacactggcctggaaacttgctcagtcacaccatgtgaaacaggtgcttgtggctccaggaaatgcaggcaccgcttgtagcgagaagattagcaataccgcaatctccattagtgaccacacagctctcgcccaattctgtaaggagaagaagatcgaatttgtcgtggtggggcccgaagcgcccttggccgctggcatcgttgggaatctcagatctgcaggagtccagtgctttggaccgacagctgaggcggcccagttggagtcctccaaacgtttcgccaaggaattcatggaccgccacggaatacccactgcccaatggaaagcgttcactaaaccggaggaggcttgttcctttatcctgtccgccgactttccagccctcgtagtgaaagctagcggactggccgctgggaagggtgtaatcgtggcaaagagcaaggaggaagcttgcaaagcggttcaggagattatgcaggagaaggcctttggtgccgccggagagacgatcgtgatcgaggaacttctggacggcgaggaggttagttgcctctgctttacagacggcaaaactgtagctcctatgccccctgcccaggatcacaagcgtctgttagagggcgacggtgggcccaatactggcggcatgggcgcctactgccctgcaccacagtag

SEQ ID NO: 128826 - DNA, 417 bp, synthetic construct
  misc_feature 1..417: note = Description of Artificial Sequence: Synthetic coding sequence
  source 1..417: mol_type = other DNA
atggcagccagagtgctcattattggttccggtggacgcgaacataccttagcatggaaactggcgcagtcgcaccatgtcaagcaggtactggtggcacctgggaacgcaggcacagcctgctccgagaagatctctaataccgcgataagcatttccgaccacaccgcattggctcagttttgcaaagagaagaaaattgaattcgtggtcgtgggacccgaagcgcctttggccgcgggcatcgttggtaatctgcggtcagcgggagtgcaatgtttcggaccaacagcggaagcagcgcagttagaatcatctaagaggtttgcaaaagaattcatggacaggcacggcatccctaccgcacagtggaaagcctttaccaaaccagaagaagcatgctcctttattttatag

SEQ ID NO: 128827 - DNA, 411 bp, synthetic construct
  misc_feature 1..411: note = Description of Artificial Sequence: Synthetic coding sequence
  source 1..411: mol_type = other DNA
atggctgccagggtgcttatcatcggaagcggcggccgggaacacacactggcatggaaactcgcacagtctcatcacgtgaaacaagtgcttgtcgcaccgggtaatgccggaaccgcctgttccgagaagatctctaacaccgccatctcaatctcagatcataccgcactggcccaattttgcaaagaaaagaaaatcgagttcgttgtggtgggaccggaagcaccattagcagcgggtattgtgggtaacctaaggagcgccggcgtgcaatgcttcggacctaccgcggaggcagcccagctggagtccagcaagagatttgctaaggagtttatggataggcacgggattccgactgcccagtggaaggcctttacaaagcccgaggaggcatgtagtttctag

SEQ ID NO: 128828 - DNA, 1689 bp, synthetic construct
  misc_feature 1..1689: note = Description of Artificial Sequence: Synthetic coding sequence
  source 1..1689: mol_type = other DNA
atgctggtgaagaagatccaaccacttgccaaagcaacgtcaaggtcaggctgtaaagtcgacctgggtggcttcgctggtcttttcgaccttaaagcggcaggtttcaaggaccctctcctagcctctggtactgatggtgtggggactaaattgaagatagctcagctctgtaataaacatgatactattgggcaggatcttgtggcaatgtgtgtgaacgacatcctggcgcagggagccgagcccctttttttcctcgattacttttcatgcggcaaactcgatctgagcgtcaccgaggcagtcgtggccggcatcgccaaagcctgcggaaaggcaggatgtgcactcctgggcggcgagaccgcagaaatgcccgacatgtaccccccaggtgagtatgatctggcgggcttcgcagttggtgccatggagagagaccagaagttacctcatctggaacgcattactgaaggggacgtcgtggtaggaatcgcctcttcggggctgcactccaatggcttcagcctcgtgagaaaaatcgtggctaaaagtagtcttcagtactcttcccctgccccggacgggtgcggagaccagactttaggggacctgctgctaacacctactagaatctacagccattccctgctgcccgtgcttaggtccggccacgttaaggcttttgcgcacattactgggggaggcctactcgaaaatattcctagggttttgcctgagaaactgggggtggatctcgatgcccagacttggcgcattccaagagtgttcagttggctgcagcaggaggggcatctgagcgaggaggagatggcgcgaacctttaactgtggagtcggtgcagtcttggtggtgtcgaaagagcagacggagcagatcctgcgcgacatccagcaacataaagaggaggcctgggtcattggctctgtggttgccagagcggagggatcccctagggtgaaagtaaagaatctgatcgaaagcatgcagattaacggcagcgtgctcaagaatggaagcctcacaaaccattttagctttgagaagaaaaaggcccgggtggctgtgctcatctctggtacaggctcaaatctgcaggccctcattgactctactcgggagcccaattcctcagctcagattgacattgtgatatctaataaagcggccgtggctgggttggacaaagcagagagagccggcattcctacccgtgtgattaatcataaactgtacaagaaccgggtggaattcgattcggctatagatttggtcctagaagagtttagtattgatatagtgtgtttggcaggctttatgcggattctgtcagggcctttcgttcagaagtggaacggaaaaatgttgaacatccatccatcacttctgcctagttttaaaggaagcaatgcacacgaacaggccctggaaacgggcgtgactgttaccgggtgtactgtgcattttgttgcggaagacgtggacgcaggacaaataatcctgcaggaggccgttcctgttaagcgcggcgataccgtcgccaccttaagcgaacgagtgaaacttgctgagcacaagatatttcccgctgcactccagctggtggcctcaggaaccgtccagctgggtgagaacggcaaaatctgttgggtcaaagaggaatag

SEQ ID NO: 128829 - DNA, 2265 bp, synthetic construct
  misc_feature 1..2265: note = Description of Artificial Sequence: Synthetic coding sequence
  source 1..2265: mol_type = other DNA
atgtcaaggcctttaagcgatcaggagaagcgtaagcagattagcgtacgggggctggctggggtggagaacgtgactgaattgaaaaaaaacttcaatagacacctccactttacactggtcaaagaccgcaatgtggctactcctcgggactactattttgcacttgcccacacggttcgcgatcacctggtcgggaggtggatccggacccagcaacattactatgagaaagatcccaagaaaatatccggcggttggcaaatggaggaggcagacgattggttgagatacgggaacccttgggagaaggctagaccggagttcacccttccggtacacttctacggccatgtagaacataccagccagggagccaaatgggtcgacactcaagttgtgctggcgatgccttacgacacaccagtgcccgggtaccgcaataacgtggtcaatacaatgagactctggtccgctaaagccccaaatgacttcaatctgaaggattttaatgtgggaggctatatacaagctgtgctggataggaaccttgccgagaacattagtagagtgctgtaccccaacgataatttctttgaaggtaaagagctccgcctgaagcaagaatatttcgttgttgccgccacgttgcaagatattatcaggaggtttaagtcaagtaagttcgggtgtcgtgatccagtgcggactaatttcgacgcattccctgataaagttgctattcagctcaatgatacacatccttcactagcaatccctgagctgatgcgaatcttagttgatttggagagaatggattgggataaggcctgggacgtcacagtcaggacctgtgcatacaccaaccatactgttctccccgaagccttggagaggtggcccgttcatctgctcgaaaccctactgccccgccacctacagattatttacgaaatcaatcagcgctttcttaatcgggtggccgcagccttcccgggcgacgtggaccgccttcgaaggatgtcactggtggaagagggggcggtcaagagaatcaatatggctcatttgtgcatagctggctctcatgctgttaacggggtagcgcgaatacattcggagattttgaaaaaaaccatctttaaagatttttatgaactggaaccccacaaattccagaacaaaacgaacggtattactccaagacggtggttagtgctgtgtaatccaggcctggccgaggtgatcgcggagcgaattggcgaggattttattagtgatttagaccagttgagaaaattactcagcttcgtcgatgacgaggcattcattcgagatgtggcgaaagtgaagcaggagaacaagttgaagttcgccgcttatcttgagagggaatacaaggtccacatcaatccaaactctttattcgatatccaggtcaagcgcatccacgaatacaaacggcagctgctgaactgtttgcatgtgatcactctctacaacaggattaaacgtgaaccgaacaagttcttcgtgccccgcactgtaatgataggaggcaaggctgcgccaggataccatatggcaaaaatgatcatccgcttggtcaccgccataggcgacgttgtgaatcatgaccctgcagtgggtgaccggctccgcgtgattttcctggagaattaccgcgtgagtctggctgaaaaggtcataccggccgctgatctgtccgaacaaatcagtacagccggaaccgaggcctcagggaccggcaacatgaaatttatgctgaacggcgctctgaccatagggactatggacggggccaacgtggaaatggccgaggaggccggggaagaaaactttttcatctttgggatgagagtagaagacgtggataaactggatcagcgcggttacaatgcccaagagtactacgatcgaatcccagagttgcgccaggtcatcgagcagctgagttccggatttttcagtcccaaacagccggatctttttaaggacatagtcaacatgctcatgcatcatgaccgattcaaagtgttcgccgattacgaggattatataaaatgtcaggagaaggtctcagcactgtacaagaatcccagggagtggacccgtatggtgattagaaatatagccacgtctggaaaattttcaagcgaccgtacaattgcacaatacgcccgcgaaatctggggtgtagagccttcacgacagcgtttgcccgcacctgacgaggcaatttag

SEQ ID NO: 128830 - DNA, 3633 bp, synthetic construct
  misc_feature 1..3633: note = Description of Artificial Sequence: Synthetic coding sequence
  source 1..3633: mol_type = other DNA
atgaggagtcgctctaattccggtgtcagacttgatggctacgctagattagtgcagcaaacaatcctgtgtcaccaaaatcccgtgacaggcctactgcccgccagttatgaccagaaggatgcatgggtgcgagataatgtatattctattctcgcagtatggggactcggattggcgtatagaaaaaatgcagaccgcgacgaggataaagccaaggcatacgaattggaacagtcagtggtgaaactgatgagaggactgcttcattgcatgatcagacaagtcgacaaagtcgagtcattcaaatacagccagtcgacgaaggacagtctgcatgccaagtacaacacaaaaacctgcgctacagtcgtcggggatgaccagtggggtcatctccagttagacgccacctcagtatacttactattcctcgcgcaaatgacagcaagtggactgcatatcattcactcactcgatgaagtgaattttatccagaatctagtcttttatattgaggccgcttacaagaccgccgactttgggatctgggagcgcggcgacaagacaaatcaggggatctccgagctgaatgcctcctccgtgggcatggcgaaggcggctttggaggcactggatgagctggatctttttggtgtaaaaggcggaccccagagtgtgatccacgtgctcgccgacgaagtccagcattgtcagagtattctgaactcactgttgccccgtgcttcaactagcaaagaagttgatgccagtctgctgtccgttgtgagttttcccgcctttgccgtggaggacagccagctggttgaattaacaaagcaagaaatcatcacaaagctacaggggagatatggctgttgtagattccttcgtgatggctataagactccaaaggaagatcccaacaggctttactatgagccagccgaattaaaattgtttgagaatatagaatgtgagtggcctctgttttggacctatttcattttggatggggtgttcagtggaaacgctgaacaggtccaggagtacaaggaggccctggaagctgtgttgatcaagggaaaaaacggggtgcccctgttgcccgagctatattccgtcccccctgaccgggtggatgaagaatatcagaacccacacacagtagacagagtacccatgggaaagcttccccatatgtggggccagtctctgtatatccttgggagcttaatggccgagggttttctcgcccctggggaaatagaccctctgaataggcggttttctacagttcctaagccggatgtggtggtccaggtgagcattctggctgaaactgaggaaattaagactatcctgaaggacaaagggatatacgtggaaacgattgcagaggtgtatccaatcagagtgcagccagctcgcattctttcacacatttactccagcctgggttgcaacaacaggatgaaactctccgggcgaccttaccgccatatgggggttctcggtactagcaagctttacgatattaggaaaacaatcttcacgtttaccccccaattcatcgaccagcagcaattttatcttgctctcgataataagatgatcgtggaaatgttgagaactgacctcagctacctgtgttctcggtggcggatgacaggccagccaacaatcaccttccccatcagccattcaatgctagatgaagacggaacgagcctcaactcctcaatcctagctgccctgaggaagatgcaggacggttatttcggcggtgcacgggtgcagacagggaagctgtctgagtttttgaccacctcctgctgcacgcacctgagcttcatggatccaggaccagaaggtaagctgtactcagaagattacgatgacaactacgactatttagaatcaggaaactggatgaatgactacgacagtacctctcatgcaaggtgtggagatgaagtggctcggtatctggatcacctcttggcccacaccgcaccccatcccaaactggctcctacctcacagaagggcggcctcgatagatttcaagcagcagtccagacgacttgtgacttgatgtctctggtgactaaggccaaggaacttcacgtccagaacgtgcatatgtacctgcccaccaagttatttcaagcctcccggccatcatttaacttgctcgatagtccccaccctcggcaagaaaaccaagtgcctagtgtgagagtggaaatccacctgccgagagaccagtctggtgaggtcgactttaaggcgctggtcctccagctgaaggagacaagttccctacaagagcaggctgatattctgtacatgctgtacacaatgaagggaccggactggaacactgagctctataatgaacgaagtgctaccgtgagagagttactgacagagctttatggcaaagtgggtgagataagacattgggggttgattcgatacataagcggaatcctgcggaagaaggtcgaggccctcgacgaggcctgcactgacctgctgtcacaccaaaagcacctcacagtgggccttccacccgaacctcgggaaaaaaccatcagcgcacctcttccgtatgaggcgctcacccaactaatagacgaggcctccgagggcgatatgtccataagcatcctgacacaggaaatcatggtttacttagcgatgtatatgcggacacagccaggactcttcgctgaaatgttccggcttcgcatcgggctgataatacaggtaatggccacagagctggcccactctcttcggtgctcggcggaggaggctacagaaggattgatgaacctgagcccatccgctatgaagaatcttttacatcatatactgagcggcaaagagtttggcgtggagaggtctgtgaggccaacagattcaaacgtgtcccctgcaatctctatccatgagatcggagcggttggcgcaacaaaaaccgaacgcactggtattatgcagttgaaaagcgaaatcaagcagagccctgggacatcaatgaccccttcgtctggctcttttccctcggcctatgaccaacaatcgtctaaagatagtcggcagggacaatggcagcgtaggaggcgacttgatggggcattgaaccgcgtgccggttggtttctatcaaaaggtttggaaagttctgcaaaaatgccacggactgagcgtggaaggatttgttctgccttcttcaaccacacgggagatgactcctggtgagattaagtttagcgtccacgtggaaagcgtcttgaatagagtgcctcagccagaataccggcaactcctcgttgaagctatcctagttctaactatgctggcagatattgaaattcattctattggtagcataatcgccgtcgagaagattgttcatattgccaatgaccttttcctgcaagaacagaagacgctcggcgccgatgatactatgctggcgaaagatcccgccagcggcatctgtactttgttatacgattccgcaccctccggtcggttcggaactatgacttacctctccaaggccgctgcgacctatgtgcaggaatttcttccccattcaatctgtgctatgcagtag

SEQ ID NO: 128831 - DNA, 3723 bp, synthetic construct
  misc_feature 1..3723: note = Description of Artificial Sequence: Synthetic coding sequence
  source 1..3723: mol_type = other DNA
atgcggagtcgttctaactccggcgtccgcctggatggttacgcacgcttggtacagcaaacaatcctatgtcaccagaatcctgtcactggactcctgccagcctcctatgaccagaaggacgcctgggtcagggataacgtgtatagcatcctggccgtgtggggactcgggctagcatataggaagaacgcggatcgagacgaggataaggcaaaagcctatgagctcgagcagtccgtagtaaaactcatgagggggcttttgcactgcatgatcaggcaagtggataaagtggagtcgttcaagtatagccaatcaacaaaggatagtctgcacgctaagtacaataccaagacctgtgctacagtggtgggggatgaccagtgggggcacctacagcttgatgcaacctcagtttacctcctgttcctcgctcagatgacagcaagtgggctccacatcatccatagcttggacgaagtcaactttatccagaaccttgtgttttatatcgaggccgcttacaagaccgccgatttcggaatatgggaaagaggcgacaagaccaatcagggtattagcgagctgaatgcttcttcagtggggatggcaaaggccgctttagaagctctcgatgagcttgacttgttcggcgtaaagggtggcccacagtcagtgattcatgtgcttgccgacgaggttcagcactgccagtcaatccttaattccctgttgccacgagccagtacctcaaaagaagtcgatgcctctttgctgtcagtggtctcttttccagcttttgcagtagaagatagtcagcttgtagagctgacgaaacaggaaattatcaccaagctgcagggaagatacgggtgttgtcggtttctgcgagatggctacaaaaccccaaaagaggatcctaatagattatactacgagcccgcagaactgaagctattcgaaaacatcgaatgcgagtggcctttattttggacatatttcatattggacggtgtcttcagtgggaacgccgaacaggtgcaagagtacaaggaagccctggaggccgtgctcattaaggggaagaatggagtccccctgcttccagagctgtattcagtacccccggaccgggtagatgaagagtatcagaacccccatacagtagaccgtgtccctatggggaaactgcctcatatgtgggggcagtctttatacatcttaggtagtttgatggccgagggcttcctagccccaggcgaaatcgaccccctcaacaggaggttcagtacagtcccaaaaccagacgtggtggtacaggttagcatcctcgctgaaactgaagagattaaaacaatccttaaggacaaggggatctacgttgaaacaatcgctgaggtatatccaatccgggtgcaaccagctagaattctttcccatatctatagttccctagggtgtaataatcggatgaaactgagtggcaggccctacaggcacatgggtgtgctggggaccagcaagctttacgacatccgcaaaactatatttacctttacaccccagttcatcgatcagcagcaattttatctcgccctggacaacaagatgatcgtagaaatgcttaggactgatttgtcttacctctgcagcaggtggaggatgacaggccagcccaccattacattccctatcagtcacagtatgctagatgaggacggcacaagtctcaattcttctattctggcggctcttcgtaagatgcaggacggatacttcggcggtgctagggttcagacaggtaagctgtctgaattcttgacaacatcttgctgcacacacctgagctttatggatcctggccctgaagggaagctgtattctgaggactacgacgacaattatgactatctggaatctggaaattggatgaacgactacgattcgacaagtcacgcccggtgtggcgacgaagtggccagatatctagatcacctactggcacacacagctccccatccgaaattggcccctaccagccaaaagggcggtctggatcgcttccaggccgctgtgcaaaccacatgtgacctgatgagtctcgtaaccaaagccaaagagctacacgtacagaatgtccacatgtacctccccacaaagttattccaggcctctcggccaagctttaacctgttggactctccgcacccgcgccaagagaatcaggtcccctctgttcgggttgaaatccatctgcccagagatcagagcggagaggtggactttaaggccctggtgttgcaactgaaagaaacatccagtctgcaggagcaggctgacatcctgtacatgctatatactatgaagggaccagattggaacacagaattgtataatgagcggtcagcaacagtaagagaattgctaacggagttgtatggtaaggtaggcgagatccggcattggggcctcattcggtatatcagcggtattctgcgtaagaaggtagaggccttggatgaagcatgtacagacctcctaagccatcagaagcacctgacagtcggactgcccccagaaccaagggagaaaacaatctccgcaccattgccctacgaagccttgactcagcttatcgacgaggcctccgaaggtgacatgagtatcagcattctgacacaggaaattatggtctatctcgccatgtatatgaggacccagcccggcctctttgcagaaatgttccgcttgcgaatcgggcttattatccaagtcatggccaccgagctggctcacagccttagatgttccgcagaggaggccactgaaggccttatgaatctgtctccgtcggctatgaagaacttactgcatcatattctgagcgggaaagagttcggtgtagaaagatcagtccgaccgactgatagtaacgtctccccagccattagtatccatgagattggtgcagtcggggccaccaagactgagcgaacgggaattatgcagttgaaatctgagatcaaacaagtggagttcaggaggctatccatttctgcagagagccagtctaacggcggtcacccactaggcatcgacttaatgagtccttctttcatgtcaccgggtactagcatgacgcccagcagcggcagtttcccttccgcctacgatcagcaatcaagcaaggattccagacagggccagtggcagcgaagaagaaggctcgacggggccttgaatcgagtccccgtgggattctaccagaaggtctggaaggtcctacagaaatgccacggactctccgttgagggattcgtgctcccctcttcgaccactcgagaaatgacgcctggggagatcaagttttccgtccacgtcgagtcagtcttgaacagggtgccccagcccgaatataggcagctgcttgtcgaggcgattttggtgctcactatgctggcagacatagagatacactcaatcggcagcatcattgccgtggagaagatcgtgcacatcgctaacgacctgtttctgcaagaacagaagaccctcggcgctgatgacactatgctcgctaaagatccagcctccggaatatgtacactactttatgattctgctccttccggcagattcgggaccatgacatacttatcgaaagccgcggccacctacgtccaggagttcctaccccattccatctgcgccatgcagtag

SEQ ID NO: 128832 - DNA, 3672 bp, synthetic construct
  misc_feature 1..3672: note = Description of Artificial Sequence: Synthetic coding sequence
  source 1..3672: mol_type = other DNA
atgcgttcccgcagtaactcaggagttcgcctggacgggtacgccagacttgttcagcagaccattctttgtcaccaaaaccccgtaaccggacttcttcccgcctcttatgaccaaaaggacgcctgggtgagggataatgtctactccattttagctgtgtgggggttagggctggcttaccgcaagaatgctgaccgcgatgaggataaggctaaagcctacgaactggagcaatcagtggtaaaactcatgaggggcctacttcattgtatgattcggcaggttgacaaggtcgagagttttaagtactcccagagcacaaaagatagtctgcatgctaagtacaacaccaagacatgtgcgacggtggtgggggacgatcagtggggccacctccagttagatgcgacttccgtgtatctgctgtttctcgcacagatgaccgcgtcaggtctgcacattattcactccctggacgaggtgaacttcattcaaaacctcgtgttctacatcgaggctgcctacaagacagcagattttggcatctgggagcgtggagataagaccaaccaggggatctcagagctgaacgccagctcagtgggaatggcaaaggccgctctggaggccctcgatgagctcgacctgtttggagtgaaggggggccctcagtctgtgatacatgtgcttgccgacgaagttcagcactgccagtccatcctgaacagtctccttcccagagcttctacgtccaaggaagtcgacgcctctctgctctcagtcgttagctttcccgctttcgctgtcgaagactctcagctggttgagctcacaaagcaggagatcatcaccaagctccagggacggtatgggtgttgccggttcctccgtgatggctacaagaccccaaaagaagatccaaatagactatactatgagcccgctgagctgaagctgttcgaaaacatcgagtgcgagtggcccttgttctggacatatttcatcctggatggagtgttttccggtaacgctgagcaggtacaggaatacaaggaagctttggaggcagtgctcattaaaggaaagaatggagtgcccttgctaccggagctttactccgtgcctccggaccgagtggacgaggaataccagaatcctcatacagtggaccgagtgcctatggggaaattgcctcatatgtggggtcaaagcctctacatactgggatcgctgatggccgaaggatttctggctcctggagagattgacccactgaatcgcaggttttcgacggtgcccaagcccgatgtcgtagtgcaagttagcatactggcggagacagaagagatcaaaacaatcctcaaagataaggggatctacgtggaaacaattgctgaggtgtatcccatcagggtacagcccgctagaatcttgagccatatttactcttctctggggtgtaacaacagaatgaaactgtctgggcgtccttaccggcacatgggggtactcgggacttcaaagctttacgacatcaggaaaactattttcactttcacccctcagttcatcgaccaacagcagttctatctggcactggacaataaaatgatcgtcgaaatgcttcgtactgatctctcctacctgtgtagtaggtggaggatgacggggcagccaacgatcacatttcccatcagccactccatgctggatgaggatggcacttccctgaactcctccatcctggctgcattgcgcaagatgcaggacggttatttcggcggagccagagtgcagaccggaaaactgagtgaattcctgactacatcatgttgtactcacctcagttttatggatcccgggcctgagggcaagctatatagcgaggattatgatgacaactatgactatctagagagcggcaattggatgaatgactatgattctacgtcccatgcccggtgtggagatgaagtcgcccgatatcttgatcacctgctggcccacacagctccccatcccaagctggcgcctacttctcagaaaggcggactggacagattccaggctgcagtgcaaaccacctgcgacctcatgtcactggtaaccaaagccaaagaactacacgtgcaaaatgtccacatgtacctacctaccaagctgttccaagcctctcggccgtctttcaaccttctggattcacctcatccaagacaggagaaccaggttccaagcgtgcgtgtcgaaatccatctcccacgggaccagagcggagaggtggatttcaaggccctcgttcttcaattgaaagagacgtcaagcctgcaggaacaagccgacatactgtatatgctgtacaccatgaagggccctgattggaacacggaactttacaacgaacgctcggccacggtgcgcgaactcttgacagagctgtatggaaaggtgggtgagatacgtcattggggcctgattcgatatatttctggtattctcagaaagaaagtggaggccctggatgaggcttgcaccgacctcctgtcccaccagaaacacctgacagtcgggctcccgccagagccaagggaaaagactatctcggcacctctgccttacgaggctctgacccagctgattgatgaggcttcggagggtgacatgtctatctcaattttgactcaggaaatcatggtctatctcgccatgtacatgaggacacagcccgggctgttcgccgagatgttccggctgcgcatcgggctaataatccaggtaatggctaccgaactggctcacagcctgcgctgtagtgccgaggaagcaaccgagggtttaatgaacttaagccctagcgcgatgaagaatcttttacatcatatcctgagcggaaaagaattcggcgtcgaacggtctgtccgcccaaccgactcaaacgtttcccctgctattagcatccacgagatcggggccgtgggagctacaaagacggagaggactggaattatgcagcttaagtctgagataaaacaggtggaattcaggagactctctatcagcgccgagtcccagagcccgggcacctcaatgaccccatccagcggttcctttccatccgcttatgaccagcagagttcaaaggactctagacagggccagtggcagcgtaggcggcgcctcgacggagcactgaatagagttcccgtgggtttctaccagaaggtgtggaaagtgctgcagaagtgccatggactctcagtggagggattcgttttgccaagctcaaccacacgcgaaatgacacccggcgagattaaatttagcgtccacgtggagagtgtgctgaatagagtgccgcagccagaatacagacaactcctggtcgaagccattcttgtcctgacaatgttggctgatattgagattcactctatcggatcaatcatagccgttgagaagattgtccacatcgccaatgatttgttccttcaggaacagaaaactcttggcgccgatgacaccatgctggccaaggatcccgctagcgggatttgcacgctcctctacgacagtgcgcctagcggtaggttcggcaccatgacttaccttagtaaggctgccgccacctatgtgcaagagtttctccctcactccatctgtgctatgcaatag

SEQ ID NO: 128833 - DNA, 3546 bp, synthetic construct
  misc_feature 1..3546: note = Description of Artificial Sequence: Synthetic coding sequence
  source 1..3546: mol_type = other DNA
atgaggtcaagatctaactcaggagtccgcctcgacggctacgcgcggctggtgcagcagacaattctctgtcaccaaaatccagttactggtctactccctgccagctatgaccaaaaagacgcatgggtacgagacaatgtgtactcgattctcgctgtgtgggggctcgggttagcgtatagaaagaacgcagacagagatgaagacaaagccaaggcgtacgagcttgaacagagtgtggtgaagttgatgaggggcctccttcactgtatgattcgacaagtggacaaggtggagtcgtttaaatactcacaatccacaaaagatagcttgcatgccaagtacaacacgaagacttgcgctaccgtggtgggtgatgatcagtggggccatctgcagctggacgccaccagcgtttacctgctgtttttggctcagatgactgcatctgggctgcacatcattcactccctggacgaagtcaattttatacagaatcttgtcttctatattgaggcggcctataagactgctgactttggcatttgggagcggggggacaaaacgaatcaaggaatttctgaattgaacgcctcctccgtcgggatggccaaagctgccctcgaggccttggatgagctggacctgtttggtgtgaaagggggtccacaaagtgtcattcacgtgcttgccgatgaagtgcagcactgccagtcaattctcaactctttattaccgagagcatctaccagtaaggaggtcgacgccagccttttgagtgtggtgagctttcccgcatttgctgtggaggactctcagctcgtagagcttaccaaacaggagatcatcaccaaattacagggtaggtatggttgctgcaggttcctcagagacggctataaaacccccaaggaagatcccaatcgtctgtactatgaaccagccgagctgaagctgtttgagaatatagagtgcgagtggcctcttttttggacctattttatcctggatggcgtgttctctggaaatgcggaacaggttcaggaatacaaagaggctctcgaggccgtgctgattaaagggaaaaacggggtgcccctgttgcctgagttatacagcgtaccaccagatagggttgatgaagaatatcagaatcctcataccgtggaccgcgtcccgatgggtaaacttccccacatgtggggccaatccctgtatatcctgggcagtctgatggcggagggcttcctggctccgggcgaaattgatccgctaaaccggagattctcgacggtaccaaagccggacgtggtagtgcaagtcagcatcttagctgagaccgaagagattaagactatcctaaaagataagggtatttatgtcgagaccatagccgaggtctatcccatacgggttcagccagctaggatcctcagtcatatatacagtagtctgggctgtaacaataggatgaagctttccggtcggccatatcgccatatgggcgtattaggaactagtaaactctacgacattcgcaagacgatttttacttttacaccacaattcatcgatcaacaacagttttatttggccttagataataagatgatagtggagatgctgcgcaccgatctgtcatatctgtgctccaggtggagaatgaccgggcagcctacgatcacatttccaatcagccattcaatgctggatgaagatggaacaagcctcaattcttctatccttgcagccctcaggaaaatgcaagacgggtacttcggcggtgccagagtgcagaccggcaagctgtccgagttcttaacgacctcatgttgcactcacctaagcttcatggatcccgggcccgaaggaaagctttatagcgaggattacgacgataactacgattacctcgagagtggcaattggatgaatgattatgactcgacgagtcacgatgtacacatgtatctccccacaaagctgtttcaggcttcacgaccaagctttaacttactcgactctccacacccacggcaggaaaatcaggttccctctgtccgcgtcgaaatccacctaccgcgggatcagagcggggaagttgactttaaagcattggtcttgcagttgaaggagacatcctctttgcaggaacaagcggacatcctttatatgctttataccatgaaagggccagattggaacacagagctgtataatgaaagatctgcaactgtacgggaacttctgaccgagctctatgggaaggttggagaaatccggcactggggattgatccggtatattagcggaattctgcgtaagaaggtagaggcattggatgaagcctgcaccgacttgcttagtcaccagaagcatctgactgttggattgccgcccgagccacgcgaaaaaaccatctccgctcctctgccttatgaggccctgacacagctgattgatgaggcctccgagggtgacatgtccatatctatactcacacaggaaatcatggtgtatctagcgatgtacatgaggactcaacccgggttattcgcagagatgtttcgtctccgcatcgggttgatcatccaggtaatggccaccgaactcgcgcactcactccggtgcagcgctgaagaggctacagaaggattgatgaatctatctccttcagcaatgaaaaatctactccaccacatcctaagcggtaaggaattcggagtcgagaggtctgtgagacccactgactccaacgttagccctgccatttctatccacgagattggcgcagtgggggctactaagacagagcgaacgggcataatgcaactgaagagtgagatcaaacaggttgaatttcgaagactgtctattagtgcagagagccagtcaaacgggggccatcctttgggaattgatctgatgtcacctagctttatgagccccggtacaagtatgacacctagtagcgggagcttcccttctgcctacgaccagcagtcttcaaaggacagccggcagggccagtggcagaggagaaggcggctggacggagccttgaatagggtgcccgtgggcttctaccagaaagtttggaaggtgctgcaaaagtgccacgggctgagcgtcgaaggttttgtccttcctagttctacgacacgggaaatgaccccaggtgagatcaaattcagcgttcatgtggagagtgtgcttaatagggtccctcagcccgaatatcgccagcttctcgtggaagccattctcgtgctcacaatgctggcagacattgaaatccactccatcggaagcatcatcgccgtcgagaagatcgttcatatagcgaatgatctctttctacaggaacagaaaactctgggcgcggatgacaccatgctggccaaagaccctgcctcagggatctgtacgctgctgtatgactcagccccttctggccgttttgggaccatgacatacctgtctaaggctgccgctacatacgtacaggagtttctgcctcatagcatttgcgcaatgcagtag

SEQ ID NO: 128834 - DNA, 3456 bp, synthetic construct
  misc_feature 1..3456: note = Description of Artificial Sequence: Synthetic coding sequence
  source 1..3456: mol_type = other DNA
atgcgctcccgatctaactctggtgtgcgcctggatggctatgcaagacttgtgcagcagacaattctttgccaccaaaatcccgtcaccggtctgctccccgcttcctatgatcaaaaagacgcctgggtgcgagataatgtctacagcatactggccgtctggggtctgggactcgcgtatcggaagaacgcagacagggacgaggacaaggccaaagcctatgaactcgaacagtccgtagtcaagctgatgcggggactgcttcactgtatgattaggcaggtagataaagttgagtcttttaaatacagccagagcacgaaagattccttgcacgccaaatacaacaccaagacctgcgctaccgtcgtgggagatgatcaatggggccatctgcaattagacgcaacctctgtctacctcctgttccttgcccagatgaccgcttcgggcttgcatatcatccactctctggatgaggtgaattttatccagaatctggtgttctacattgaggctgcctataaaactgcggatttcggcatatgggagagaggcgacaaaacaaatcagggtataagcgagcttaatgccagctctgttggaatggccaaggcggcgctggaggccctcgacgagctggacttgtttggggtcaagggcggccctcagagtgttatacacgtgctcgctgatgaggtgcagcattgccaaagcattctcaacagtctgctgcccagagcgagtacctctaaagaggtcgacgccagccttttaagcgtggtatcatttcctgcattcgcggtggaggatagtcagctggtagaacttaccaagcaggagatcataactaagttgcagggaagatacggatgctgccgcttcctcagggatggatataagacccctaaggaagatccaaacagactatactacgagcctgctgagctgaagttattcgagaacatcgagtgcgaatggccactcttctggacctatttcatcctggacggcgtgttcagtggtaacgcagaacaggtacaggaatataaggaggccttggaagcagtgctcatcaaggggaagaacggggtgcccttgctacccgagttgtacagcgtgcccccagatcgagttgacgaggaataccagaatccccacaccgtcgaccgcgttccgatggggaagctccctcacatgtggggccaatctctgtacatcttggggtcgctgatggccgagggtttcttagccccaggcgaaattgatccattgaaccggcggttctctacagtgcccaaaccagacgtcgtggttcaggttagcattctggccgaaacggaagagatcaagaccattttgaaggataagggcatctatgtggagactattgcggaggtctaccctattcgggtgcaaccagctcgaattttgtcgcacatctattctagcctaggctgtaacaacaggatgaaactgagcggtcgcccttatcgccatatgggagttctgggtacttctaaattatacgacatacggaaaacaatatttacattcacgccccagttcattgatcagcagcagttttatctcgcactcgataacaaaatgatcgttgagatgctgagaaccgaccttagctatctatgcagtcgctggcggatgacgggacagcctaccattactttccccattagccacagcatgctggatgaagatggtacatcactgaattcctcgattctcgccgcccttaggaagatgcaggatggttatttcggaggtgctcgcgttcagactgggaagttgtccgagtttctcacaacatcatgctgcactcatctctcctttatggatcccggacctgagggcaaactctacagtgaagattacgacgataactatgattatctagaatcgggaaactggatgaatgattacgactcgacttctcacgacgtccacatgtacctccctacaaagctgttccaagcgtcccggccatccttcaacctgctggattcaccccatccacgacaggaaaaccaggtgcctagtgtgcgcgtggagattcacctccccagggatcagagcggagaagtcgatttcaaagctctggttttgcagctgaaggagacttctagccttcaggaacaggctgatatcctgtacatgctgtacactatgaagggtcctgactggaataccgagctgtataacgagcgaagcgccacggtgcgcgagctgcttaccgagctatacgggaaggtgggagaaatccgacactggggcctgatccgatacattagcggcatcttgcggaaaaaagtggaagccctggacgaagcatgtacagacttgctgtcccatcagaagcacctcactgtaggactgccaccagagcccagggaaaagaccattagcgccccactgccttacgaagccttgacccagctcattgatgaagcttctgagggagatatgagcatctccattctcacacaggagattatggtttatctggccatgtacatgcgcacccagcccggattgtttgctgaaatgtttcggctgcgcataggattgatcatacaggtcatggcgaccgagctcgcccattcattacgttgcagcgcggaggaagcgacagagggccttatgaatctctctccatcagctatgaaaaatctgttgcaccatatactttccggcaaagagttcggagtagagcggagtgtcaggcctaccgattccaatgtgtcacctgccattagtattcatgagattggagcggttggggccacaaaaacagaaaggacagggatcatgcagttgaagtcagagataaagcaaagtcctggcaccagcatgacaccatcctctggctccttccctagcgcttacgaccaacagagctccaaagattctagacagggtcagtggcagcggcggcgcaggttggacggagcacttaacagagtgcctgtcggcttttaccaaaaggtgtggaaggttctgcagaagtgccacgggctctcagtagaaggatttgttctcccatcatcaaccacacgcgaaatgacccccggcgagataaaattcagcgtgcacgtggagagcgtgctgaaccgagtaccccagccagagtatcggcagctgcttgtcgaagccatcctcgttctgactatgttggcagacattgaaatacactccataggttccatcattgctgtggaaaagattgtccatattgcgaatgacttgtttttgcaggaacaaaagaccctgggtgctgatgataccatgttagccaaagatcctgcctccggcatctgtacgctcctttacgattctgcacccagcggccggttcgggacaatgacctacctgtcaaaggccgccgcaacttacgtccaagagtttttgccacactcgatctgtgcaatgcagtag

SEQ ID NO: 128835 - DNA, 1164 bp, synthetic construct
  misc_feature 1..1164: note = Description of Artificial Sequence: Synthetic coding sequence
  source 1..1164: mol_type = other DNA
atgacacgggatgaggcccttcccgactctcattctgcacaggatttctatgagaattacgaacccaaagagatcttggggagaggggtgtccagtgtcgtgcgacgttgtattcataaaccaacttcccaggagtacgcagtcaaggtcatagatgtaaccggcgggggatcattcagccccgaagaggtgagggagttaagagaggccaccctcaaggaggttgatatactacggaaggtctccggacaccccaacattatccagctaaaggatacctatgagacaaacaccttcttcttcttggtgttcgatctgatgaaaagaggggaactgttcgattatctgacagaaaaggtgacgctatccgagaaagaaactaggaaaattatgcgcgccctcctcgaggtgatctgtactctgcacaagctcaatattgtgcatcgggacttgaagcctgagaatatcttgctcgacgacaacatgaacatcaagctgaccgacttcggattttcttgccagctggagcctggggagagactgcgtgaggtgtgcggaaccccctcatatctggctcctgagattatcgaatgctcaatgaacgaggatcatcccgggtacggaaaggaggtcgatatgtggtccacaggcgtcattatgtacacactcctcgccgggtctccacccttctggcaccgcaagcagatgctgatgttacgcatgatcatgagtggcaactatcaatttgggtctcctgagtgggacgactacagcgacactgttaaggatcttgtgtcacggttccttgtcgtccagccgcagaaccggtacacggctgaagaagccctcgcacatcccttttttcaacagtatctggttgaggaagtgcggcacttttctcctcgcggtaagtttaaggtgattgcactgacggtgctggcttcagttcggatctactatcagtatcgtagggtgaaaccagtgaccagagagatcgttatcagagatccgtacgccctgagaccactcagacgcttaattgacgcttacgcatttcgcatttacgggcactgggtcaaaaagggccagcaacaaaatagggccgcgttattcgagaatacgcccaaggcagtgctgctttccctggctgaggaagattattag

SEQ ID NO: 128836 - DNA, 1260 bp, synthetic construct
  misc_feature 1..1260: note = Description of Artificial Sequence: Synthetic coding sequence
  source 1..1260: mol_type = other DNA
atgactcgtgacgaggccctaccagattctcactccgctcaagatttttatgagaactatgaacccaaagagatcctgggccggggtgtctcttccgtcgttcgtaggtgcatccacaaaccaacttcacaagaatacgccgtgaaggtcatagatgttaccggaggaggaagtttctcaccagaggaggttagagaattaagggaggctactttgaaggaggtggatatactacgaaaagtgtctggacaccccaatatcattcaactcaaggacacgtatgagaccaacacgttttttttcttagtctttgacttgtgggaggataccgataccatggagatggaacagaaatggtgtcttggatgggattctccaaagtcaacaaacttcagagcccaggggcgcgctcgaatgaagagaggggaactgttcgattatctgacagaaaaagttaccctctctgagaaggaaacaagaaaaatcatgagagcactgctggaagtcatttgcaccctgcacaagttgaatattgtgcatagagaccttaagccggaaaacatccttttggatgacaatatgaatataaaactgacggatttcggcttctcctgccagctggagccaggggaaaggctgcgggaagtatgtggaacaccttcttatctagctccagagatcattgaatgttccatgaatgaggatcatccagggtatggaaaggaagtagatatgtggtctacaggcgtgatcatgtatactctgttggctgggtccccccctttttggcatcgcaaacagatgttgatgttaagaatgatcatgtctgggaactaccaattcggatctccggaatgggacgactacagtgacaccgttaaagacctggttagtcgtttcctagtggtccagccccagaatcggtatacggcagaggaagccctggctcatccattctttcaacagtatttggtagaagaggtacgccacttcagcccaagaggaaaatttaaggtgattgctcttacagtgttggcctccgtacgtatctactatcagtaccgccgagttaaacccgtgaccagggaaatcgtgatccgcgacccttatgctctgaggcctctgcgccgcctcattgatgcttacgctttcaggatctacggtcactgggtaaaaaagggccagcagcagaaccgggccgcgctatttgagaacacacccaaagcggtcctgctgtccctggccgaggaggactattag

SEQ ID NO: 128837 - DNA, 1002 bp, synthetic construct
  misc_feature 1..1002: note = Description of Artificial Sequence: Synthetic coding sequence
  source 1..1002: mol_type = other DNA
atgcatccacaggcacacgagccgggggtgcgacgggaagggcatcggcgtcatagatggcggcagttgcagcctggtggaggagctggcgctgctcgtagccacgctgagggcggcggacaccctgcccagggcctgcgcgcccctcagcatcagatgaaacgtggtgaactgttcgactatcttacagaaaaggtaaccctgagtgaaaaagaaacccggaagatcatgcgggctctgctggaagttatctgtacactccataaactcaacattgtgcaccgggacctgaagcctgagaacatactcttggatgataacatgaacattaagctaaccgactttggattttcctgccagcttgaaccgggggagagattacgggaagtctgcggcacgccatcgtacctagctccagagataattgaatgttcaatgaatgaagaccaccctggatacggcaaggaggtggatatgtggagcactggggttatcatgtacaccctgttggccggcagcccaccattctggcaccgcaaacagatgctgatgctccgcatgattatgtcaggcaactaccagtttggctctcctgaatgggacgactattccgataccgtcaaggacctcgtttcccggttcctagtggtgcagcctcaaaatcgctacaccgcggaagaggcgcttgcccatccattttttcaacagtatctcgtggaggaagttagacacttctcccctagaggcaagtttaaggtcatagctttaaccgtgttggcgtccgtgagaatttactaccagtatcggagggtcaaacccgtgaccagggagattgtcattagagatccatacgcactgcgccccctgagaaggcttattgacgcgtacgccttccggatttatggccactgggttaaaaaaggccagcagcagaatcgggcggcgctttttgagaacacacctaaggcagtgctgttgtcactggcggaggaagattattag

SEQ ID NO: 128838 - DNA, 2529 bp, synthetic construct
  misc_feature 1..2529: note = Description of Artificial Sequence: Synthetic coding sequence
  source 1..2529: mol_type = other DNA
atgagccgcccactgagtgaccaagagaagcgtaagcaaatcagcgtacgaggtctggcaggcgttgaaaatgtaacggagctgaaaaagaactttaatcgacaccttcacttcaccctggtcaaggacaggaacgtcgccacaccccgagactactacttcgccctagcacacactgtgagagaccaccttgttggccgctggatccggacacagcaacattactacgagaaagaccctaagaggatatactacctgagcctggagttttatatgggccgcacattacagaacaccatggtgaacctcgctctggagaacgcctgtgacgaggccacttaccaactgggcctggacatggaggagttggaggagatcgaggaggatgctggcctgggaaacgggggcctgggacgactcgctgcttgcttcctggactctatggctactctagggctcgccgcctatggctacgggatcagatatgaatttggaattttcaatcagaagatctccggggggtggcaaatggaggaggctgacgactggctcaggtatgggaatccttgggagaaggccaggcctgaattcactctgcccgtgcatttctatgggcatgtcgaacacacgtcacagggagccaaatgggtcgatacccaagtggtgttagccatgccatatgatacacccgtccccgggtatcggaacaacgtagtgaatacaatgcggctgtggtcagcaaaagcgcccaacgattttaacctgaaggacttcaacgtcgggggctacatacaggccgtgctcgacagaaatctggccgagaatatatctcgggttctctatccaaatgacaacttcttcgaaggcaaagaattacgcctgaaacaggagtactttgtggtagccgcaactttgcaggacatcattcggcgattcaaatcctccaagtttgggtgtcgagatcccgttcgtacaaactttgacgcctttcccgataaagtggcaattcagttgaacgacactcatccctccctcgccatccccgaactcatgaggatattagtggatctggaaagaatggattgggacaaggcgtgggatgtgaccgtccggacttgcgcctacaccaaccacacagtgctgcctgaagctttagagcgctggcctgtgcatctgctggaaaccctgctgccccgccacctccagatcatttatgaaatcaatcagcgctttctgaatagagtggccgcagcatttccaggtgatgtcgatcggttacgacggatgagcctggtcgaggagggcgcagtgaaaaggatcaacatggcccacctatgcatcgcaggctctcacgcggtgaatggggtggcaaggatccattcggaaattttgaaaaaaaccatcttcaaagacttctatgagctggaaccgcacaagttccagaataagaccaatggcattacgccaagacggtggctggtgctgtgtaatcccggtctggcagaggtgatcgccgagcggatcggggaggatttcatcagtgatctcgaccagctcaggaaactcttgagctttgtagacgacgaagcctttatccgagatgtcgctaaggtgaaacaggagaataagctcaagttcgcggcatatcttgaaagggagtacaaggtgcacatcaatcccaactcgttgtttgatatacaagtgaagaggatccacgaatataaaaggcagctgctgaactgccttcacgtgattacactgtacaataggatcaaacgagaacctaacaagttctttgtcccccgcacagtgatgattggcggaaaggcagcccctggctatcacatggcaaagatgataataaggctcgtgacagcaatcggtgacgtggtgaaccatgatcctgccgtcggagatcggctgcgcgtcatctttctagagaattatcgggtctccctggccgaaaaagtcattcctgccgccgacctaagcgagcagatatccactgcggggactgaggccagtggcaccgggaacatgaaattcatgctcaacggagcactgacaatcgggaccatggatggtgcgaatgttgagatggccgaagaggcgggggaagaaaatttttttatctttggaatgcgggtagaggatgtagacaaactggatcaaagaggttacaacgcacaggagtactatgaccggattcctgaactcaggcaggtcattgagcagctttcatccggcttcttctcacctaagcagcctgacctgtttaaagacatagtaaatatgcttatgcaccatgacaggtttaaggtgtttgccgactacgaggactacattaaatgccaggagaaagtgtccgccttgtataagaaccccagagaatggactcgtatggtgatcagaaacatcgctacttccggcaaatttagtagcgaccgcacaattgcccagtatgctcgggagatctggggagtggagccctctcgtcagaggctacctgcgcctgacgaagccatctag

SEQ ID NO: 128839 - DNA, 2499 bp, synthetic construct
  misc_feature 1..2499: note = Description of Artificial Sequence: Synthetic coding sequence
  source 1..2499: mol_type = other DNA
atgtctcggccactctcggatcaggagaagagaaaacagatttctgtccgggggctggcgggggtcgaaaacgtcaccgagcttaaaaagaacttcaacagacacctgcatttcacacttgtgaaggatagaaatgtggctactccaagagactactacttcgcgctggctcacaccgtaagggaccacctggtgggacgatggataagaactcagcagcattattatgaaaaagatccaaaaagaatttactaccttagcctcgagttttatatgggacggactttgcaaaatacaatggtaaacctggctctggaaaacgcctgtgacgaggccacctaccaggttgggttaggcagattagctgcctgtttcctggactctatggctactctcggcttagccgcctatgggtatgggatccggtacgaattcggcatcttcaaccaaaaaataagtggagggtggcagatggaggaggccgacgattggctccgatacggcaacccctgggaaaaggccagacccgaattcacactgcctgtacatttttatggacatgtggaacacacgtcacagggggcaaagtgggtggacacacaggtcgtcctcgcaatgccatatgacactcctgtgcccggctacaggaacaacgtggtgaataccatgagactgtggtcagcaaaggcccctaatgacttcaacttgaaagacttcaacgttggcggttacatccaggctgtcctcgaccgtaatttagctgagaacatatctcgtgtgctctacccaaacgacaacttttttgaaggcaaggaactcaggcttaaacaggagtactttgtggttgccgccacccttcaagacataatcagaaggttcaagagtagcaagtttggttgtagagacccagtgagaaccaatttcgatgcattcccagataaagtggcgattcaactgaatgacactcacccttctctcgcaatacccgaattaatgcgtattttggtggatctcgaacgcatggactgggataaagcttgggacgtgacagtaaggacatgcgcctacacaaatcacactgttttaccagaagctttggagcgctggcccgtgcacctgctggaaactctgctacccagacaccttcagatcatttatgaaattaaccagcgattcctgaatagagtagccgccgctttccccggggacgttgatcgtttaaggaggatgtccttagtggaggaaggggctgtgaaacgaattaacatggcccatctctgcattgcagggtcccacgcagtcaatggagtggccaggatccattccgagatcttaaagaagaccatatttaaagacttctatgagctggaaccccataagtttcaaaataagacgaatggcataacaccgcggcgttggctcgtcctctgcaatccaggtctcgccgaggtgatcgccgaacgtatcggcgaagattttataagcgacctcgatcagctcaggaagctgctgagctttgtcgacgatgaagctttcattcgagacgtggcgaaggtgaaacaggaaaataaactgaaatttgccgcctacctggagcgagaatacaaggtccacatcaatccaaacagtttgtttgacattcaggtgaagcggatacacgaatacaaacgtcagttgctgaactgtctgcatgttataacactgtacaatagaattaaaagggagccaaataaattctttgtgcccaggacggttatgattggagggaaggccgcacccgggtatcacatggccaaaatgataattcgactggtgactgctattggtgatgtggttaaccatgatccagcagttggcgatagactgcgggtgatattcctggaaaactacagagtgtcgctcgcagagaaggtgatccccgcagccgacctctcagagcagatctccaccgccggaaccgaagccagtggcaccgggaacatgaagttcatgctcaatggcgctctcactatcggcactatggacggggcaaacgtggagatggcagaagaagcaggcgaagagaattttttcatcttcggaatgcgggttgaggacgtggacaaactggaccagagagggtataacgcccaggaatactacgaccggattcctgagctgcggcaagtgatagaacaactaagtagtggtttcttctcccccaagcagccagatctcttcaaggatatagtgaatatgctgatgcaccacgaccgctttaaggtcttcgctgactatgaggattacatcaaatgccaagaaaaggtctcagcgctttataagaatcctcgggagtggacaaggatggtgattagaaatatcgcaacctcagggaagttttcctccgaccgaaccatcgctcagtacgccagggaaatttggggagttgagccatcccggcagcgattacccgcccccgctccccacgcagagggcggagtgttagagctcgacctttag

SEQ ID NO: 128840 - DNA, 1425 bp, synthetic construct
  misc_feature 1..1425: note = Description of Artificial Sequence: Synthetic coding sequence
  source 1..1425: mol_type = other DNA
atggctaccaactggggaagtttactgcaggataagcaacaactcgaggaactcgctagacaggcagtggatagagccctggccgagggagtgctgctccggacgtcccaagagccaacttcatcagaggtcgtgtcttacgctccgttcacgctgtttccttccctggtcccctcggccttgctggaacaagcttacgcggtgcagatggactttaacctccttgtggatgccgtgtctcaaaatgctgctttcctggagcaaactttgagtagcacaattaaacaggacgatttcaccgctagactttttgatatccataagcaggtgctaaaagagggaatcgcccagactgtattcctgggcttaaatcgaagcgattatatgttccagaggtccgctgacgggagtcccgctcttaagcagatagaaatcaacaccatcagcgctagttttgggggtctggcatcgagaacccccgctgtacacagacacgtgctctctgtgctcagcaagacaaaagaagccggtaagattttgagtaacaatccttctaagggtctcgctctggggatcgcgaaggcttgggagctttacggatcccccaacgccctggtcctcttgatcgctcaggagaaggagcgcaatattttcgatcagcgagcgatcgagaacgagctgctagcccgcaacattcacgtcattaggcgcacattcgaagacatctccgagaagggatccctggatcaggacaggcgcctctttgttgatggccaggagatcgccgtcgtctacttcagagacggttatatgcctcgccagtacagcttacagaactgggaggcccgcttactccttgagaggagtcatgcagcgaaatgcccggacatcgcaacgcaacttgctggaacgaagaaggttcagcaggaactgagtagaccgggtatgttggagatgctcctcccaggccagcctgaggctgtggccagactcagggctaccttcgctggcctgtacagtttggatgtgggcgaggagggcgatcaggcaatcgctgaagcattggccgccccatccagatttgtgttgaaacctcagagagaaggagggggtaacaatctatatggggaggagatggtgcaggcacttaaacagctgaaggactccgaagagagagctagctatatactgatggaaaaaatcgaacctgaaccttttgaaaactgcctgctacggcccggatcgcccgctcgcgttgtgcaatgtatctcggaactgggcatcttcggcgtttatgtaagacaggagaagactttggtcatgaataaacatgtggggcacttactgcggaccaaagctatcgaacatgcagatggaggcgtagcagccggcgtcgccgttttggataacccctacccagtctag

SEQ ID NO: 128841 - DNA, 738 bp, synthetic construct
  misc_feature 1..738: note = Description of Artificial Sequence: Synthetic coding sequence
  source 1..738: mol_type = other DNA
taaaagcaccaccatacagtgccccccagcgtcactcctaaagctctcgatcgcagcccaccctgtccggagatgttcactcgcgccgctcctggttaccacatggctaaactgatcattaaactcgtgaccagcattggggatgtcgttaaccatgatccagttgtcggggacaggctgaaagtcattttcctggaaaattatagggtgtccttagctgaaaaagtcataccggcggccgatctgtcccagcagatttcaacagccgggaccgaggcgtctggaacaggaaatatgaaatttatgcttaatggcgccctgacaattggaaccatggacggcgcaaatgttgaaatggctgaagaagccggagctgagaatctctttatttttggattgcgcgtggaagacgtggaggcgttagatcggaaggggtataatgcacgtgagtactatgaccatcttcccgagctgaagcaggctgtagatcagatctcatccggatttttctccccgaaggagcccgattgtttcaaagatattgtcaatatgctgatgcaccatgaccgttttaaggtctttgccgattacgaggcatacatgcagtgccaggcacaagtggaccaactctacaggaaccccaaggagtggacaaaaaaggtgatccgcaacatcgcctgttccggaaagttttctagtgaccgcaccatcacagagtatgcacgcgaaatttggtag

SEQ ID NO: 128842 - DNA, 975 bp, synthetic construct
  misc_feature 1..975: note = Description of Artificial Sequence: Synthetic coding sequence
  source 1..975: mol_type = other DNA
atggatgctcctcggcaggtggtcaactttggcccaggccctgccaagcttcctcattctgtcctgctggagatccagaaagagctcctggattacaaaggcgtcggcatttccgtcctggagatgagtcacaggtcctccgatttcgctaagattataaataacaccgagaatttagtgagagagttactggccgtgcccgacaactataaggtcatttttctccaggggggggggtgcgggcaattttccgccgtgccgcttaacctgattgggctgaaggccgggcggtgtgccgattatgtggtgaccggtgcttggagtgcgaaggcagctgaagaagccaaaaagttcggaactattaatatcgtccacccaaaattgggaagctacacaaaaatccccgatccttcgacttggaatcttaatcccgacgcctcctacgtttactactgcgccaatgagacagtgcatggagttgaatttgactttattcctgacgtgaaaggggctgtcctcgtctgcgatatgagcagcaacttcctgtccaaacctgtggatgtgtctaaatttggtgttatctttgctggggctcagaaaaatgtggggtccgctggcgtaaccgtggtgattgtgcgggacgacttgctcggcttcgcgctgcgcgaatgtccctcagtgctcgagtacaaagtccaggcaggtaattccagtctgtataacacccccccctgcttcagtatttatgtgatgggacttgtgctggaatggatcaagaacaacggcggagcggccgccatggagaagctgtcgagcatcaagagccaaactatttatgagatcatcgacaatagtcaggggttctacgtgtcggtaggcggcattcgggcctctttgtacaacgcagtcaccatagaagatgtacagaaactcgccgcattcatgaaaaagttcctagagatgcaccagttatag

SEQ ID NO: 128843 - DNA, 1113 bp, synthetic construct
  misc_feature 1..1113: note = Description of Artificial Sequence: Synthetic coding sequence
  source 1..1113: mol_type = other DNA
atggatgctccaagacaggttgttaattttggccccgggcctgccaagctgcctcacagcgtcctgcttgagatacagaaagaactgttggattataaaggagtcggaattagcgtgcttgaaatgagccatcgctcttcagactttgccaaaatcatcaataataccgagaatttagtcagagagctgttggctgttcctgataattacaaggttatcttcctgcagggcggaggatgcggccagttctctgcagtccccctcaacctgattggactcaaggccggacggtgtgccgattacgtcgtgacgggggcttggtccgcgaaagccgccgaggaagctaagaagtttgggaccatcaacatcgtgcaccctaagctggggagctacactaaaattccagaccctagcacctggaatctcaatcctgacgcatcttacgtttattactgcgccaacgagaccgtgcatggcgtggaattcgattttataccggatgtgaagggagctgtgctggtctgtgatatgtcctctaacttcctctctaaaccagtggacgtatctaagttcggggtcattttcgccggtgcccagaagaacgtggggagtgcaggggtgaccgtggtgattgtgcgggatgacctgttggggttcgccctgagagaatgtccttccgttttagagtacaaggtgcaggccggaaactcatctctctataataccccgccctgcttttcaatctatgtcatgggacttgtactggaatggattaaaaacaacggaggggccgcagccatggaaaagttgtcaagcattaaatctcagaccatctacgaaattatcgacaatagtcagggattttatgtatgtcctgtggaaccacaaaatagaagcaaaatgaatatacccttccggattgggaatgcaaagggcgacgatgctctggagaagaggttcctggacaaggcccttgagctcaatatgttatccctgaaaggccatcggagcgtcggcggaatccgagccagcctatataacgcagtcactatcgaggacgttcaaaagcttgctgcttttatgaagaaatttttagaaatgcaccaactgtag

SEQ ID NO: 128844 - DNA, 585 bp, synthetic construct
  misc_feature 1..585: note = Description of Artificial Sequence: Synthetic coding sequence
  source 1..585: mol_type = other DNA
atgtcctcaaacttccttagtaagccagtggacgtttctaagttcggggttatctttgcaggcgcacagaagaacgtgggctcagccggggtaaccgtggtgatagttagggatgatctgctgggatttgcacttagggagtgtcctagcgtcttggagtacaaggtccaggcaggcaatagtagtctatataatacacctccatgcttctcaatttacgtgatgggactggtcctcgaatggatcaagaataacggtggcgcggctgctatggagaagctctcctcaatcaagtcacagacaatctatgagatcattgacaactcacagggcttctatgtctgcccagtggagccccaaaaccgcagtaaaatgaacatccccttccgaatcgggaatgctaagggagacgacgctctggaaaagaggttccttgataaggctctggagctcaatatgctgtcactaaagggacatcgttcggtaggagggatccgtgcgtccctgtacaacgctgtgactatcgaggacgtgcagaaattggctgccttcatgaagaagttcctcgaaatgcatcagctttag

SEQ ID NO: 128845 - DNA, 1050 bp, synthetic construct
  misc_feature 1..1050: note = Description of Artificial Sequence: Synthetic coding sequence
  source 1..1050: mol_type = other DNA
atgtcttctctttctggcaaagtccaaacagtcctgggattggtggaaccttccaagctaggtagaacacttacccacgagcacttagcgatgactttcgattgctgctattgtccccctcccccctgtcaggaggcaatcagtaaggagcctatcgtgatgaagaatttgtattggattcagaagaacgcatatagtcataaggaaaatctgcaactgaaccaagagactgaggcaattaaggaggagctgttgtattttaaagcaaacggaggcggcgcgctagtcgaaaacacaactactggcattagcagggacacccaaaccctgaaaagactggcagaggagactggagtgcatataatcagcggggccgggttttatgtggatgccacccatagtagcgagaccagggcaatgtctgtggagcagttgaccgatgtgctgatgaacgaaatattgcacggagcagacggcacatcaatcaaatgtggaattattggtgaaatcggatgttcatggcccctgactgaatctgagcgaaaggttcttcaggccacagcccacgcgcaagcgcagctggggtgtccggtcataatacatcccggtaggagctcccgtgcccccttccagatcattcgaattctgcaggaggccggcgcagacatctccaaaactgtgatgtcccaccttgatagaactatcctggacaagaaggaattactcgagtttgcacagctcggatgttatctggagtacgaccttttcgggacggagctgctgcactatcagctcggaccagacatcgacatgccagacgacaacaagaggatcaggagggtcagactgctggttgaggaggggtgtgaggatcgtatcttagtggctcacgatatccacacaaagactcgactgatgaaatatggtggacacggttattcgcacatcctaactaatgtcgtccccaaaatgctccttcggggcatcacagagaacgtcctggataagatactgatcgaaaatcctaagcagtggctcacgttcaagtag

SEQ ID NO: 128846 - DNA, 1050 bp, synthetic construct
  misc_feature 1..1050: note = Description of Artificial Sequence: Synthetic coding sequence
  source 1..1050: mol_type = other DNA
atgtccagcctgtccgggaaagtccagactgtcctgggacttgtggaacccagcaagctagggcgaactctcacacatgagcacctggccatgactttcgactgttgttattgtcccccacctccgtgccaggaggccatctccaaggaaccaatcgtgatgaagaacctgtactggattcaaaaaaacgcttattcacataaggagaaccttcagctgaatcaagagacggaggcgatcaaggaagagcttctatacttcaaagccaacggcggtggcgcactggttgagaataccactaccggaatcagcagagacacacagaccctcaagcgtcttgctgaggaaaccggcgttcacatcatctccggcgccggtttttatgtggacgcaacacatagctcagagacaagggcaatgtcagtagagcagctgacggacgtccttatgaacgaaattctgcacggcgccgacggaacttctattaagtgtggtataatcggagagattgggtgcagctggcccttaaccgagtccgaacgtaaagtcctccaggctactgcccatgcccaggcccagctggggtgccccgtgatcatacacccaggacggtcatcccgagcccctttccagattatcagaatcttacaggaggccggcgccgacatctcaaagaccgtcatgagtcacctagaccggacaatcctagataagaaagaactccttgaatttgcgcagctaggatgctatcttgagtatgatctgtttgggaccgagttactgcattaccagctgggcccagatattgacatgcctgacgataataagagaataaggagggtgcgtcttctcgtcgaggaaggttgtgaggataggattttggtggcacatgatatccataccaaaacgaggctgatgaaatatgggggacacggctactctcatattttaactaatgtggtccctaagatgctcttgagaggtattacagagaatgtgttggacaaaatactgattgaaaacccaaaacagtggctgaccttcaagtag

SEQ ID NO: 128847 - DNA, 1050 bp, synthetic construct
  misc_feature 1..1050: note = Description of Artificial Sequence: Synthetic coding sequence
  source 1..1050: mol_type = other DNA
atgagttccctttcagggaaagttcagacagtgctcgggttagtggagccgtctaagctcgggcgcacgctgactcacgagcacctggccatgactttcgactgctgttactgtccaccccccccctgccaagaagccatcagcaaggaacctatagtgatgaaaaatctttattggatccaaaagaatgcttattcacataaggagaacttgcagctcaaccaggagaccgaagccatcaaagaagagttactgtatttcaaagccaacggtgggggggcacttgtggagaataccacgacaggcatctcacgagatacccagacattgaagaggttggccgaggaaacaggcgttcacataatctccggcgccggcttctacgttgatgccactcattcttctgagacacgggcgatgtcagttgaacagctcaccgatgtgcttatgaacgagattttgcatggcgccgacggtacttccattaagtgcgggattatcggagaaatcggctgcagttggcctctaacagagtccgagcgtaaggtcctgcaggctactgcacatgcacaggctcagcttggctgcccagtcattatccaccctggccggagctcacgagccccctttcaaattattcgaattctgcaggaggcaggagcagatatcagcaagacagtaatgtctcatttggacagaaccatactggataagaaagaattgctagaattcgcccagctggggtgctaccttgagtacgacctgttcgggacagagttactccattaccagctgggtccagacatcgacatgcccgatgacaataaacggattaggagagtgcgactactggttgaggaggggtgtgaagatagaattctggtggcccacgatatccataccaaaacaagactaatgaaatatggaggtcacgggtactctcatatcctgacaaatgtagtccctaaaatgctgctgaggggtattacagaaaacgtcctggacaagatcctgatcgagaatcctaagcagtggctcacattcaaatag

SEQ ID NO: 128848 - DNA, 909 bp, synthetic construct
  misc_feature 1..909: note = Description of Artificial Sequence: Synthetic coding sequence
  source 1..909: mol_type = other DNA
atgagctccctgtccggtaaggtgcagaccgttctaggactggttgaaccttctaagctgggccgaactctcacccacgagcatctcgcgatgacattcgactgctgttattgtcctccaccaccatgtcaggaagccatctccaaagagcccatcgtgatgaaaaatttgtactggattcagaaaaacgcctattcgcacaaagagaatttacagctgaaccaggagaccgaggcaattaaggaggagcttctgtatttcaaggccaatggcgggggcgcgcttgtggagaacactactaccggaatatcaagagacacccagactctcaagaggctggctgaggaaactggagtccatattatttctggtgcagggttttacgtagacgctacccattctagtgagaccagggccatgagcgtcgagcagttaacagatgtcctgatgaatgaaattctgcacggcgcggatggcacgtccatcaagtgcgggattatcggagaaattggatgctcctggcccctgacagagtctgaacggaaagtgctccaggcaacagcccatgcacaggctcaacttgggtgcccagtgatcatccatccaggtagaagctctagggcccccttccagattatccgcatcttgcaggaggccggcgccgacatctccaagactgtcatgtcacatcttgacagagtgcgcttgcttgtagaagagggctgtgaggaccggatactcgtggcccacgacatacacactaaaacccgactaatgaaatacgggggccacgggtacagccatattttgaccaacgttgtgccaaaaatgctgttgaggggtatcaccgaaaacgtgctggacaagatactaattgagaatccaaagcagtggctaactttcaagtag

SEQ ID NO: 128849 - DNA, 1050 bp, synthetic construct
  misc_feature 1..1050: note = Description of Artificial Sequence: Synthetic coding sequence
  source 1..1050: mol_type = other DNA
atgtcctctctgagcggaaaggttcagaccgtcctgggattggtggagccttccaagttgggccggaccctgactcacgagcacctggcgatgaccttcgattgttgctattgtcctccccccccctgccaggaagctatttcaaaggagcccattgtgatgaagaatctgtactggatccagaaaaatgcctattctcacaaggagaacctgcaattaaaccaagaaaccgaagcgataaaggaagagcttctgtactttaaagcaaacgggggtggagctctagtagagaacactaccacaggaatttctcgcgatactcagacgctcaagaggttggccgaagaaacaggagttcacatcattagcggtgctggcttctatgtggacgcaactcattcctctgagacccgggctatgtctgtagagcaactcacagacgtgctcatgaatgagatacttcatggggcagacggcacatccattaagtgcggcatcattggcgaaatcggctgtagttggcccctgacagaatcggagcgcaaggtactgcaggcaacagcacatgcccaggcgcaacttgggtgccccgttatcatccatcccggtaggagctcccgcgcaccgttccaaattatcaggatattgcaggaggctggtgccgatatctcaaagactgtaatgtcacaccttgatcggactatcctggacaagaaggaactgttggaattcgctcagttggggtgttacctcgaatacgaccttttcgggacggagctgcttcattatcagctgggcccagacatcgacatgcccgacgataacaaacgcataaggcgtgttaggctgctggtggaggaagggtgtgaagatcggatcctcgtggcccatgacattcacactaagacaaggcttatgaagtacggcggacacggatattcacacatcctaacaaacgtcgtcccaaaaatgttactccgcggaataaccgagaatgtcctggataagatcttgattgagaatcccaagcagtggttaaccttcaagtag

SEQ ID NO: 128850 - DNA, 753 bp, synthetic construct
  misc_feature 1..753: note = Description of Artificial Sequence: Synthetic coding sequence
  source 1..753: mol_type = other DNA
atgttctcactcccattgtctctccccctatgcgaggacaccgcattcttgccgagtaagtgttgcagctcccacaaaaccatcaaacaagcccgcacactcatcatgatctttctcgcttctggtacacacttccagacaatgctgaagtctaagctcaatgtgcttacgctgaaaaaggaaccattgccagcagtgatattccacgaacctgaggcgatcgaactctgcacaaccacccctctcatgaaaaccagaacccactccgggtgcaaagtgacatatcttggcaaagtttctaccactggcatgcaattcttgtctggttgcactgaaaaacctgtgatcgaactctggaaaaaacacaccctggccagagaggatgtcttccccgccaatgcccttctggaaattagacctttccaagtgtggctccaccacctggaccacaaaggtgaagctaccgtgcatatggacacatttcaagtggcgaggatcgcatattgcaccgcagaccataacgtatcccccaacatcttcgcctgggtgtatcgagagatcaacgacgatctgtcttaccagatggattgccatgccgtcgagtgtgaaagcaagcttgaggccaagaaactggcacatgccatgatggaagcgtttaggaagacctttcacagtatgaaatcggacggaagaattcattctaactcaagctctgaggaagtgtcccaggaattggaatcagacgacggctag

SEQ ID NO: 128851 - DNA, 747 bp, synthetic construct
  misc_feature 1..747: note = Description of Artificial Sequence: Synthetic coding sequence
  source 1..747: mol_type = other DNA
atgccaagaatagcaggtaaccacctcatgctagaagaaagccgaacatgttcctcacccgagctccttgatggtgtttggccttgtcagcccctacattttggactccccgcgtccgagatgcactttcaaactatgctcaagagcaagttaaacgtgttaaccctgaagaaagaacccctaccggccgtcatctttcacgaaccagaggctatcgagctgtgcaccactacccctctgatgaaaactagaacacactctggctgtaaggttacttacctgggtaaagtgtcgaccacagggatgcagtttctgtcaggatgcaccgaaaagccagtgattgagctatggaagaaacacacgttagctagagaggatgtgtttccggcgaatgccctgcttgaaattcggccctttcaagtatggctgcaccatctggatcataagggcgaagctaccgtccacatggacactttccaagtggcccgcatcgcatactgcaccgctgatcacaatgtgtcccctaacatctttgcctgggtgtaccgcgaaataaacgatgacctgagctaccagatggattgccacgccgtggagtgtgaatctaagttggaagccaaaaagctggctcatgctatgatggaggcctttcgcaagactttccattcaatgaaatctgacgggcgcatacatagcaactcctctagcgaggaggtgagtcaggagcttgagtctgatgacggctag

SEQ ID NO: 128852 - DNA, 654 bp, synthetic construct
  misc_feature 1..654: note = Description of Artificial Sequence: Synthetic coding sequence
  source 1..654: mol_type = other DNA
atgtggcagcctgcaaccgagagattgcagcacttccagacaatgttaaagtctaagttgaacgtgctcaccctcaaaaaggaacccctgcccgctgtaatctttcacgagccagaggcaattgagctgtgcacgacgacaccactgatgaaaacgcgtacccactccggctgtaaggtgacttatctagggaaggtgtccaccaccgggatgcagttcttaagcggatgcacagaaaaacccgtgatagagctgtggaaaaaacacactctggctagagaagacgtgtttccagcgaacgccctgctggaaatccgcccattccaggtatggctgcaccacttagatcataagggagaggcaacagtgcacatggacacattccaggtggcacgtattgcctactgcacggctgaccacaatgtgagtcccaatatcttcgcctgggtctatagagagatcaatgacgatctttcgtatcagatggattgtcatgctgtcgaatgtgaatcgaagttagaagccaagaagcttgcccatgcgatgatggaggcttttcgcaaaacttttcattcgatgaaatccgacgggcgaatccactcaaactccagttctgaggaggtgagtcaggaattggaaagcgatgacggttag

SEQ ID NO: 128853 - DNA, 507 bp, synthetic construct
  misc_feature 1..507: note = Description of Artificial Sequence: Synthetic coding sequence
  source 1..507: mol_type = other DNA
atgtggcagccagcgacagagcgcttgcaggtgacttacctcgggaaagtgagcacaaccgggatgcagttcctgtccggttgcactgaaaagcccgtcattgagctgtggaaaaagcacactttggcccgcgaggatgtctttcctgctaacgcccttcttgagattagaccgtttcaggtctggctgcatcatcttgaccacaagggagaagccaccgtgcatatggatacgttccaggtcgctagaatagcgtattgtactgccgaccataacgtcagccctaatatcttcgcctgggtctaccgcgaaattaatgacgacttaagttaccaaatggattgccatgcagtggaatgtgaatccaaactggaagccaagaaactcgcccacgctatgatggaggccttcaggaaaaccttccactcaatgaagtcagatgggaggatccacagcaattcctcctccgaagaggtttctcaagagctagaaagcgacgatggctag

SEQ ID NO: 128854 - DNA, 753 bp, synthetic construct
  misc_feature 1..753: note = Description of Artificial Sequence: Synthetic coding sequence
  source 1..753: mol_type = other DNA
atgttctcactaccactgagcttgccgttgtgcgaagacactgcattcctgcccagtaagtgttgttcgagtcacaagacgatcaagcaggcccggaccctcatcatgattttcctcgcttccggcacacacttccagactatgcttaaaagtaagcttaacgtattgacactgaaaaaggagccactgcccgcggtcatcttccacgaacccgaggccatagaactgtgcaccacaacacctcttatgaagaccaggacacattccgggtgcaaggtcacttacttaggcaaggtgtcaaccacagggatgcagtttctgtcaggttgcaccgagaagcccgttatcgagttgtggaaaaagcatacgttggcacgagaggatgtgttccccgcaaatgcactccttgagatacgtccctttcaggtctggctccaccatttggaccacaagggcgaagccacggtccacatggatacctttcaggtcgccaggatcgcctattgtactgccgaccacaacgtgagcccaaacatcttcgcgtgggtgtacagagaaattaacgacgaccttagttaccagatggattgccatgctgtggagtgtgagtccaagctcgaagcaaaaaaactggcacatgcaatgatggaggccttccggaaaacctttcatagtatgaagtccgatgggcgaatacactcaaactctagtagtgaagaggtttctcaggagctcgagagcgacgacggctag

SEQ ID NO: 128855 - DNA, 1017 bp, synthetic construct
  misc_feature 1..1017: note = Description of Artificial Sequence: Synthetic coding sequence
  source 1..1017: mol_type = other DNA
atggagcagcttagagccgcagcgcgcctccaaattgtgctgggccatctgggcagaccatccgccggcgcggtggttgcgcacccaacaagtggtaccatttcatctgccagctttcacccccagcagttccaatacaccctggataataatgtcctcacactggagcagaggaagttctacgaagagaacgggttcctagtgattaagaatctggtgccggacgctgacattcaacgcttccgtaacgagttcgaaaagatttgccgtaaggaggtcaaacccttgggactgaccgtgatgagagacgtaactatttcaaaatcagaatatgcgccaagtgaaaaaatgattaccaaggtgcaggattttcaagaggataaggaactgtttaggtattgcacgctgccggagattctgaaatatgtagagtgcttcacagggccgaacatcatggcgatgcatactatgctcataaataagcctcctgacagcgggaaaaaaacctcccgccaccccctgcaccaggatcttcattattttccattcaggcccagcgacctgatcgtttgcgcctggaccgccatggagcacatttcccggaataatggatgtctggttgtcctgcccgggacgcacaaggggtcactaaaaccccatgattatcccaagtgggaaggtggagtgaacaaaatgtttcatggcatccaggattatgaagagaataaggcaagagtgcatctggtgatggagaaaggagatactgtgttttttcatcctctgctaatacacgggtcaggccaaaataagacacaggggttccgaaaggcaatctcctgccacttcgcaagcgccgactgccactatattgacgttaaaggcacttcccaagaaaatatcgaaaaggaagttgtcggtatagcccacaaatttttcggcgccgaaaactccgtcaatctgaaggatatttggatgttcagggcacggcttgttaagggagagcgaactaatctgtag

SEQ ID NO: 128856 - DNA, 717 bp, synthetic construct
  misc_feature 1..717: note = Description of Artificial Sequence: Synthetic coding sequence
  source 1..717: mol_type = other DNA
atgcgggatgtcaccatatcaaagtccgaatatgctccctccgagaagatgattactaaagtgcaggacttccaagaagacaaagagctgtttcgatattgtaccctgcccgaaatcctgaagtatgtggagtgcttcacgggacctaacatcatggccatgcacaccatgctgataaataagcctccagacagcggtaaaaaaacttcccgccatcctttacaccaggatctgcactactttccctttaggcccagcgacctcattgtgtgtgcctggaccgctatggaacacatttctaggaataatggctgcctggtagttcttcctggcacgcacaaaggcagtctgaagccacacgactaccctaagtgggagggcggggtgaataagatgttccacggcattcaggactatgaggagaacaaagctcgggtgcatcttgtgatggaaaagggcgacaccgtgttttttcatccactgctcattcatggaagcgggcagaacaagacccagggcttccgcaaggctatttcctgtcactttgcctcggctgattgtcattacattgatgttaagggtacaagccaggaaaacatagagaaggaggtggtggggatcgcccacaagttctttggagcggagaactccgttaatttgaaagacatttggatgttccgggcacgcttggtcaaaggagaacgcaccaatctgtag

SEQ ID NO: 128857 - DNA, 15429 bp, synthetic construct
  misc_feature 1..15429: note = Description of Artificial Sequence: Synthetic coding sequence
  source 1..15429: mol_type = other DNA
atggggaatgaagctagcctggaaggggagggcctgccagaaggactagctgcagcagctgctgctggcgggggggcctccggagcaggttccccatcccacacggcaatcccagcaggcatggaggcagatctttcccaattgtctgaagaagagagaaggcagatcgcagccgtgatgagtcgcgctcaaggtctgcctaaaggatcggttccacctgcggccgccgagtctccgtcaatgcacagaaagcaggaactcgactcatctcacccaccaaagcagtcgggccggccacccgatcccggccggccagctcagcctgggctgtccaaaagtaggacaacagataccttccggtccgagcagaagctccccggtcggagcccttctaccattagcctgaaagagtcaaagtcaagaactgatctcaaggaggagcacaagtctagtatgatgccaggcttcctctcagaggtaaatgctctaagtgcagtaagctctgtcgtgaacaaatttaatccatttgatctgatctctgacagtgaagcgagccaggaagaaactactaaaaaacagaaggtagttcagaaggagcagggcaaaccggagggcataattaaaccccccttacagcagcaacccccaaagcccattcctaagcagcagggtcctggcagggacccgctgcagcaagacggcacacctaagtcaatcagttctcagcaaccagagaagattaaatctcaaccgcctggcaccggcaagccaatccaggggccaacacagacccctcagacagaccatgctaagctgcccctgcagagggatgcctcacgtccccaaacaaagcaagccgatattgttcgcggggagagtgttaagcctagcctgccatctccaagcaagccgcccatacagcaacctacccccggtaaaccccctgcgcagcagccgggccatgaaaaatcccagcctggcccggccaagccaccagcacaacccagtggcttaactaaacctctcgcgcaacagccaggaacggtgaagccccccgttcagccacctggcactacaaagccacccgcccagcctctgggaccagctaaacccccagcacagcagaccgggtccgagaagcccagctccgaacagcccggacctaaggctttggcacaacccccaggcgtcggcaagactcccgcccagcagccaggacccgctaagccccccacccagcaagtcggcacacccaagcccctagcccagcagcctggactgcagagtcccgccaaggcccccggcccaaccaagacacccgtgcagcaacccgggcctggcaaaattccagcccagcaagctggcccaggcaaaacatcagctcagcagactgggcctactaagcctccgtcccagcttccaggccctgccaagccgcccccacagcagcctgggcccgcaaagcccccaccccaacagcctgggagtgcaaaaccaccctcccagcagccaggatcaacaaagcctccgccccagcagcccgggccagccaagccctccccccaacaaccaggttcgacaaagccgccaagtcagcaacctggttctgcaaagccaagtgcccaacagccttctccagcaaagccgagtgcgcagcagagcacaaagcctgtgtcccagaccggaagtggcaagccattacaaccccctacagtgtctccatctgcaaaacagcccccttcccagggattgcctaagactatctgcccactatgcaataccacggagttattgcttcacgttcccgagaaggcaaacttcaatacctgcactgagtgtcagaccaccgtctgctcactgtgcggattcaaccctaatccccacctgaccgaggtgaaagaatggctctgtttaaattgtcaaatgaagagagcgctcgggggggacctggcacccgtgccgtccagcccgcagccaaagttgaagacggctcccgtgaccactacctctgccgtcagtaagagctccccccagccccagcagacttcccccaaaaaagacgcggcaccgaagcaggacctgtccaaggcgccagagcccaagaaaccgcccccccttgtcaagcaacccacactccacggttcacctagcgcgaaggccaagcagcctcctgaggccgacagcctatctaagcctgcaccccccaaggagccaagcgtcccttctgagcaagacaaggccccggtggccgatgataagcctaaacagccaaagatggtgaagcctacaacagatttggtgagctcctcttcagctacaactaaacccgacatcccctccagcaaggtccagtcacaagccgaagaaaaaacaacgccccctctaaagaccgacagcgccaaacccagtcaatcgttcccaccaacgggggagaaggtcagcccatttgacagtaaagctatccccagacccgcctccgactccaaaatcatttctcaccctggaccgtcctccgaaagcaaagggcagaagcaggtggatcccgtacaaaaaaaagaggagcctaaaaaagctcaaaccaagatgtctccaaaaccagatgccaaacccatgccaaagggatcccctactccccccgggcctagacccacagcaggccagacggtgcccactcctcaacaatccccaaaaccacaggagcagagcagacggttctctcttaatctcggctcaatcactgatgccccgaaaagccagccgaccacgcctcaggaaacagtgactggcaaactctttggttttggtgctagtatctttagtcaggcgtctaatctgatcagcacggcaggacagcccggaccgcacagccagtcaggtccaggagctccaatgaagcaagcacctgcccccagtcagccacccacgtctcaagggcccccaaaatcaaccgggcaagcaccccctgctccagctaaaagtattcccgtaaagaaagagaccaaggcgcctgctgctgagaaactcgaaccgaaagctgaacaggcccccaccgtaaagagaacagagacagagaagaaaccaccccccattaaggactccaaatccttaaccgctgagccccaaaaggccgtcctgcccacgaaattagaaaagtcccccaaacctgagagcacctgtcctctgtgcaagacagaactcaatatcgggtcaaaagacccccctaattttaatacctgtacggaatgtaaaaaccaggtgtgtaacctttgcggctttaatcccaccccacacctgacagagattcaagagtggctgtgcctgaattgccaaacgcagcgcgcgatctctggtcagcttggggacatacgtaaaatgcccccggctccctccggccccaaagccagccctatgccagtccctacagaatcaagctcacagaagacagcggtccctcctcaggtgaaactggtgaaaaaacaggaacaggaggtcaagactgaagcagaaaaggtgatcttagaaaaggttaaggaaaccctttcaatggagaagattccaccaatggtgactaccgaccagaaacaggaggagagcaaactcgagaaagacaaggcgagtgcccttcaggaaaaaaagccactcccagaggaaaagaaactcatcccagaggaggagaagatacgcagcgaggagaaaaaaccactactggaggagaagaaaccaacacccgaagacaaaaagcttcttcccgaggcgaaaactagcgctcccgaggagcagaaacacgacctcctcaagtcccaggtgcaaatcgcagaagagaagcttgagggtagggttgctccaaagaccgttcaagagggcaagcagccccagaccaagatggagggtttgccttcaggcacccctcaatcgttgccaaaggaagacgacaaaactaccaagactattaaggagcaacctcagcccccttgtacagctaagcctgaccaagtcgaaccggggaaagaaaaaacagagaaagaagatgataaatcagatacatcctctagtcaacagcccaagtctccacaggggctgtccgacacaggatactcgtcagacgggatctcttcgagtctgggcgaaatcccatctctcattcccactgatgaaaaggatattctgaaaggtctgaagaaagattctttttcacaagaaagttccccctccagccccagcgacctagcaaaactcgaaagcacagtgctgagtatactcgaagcacaagcctcgacactggccgacgagaaaagcgaaaagaaaacccagcctcatgaggtgagtccagaacaacctaaagatcaggagaagacccagagtctgagcgagacgctagaaatcacgatatccgaggaggagattaaagaatcacaggaggaaaggaaggacaccttcaagaaagacagccagcaggacatcccgtcgagtaaggatcataaggagaagtcagagttcgtggacgatattactactagacgtgagccttacgattcggtcgaggagtcgagcgaaagtgagaactctcccgtccctcagaggaaacggcggacctcagttggctccagcagctcagacgagtacaagcaggaggactctcagggttctggggaggaggaagacttcatccgaaaacagatcatcgagatgagtgccgacgaagatgcttccgggagcgaggacgatgaattcatccgaaaccaattaaaagaaatttcctccagtactgaaagtcaaaaaaaagaggaaaccaagggcaagggcaaaataacggcaggaaaacaccgtcgcctaacgcgcaagagttccaccagcatcgatgaagatgcaggtcgtaggcactcctggcacgatgaagatgacgaggccttcgacgagagcccagagctaaaatatcgcgagacgaagagtcaggagtctgaagagctcgtggtcacgggcggaggagggttacgcaggttcaaaactattgagttaaatagcactatcgccgataaatatagtgcagaatcatctcagaagaagactagtctgtacttcgatgaggagccggaactagaaatggagagcttgacagattcgccggaggatcgaagccgtggagaaggaagctcttccctgcatgcttcttcctttacacccggaacttcacccacttctgtgagttctctggatgaagattcagactcttcaccgtcccacaagaaaggtgagagtaagcaacagaggaaggcccgccaccgcccccacggacctttgttgcctacgatcgaggatagttctgaggaggaggaactgcgggaagaggaagagctgttgaaggaacaggagaaacaacgagaaatcgagcagcaacaaaggaagtccagctccaaaaagtccaagaaagacaaggacgagctgcgggcgcaacggagacgcgaacgacctaagacgccacccagcaacctctccccaatcgaggacgccagtccgactgaagaactgcgccaggcagccgaaatggaagaacttcatcggagttcatgcagcgagtacagtccttccattgagagcgaccccgagggctttgaaattagtcccgaaaagattatagaagtccagaaggtgtataaattgccaacagctgtgtctctgtattctcccacagacgagcagtcaattatgcagaaagaaggcagtcagaaggccctcaagtcggccgaagaaatgtacgaagagatgatgcataagacgcataagtacaaggccttccctgctgcaaacgagcgtgacgaagtatttgagaaggaaccactgtacggcgggatgctgatcgaggattatatatacgaatcacttgtcgaagatacctacaatgggagtgttgacgggagcttactgactagacaagaggaggagaacggattcatgcagcagaagggccgcgagcaaaagattcgacttagtgagcagatctacgaggacccgatgcaaaagattactgatttacaaaaggagttctatgagctcgagtcactgcactcagtagtgccacaggaagatatcgtgagctcatctttcataatcccagagtcccacgagatcgtagatcttggtactatggtgacttctacggaggaagagcgcaagctgttagatgccgatgcagcatacgaggagctcatgaagcggcagcagatgcagctgacccctggatctagccctacacaggctcctatcggtgaggacatgacagaatctactatggacttcgacaggatgccagatgcaagcttaacctcaagcgttctcagcggcgcttctctgactgatagcactagctccgcaacactatcaatcccagatgtgaaaattacacagcatttcagtacagaggagattgaggacgagtacgtgacagactatacacgcgagatccaagagatcatagctcacgagagcctgattctgacctacagcgagccaagcgagagtgccacatccgtgccgccttcggacactccatcactcacttcctccgtcagtagcgtgtgcacaacagattccagctctccgatcactaccctggactctatcacaacagtgtacaccgagcccgtcgacatgatcaccaaatttgaagacagcgaggagatcagctcctctacatattttccaggaagcatcatcgactatcccgaagaaatatctgtgagcctcgacaggactgccccgcctgacggaagagcttccgctgaccatatcgtcatcagcttatccgatatggcgtcctctatcattgagagcgtggttcccaaacccgaaggaccggtggctgataccgtctctaccgatctgctcatctctgaaaaggatcccgttaaaaaagcaaagaaagaaactgggaacgggattattctcgaagtgctggaggcttatagggataagaaagagttggaggctgagcggacaaaatcatcactttccgaaaccgtttttgaccaccctccgtctagcgtcattgccttgccaatgaaggagcagctgagcaccacctacttcacatcaggcgagacgttcggccaagagaaaccagcgtcacagctgccaagcggttcaccgtctgtcagcagtctcccagcaaagccgagaccgttctttagaagttcctcactggatatctctgcccaacctccgcccccacccccgcctcctccgccccctccccctccaccaccacctcctcccccacctccccttccaccccctacctccccaaagcccaccattctgcctaagaaaaaactaacggtggccagtccagtgaccacagcgactcctctgtttgatgccgtgactacactggaaaccactgctgttttgagatcaaacgggctcccagtaacaaggatttgcacgacagcaccaccacctgtgccccctaaaccatcatccattccctcgggtctagtatttacccaccgccccgaaccctctaaacccccaatcgcccccaagccggtgattccacagctcccaactaccacacaaaaacctacggacatccatcctaagcccactggtctcagtttaacgagcagcatgacccttaacctcgtgactagcgcagattacaagctgccctcaccaacaagtccgctctcaccccacagcaataagtcgagtcctcgctttagcaagtcgctgacggaaacatatgtggtgattaccctcccctctgaacccggcacgcccacggattcatctgcctctcaggcaataacaagctggcctctggggtccccttccaaggatctggtgtcagtagagcccgtcttctctgtggtcccacccgtcaccgcagtagagatacctatatccagcgaacaaacgttttacatctcaggagctctgcagaccttttcagctacacccgttacagcaccaagctcgtttcaggctgcgcccacctctgtcactcagttccttacaactgaggtgagtaagacagaggtcagcgctactaggagcacggcccccagcgtcggcctgtccagtatttcaattaccatccccccagagccccttgctctggacaatattcatctcgaaaagccccagtataaggaggatgggaaactgcagttggtgggcgatgtaatagatctgagaactgttcctaaggtggaagtaaagactaccgacaaatgtatagacctcagtgccagtaccatggatgtaaagcggcaaattactgcaaatgaggtgtacgggaaacagatttcagccgtgcagccatccatcataaacttgtccgtgacatcgtctatagttacaccagtgtctctggctacggagaccgtcacttttgtaacctgcaccgcctctgcttcttacacaacaggtactgagagcctcgtcggggctgaacatgccatgacgacccccctccagttgactacaagtaagcatgcggaacctccctatagaatccccagcgaccaagtatttccaattgcccgtgaagaggctccgatcaatctgtctctagggacccctgctcacgccgtaacccttgccataaccaagcctgtaaccgtgccccccgttggtgttacaaatgggtggaccgactctactgtttcccagggcattaccgatggtgaagtggtggacttatctacaaccaagtctcatcggacagtcgtcaccatggacgagagtaccagctccgtgatgacgaaaattattgaagatgaaaaacccgtggacctgaccgcggggaggcgcgcagtttgttgcgacgttgtatataaattgcccttcggacgcagttgcactgcacagcaacctgccactactctgcccgaagataggttcggatatagggatgatcactatcaatacgatcgctccgggccctatggataccgaggaattggggggatgaagccaagtatgtctgacactaacctggccgaggccggtcatttcttttataagagtaagaacgcattcgactacagtgaaggcacggataccgcagtggatctgacgtctggacgggttacaacgggagaggtgatggattatagctccaagaccacggggccatatccagagacccgccaggtcatcagcggtgcaggaatctcaacaccacaatactcaaccgctcgcatgacacctccgcctggcccccaatactgtgtagggtccgtgctgcggagtagcaacggtgtggtatacagctccgtggctacacccaccccatccacattcgcaatcactacacagcccggcagcatcttctcaaccacagtcagggatctgtccgggattcacaccgccgacgccgtgacaagtctccccgctatgcaccactctcagcctatgccacgatcgtactttatcaccaccggggcaagcgagactgacatcgccgtgactggcatcgatatcagcgcgagccttcagacaatcaccatggagagtcttactgccgagactatcgattcagttcctacactgacgacagcttctgaggtcttccctgaggtcgtcggtgatgagtctgcactcctcattgtgcccgaggaagacaagcagcaacagcaactcgacctagagagagagttacttgagttagaaaagataaaacagcagcgattcgctgaagagctagagtgggaacggcaggaaatccagagatttagagagcaggaaaaaatcatggtccagaagaagctggaggagctccaatccatgaaacagcatttgctgttccagcaagaggaagagagacaggcacagtttatgatgcgccaagagactttggcgcagcagcagctccaactcgagcaaatccaacagctgcagcagcaattacaccagcagctagaggaacagaaaattcgtcagatctatcagtacaactatgacccaagcgggaccgcaagcccacagacaaccactgagcaggcaatcctggaagggcagtatgcggctttggagggaagccaattctgggcaaccgaggatgctactacaaccgccagcgccgtggtagctattgagatcccacaatctcagggatggtacacagttcagtctgacggcgtcacacagtatatagcacccccaggtatcttgtccaccgtttcggaaatcccactcaccgacgtcgttgtgaaagaggaaaagcagcctaaaaagcgcagctcaggcgcaaaggtgagagggcagtacgatgatatgggcgagaacatgacggacgatccccgatccttcaaaaaaatagttgacagtggagtgcagaccgacgacgaggacgccaccgataggagttacgtcagtcgcaggcgacggacaaagaaaagcgtggatactagcgtccagaccgacgacgaagaccaggatgagtgggacatgcctacgcggtcgaggcgaaaagcccgcgtgggcaaatacggggattccatgaccgaagctgataaaacaaagcccctcagcaaggtgtctagcatcgcagttcaaaccgtagctgaaatctctgttcagactgagcccgtgggaaccattcgtacaccttctattcgcgctagagtggatgcgaaagtggaaatcattaagcacattagtgcacctgaaaaaacttacaagggaggaagcctgggatgccaaactgaagccgattcagacactcaaagtccgcagtacctgtctgcaacttccccaccaaaggataagaaacgccctacccccctcgagatcggatactcttcacacctgcgagctgatagcactgtccagctggctccatccccaccaaagagtcctaaagtcctttatagcccgattagccccctgtctcctggaaaagcccttgagtccgcctttgtgccttacgagaagccactccccgacgatatcagcccgcaaaaggtgctgcatcctgatatggcaaaagttcctcccgcctcgccgaaaactgcaaaaatgatgcagcgatcaatgtccgatccgaaaccgctctctccaacggcggacgaatcatccagggcgccgttccagtacaccgaagggtatactactaagggttctcagactatgacttcatcaggagcacagaagaaagtgaagaggacactcccgaatccacctcctgaggagatctctactggaactcagagcacattttccacgatgggcactgtgtcacggagaagaatctgccggacaaacaccatggcgagagctaaaatcctccaggacatcgatcgggaactagacctcgtggaaagagagagcgcgaaactgcgaaaaaagcaggccgaactcgatgaagaagagaaagagatcgatgcaaagctgcgatatttggaaatgggaataaatagacgcaaagaggccctgctgaaagaaagagagaagcgggaacgggcatacctccaaggtgtggctgaagatagggactacatgagcgattcggaggtgtcctccactagacctactcgaattgagtcgcaacacggtatcgagagaccaaggacagctccacaaaccgaattctctcagtttataccacctcaaacacagacggaatctcaactggtgccccctacctccccatatacccagtaccaatacagctctcccgccctgcctacacaggccccaacctcatatactcaacagagccacttcgagcaacagacgctgtatcatcagcaggtgtccccataccagacacagcctacttttcaggcggttgcaacgatgagctttacaccacaagtgcaaccaactcctacgccacagccaagttaccagctgccctcacagatgatggtcatccaacagaagcctcgtcagacaacactgtaccttgagccaaaaattacatctaattacgaagtcataaggaatcagccgctcatgatcgcacctgtgtctacagataatacctttgccgtatcacacctcggatctaagtataacagcctcgatctaagaattggactggaagaacgctcttcgatggccagcagtccgattagtagtatcagcgcagactctttttacgccgacattgaccatcatacgcccaggaactatgttctcatagatgacattggagaaataacaaagggcactgctgccctttctacggctttttctcttcacgaaaaggatctgtctaagaccgaccgactgttgcgcacgactgaaacaaggaggtcccaggaggtgaccgattttctggcccctctacagtcctcttcaaggctgcactcgtatgtaaaggccgaggaggaccccatggaggatccatacgagctaaagttacttaaacaccaaattaagcaggagtttcggagggggacagagtccctcgaccacctagctggcctgtctcactactaccacgccgataccagttaccgacatttcccaaaaagcgagaagtacagcatttcgagactgaccctcgagaagcaggcagctaagcagctgccggctgcgattctgtatcagaagcaatcaaaacacaaaaagtctctgatcgatccaaagatgagcaaatttagcccaatccaggaaagccgggacctggaacccgactactcgtcctacatgacttctagtacatcaagtataggtggcatctcttcccgcgcaagactgttgcaggacgacattacctttggactcagaaaaaacattaccgatcagcagaagttcatgggctctagccttgggaccggcctgggcactctgggtaacaccattcggtcagccctgcaagacgaggccgacaagccctattcatctggatctcgcagtcgcccttcgagtcgcccaagctccgtctacggacttgacctgtctatcaaaagggactcttctagtagtagcctgcggctgaaggcccaggaagctgaagccctggacgtctctttcagccacgcctcgtcatcagccaggacaaagccaacaagcctgccgatcagccaaagtcggggccggatccctattgtagcccagaattccgaagaagagtcccccctgtccccagtcggacagcctatgggcatggccagggccgcagctggacccctcccccctatttcggccgacacgagagatcagttcggtagttcccactctctacccgaggtgcagcaacatatgagggaggagtctcgcactaggggttatgaccgagatatcgcttttatcatggatgatttccagcatgccatgtctgactctgaggcttatcatctgcggcgggaagaaacggattggtttgacaagccgcgggaaagccgcttagaaaatgggcatgggctggatcgcaaactgcccgaaagactcgtccactcccggccactttcacagcatcaggaacagattattcaaatgaacggcaaaactatgcactatatcttccctcatgctaggatcaagatcacgcgcgatagtaaagaccatacagtaagtggcaatggcctggggattagaattgtaggcggcaaggagatccctgggcatagcggtgagatcggcgcttacatcgccaagattctgcctggaggaagcgcagagcagaccgggaagctgatggaaggtatgcaggtccttgaatggaacggaattccactgaccagtaagacatacgaggaggtacagagcattatttcccagcaatcgggcgaagctgaaatatgcgttagactggatctgaatatgcttagtgacagtgagaatagtcaacacctagagctgcacgagccacccaaagccgtggacaaggctaagagtccaggcgtagatccgaagcagctagcagctgaactgcaaaaggtgagccttcagcagagtccactggtgctctcgtctgtggtggagaagggttcccatgtccattctggaccaacttcagctgggagctcctcagtgccctccccgggccaacccggcagccccagcgtgagtaaaaagaagcatggtagctccaagccaacggacgggaccaaagtggttagtcatcctattacgggagaaatacagctacagataaattatgacctgggtaacctgatcatccacattctgcaggcccggaacctggtgccgcgcgacaacaatgggtattcagaccccttcgtaaaggtttatttattgccaggtaggggccaggtgatggtggtgcagaatgcaagtgccgagtacaaaaggcgcacaaagcacgtccaaaagagccttaaccctgagtggaatcaaacagttatatataagagcatctcaatggagcagttgaaaaagaagactttagaggtgactgtctgggactacgatagattctcttccaacgactttttaggagaagtcttgatagacctgagctcgacgtctcatctcgataacacaccgagatggtaccccctgaaagaacagacagaatccattgatcatggtaaatctcactctagtcagtctagccagcagagccctaaaccatccgtcattaagtcccgatcccacggtatttttccagaccccagcaaggatatgcaggttcccactatcgagaaaagccacagctcacccggatcctccaagtccagttctgaagggcatctgcgcagccatggcccaagtcgcagtcagtcaaaaacaagtgttacccaaacacacttagaagatgctggagctgccattgccgccgctgaggctgcagttcagcaactgcggattcaacccacaaagccacctaatcaccgacccgctgaaagcagcgtgtccacgggaagctctggcagtagctttggcagtggctactcggttgactctgagggctcctcctctacagcgggagagactaacctctttcccattcctcgaataggcaaaatgggacagaacggccaggagcctgttaagcagcccggtgtgggcgtcggccttgcggatactgaagctaaaacccaagtgatgggagagataaaaatcgcactgaaaaaggaaatgaagactgacggcgaacagctcatagtggagattttgcagtgtcggaatattacgtacaagtttaaatcccctgatcacctccccgatttatatgtcaaaatctatgtgatgaacatttctacacagaagaaggtgattaagaaaaagacgcgagtatgtaggcacgaccgggaaccaagtttcaatgagacattccggttcagcttgtctcctgccggccattccctccaaatcctcctgtttagcaatgggggtaagtttatgaaaaagactctcattggcgaagcttgcatctggctggacaaggtggatctgcgaaaacgcatcgtgaattggcataaactgctcgtgtcaccgacacagacacactag

SEQ ID NO: 128858 - DNA, 1269 bp, synthetic construct
  misc_feature 1..1269: note = Description of Artificial Sequence: Synthetic coding sequence
  source 1..1269: mol_type = other DNA
actaaggtttggaactctaacggattgggaatccggattgtgggagggaaagaaattcctgggcactctggtgagatcggagcctatatcgcaaagatccttcccggcgggtctgccgagcagaccggtaaactcatggagggaatgcaggtgctggaatggaacggaatccctctcaccagtaaaacctacgaggaggtgcagtccattatcagccagcagtccggggaggcggagatctgcgtgcgcctggacctgaacatgctgagcgacagcgaaaattcccagcacctggaactccatgagcctccaaaggcagtggacaaggctaaatccccaggtgtagaccccaaacagcttgcggctgagcttcagaaagtcagccttcagcagtctcccctggtcttaagctccgtggtagagaaaggaagtcatgtgcacagcggtcctacatcggccggttcctcaagcgtgccaagccctggacagccagggagcccctccgtatcaaagaagaagcatggaagctcaaagccaactgatgggactaaggttgtgtcacatcccattacaggcgaaatacaactgcagatcaattatgatttaggtaacctcattatccacatcttgcaagcgagaaacctcgtgcccagagacaataatggatactctgacccattcgtcaaggtctatctgctgccaggacgcggcgctgaatataaaagacggaccaagcacgttcaaaagagtttaaatccagagtggaaccagacagtcatctataaaagtatctcaatggaacaactcaagaagaagaccctcgaagttactgtctgggactacgatagattcagttcaaacgattttctgggcgaggtccttattgatctgagttcaaccagccacctggacaacaccccccggtggtatcctctgaaggaacagacagaaagcatcgaccatggcaagagtcattccagccagtcgagtcagcaatccccaaaaccctccgtgatcaagagtagaagtcatgggatttttcctgatccctctaaggatatgcaggtccctaccatcgagaaatcccattcttcacccggctcaagcaagtccagttcggagggtcacctgaggtcacacggcccttccagatcacagagtaagacttcagtcactcagacccacctggaggatgctggggcagctatcgccgcagctgaggccgctgtgcagcagctacgcattcaaccaagcaaacgcagaaagtag

SEQ ID NO: 128859 - DNA, 14808 bp, synthetic construct
  misc_feature 1..14808: note = Description of Artificial Sequence: Synthetic coding sequence
  source 1..14808: mol_type = other DNA
atggggaacgaagccagtctcgagggcgaaggcctcccggagggactggccgccgcagcagcagcagggggcggcgcatccggggctggcagccccagccacactgcgattccggccggtatggaggccgatctctcacagctgtccgaagaagaacgccggcagattgcggctgtcatgtccagggcccaaggactacccaaggggagtgtgcctccagccgctgctgagtccccttctatgcatcggaagcaggagcttgattcgtcccacccacctaaacaatcaggcagaccccccgaccccggcagaccggctcaaccgggactgtctaaatctagaactaccgataccttccgatctgaacaaaaactgccgggacgttcaccgagtacaatctctttaaaggaaagcaagagtaggaccgacctgaaggaggagcacaagtcgtctatgatgcccggcttcctatccgaggtcaatgctttgagcgctgtgtcatccgttgtgaataaattcaatccattcgacttgatcagcgattctgaggcatcacaggaagaaactacgaagaaacagaaagttgtacagaaggaacagggaaaacccgagggcataattaaaccacccttacaacaacagccacccaagccaatccccaagcaacagggccccgggagggaccctttacaacaggatggtacacctaagagcatttcgtctcagcagccagaaaaaatcaagtcccagcctcctggaacaggtaagcccattcaaggtcccacccagacgccacagaccgaccatgccaaattgccactgcagcgagatgcctcgagaccacagaccaagcaggccgatatagtgcggggtgagtctgtgaagccttcactcccaagccctagtaaaccccctattcaacagccgacccccggaaagcctccggcgcaacagcccggccacgagaaatctcaaccggggccagccaaaccacccgcccagccaagcgggttaacaaagcctctggctcagcagcccggcacggtgaagccccccgttcagcccccaggaacgactaaaccccctgcacaacccctcggccctgcaaagccacctgcccaacagacgggttctgagaaacctagtagcgagcagccggggcccaaagcgctggcccagccaccgggggtgggtaaaacacctgcccaacagcctggaccagctaaacctcccacacaacaggtggggactcccaaaccgcttgctcaacagcccgggctgcagtcacctgccaaagcacctggaccaaccaaaacacctgtacagcaaccggggcccggtaagatccccgcccagcaagccgggcctgggaaaacgagtgcccagcagactggaccaacaaagcctccaagccaactccccggcccagcgaaacctcctccgcaacaaccagggcctgccaaaccccctccccaacagccaggttcggcaaagccgccaagtcaacagccaggaagcaccaaacctcctccccaacagccaggtcctgctaagccaagtccccagcaacccggaagtacaaaacctcctagccagcagcccggatcagccaagcccagtgcccagcaacctagtcccgcaaagcctagcgcccaacagtccacaaaacctgtgtctcagacgggtagcgggaagccgctacagccgccgactgtctctccatccgccaaacagcctccatctcaggggctgcctaaaaccatttgccctctgtgtaataccactgagctgcttttgcatgtccctgagaaggcgaatttcaacacatgtactgaatgccagacaacggtttgctccctttgtggcttcaatcccaacccccatttaaccgaagtcaaggagtggctctgtctgaattgccagatgaagcgcgcactgggaggggatctcgccccagtgccgagttctccacagccaaaactcaagacagccccagtgacaacaactagtgccgtgtctaagtcttcaccgcaaccccagcagacctcaccaaagaaagatgccgctcccaaacaagacctctccaaggcccctgagccaaaaaagccccctccattagtcaaacagccaacattgcacggttcacctagtgcaaaagctaagcagccacccgaggcggatagcctcagcaaacccgcacctcccaaggagccatcggtaccctcagagcaggataaggctcccgtggcagatgataagccgaaacagcctaaaatggtgaagccgactactgacctggtttcttcgtctagtgccactaccaagccagacattcccagttctaaagtccagagccaggccgaggaaaagaccaccccgcccctgaaaacggactccgccaagccctcccagagctttcccccaaccggggaaaaggtttcaccctttgatagcaaggcaatcccgcgtcccgccagcgattcgaagataatcagccacccaggtccttcttccgagagcaaagggcagaaacaggtggatcccgtgcagaagaaagaggaaccaaaaaaggcgcaaactaaaatgagccctaagccagatgccaagcctatgccgaagggatcccctacacctcctggacctcgcccaaccgccggccagacggtgccaactccacaacagagcccaaagcctcaggagcagagcaggaggttctctctcaatttaggaagtatcacagacgcccctaaaagtcagccaaccacaccacaggagacggtaaccggcaagctcttcggatttggtgcctctatttttagccaggcttcaaatctaatctccaccgctggacaacccggaccacactctcagtcaggacctggggccccaatgaagcaggccccagctccttctcagccacccactagccaagggcccccaaagagcactggccaggccccacccgccccagccaagagtattcccgtcaagaaggagaccaaggcccccgcggctgagaagctcgaacctaaagctgaacaggctcctaccgttaaacgtaccgaaaccgaaaagaagcccccaccaattaaagacagcaagtcactcacagccgagcctcaaaaagctgtcctccccactaaacttgaaaagagccctaagccggagagcacttgccctttatgcaaaactgaactcaacatcggatccaaagatccgcctaatttcaatacatgcactgagtgcaaaaatcaagtctgcaatctctgtggctttaatcctacaccccatctcactgagattcaggaatggctctgcctgaattgtcagacgcagagggccatatcggggcagctgggcgacatccgaaagatgccccctgctccaagcgggcccaaagccagccccatgccagtacctactgagagctcctctcagaagacggcagtgccaccacaggtgaaactcgtgaaaaagcaggagcaggaggttaagacagaggctgaaaaggtcatactggagaaagtgaaggagaccctgtcaatggagaagatccctcctatggttacgaccgatcaaaaacaggaggagtccaaacttgaaaaagacaaagcctcagcgttgcaagaaaagaagccactcccagaagagaagaagctaatccctgaggaggagaagattagatctgaggaaaaaaagccccttctcgaggagaaaaagcccacccctgaagataaaaaactgctacctgaggctaagacttcagcccccgaagaacaaaaacatgacttacttaagtcacaggtgcagatcgccgaagagaaacttgaagggagagtggcccctaaaacagtgcaggaaggcaaacagccacagacaaaaatggaggggctgcccagtgggacccctcagagtctccccaaagaagacgataaaacgacaaagactatcaaagaacagccacaacccccatgcaccgccaaacccgaccaggtggagccagggaaagagaaaaccgagaaggaggatgataagtctgacacatcaagcagtcaacagcctaagagtcctcagggcttgagcgacacgggatattccagtgatggaatttcctcatcgttgggggagatccctagcctcatcccaactgacgaaaaggatatcctcaaagggctgaaaaaggattcgttctcccaggaatctagcccgtcttctccatctgaccttgccaaactcgaatcaacagtactgtccatcctggaggcccaagcttctactctagctgatgagaagtctgagaagaagacccagcctcacgaggtcagtcctgaacaaccaaaggatcaggaaaagacccaatctttgagcgagaccttggagattacaatttccgaggaggagatcaaagagtctcaggaagaaaggaaggatacgtttaaaaaagattcccaacaggatattccttccagcaaggatcacaaggaaaaatctgaattcgtggacgacatcactactagacgggagccctacgacagcgtcgaagagtcttccgaatccgaaaactcccctgttcctcagcgcaagcgccgcactagcgtcggtagttcaagcagcgatgagtacaagcaagaggactctcagggatccggggaggaggaggatttcatccggaaacagatcatcgagatgtcagcagatgaggacgccagcggttccgaggacgatgaattcatccgaaaccaactgaaggaaatatcgagctccacagagtcacagaagaaagaagagacaaagggtaagggcaagatcactgcaggtaagcatcgccggcttactagaaaaagtagcacctccattgacgaggacgccggtcgtcgccattcttggcatgatgaggacgatgaagcctttgacgagagcccagaacttaagtacagagagacaaagagccaggagagcgaggaactggttgtgacaggaggggggggactgcgtaggtttaaaaccatcgaacttaattcgactattgccgataaatatagcgctgagtctagccagaagaagacatcactgtacttcgatgaggaacctgagcttgagatggagagtctaacagattcgcccgaggaccgctccaggggagaaggatcctccagcctccatgctagtagctttacccccggcacatctcctaccagcgtttccagcctcgatgaggattctgatagctcccccagccataagaaaggggagagcaagcaacagcgcaaggccaggcacagaccccacgggccactgctccccaccatagaagattcctcagaagaagaggagctcagagaagaagaagagctgctgaaagagcaggaaaagcaacgcgagatcgaacagcagcagcggaagtcctctagtaagaaatccaaaaaggacaaagacgaactacgcgcgcaaaggaggcgcgaacgcccaaaaaccccaccctcgaatttaagccctatcgaggatgccagccccaccgaagagctgcgccaagcagccgaaatggaagaactgcatagatcctcctgctctgagtactcgccttccattgaaagtgatccagaaggctttgaaatctcgcccgagaaaattatagaggtccaaaaagtctacaagttacctactgctgtaagcctctacagccccaccgatgaacagagtattatgcaaaaagagggttctcagaaggctctcaaatccgccgaagaaatgtacgaggagatgatgcacaagacccataaatataaggcatttccagccgctaacgaacgcgatgaagtgttcgaaaaagaaccactctatggcggaatgttgattgaggactatatctacgaaagtctcgtggaggatacgtacaacggaagcgtggatggcagtctccttaccaggcaggaagaggagaatggtttcatgcagcagaaggggcgggaacagaagataagacttagcgaacagatctatgaggaccctatgcaaaaaatcactgacctgcagaaggagttttacgagctggagtccctgcactccgtcgtgccccaggaggatatcgtttctagtagttttatcattccagaatcccatgagatcgtggatctcggcaccatggtcacatccacggaggaggaaagaaaattactcgatgcagacgctgcatacgaagagctgatgaaacggcagcaaatgcaattgacacctggttcaagtcccacccaggcccccatcggagaggacatgacagaaagtactatggattttgatagaatgcctgatgcctccctcacctcatcagtcctgtcaggagcctccttgaccgattcaacttcctctgccaccctgagtatccccgatgtgaagatcacacagcacttcagcaccgaagagatcgaggacgaatatgttacagattacacccgggaaattcaagagataatcgcccatgagtctctgattctgacatactccgagcctagtgagtcagctacttcagttccacctagcgacactccatccctgacctcatccgtgagcagcgtgtgcacgaccgattcttcatcccctataaccacattagattctatcacaaccgtgtataccgaacccgtggatatgataacaaagttcgaggattcagaggagatttcatccagcacatactttcctgggtcaattatcgattatcctgaagaaatttccgtgtccttggacaggacggcacctccagacgggcgcgcctcagccgatcacatcgtgatatcgctgagcgacatggcctcaagtatcatagagtccgtcgtgcctaagccagagggtcctgtggccgataccgtctccactgatttactcatcagtgaaaaagatcccgtcaagaaggccaagaaggaaacaggaaacggaatcatcctggaagtactagaagcctatcgcgacaaaaaagaactggaggccgagcgcaccaaatctagtttgagcgaaaccgtcttcgaccatccaccaagtagcgttatcgcgttgcccatgaaagaacagctgagcaccacatactttacctcgggggagacatttggtcaggaaaaacccgccagtcagctgccaagcggttccccaagtgtgagcagtttaccggcgaagcctcgccctttctttaggtctagttccctggatatctcagcacagcctcctcctccccctccacctccgccccctcccccacctcccccaccgcccccacccccgcccccattgccccctcctacgtcaccaaagccaaccattctgcccaagaagaaactcactgtggccagtcctgtgactacagccacacccctttttgatgcagtgacaaccctcgagaccacagccgtacttaggagtaatggactcccagttacacgaatttgcacaactgcaccaccccccgtccctccgaagccctcaagcatcccatcaggcctcgttttcacacatcgaccggaaccatctaaaccaccaattgcccccaaacccgttatccctcaactgcctactacaactcagaagccgaccgacattcaccccaagccaactgggctgtccttgacgtcgtcaatgactctgaacctggttacaagcgctgactataaactccccagtccaacctctccattatccccccactctaataagtcctccccaagattctcaaagtcgctgaccgagacttacgttgttataacgctcccgagcgagcctggtacccccaccgatagctccgcatctcaggcgattacatcgtggcctctgggttccccatctaaggacttagtgagtgtcgagccagtgttcagtgtggtgcctcctgtgactgcagtggagattcctatttctagcgagcagaccttctacatcagcggggcccttcagacattcagcgccacacccgtgacggctcctagtagtttccaggctgctcccacatcagtcactcagttcctcacgactgaggtgagcaagactgaggtatcagctactcgcagtaccgccccctctgtcggcctcagctcaatctccatcacaattcccccagagccgttagccctcgacaacattcacctcgaaaagccccagtacaaggaagatggcaagctgcaactggttggcgatgttatcgatctgcgcaccgtccccaaggtcgaggtgaaaaccacagacaaatgcatagatctgtcagcgtctactatggatgtcaagagacagatcactgcaaatgaggtctatggcaaacagattagcgctgtccaaccgagtattattaacctttccgtcaccagctctattgtgacccctgttagtctcgctacggaaaccgtgacgtttgtgacctgcacagcctctgctagctacaccaccggaactgaatcactcgtgggagctgagcatgctatgacaactccactccagttgaccacctccaagcacgctgagcctccttatagaatccccagcgatcaggtgttcccaatcgcccgggaagaggctccaattaacttgtcgcttggcacgcctgcacacgctgtaaccctggcaattacgaagccagtgaccgtgcctcccgtgggcgttaccaacgggtggactgattcaaccgtctctcaggggattactgatggtgaagtggtagatcttagcactaccaagagccataggaccgtggtgacaatggacgagtccaccagtagtgtcatgactaagatcatcgaggacgagaaacccgtcgatctaacagcaggcaggcgcgcagtttgctgcgacgtcgtttacaaactccccttcggccgcagttgtaccgctcagcagcccgctaccaccttacccgaggatagatttggctaccgcgacgatcactaccaatacgatagaagtggcccttatggctatcgcggtatcggtgggatgaaaccgagtatgtccgacaccaacctggctgaagcaggccacttcttctataaaagtaaaaatgcttttgactacagcgagggcacggatacagccgtcgatctcaccagcggtcgtgtcacaaccggcgaagtgatggactactcatctaaaactacgggtccatacccagagacccggcaagttatttccggtgctggcatttccactccacagtacagcactgcacggatgactccacctcccggacctcagtactgtgtaggttctgtgttacggtcctcaaatggggtcgtctactccagcgtggcaacaccaaccccaagcacatttgccattacgacacagccggggtctatattcagtactacagttagggacctcagtgggatccataccgccgacgctgtcacctctctgcccgccatgcatcattcccagcctatgcctcggagctatttcattacaacaggcgcgtcagagaccgatattgcggtgacggggatagacatctccgccagcttgcagaccatcacaatggagtcactgacagcagaaaccattgattctgtgcccaccttgacaactgcgtctgaggtattcccagaggttgtgggggatgagtctgcactgctgatagtcccagaagaggataaacaacagcagcagctggatctggagagggagctgttggagttagagaaaattaagcaacaaagatttgcagaagagctggagtgggagaggcaagagatccaacgttttagagaacaagaaaagattatggtgcagaagaagttggaagagctgcagtccatgaagcagcatctcctgttccagcaagaggaggagagacaggcacagtttatgatgaggcaggagaccctggcccagcaacaactgcagcttgagcagatacagcagctgcagcagcaactgcatcagcagctggaggaacagaagataagacaaatttaccagtataattacgatccctcaggcaccgcttctccccaaacgactactgagcaggccatattagagggccagtacgcagccctggagggctcccagttctgggcgaccgaagacgcgacgaccaccgcttctgcagtggtggcaatagaaatcccccagtctcagggctggtacacggtgcagtcggatggtgtgacccaatacatcgccccccccggaatcctaagtacggtgagcgaaattccccttacagacgtggtagtcaaggaagagaagcaaccaaagaaacggtcatcaggagccaaggtgcggggccagtatgatgatatgggggagaatatgaccgacgatccacggagctttaagaaaatcgtggatagcggggtccagactgacgacgaagacgccaccgatagaagttacgtatctaggcgacgaaggaccaagaagtccgtcgatacctcagtccagaccgacgatgaagaccaggacgaatgggacatgcctacacggtcacgaaggaaggccagagtcggcaagtatggcgatagcatgacggaggccgataagaccaaaccgctctcaaaagtgtctagtattgcagtgcagaccgtcgcagagatctctgttcagaccgagcccgtgggcaccatccggacccctagcatccgtgccagggtggacgcaaaagtagagattattaagcacatatctgcaccggaaaagacctataaaggagggagcctcgggtgccagacagaggctgactctgatacgcagtcacctcaatacttatcagcgaccagtccaccgaaagacaagaagcggccaacacctttggagatcggatacagtagtcaccttcgagctgactccaccgtgcagctggctccgagcccccccaagagcccaaaggtcctctattcccccattagccccttgagtccgggtaaagcactggagtctgcattcgtgccttatgagaaaccactgcccgatgacataagcccccagaaggtcctgcaccctgacatggccaaggtcccccccgccagtcctaaaacagctaagatgatgcagcgcagcatgtccgaccccaagccattatcccctaccgctgacgaaagcagccgagccccttttcagtacaccgagggctatactactaagggcagtcaaaccatgacatcctctggggcacagaagaaagtgaagcggacgcttcccaatccccccccagaagaaatcagcactggcacccaaagtacattcagcacaatggggaccgtgtcacgcagacgaatatgcaggaccaacactatggctagggccaaaatcttacaggatatcgaccgggagctggatctagtggagcgcgagtccgccaagctgaggaagaaacaggcagagctggacgaggaggagaaagagatcgacgctaaacttcgctaccttgaaatgggaatcaaccggaggaaggaggccctccttaaggaacgagaaaaaagggagcgagcctaccttcagggcgtcgctgaggatagggactatatgtctgattctgaggtttcaagcaccagacccacaagaattgagagtcagcatggcatcgagaggcctcgaacagctccacaaactgagttttctcaattcattcctccccagacgcagaccgagagccaacttgtcccacccacaagcccctatacacaatatcagtactccagccccgctctccctacacaggcgcctacaagctacacgcagcagagccatttcgagcaacagactctttatcatcagcaggttagcccgtaccaaactcaacccacctttcaggcagttgccacaatgagcttcacgccccaggtgcagcccacaccaactccacagcccagctaccagcttcccagtcagatgatggtgatacaacaaaagccccgccagacaacactgtatctggagcctaaaattacatcaaactacgaggtcatccgaaatcagccactaatgattgcccctgtaagtacagacaatacatttgcggtgtctcacctgggctccaaatacaacagtcttgatttgagaatcggactggaggagcggtcgtctatggcatcatctcccatctccagtatatctgcagattcattttatgcggatattgaccatcacaccccaagaaattatgtgctcatcgacgatattggtgaaatcacaaaagggactgctgcgctgtcaaccgccttttctcttcatgagaaagacttatctaagaccgaccggttgctaaggacaacggaaaccaggaggagccaggaagttactgatttccttgccccccttcaatcatcttctcgactgcacagttacgtaaaggccgaagaggatcccatggaggatccctacgagctcaagctgctgaagcaccagatcaagcaggaattcagaaggggcaccgaaagcctggaccatctcgctggcctcagtcactattatcatgccgatacgtcttatagacattttccaaaaagcgaaaagtactccatctctaggttgacgctggagaagcaggcagccaagcaattgccggctgccatactgtaccagaaacagagcaagcataagaaatcgctcatcgacccgaagatgagtaagttcagcccgatacaagaaagtagagacctcgagccagactacagttcatatatgacctcctcgacatcctcgataggtgggatttctagccgggcccgccttctccaggacgatattacgttcggacttcggaagaatatcaccgaccaacagaaattcatggggagcagtttaggaaccggcctcggtaccctcgggaatacaattaggtcagctttacaagatgaagccgataagccctacagcagtggtagtcgctccagacctagctccagaccgtcttccgtgtatgggctcgacctgtctattaagcgtgattcaagttcatccagtctccggttgaaggctcaggaagccgaggcacttgacgtcagcttttcccacgcaagttcatctgccaggaccaagccaacatccttgcccatcagccagtcccgtggccgcattccaattgtagcccagaatagcgaggaagaatctcccctgtccccagttggccagccaatggggatggcccgcgccgccgccggcccactgcctccaatctccgccgacacaagagaccagttcggatcatctcattcgttgcctgaagtacagcagcatatgcgtgaggaaagtcgaactcgagggtacgatagagacattgcctttattatggatgatttccagcatgctatgtccgactccgaagcttaccacctgcgacgcgaagagacggactggttcgataagcctcgcgagtcacgtttggaaaacggacatggtctagaccgcaagttgcccgagcggcttgttcactcaagacctctgagccagcatcaggagcagatcatacaaatgaatggcaaaaccatgcattacatcttcccgcacgctaggatcaagattacccgagatagcaaagaccacactgtgtcggggaacggtctcgggatccgtattgtcggaggcaaagaaattcctggccactctggtgagatcggggcttacatcgccaaaattctacccggcggcagcgccgagcagactggcaaactcatggagggaatgcaggtccttgaatggaacgggatacctctcacgagtaaaacgtacgaagaggtccagagcatcattagccaacagtccggtgaggccgaaatctgtgtgaggctcgatctgaatatgctctccgattccgaaaattcacagcacttagaactccatgaaccccctaaggctgtcgataaggcaaagagtccgggagtagaccccaagcaacttgcggccgagttacagaaggtatctttgcagcagtcccctctggtgctcagcagcgttgtggagaaagggtcgcacgtccatagcggccccacttcagccggcagctcttctgtgcctagtcctggccagcccggctcaccgtccgtgagcaaaaagaagcatggaagctccaaaccgaccgatgggactaaggtggtgtctcacccaatcacaggagagattcaattacagatcaactatgatctgggcaaccttattatccatatcctccaggcccggaacctcgttcccagggataacaatgggtattctgatccatttgtgaaagtgtacctactgcctgggaggggccaggtgatggtagtgcagaacgccagcgccgaatataagcgcagaactaaacacgtgcagaagagtctgaatccagagtggaaccagacagtcatttacaagagcatttccatggagcagctgaaaaaaaagactctggaggtaaccgtgtgggactatgaccgctttagcagcaatgactttctgggtgaggtcctgattgacctctcaagcaccagtcatttagacaatactccacgatggtatccactgaaggagcagacagagtccatcgaccatgggaaatcacactccagccaatctagtcaacagtcacccaaacccagcgtgatcaagtctcgctcccacgggatatttcctgaccctagtaaagatatgcaggtgcccacaatcgagaagagtcatagctctccaggcagcagcaaaagtagttccgaagggcacctgaggagccacgggccgtcccgctctcagtccaagaccagcgtgacccagacacaccttgaagacgccggcgccgcaattgcggctgcagaagcggcagttcagcagctaaggatccagccaagtaagcggcgaaaatag

SEQ ID NO: 128860 - DNA, 10908 bp, synthetic construct
  misc_feature 1..10908: note = Description of Artificial Sequence: Synthetic coding sequence
  source 1..10908: mol_type = other DNA
atggggaatgaagcctcccttgagggggaaggcctcccagaggggctggccgccgccgccgccgctggcggcggggcctcaggagccggctctccctcgcatacagccatcccagctggcatggaagctgatctttctcagctcagcgaggaggagagacgtcagatagctgctgttatgagccgcgcccagggattacctaaggggtcagtaccccctgcggctgccgagtctcccagcatgcataggaaacaggagctggattcctcccacccacccaaacaaagcggtaggccaccggaccccggacggcccgctcagcctggtcttagtaagtctcgcacaacggatacatttcggtccgaacagaaactgcccggtcggtctccttcaactatttctcttaaggagagtaaatcaagaactgatctcaaggaggagcacaagagctccatgatgccaggcttcttgtctgaggtaaacgctcttagcgccgtgagctcagtggtcaacaaatttaatccattcgacttaatctccgactccgaagctagtcaggaggaaacgacaaaaaaacagaaggtcgtccagaaagagcagggcaaaccggaaggtatcataaaaccacccctgcaacagcaaccacccaagcccattcctaaacagcagggtccaggaagggatcccctccagcaggacggaaccccaaaatccatttcgagtcagcagcccgagaaaatcaagtctcagcccccagggactggaaaaccaatccaggggcccacgcagacccctcagaccgaccacgcaaaattaccactgcagcgagatgcctcacggccacagaccaaacaggccgacattgtgaggggggagtccgtgaagccatctctgccatccccatctaagccgcctattcagcagcccactcccgggaagccccccgcccaacagccaggccacgaaaagtctcagcctggccccgccaagccgccggcccaaccctcagggctgaccaaacctctcgctcagcagccaggaacagtcaaacccccggtccagcccccaggcaccacgaagcctcctgcccaaccactcgggcctgccaagcctccagctcagcagacgggtagcgaaaagcctagcagtgagcagcccgggcctaaggcactggcgcaaccacctggcgttggaaaaaccccggcgcagcagcctggccccgccaagccccctactcagcaagtagggacgccaaaaccactcgcacagcagccagggctgcaaagtcctgcaaaggctccggggcccactaaaaccccagtgcagccaaaacctccttctcagcagccgggtagcacaaaacccccaccacaacagcccggaccggctaagccttccccacagcagcccggctccacgaaacccccatctcagcaaccgggaagcgctaagcctagcgcacaacagccctcacccgccaagccaagcgcacagcaatccactaagcccgtgtcacaaactggatccggtaagcccctgcagccccccacggtcagcccgagcgccaaacagcctccaagccagggactccccaaaaccatctgtccgttatgtaacacaactgaactacttcttcacgtgcctgaaaaggctaacttcaatacttgtaccgagtgccagactaccgtgtgttccctgtgcggatttaaccccaatccacacctcaccgaggtcaaggaatggctatgcctcaattgtcagatgaaaagagctctcggcggggacctggcaccagtgcctagtagcccgcagcccaaactgaaaacagcgccagttacaacgacatcggccgtgtcaaaaagcagcccgcagccacaacagacgagccctaagaaggacgcagccccaaagcaggatctatcaaaggctcccgagcccaaaaagccaccgcctctcgtgaaacagcctacactccatgggtctccctctgccaaagccaagcaacccccagaggccgattccctgagcaagccagccccccctaaggagccctcagtcccttctgagcaggacaaggccccagttgcagatgataaaccaaagcagccgaagatggttaaacccacaaccgatcttgtctctagttcttcagccacaacaaaacctgacatcccctcttctaaggtacagtctcaggcagaggagaagacgacaccccccctgaagaccgatagcgctaagcccagtcagtcgtttccccctacaggggagaaagtaagcccattcgactccaaggctatccctaggccagccagtgacagtaagattatcagccaccccggcccatcttcagagtctaaaggccagaaacaggtggacccagtacagaaaaaggaagaacctaagaaggcacagacaaaaatgagccctaagcccgatgccaaacccatgccaaagggcagccccactcccccaggtccgcgccctacagccggtcagaccgtacctactccacagcagagccctaagccacaagagcagtctaggaggtttagcctaaacctcgggagcatcacagacgccccaaagtcacagccaacgactccacaagagactgttactggcaagctttttggatttggggcttctatcttttcccaggcaagcaatctgatttcaaccgccgggcagcccgggccccactcacagagtggacctggcgcccccatgaaacaagctcctgctcctagccaacctcccaccagccaggggcctccaaagagtacaggtcaggccccccctgcgcctgctaagagcataccagtaaagaaagagactaaggcccccgctgctgaaaagctcgaacctaaagctgaacaagccccaacagtgaaacggactgaaaccgagaagaaaccccctcccattaaagactctaaaagtctgaccgccgaaccacagaaagctgtgctgcccacaaaactggagaagtctccaaagccagagtccacctgcccgctatgcaaaacagaattgaatattggatccaaagaccctcctaactttaacacctgcactgagtgtaagaatcaggtctgtaacctgtgtggatttaaccccacccctcatctaacagaaaactgtcagacccagagagcgatcagcggtcagctgggggacatcaggaagatgcctccggctcccagtgggcctaaagcgtccccaatgcccgtgccaaccgagtcaagctcacagaagaccgcggttccaccccaggtgaagctcgtgaagaaacaagagcaggaagtcaaaaccgaggctgaaaaggttattcttgaaaaggtgaaggagacgcttagtatggaaaagattcctccaatggttacgaccgatcagaagcaggaagagtcaaagctggaaaaggacaaagcatcagcactgcaggagaaaaaaccactccccgaggaaaaaaagctcatccccgaggaggaaaaaatccgctctgaagaaaaaaaaccactgctggaggagaagaagcctacaccagaagataagaaactactaccagaggcaaagacctcagccccggaggagcaaaaacatgaccttcttaaatctcaggtgcagatcgcagaggaaaagctcgagggaagggtcgcccccaagacagtgcaagagggtaagcagcctcagacaaagatggagggacttccgtccgggacacctcagtctctgcctaaggaggacgataaaaccacgaaaacgatcaaggaacagccccagcctccatgcacagccaaaccagatcaggagaaggaagatgataaaagcgataccagcagttcccaacagcctaagtctccacaggggctcagtgacacaggatacagcagcgatggaatctcctccagccttggcgagattccttcgctgatacccacagacgagaaggatatcctcaagggcctcaaaaaagacagctttagccaggaatctagcccatcttcacctagcgacctggcaaagcttgagagtacagtgctgagcattctggaggcccaggctagcactctagcggacgagaaatcagagaagaagacacagccgcatgaggtttcacccgaacaaccgaaggaccaagagaaaactcagtcattgtctgaaactctagaaattacaatcagtgaagaggagattaaggagtctcaagaagaacgaaaggacacattcaagaaagactctcagcaggacatcccttcatcaaaggaccataaggagaaatccgaattcgtggatgacatcacgacccggcgcgaaccatatgatagcgtggaagagagtagtgagagcgaaaatagtcctgttccacaaaggaagcggcgtacatcagttggatcttcctctagcgatgagtacaagcaggaggactcacaagggtcgggcgaggaggaagacttcatccgcaaacaaatcatcgaaatgtctgccgacgaggatgcaagcgggtccgaggatgacgagttcatcaggaaccagctaaaggagatcagctcgtctactgagtcgcagaagaaagaagaaaccaaaggcaaaggtaagatcaccgccggtaaacaccgccgcctgactcgcaagtcctcgacaagcatagatgaggatgccggacgccgacattcttggcacgacgaagacgacgaagcttttgacgagtccccggaattgaaataccgggagactaaaagccaagagtctgaagagctcgtagtgactggcggtgggggccttcgcagatttaagactattgagctgaactctaccatagctgacaagtacagtgcggagtcatcccaaaagaagacgagcctgtactttgatgaggagcctgagttggagatggagagtttgaccgacagccccgaggaccgaagtagaggggagggaagtagctcgctccacgcttcttctttcaccccggggacctcccctacatcggtgagtagtctggacgaggattcagattctagccccagtcataaaaaaggcgaaagtaagcagcaaaggaaagctcggcatcgccctcatgggcctttattacctactatagaggactcttcagaagaagaagaattacgggaggaagaggagttgttgaaagagcaggaaaaacagagagagatcgagcaacaacagagaaaatcctccagcaagaagtccaagaaagacaaagatgaactgcgtgcacagagacgcagagaaagacctaagaccccaccctcaaacctgagtccaatagaagacgcttccccaaccgaggagctgcgacaagcagctgagatggaagaactgcatcgttcttcatgtagtgaatatagcccttctatagagagtgacccagaggggttcgaaatatcaccagaaaagataatcgaggtgcagaaagtttacaagctccctaccgcagtgtcattatacagcccaactgacgagcaatcaattatgcagaaagaaggttcccagaaggcgctcaagagcgcagaggaaatgtacgaagagatgatgcataagacacacaagtataaggcattccctgcagccaatgagagagatgaagtgtttgagaaagaaccactctacgggggtatgctcatcgaagactacatttacgaatcactggtggaagacacctataatgggagcgtggacggatcactgctgacgcgtcaggaagaggagaacgggtttatgcagcagaagggacgcgaacagaagatacgcctctccgaacaaatctacgaggatccaatgcagaagatcacagatctgcagaaggaattctatgagttagagagtctccattccgtggtgccccaggaggacattgtatcttcttcttttatcattccagagtcacatgagattgttgacctcgggaccatggtgaccagcactgaggaggaacgcaagctattggatgcagatgccgcatatgaagagctcatgaagcggcagcagatgcagctgacccccggatcatcccccacccaggcccctataggagaggacatgactgagtccacgatggactttgaccggatgcccgatgccagtctcacatcatcagttctgagcggcgcgtctttaacagactcaacgtcatctgccacgctgtcaatacctgacgtcaaaattacacagcacttctccaccgaggaaattgaggacgaatacgtgactgattatacccgcgaaatccaggagatcatagcacatgagtccctcatactgacgtattcggaaccctctgaatcagcaacgtccgtgccccctagtgacacccccagcctgaccagctccgtctctagcgtgtgcactactgattcgtctagcccaattactaccttagacagcatcacaactgtgtacaccgagcctgtggatatgatcaccaagttcgaggacagtgaagagatcagctcctccacttatttcccagggtcaattatagactatcccgaagagatctctgtgtctctcgatagaactgcccccccggatggtagagccagtgctgaccatatagttatcagtctaagtgacatggccagtagtattattgagtctgtcgtacccaagcccgaaggtccagtggccgacactgtctcaaccgatctgcttatatctgagaaggaccctgtcaagaaggcaaagaaggaaacaggtaacggaatcatactagaggtgctggaggcttatagggataagaaggagttggaggccgaaaggacaaagtcaagcctctccgagacggtgttcgaccatcctcccagctcggtcattgcccttcccatgaaggagcaactctctacaacatatttcacttcaggcgagacatttggtcaggaaaaaccagcctcccaattaccctctgggtctccctccgtcagcagcctaccggccaaaccacgtcctttttttagaagttcttctttggatatatcggcacagccccctcccccaccgcctccccctccccctccccctccacccccccctccacctccaccacctcccctgcctccccccacatctcccaaacccacaatcctaccaaagaaaaagctgacagtggcaagccccgtcaccacagcgacccccctgttcgacgcggtgacaacccttgagacaactgctgttctgcggtcaaacggactcccagtgacacgaatctgtacaacggcccccccgcctgtgcccccaaaacctagtagcatcccctcgggtctcgttttcactcatagacccgagccttctaaaccacctattgctcctaaacccgtaatcccccagcttcccactacaacacaaaagcctacagacattcacccaaagcccaccgggcttagtctgacaagctctatgaccttgaacctggtgacatctgcagattataagttgccttctccaacgagcccgctcagcccccactcaaataaaagcagtccacgcttttctaagagcctgaccgagacttatgtggtcattaccttgccgtccgaacccggcacacctacagactcaagcgcgagccaggctattacctcatggcccttgggcagtcctagcaaggacttggtctcagtcgagcccgtgttttctgtggtgcccccggttacagccgtggagatccccataagctcagagcagacattttatattagtggtgctctccagactttttccgcaacgcctgtcacggctccatccagctttcaggctgctcctaccagtgttacacagttcttaacaacagaggtcagcaagactgaggtatccgcaacacgatcgaccgcaccctcagtgggcctcagctcaatctcaatcaccatccctcccgaaccactcgcactagacaatattcacttggagaaaccgcagtataaagaggacgggaaactacagctagtgggagatgtgattgatctgcgtactgtgccaaaagtggaggtgaagacaaccgacaagtgtatcgatctttctgccagcaccatggatgtgaaacggcagattaccgcgaacgaagtctacggaaagcagatcagtgcggtgcagccctccattatcaacctatccgtgacttcaagcatcgtcactccagtttcactcgcaacagagacagtcaccttcgtgacctgtacggctagtgcttcatatacgacgggtaccgagagcctggtcggcgcagaacacgccatgacaacccccctgcaactgaccaccagcaaacatgcagaacctccgtaccggatcccctcagaccaggtgttcccgattgcacgcgaagaggcacccatcaacttatccttgggcaccccagcccacgccgtcactcttgcgatcacgaaacctgtgaccgtgcctccggttggagtgacgaacggatggacggacagtaccgtttcacaggggatcactgacggggaggttgtggacctgtctaccaccaaaagccatagaactgtcgtcacaatggacgagagtaccagctcggtcatgactaaaatcatcgaagacgaaaagcctgttgacctcactgcgggcagacgtgccgtgtgttgtgacgtggtgtataaactgccttttggccggtcctgtaccgctcaacagccagccaccactctgcctgaggatcggtttggatatcgtgatgaccattaccagtatgaccggagtggtccgtatggatatcgggggataggtggaatgaaaccgtccatgagtgatacgaatctcgccgaggcaggccatttcttttacaagagcaagaatgcttttgactattccgaagggactgacaccgcggtcgacctgacatcaggtcgggtgactaccggggaggtaatggactactcttctaagacgactggaccgtatcccgaaacccggcaggtcatttccggtgcgggcattagtactcctcaatacagtaccgcccgcatgacaccacctcctggtccccagtactgtgtgggatctgtcctgagatctagcaatggagtggtatactcttccgttgcaacccccactcccagtacatttgcaatcacaacccagcctggctcaattttctccaccactgtaagggatctgtcagggatccatacagctgatgcagtgacttctctccccgccatgcaccactctcaacctatgcctagatcatactttattactactggggcatcggagacggatatcgctgttaccgggatcgacatttcagcctcactccagactattacaatggagtccctgacggccgaaactatcgattcagtgccaaccctgaccacagcttctgaggtcttcccagaggtggttggtgacgaatccgcattgttaatcgtacccgaagaagataagcagcaacagcagctggatctggagagggaactgcttgagttagaaaaaattaaacagcaacgctttgccgaggaactggagtgggagaggcaggagatccaacgatttcgtgagcaagagaaaattatggtgcagaagaaacttgaagaactgcaatcaatgaagcagcatctgctgtttcagcaagaggaggagcgccaggcccagtttatgatgagacaggagacccttgctcagcagcagcttcagctcgagcagattcaacagctacagcagcaattgcatcagcaactggaagaacagaaaatcagacagatttaccagtacaattatgatccttcaggaaccgcatctccacagacaaccacagaacaggcaatcctagagggacaatacgccgctctggaagggtctcagttctgggccactgaggacgccactacgacagcatctgccgttgtggcgatagaaatacctcagagccagggatggtacactgtgcagtctgacggggtaactcagtacatcgcgccccccggcatcttatccacggtctctgagatcccacttacagacgtcgtggtgaaggaagaaaagcaacctaagaagaggagctcaggggcaaaggtacggggacagtatgatgatatgggagagaacatgaccgacgaccccagaagtttcaagaaaatcgtggacagtggagtccagaccgacgacgaagacgcgactgaccgtagctacgtaagcaggcgaagacggactaagaagtccgtagatacttcagtgcagactgatgatgaagatcaggatgagtgggacatgcctaccaggtcaaggcgaaaggctcgggtcggcaaatacggtgattcaatgactgaagcggacaaaacgaagcccctgtccaaggtgtcttctattgccgttcagaccgtcgctgagatcagtgtgcagaccgagcccgtgggcaccatacgcaccccctctatcagagcgagagtggatgccaaggtcgaaattattaagcacatttctgcccccgaaaagacttacaagggcggaagtttagggtgccagacagaagctgattccgatacgcaaagcccgcagtacctgagtgcgacatctccacccaaggataagaagaggcccaccccccttgaaataggttatagcagtcacctgagggcagacagcacagtccagctggccccctcccctcctaagagtcctaaggtgctttattcccccatatcccctctgagtcctggcaaggctctggagtctgctttcgtaccctacgaaaaaccattacctgacgacattagtccgcaaaaagtgttgcaccctgacatggctaaagtcccccccgcctctcccaaaactgcgaagatgatgcagcggtccatgtctgatccaaagcccctgagccccacagccgatgagtcttccagggctccttttcaatacactgaaggctatacatag

SEQ ID NO: 128861 - DNA, 1635 bp, synthetic construct
  misc_feature 1..1635: note = Description of Artificial Sequence: Synthetic coding sequence
  source 1..1635: mol_type = other DNA
atggagaagctgcaggagcatttaattaaggccaaggctttcactattaaaaagaccctcgaaatctacgtgcctatcaagcagtttttctacaacctgatacacccggagtacagcgctgttacagacgtgtatgtgctgatgttcctagccgatacagtcgatttcatcatcattgtcttcggcttctgggcgttcggaaaacattcagccgccgccgacataacttcttcactatccgaggatcaggtcccgggcccgtttctggtgatggtgttaatacagtttggtaccatggtggttgacagggccctctacctgcgaaagacagtgctcggcaaggtgatctttcaggtaatcctggttttcggtatccacttttggatgttctttatcctccctggcgtgacggaacggaagttctctcagaacctcgtcgcacaattgtggtatttcgtgaaatgcgtctattttggcctctctgcttaccagatcaggtgcggataccctaccagagtccttgggaattttctcaccaaatcatacaactatgtgaatcttttcctcttccaaggattcagactggtccctttcctcacggagttacgcgcagtcatggactgggtctggacagatactaccctctcactctcctcctggatatgcgtggaggatatctacgcacatatctttattctgaaatgctggagggaatcggagaagcccatcttcaccatgtccgcgcagcaatctcagctgaaagtcatggatcagcagagctttaacaaattcatacaggccttcagccgcgatactggcgccatgcagtttctagagaattatgaaaaggaggacatcacagtcgctgaactggagggaaacagtaattcactctggacaatatctcccccttccaaacaaaagatgatccacgaactgctcgaccctaactcctcattttccgtggtattctcatggtcaattcagcgtaatctttcattaggcgctaagtccgagatcgccaccgataagttaagctttccgctcaaaaacatcacccgaaaaaacatcgccaaaatgattgccggtaattctacagagagcagcaaaacaccagtgacaatcgaaaagatctacccctattatgttaaggccccctcggatagcaacagtaagccaatcaagcagttactgagtgaaaacaactttatggatatcacaattatcctgagtcgagacaataccactaaatacaatagcgagtggtgggttttgaaccttactgggaaccggatctacaatcccaattctcaagctttggagttggttgtctttaacgacaaggtcagccccccaagcttgggattcctcgcagggtatggcataatgggcctttacgccagcgtggtgctggttattggaaagttcgtgagggagttctttagcggcattagccattcaatcatgttcgaggagctgcctaatgtggatcgaattctgaaactctgtacagacatcttcctggtccgcgagactggcgaactcgagcttgaggaagatctctacgccaaactcatcttcctgtaccgtagccctgagacgatgatcaaatggactagggaaaagacaaactag

SEQ ID NO: 128862 - DNA, 8259 bp, synthetic construct
  misc_feature 1..8259: note = Description of Artificial Sequence: Synthetic coding sequence
  source 1..8259: mol_type = other DNA
atggcttccgaggtcgtgtgcggcttaatctttaggctgctccttcctatctgcttagcagtggcctgcgcttttagatataatggcctgagctttgtttacctcatctacctcttattgattccactgttttctgagccaaccaagaccacaatgcaaggccataccggtcggctgcttaaaagtctgtgctttatctctctgtcctttctcctgctgcacatcatcttccacatcacgctagtttccctggaagcacagcaccggatcgcccctgggtacaactgttctacctgggaaaaaactttccggcagatcggctttgaatccctgaagggggccgatgcgggaaacgggattagggttttcgtgcctgatatcggcatgtttattgcctccctaaccatctggttattgtgtcgtaatattgtgcagaaaccagtaacggacgaggctgcccagtctaatcctgagtttgagaacgaagagctggccgagggggaaaaaatcgactccgaggaggcccttatttatgaggaagattttaatggaggggacggcgtagagggcgagctcgaagagtcgactaaacttaaaatgttcagaaggctggccagcgtggcttccaagctaaaggagtttatcggtaacatgatcactacagccggcaaagttgtcgtaacgatcctgctaggaagctctggaatgatgctgcccagcctgacctctagcgtgtatttcttcgtgttcctggggctgtgtacctggtggtcttggtgtcgaacattcgaccctctgttatttagctgtctttgtgttttgttagctattttcaccgccggacacctcattggactgtatctgtaccagttccagttcttccaggaagctgtaccaccaaatgattattacgctcgcctttttggcattaaatctgttatacagacagattgcagtagcacttggaagatcattgtcaatccggacctgagttggtatcatcatgccaacccgattctgctcttggtaatgtactacacactggctacactgattcgcatatggttgcaggagcccctcgtacaagacgaaggtacaaaggaagaggacaaggccttggcctgttctccaattcagattacagctgggcgtcgtcggagtctgtggtacgccactcattaccctaccgacgaacggaagctgctcagcatgactcaggatgactacaaaccatctgacgggctgttggtgaccgtcaacgggaaccccgtggactatcacacaattcatccatccctgccaatggaaaacgggccaggcaaagcggatttgtatagcactccacagtatcggtgggagccgagcgacgagagttccgagaaacgcgaggaggaagaggaagagaaggaagagttcgaggaggaacgcagccgagaggaaaagaggtctatcaaggtccacgctatggtcagcgtgttccagttcataatgaaacagtcttacatctgtgcgttaatcgccatgatggcctggagcataacctaccattcttggctgacctttgtgctgctcatctggagttgcaccctctggatgatccggaatagacgcaaatacgccatgatctcttcacctttcatggtggtttatggtaacttactactgatcctgcaatacatatggagcttcgagttgccagagattaagaaggtccctggttttctagagaagaaggaaccaggagaacttgcttcaaagattctgttcacaataaccttttggctccttctccggcagcacctcaccgaacagaaggcgctgcaagagaaggaggcactgctgtcagaggttaagatcggctcccaggagaatgaagaaaaggacgaggaactccaggatatacaggtcgaaggggagcctaaggaagaggaagaagaggaagccaaggaagagaagcaggaaagaaagaaggttgagcaggaggaggctgaggaggaagacgaacaggatatcatgaaagttctgggtaatctggtggtggcaatgttcataaagtattggatatacgtgtgtggcggcatgttcttctttgtgtcattcgaggggaagattgtgatgtataagattatttatatggtcttattcttattttgtgttgctctctaccaggtacactatgagtggtggaggaagatcctcaagtatttttggatgagcgtggtcatatacaccatgctggtattgatattcatttatacctaccagttcgaaaactttcccggcctctggcagaatatgaccgggctcaagaaggaaaaactcgaagacttggggctcaaacaattcaccgtggctgagttgttcacaagaatatttatcccaacctctttccttctcgtctgcatccttcatttacattatttccacgaccgctttttagaacttactgatctgaagtcaattccgtccaaagaagacaataccatatacagactagcgcaccccgagggtagcctgcccgaccttactatgatgcaccttaccgcgtcacttgagaaacccgaggtccgaaagttagctgaacccggagaggaaaaacttgaggggtactctgaaaaagcccagaagggcgatctcggaaaagattctgaagagtctgaggaggatggtgaggaggaggaggagtccgaggaagaagaagagacctctgacctccgcaacaaatggcacctggtcattgacagactcacagtcctgttcctaaaattcctcgagtactttcataagctacaggtgtttatgtggtggatactggagttacacatcatcaagattgttagctcctatatcatctgggtgtccgtcaaggaggtatctctgtttaattacgtgttcctgatttcttgggctttcgccctgccttatgcaaaactacgaagattagcctcctctgtttgtaccgtatggacatgtgtgatcattgtgtgtaagatgctgtaccagctgcaaacaatcaagccagaaaatttctctgtgaactgtagccttcctaatgagaatcagaccaacattcctttcaatgaactgaacaaatctcttttgtactctgcgcccatcgacccaacagagtgggttggactccggaagtcatctcctttactagtctatctccgtaacaacctcctgatgctggctattttagcttttgaggttaccatctataggcatcaggagtattataggggacgaaacaatctgactgccccggtgtcaagaaccatcttccatgatattactaggctgcatctggatgatggtctgataaattgcgccaagtactttattaattacttcttctacaagttcggcctggaaacatgttttttgatgtcggtaaacgtgatcggccaacgcatggatttttatgcaatgatccatgcctgttggctgatcgctgtcctttacaggagacgccgcaaagccattgctgagatctggcccaaatactgttgctttctggcttgcattattactttccagtattttatttgtatagggattccgcccgctccctgccgagactacccctggagattcaagggagcctcgtttaacgacaatatcattaagtggctgtatttccccgactttattgtaaggcccaacccagtcttcttggtgtacgatttcatgctgctattatgcgcatctttgcaacgacagatctttgaggacgagaataaggcggctgtgcgaattatggccggtgataacgtggaaatatgcatgaacctcgatgcggcctcctttagtcagcataaccctgtacccgactttatacactgccggtcgtatcttgatatgtctaaggtgataatcttctcctacctgttctggtttgtgctgactattatttttatcacaggcacaacacgcatctctatcttctgcatgggttacctagtggcctgtttttactttttgctatttggaggggacctgctgctcaaaccaattaaaagtatacttcgctactgggattggctgatcgcttataatgtcttcgtgatcaccatgaagaacatcctgtctattggggcatgcggctatatcggcaccttagtccacaactcatgctggctgatacaggctttttccctagcatgtacggtgaaaggctaccagatgcccgctgcaaattcaccctgtacattaccatccggcgaagccggcatcatttgggacagtatctgctttgcctttctgctcctgcagagacgggtatttatgtcctactatttcttacacgtggtggcagacataaaagcctcccaaattctggcctcccggggggctgagctgttccaagccactattgttaaagcggtgaaggcacgaattgaggaggaaaagaagagcatggatcagctgaagcgccagatggacagaattaaggcacgccagcagaagtacaagaaagggaaggaacggatgctcagcctgactcaagagcccggggaggggcaagacatgcaaaagctatccgaagaggatgacgaacgggaagctgacaagcagaaagccaaagggaaaaagaagcagtggtggaggccttgggttgaccatgcctctatggtaaggtccggggactattacctcttcgaaactgattcagaggaagaggaggaagaggagctcaagaaggaagatgaagagccaccccgccggtcagcctttcagttcgtgtatcaagcttggataacggacccgaaaaccgccctgcggcagcggcacaaggagaaaaaaagaagcgcccgcgaagaacgaaagcggaggcgcaagggcagtaaagaaggccccgtggagtgggaggatcgggaagatgaaccgatcaagaaaaagtcggacgggccagataacattatcaaacgcatcttcaacatcctcaagtttacatgggtactgtttttagctacagtggattcttttacaacctggttgaatagcattagccgagaacacatagacattagcacagtgttgagaatagaacgctgtatgctaacacgagaaattaagaagggtaatgtgcctacccgggagtcaatccatatgtattatcagaatcatattatgaatctgtcaagggagagcgggttggacactatcgacgagcacccaggagcagctagcggagctcaaacagcgcaccgtatggacagtttagattctcatgattccatctccagcgagcctacacaatgtacaatgctatactccagacaggggaccactgagacaatcgaagaggtggaagctgagcaggaagaggaggccggaagtaccgctccagagcctcgagaagcaaaggaatacgaagccacgggctatgatgtcggcgcaatgggtgccgaggaggcatcattgacccctgaggaagagttaacacagtttagcaccctggacggggacgttgaggcacctccttcatacagtaaggctgtctcattcgagcatttgtcattcgggagccaagacgattccgccggaaagaaccgcatggccgtctccccagatgactcccggaccgacaagctggggtcctcaattctgccacccctgacacatgagttgaccgccagcgagctgctgttaaagaaaatgtttcacgacgatgagctggaggagtccgaaaagttctacgtggggcaaccccggttcctgcttttgttctacgccatgtacaatacgctcgtggctagaagtgagatggtgtgttactttgtgattattcttaatcatatggtgagtgcatccatgatcaccttgctgctccccatccttatctttctctgggctatgctaagtgtccctcggcccagtcgacggttctggatgatggcgatcgtgtacactgaggtagccatcgtggtgaagtacttctttcagtttggcttctttccatggaataagaatgtcgaggtgaataaggacaagccgtaccaccctccaaacatcatcggtgtggagaagaaagagggctatgtgctatatgacctaatccagcttctggcgctgttttttcaccgctcaatcctaaagtgccatggtctttgggatgaggacgacatgacagaaagcggaatggcacgtgaggaatcggacgacgagctgtctctgggccacgggagacgcgactcctccgattcactgaagtctataaatctcgcagcttctgtggagagcgttcacgtcacattcccagagcagcaaacggcggtgcgccggaagaggagcggttccagttcagaaccctcgcagcggagtagtttctctagtaacaggtcacagagagggagtacatccacacggaattctagtcagaaggggagttctgtcttaagcattaaacagaaagggaagcgagagctctacatggaaaagctgcaagaacatctaattaaggcaaaagcatttaccatcaagaagactttggaaatttatgtgccaattaaacagttcttctacaatctaatccaccccgagtattctgcagtgaccgacgtctacgtgctgatgtttcttgccgacactgtagactttataatcatagtgtttggcttctgggcgtttgggaagcactccgctgcagccgatatcactagctcactcagcgaggaccaggtgcccggcccattcctcgtgatggtgctcatccagtttggcaccatggtggtcgatagagccctgtatctccgtaagaccgtgctggggaaagtcatctttcaggttatccttgtatttgggattcatttctggatgttttttattctgccgggagtaactgagcgaaagttctcccagaacctcgtcgcacagttgtggtatttcgtgaagtgtgtctatttcggtctatctgcctaccagatccgctgtgggtatccaactcgcgtcctaggcaatttccttaccaagtcctacaactacgtgaacttgtttcttttccaggggttcaggctagtccctttcctaacggagctccgcgccgtgatggactgggtgtggaccgatacaactctatcactcagcagttggatctgtgtggaagacatctacgcacacattttcattcttaaatgttggagagagagcgagaaacgctaccctcaacctagagggcagaagaagaaaaaggtcgtgaagtatggaatgggcggtatgatcattgtcctcctcatttgcattgtctggtttcctctgctgttcatgagcttgattaaaagcgtggcaggcgtgataaatcagcccctggacgtttccgtgaccatcaccctcggagggtaccagcctatctttactatgagcgcacaacaatctcaattaaaagtgatggaccagcagtcttttaacaagtttatccaagccttcagcagagacaccggcgccatgcagttcttggaaaactacgaaaaggaagatattaccgttgccgagttagaaggcaatagcaatagtttgtggacaatctctcctccaagtaagcaaaagatgattcacgaactcttagacccaaattcatcatttagcgtcgtcttttcctggagtattcagcgaaatctgtctctcggcgctaaaagtgaaatcgccacagacaaattatcctttcccctgaaaaacataacgcgcaaaaatattgctaagatgatcgctggcaacagcaccgaaagctctaaaacgcctgtgacgattgaaaagatatatccatactatgttaaggctccctccgattccaattcgaaacctataaagcagctcctctcggagaataactttatggatatcactatcatcctctctagagataacaccactaagtacaactccgagtggtgggtcctgaacctgacgggcaaccggatttataaccctaattctcaagccttggaactggtggtgtttaatgataaggtctccccaccttcccttggttttctcgccgggtacggcatcatgggcctttacgcttccgtggtattagttatcggcaaattcgttcgtgagtttttttcaggcattagtcattctatcatgttcgaggagctgccaaacgtcgatcgtatcctgaagctctgcacagacatctttctcgttcgggaaacaggtgaactagaattagaagaggacctgtacgcgaaacttatatttttgtataggtcccctgaaacgatgatcaagtggactcgtgaaaagacaaactag

SEQ ID NO: 128863 - DNA, 1692 bp, synthetic construct
  misc_feature 1..1692: note = Description of Artificial Sequence: Synthetic coding sequence
  source 1..1692: mol_type = other DNA
atgtccgtggtgatctatactatgctagtgttaatctttatttacacttaccagttcgaaaattttcccggcctatggcagaacatgaccggtctcaagaaggaaaaactcgaagatttgggcttgaaacagttcacagtcgcagaactcttcaccagaattttcataccaactagcttcctattagtctgtatcctgcatcttcactacttccacgatagatttctggagctcactgatctgaagtccatccctagtaaagaggataacaccatttattcccacgcaaaggtaaacggtagggtgtatctgattattaactctataaagaagaagctgcctatccatcaaaacgagcttgcgcatcctgaggggtctctccccgatttaaccatgatgcatttgaccgctagtttggaaaagccagaggtgcgcaaactagccgaacccggggaagagaaattggagggatacagcgagaaagcccaaaagggcgacctgggaaaagactcagaagaatcagaggaagacggggaagaagaagaggaatctgaggaagaggaagagactagcgacctccgcaacaagtggcatctggtgatcgaccggttgacagtgctttttctcaaattcctggaatacttccacaagcttcaagtgttcatgtggtggatactggagttacatattatcaagattgtctccagttatatcatatgggtcagcgtgaaagaggtgtccctgtttaattatgtgttccttattagctgggccttcgcccttccttacgcaaagttgcggagactggccagtagtgtgtgtaccgtgtggacgtgcgtgatcatcgtgtgcaagatgctgtatcagttacaaacgattaaacctgaaaacttcagcgtgaattgctcattgccgaatgagaaccagacgaacatccccttcaatgagctcaacaagtctctcctgtattccgcccctattgatccaacggagtgggtgggacttcgaaaatcctcgcccctgctggtgtatctgcggaacaacttgttaatgcttgctattctggcgtttgaggtcaccatttatcgccaccaggagtattatcgcggcagaaataacctgaccgcccctgtttctcggactatttttcacgacatcacacggctgcatctggacgacggattgatcaattgtgctaagtacttcattaattacttcttctacaagttcggcctggaaacatgctttttgatgtctgtgaacgtgatcgggcagcgcatggatttttatgccatgatacacgcctgctggttaattgcagtcctttataggagaaggaggaaggcgatcgctgagatttggcctaaatactgctgctttctggcgtgcattatcacattccagtacttcatttgcatcggcataccgcccgccccatgcagggactacccctggcggttcaaaggggcctccttcaatgacaacatcattaaatggttgtattttccagattttatcgttaggcccaaccctgtttttctggtttacgatttcatgcttttgctgtgcgcgtccctgcagcgacagattttcgaggacgagaataaggcagccgttagaattatggcgggtgacaacgtcgagatttgcatgaacctcgatgccgccagcttcagtcagcacaatccgtag

SEQ ID NO: 128864 - DNA, 1941 bp, synthetic construct
  misc_feature 1..1941: note = Description of Artificial Sequence: Synthetic coding sequence
  source 1..1941: mol_type = other DNA
atgaccgaaagcggcatggcccgggaggaaagcgatgatgagttgtctctcggccatggtcgcagggattcttccgactcactcaagtcgattaacctggctgctagcgtagagtccgttcacgtgaccttccccgagcagcagacggcagtgcgacgcaaacggagtgggagctcaagtgagccatcacagcgaagctctttcagcagtaacaggagtcagcgaggtagcacatcgactcggaatagctcacaaaagggcagttcagtgttatccataaagcaaaaaggaaaaagagagctctatatggagaagctccaggaacatctgataaaagcgaaagcattcaccatcaaaaagacgctcgagatctatgtccccattaagcagttcttctataatctcatccaccccgaatacagcgccgtgactgacgtgtatgtccttatgttcctggcagacacggtggattttatcatcattgtcttcggattttgggcattcggcaagcactcggcggctgcggacataacaagcagtcttagtgaagaccaggtaccaggcccattcctcgtcatggtgcttatccagtttggcacaatggtggtggaccgggccctgtacctccgtaagaccgtgctgggcaaagtgatattccaagttatattggtattcggtatacacttctggatgtttttcatcctgccaggggtgactgaacggaagttctcacagaacttggtcgcccagctgtggtacttcgtcaaatgtgtctatttcggactgagcgcttatcaaattaggtgcggatatcccaccagagtcctcggaaacttcctgacaaagtcttataactacgtcaacttatttctcttccaagggtttaggttggtgcccttccttacagaactccgcgcagttatggactgggtgtggaccgataccactctctcgctgtcttcttggatctgcgtagaggatatctatgcccacatctttattctgaaatgttggcgggaatccgagaaacctatcttcaccatgtcagcccagcagagccaactgaaagtcatggatcagcagtcttttaataaattcatacaagccttctcacgagacacaggcgctatgcagtttctggaaaattacgagaaggaggatatcacggtagcagaacttgaagggaactctaactccctgtggactatttccccccctagcaagcagaagatgatccacgagttgctggatcctaactcctccttctctgttgtgttttcttggagtatccagcgaaatctgagcttgggtgcaaagagcgagatagccaccgataaactgtccttccctttgaagaacataaccaggaaaaatatcgctaagatgatcgccgggaatagtactgagtcctctaagacacccgtgactattgagaaaatttatccatattacgtgaaagctccatccgattcaaattcaaagccaattaaacaactactatctgagaacaactttatggatattaccatcatcctaagtcgggataatactaccaaatataatagcgagtggtgggtacttaacctaaccggcaataggatatacaatccaaacagccaggctttggaactcgttgtcttcaacgacaaagtatctccaccttcactagggttcctggccgggtacggcatcatgggcttatatgcctccgtggtgctggtcatcggtaagttcgttagggaattcttttccgggattagccacagtatcatgtttgaagaactgccaaacgtcgaccgcatcctgaagttatgcaccgatatctttctggttcgtgagactggcgagctcgagttggaagaagatctgtatgccaagctaattttcctgtatcgtagtcccgagaccatgattaaatggactagggagaagacaaactag

SEQ ID NO: 128865 - DNA, 2130 bp, synthetic construct
  misc_feature 1..2130: note = Description of Artificial Sequence: Synthetic coding sequence
  source 1..2130: mol_type = other DNA
atgaccgagtctgggatggctagagaagagagtgacgacgaacttagcctcggccacggcaggagagatagttccgacagcctcaaatcaatcaacctggccgcctctgttgaatcagtccatgtgaccttccccgagcaacagacggccgtgcggcgcaagcgaagtgggagctcttctgagccaagccaacgaagcagctttagctctaaccgcagccaacggggcagtacctcaacacgtaatagctcacagaaagggagctccgtcttgagtataaagcaaaagggtaaacgggagctgtacatggaaaaactgcaggagcacttgatcaaagcaaaagccttcaccatcaagaaaaccttggagatctacgttcccattaaacagttcttttacaatctcatccatcctgagtatagcgccgtcactgacgtctacgtcctgatgtttcttgccgacaccgtggatttcataatcattgtgttcggcttttgggccttcggaaagcattcagccgccgctgatatcacatcatcactgtctgaagaccaagtgccgggacccttcttggtgatggtgttgatccaatttgggacaatggttgtggatagggccttatacttgcgaaagactgtgctgggcaaggtgattttccaggtgatcctcgtcttcggcattcacttctggatgttctttatcctgcccggcgtgaccgagagaaaattctctcagaacctcgtggctcagctttggtatttcgtcaagtgcgtctacttcggcctatcagcctaccagatcaggtgtgggtaccccaccagggtcctgggaaatttcctgactaagagttacaattatgtcaacttgttcctgttccagggcttcaggttagttccctttcttactgagcttcgagctgtgatggattgggtctggacagacacaacgctgtccctcagctcttggatctgtgttgaggacatttatgcccatatttttatcctcaaatgttggagagaatccgaaaagcggtacccacagcctaggggccaaaaaaagaagaaggtggtgaaatatgggatggggggcatgataatcgtgcttctgatttgcatcgtctggttcccgctgctttttatgtctctgattaaaagcgtggccggggtcatcaaccagcccttagacgtgagcgtcacaatcacgctcggcgggtatcagccaatattcaccatgagtgcccagcagagccagttaaaggtgatggaccaacaaagctttaacaagtttattcaggcattctctcgagacacgggagccatgcagttcctggaaaattatgagaaggaagacatcacagtcgctgagctcgaggggaactccaattcactgtggacaataagcccaccttccaagcaaaagatgatacacgagctcttagatcctaactccagtttctctgttgtgttctcctggtccattcagcgcaatctcagcctgggcgctaaaagcgaaatagctacagacaaactcagctttccccttaaaaatatcacacgtaagaacatcgcaaagatgattgccggaaattccactgagagttccaagacacctgtcactatcgagaagatctacccctattatgtgaaggcaccgtcagactccaattccaaaccaattaagcagttgctgtccgagaacaatttcatggacattactatcatcctgagtcgcgacaacaccactaagtacaattcagagtggtgggtccttaatctgacagggaaccggatctataatcccaacagccaggcacttgagttggtagtttttaatgataaggtaagcccaccttctctggggttccttgccggctatgggattatgggactttacgcatccgtggtccttgttattggcaagttcgttcgggaattcttttctggtattagccactctatcatgttcgaggaactgcccaatgtggaccggatccttaaactgtgtaccgacatcttcctggtgagagaaacgggcgagctcgagttagaggaggatctgtatgccaagttgatatttttatacaggtccccagaaacaatgattaaatggaccagggaaaagaccaattag

SEQ ID NO: 128866 - DNA, 2565 bp, synthetic construct
  misc_feature 1..2565: note = Description of Artificial Sequence: Synthetic coding sequence
  source 1..2565: mol_type = other DNA
atggcattgaggctcgttgcagactttgatctcgggaaggatgtccttccctggctgcgggctcagcgggctgtatcggaagccagtggggcaggaagcggaggcgctgatgtcttggaaaacgactacgaatctttacatgtgctgaatgtggaaaggaatggaaatattatatatacatacaaagatgataagggtaatgtggtctttggtctgtacgactgtcagaccaggcagaatgagctgttgtatacctttgaaaaggatttgcaggtattctcctgcagcgtcaactccgaacgaactctgctggcggccagcctcgttcagtcaacaaaagaggggaagaggaatgagttgcagccaggatccaaatgtcttaccctcttggtggaaattcaccccgtgaataatgtaaaggtgcttaaagcagtcgactcttacatctgggtgcaatttctgtatcctcatatcgaaagccaccccctaccggagaaccatctattactcatttctgaagagaagtatattgagcagttccgcattcacgtggcccaagaagatggcaatcgcgttgtcattaagaacagtggacaccttccacgagataggatagcagaggactttgtgtgggcgcagtgggatatgtcagagcagcggctgtattacatagacctgaagaaatcacgatcgatcttgaagtgtattcagttctatgcagacgagtcctacaatctcatgtttgaagtgccactggacatttcgctgagcaattctggattcaagctggtcaatttcggttgcgactatcaccaatacagggacaaattcagtaagcatctgactctgtgcgtttttaccaatcacactggttcactttgcgtgtgttattcccccaaatgcgccagctgggggcaaattacctattctgtcttttacatccataagggtcactctaaaaccttcaccacatcccttgagaatgttggaagtcacatgaccaagggcatcaccttcttgaatctggattattacgttgccgtgtatcttcctggacatttcttccatcttctgaatgtgcagcacccggacttaatatgccataacctctttttgacaggaaataacgagatgattgatatgttgccacattgccctctacagtcgctttctggctcccttgttttagattgttgttcagggaagctctatagagccctcctcagccagtctagtttactgcagctgctgcagaatacctgtctagattgtgagaaaatggctgccctccactgcgccttgtattgcggccaaggagctcagtttctggaagcccaaatcattcagtggatctccgaaaacgtgagcgcctgccatagcttcgaccttatacaagaattcatcatcgcctcatcttactggagcgtttacagtgagacatccaacatggataagctcctgccccacagttcagtgttgacatggaataccgagatccccggcattacactagttacagaagatatagccttgcctctgatgaaagtgctgagcttcaaaggttattgggagaaactcaacagtaatcttgagtatgttaaatacgctaagccccattttcactacaacaatagcgtcgttaggcgtgagtggcacaatttaatctcagaagagaaaaccggaaaacggaggtcagctgcttacgtaaggaatatcctggacaacgccgtcaaagtgatttcgaatctggaggccagaaatttggggccccgattgactccactcctgcaggaggaggattcgcatcaaagactgctgatgggtctgatggtctccgaactcaaagatcactttttgcgccatctgcaaggagtcgaaaagaaaaagatagagcagatggtgctggactatatctccaagcttctcgaccttatttgccacatcgtggagaccaattggcgaaagcataacctgcacagttgggtgttgcacttcaattcgaggggctccgccgcagaatttgcggtcttccatattatgacgagaatcctggaggccacaaattccctgttcctccctctccctccaggctttcatactttgcacaccattctgggcgttcagtgcctccctctgcacaatttactgcactgtatcgactcaggcgtgctgctgcttacagagacggctgtgatccgtttaatgaaagacttagacaacaccgaaaagaatgagaaattgaaattcagtattattgtccgtcttcctccgctgatcgggcagaaaatttgccggctgtgggatcacccgatgtcctctaatattataagtcggaaccacgtcacccgattattgcaaaattacaaaaagcaaccccgaaattcaatgataaacaagagttcgtttagcgtcgagtttttgcccctgaactatttcatcgagatcttaactgatatcgagtcttcaaaccaggccctctaccccttcgaaggccatgataacgtggatgcagaatttgtggaggaggctgctctcaagcacacggcaatgttgctggggctatag

SEQ ID NO: 128867 - DNA, 528 bp, synthetic construct
  misc_feature 1..528: note = Description of Artificial Sequence: Synthetic coding sequence
  source 1..528: mol_type = other DNA
atgacacggatcctggaggctacaaatagcctattcctcccactgccgccaggctttcacaccctccacaccatattgggagtgcagtgcttgcccctgcacaatctcctgcattgcatcgacagcggggtgcttctgctaaccgaaaccgctgtaattaggctgatgaaagatctcgataatacggagaagaatgagaagttgaagttctctatcattgtaagactaccacccctcatcggacagaagatctgccgactttgggatcatccgatgtcttccaacataatttcgcgaaatcacgtgactagactcctgcagaactacaagaaacagcctaggaactctatgatcaacaaatcgagctttagcgtggagtttctgcctctgaactacttcatagagatactgacagatattgagagctcaaaccaggccctgtacccatttgagggacacgacaacgtggatgcagaattcgtcgaggaggctgccctaaaacatacggccatgttgctcgggttgtag

SEQ ID NO: 128868 - DNA, 873 bp, synthetic construct
  misc_feature 1..873: note = Description of Artificial Sequence: Synthetic coding sequence
  source 1..873: mol_type = other DNA
atggctaacccaaagctactgggcatggggctgtcagaagccgaggctattggggcggattctgctcgctttgaggagcttctccttcaggccagtaaggagttacagcaggcccagaccacacggcccgaatctacgcaaattcagccccagcctggcttttgcataaagaccaactccagcgaagggaaggtgtttattaacatctgccacagtcccagcatccctccacctgccgatgtgacggaggaggagctgctgcagatgctggaagaggatcaggccggtttcaggattcctatgtctttgggcgagccccatgcagagctggacgctaagggacaaggatgcaccgcatacgatgtggccgtgaactcagatttttataggagaatgcaaaactctgattttttacgggaactggttatcactattgcccgggaaggtcttgaagacaagtataatctgcagctgaaccctgagtggcgaatgatgaaaaatcgtccttttatgggcagcatcagccagcagaacatccggtctgagcagaggcccagaatccaagagttaggcgatttgtacaccccagctccagggcgcgccgagagtgggcccgaaaagccacaccttaatctctggctggaagccccggatctcctgctggccgaggttgacttgcctaaactggatggcgccctgggcttgtccctggagataggcgagaacagactcgtgatggggggacctcagcagctctaccacctggatgcttatatcccccttcagattaacagtcatgagagtaaggccgctttccaccggaagagaaagcagttgatggtggcgatgccactgctgcccgttccctcttag

SEQ ID NO: 128869 - DNA, 942 bp, synthetic construct
  misc_feature 1..942: note = Description of Artificial Sequence: Synthetic coding sequence
  source 1..942: mol_type = other DNA
atgctactcagcaagatcaactcccttgcccaccttcgagcggcaccctgtaatgacttacacgccacaaaactggcacccggcaaggagaaggagcccctggagtcacagtatcaggtcgggcctttgctggggtctggcggattcggatcggtttactccggtattagggtgtcagacaacctgccagtggctatcaaacatgtcgaaaaggacaggatctctgattggggcgagctccccaatggaacgcgcgtgcctatggaggttgttctactaaagaaggtgagctcagggtttagcggggtgatcaggctcttagactggttcgaacgaccagattcgttcgtgctgatactggagaggcccgaacccgtgcaggatttgtttgatttcattacagagcggggagctttacaggaagagctggcacggagcttcttctggcaagtgttagaggctgtgcgacactgtcataattgtggggtactgcatcgagatattaaagatgaaaatatactgatagatctgaatagaggagagttgaagcttatcgactttggctcaggcgctttgctcaaggataccgtgtacaccgattttgatgggacccgcgtatactcacctcccgaatggattcggtatcatagataccatggcaggagtgcagctgtatggtctttggggatcctgctctatgacatggtgtgcggcgatatcccctttgaacatgacgaagagataatccgggggcaggtgttcttcagacagcgtgtttcgagtgagtgtcagcatctgattcgctggtgcctcgcccttaggccctccgaccgtccaactttcgaagaaattcagaatcacccttggatgcaagatgtcctgcttccacaggagacagccgagatccacctacattccctgtcccctggcccctctaagtag

SEQ ID NO: 128870 - DNA, 936 bp, synthetic construct
  misc_feature 1..936: note = Description of Artificial Sequence: Synthetic coding sequence
  source 1..936: mol_type = other DNA
atgctgacaaagcctttgcagggcccccctgcccctccagggactccaactccaccccctggcggaaaggacagagaagccttcgaggcagaatataggttgggccccttgcttggcaagggcggattcggcaccgtgttcgctgggcatcgcctcaccgaccggctgcaagttgctataaaggtgatcccccggaatcgggtcctgggttggagcccattaagtgacagcgttacttgtccgctggaggtggccctcctttggaaggtgggcgctgggggaggtcatcctggggtgattcgcctcttagattggttcgaaacccaggaaggctttatgctggtattggaacgccccttgcccgcccaagacctatttgactacattacagagaaaggccctttgggggaggggccctcccggtgtttctttggccaggtggtcgcagccatacagcactgccacagcaggggagtcgtgcatcgggacatcaaagacgaaaacatcctgatcgatctgagacgtggttgcgctaaacttatcgacttcggatccggtgcattgttacatgacgaaccttacacagacttcgacggaactcgagtgtactctcctcctgaatggatttcgaggcatcaatatcatgctctgcctgccacagtttggagtctgggaatcctcttatatgacatggtgtgtggggatatacctttcgaacgcgaccaggagattctcgaagcggagttacatttcccagcccatgtctcacctgattgctgcgccttgatccgccggtgcctggctccgaaaccgagtagcagaccctcactggaggagattttgcttgacccctggatgcaaacgcccgcagaggacgtacccctgaacccgagtaaaggcgggccggctcccctcgcctggagcctccttccttag

SEQ ID NO: 128871 - DNA, 438 bp, synthetic construct
  misc_feature 1..438: note = Description of Artificial Sequence: Synthetic coding sequence
  source 1..438: mol_type = other DNA
atgttggtcttagagcgccctctccccgcccaggacctgttcgactacatcacggaaaaaggaccccttggggagggccccagcagatgcttcttcggacaggtggtagctgctattcaacactgccacagccggggagtcgtccacagagatattaaggacgaaaacatcctgatcgatctccgtagaggttgcgccaaactgattgactttgggtccggggctttgcttcatgatgagccgtatacagatttcgacggtacacgagtctatagcccaccggaatggatcagtcgccaccaatatcacgccctccccgctacagtttggagccttgggattttactgtacgatatggtatgtggcgatatcccctttgaaagggaccaggagatccttgaggcagaactgcactttcctgcccacgtgtccccatag

SEQ ID NO: 128872 - DNA, 2925 bp, synthetic construct
  misc_feature 1..2925: note = Description of Artificial Sequence: Synthetic coding sequence
  source 1..2925: mol_type = other DNA
atggcaaaagcaggacgggccggcgggcccccacctggtggtggcgcaccgtggcatttgagaaacgttttgtctgacagtgtagagagctctgacgatgagttcttcgacgcccgcgaggagatggccgaagggaagaacgcgattcttatcggtatgagccagtggaattccaacgacctggtggagcagatcgagacgatgggaaagctggacgagcaccagggggaaggtacggccccatgtacctcctctatcctgcaggagaaacagcgggaattatacagagtctctcttaggaggcagcgcttcccggcccagggaagtattgagatccacgaggacagtgaagaaggatgtccccagcgttcttgcaaaacccatgtgctcctgctggttctccatggtgggaatattctcgacacgggggcaggcgatcccagctgcaaagcagctgacattcacacattttcgtccgtccttgagaaagttacacgcgctcacttcccagccgccttaggacatattttaattaaattcgtgccctgcccagccatatgcagcgaggctttctcacttgtctctcacctgaacccttactcccatgacgagggctgcctgagctcgtcccaagaccacgtgcccctggctgctcttcctttgctcgccattagcagcccacagtaccaggatgccgtggcaaccgtgatcgagagagctaaccaggtctatagagagtttctcaaatcctccgacgggatcggcttttccggacaagtatgcttgatcggagattgcgtgggcggtctgctagctttcgatgcgatctgttactcggccgggccatcaggcgattctcctgccagcagcagccgcaaggggagcatatcaagtacacaggatacgcccgttgccgtcgaagaagactgcagtctggcgagttccaagcgactcagtaaaagcaatatagacatatcctccggccttgaagatgaggaacccaagcggcctcttcctcggaagcagtcagacagttcgacatacgactgcgaagccattacacaacatcatgcgttcttaagcagtatccactccagcgtcttgaaggacgaaagtgagacccctgccgcaggcggcccacagctcccagaggtgagcctggggcgtttcgacttcgatgttagtgacttctttctcttcggttctcctctaggactagtgttagctatgcgccgcaccgtactaccgggcctcgatggattccaagtgcgtcctgcgtgttctcaagtgtactccttctttcactgcgccgatccttcagcctctcggctcgagcccctgctggaaccaaaattccacttagtacccccagtctcagtgcctaggtaccagcgcttccctttaggagacggtcagtccctgctactggcagacgcactacacacccacagcccactattcctggaaggctcctctcgtgactctccccccttactggacgctcctgcttccccgccacaggcaagtcggttccagcgtccaggcaggaggatgagtgaaggttcaagccatagtgaaagctcggaatccagtgattctatggccccagtgggcgcttcccgaattacagcgaagtggtggggcagtaaacgcattgactacgccctgtactgtccggatgtcctgacagcattcccaacagtggctttgccccacctgttccacgcatcatactgggaatctaccgatgtggtcgccttcatactgcgtcaggtgatgcgctacgaaagcgttaacatcaaggaaagtgcccgactggatcccgctgcactaagtccggctaatccgcgagagaagtggcttcgcaaacgcacccaggttaaactgagaaatgtcactgccaatcacagagccaatgatgtgatcgctgcagaagacggtccacaggtgctggtcggccggtttatgtacggccctttagatatggttgcgttgaccggcgagaaagtagacatcctggtgatggccgagccttcaagcggacggtgggtgcacttggataccgagattacaaatagttcaggcaggatcacgtataacgtccccagaccgcgccgcttgggtgtgggtgtgtaccctgtcaaaatggttgtgagaggtgatcaaacttgtgccatgtcctatctgaccgtcttgccacgcgggatggaatgtgtggtgttctctattgatggctcgttcgccgcatccgtctcaatcatgggcagtgatccaaaagtgaggcccggagctgtagatgtggttcggcactggcaggacctcgggtacatgatcctctatattaccggacggccagatatgcagaagcagcgagttgtgagctggctaagccagcacaatttccctcagggtatgatattcttctcagacggcctggtccacgacccgttgaggcagaaggccatctttctacgcaatctgatgcaagagtgctttatcaagataagtgccgcatacggcagcactaaggacatcagcgtatactcggtgctgggtctgcccgctagccagatcttcatcgttggtcgcccaacaaaaaaataccagactcagtgtcagttcctttctgagggctacgcagctcacctggccgccctggaggcgagccaccgctctcgccccaagaaaaataacagcagaatgattctacgtaaaggaagttttggactgcatgcgcaacccgaattccttcgaaaacgcaatcatctccggaggaccatgtctgtgcagcaacctgacccgccagctgctaatccgaaacccgagcgcgcgcagagccagcctgagagcgataaggatcacgagcgacccctgcccgccctttcgtgggcacggggtccaccaaagttcgagtccgtgccttag

SEQ ID NO: 128873 - DNA, 2817 bp, synthetic construct
  misc_feature 1..2817: note = Description of Artificial Sequence: Synthetic coding sequence
  source 1..2817: mol_type = other DNA
atggcgaaggccggacgcgccggaggccccccaccaggagggggtgctccatggcatctccgcaatgtgctgtctgacagtgtggagagctccgatgacgagtttttcgacgcacgcggcgagggaactgccccgtgtacctcttcaatactacaggaaaagcagagagagctataccgggtctccttgaggcgccagaggtttcccgcacagggctctatcgagattcacgaggatagtgaggagggatgtcctcagcgcagctgtaagacccacgtgctactgttggtattgcatgggggaaacattctcgacacgggggcaggggatcctagctgtaaagccgccgacattcacactttcagttccgtgcttgaaaaagttaccagggcacattttcccgccgcactgggtcacatactgataaaatttgtaccatgtcctgcaatatgttctgaggcgttttcccttgtatctcatctgaacccgtactctcacgacgagggctgtttatccagtagccaagatcacgtgcctctggcggccctgccactgctggctatttctagtccccagtatcaggacgcggttgccaccgtgattgaacgggcgaatcaagtttaccgggaattccttaaatcttcagatgggatcgggttttccggccaggtgtgtctgataggcgattgcgtcgggggattactggcgttcgacgccatatgttatagtgccggtccttccggagattcaccagcttcctctagccgcaagggctctatcagctccacacaggatacccccgtcgccgtcgaagaggattgcagcttggcttcctctaaaaggctaagcaaatccaacatcgatatctccagtggtctggaggatgaggagccaaagcgtccactgcctcggaaacagtctgactcctccacctacgattgcgaggcaattacacagcatcatgcatttctgagtagtatccacagcagtgttcttaaggacgaatctgaaacacccgcagccgggggtccccaactcccagaagttagcctaggtcggtttgattttgacgtttccgactttttcctgttcggcagtccactgggtcttgtcctggctatgcggaggactgtgctgccaggcctggacggcttccaagtgaggcccgcctgttctcaggtgtacagttttttccactgcgccgatccctctgcttcacggctagagcccctgcttgagcctaagttccatctggtcccgcccgtgtcagtccctcgctatcaaagatttccattaggagatgggcagagtctgctgctggcagacgctttacatacacactcaccattgttcctcgagggcagtagtagagattctcccccactcctggacgcaccggctagtcccccacaagcttcacgcttccaaagacccggcaggcgtatgagtgagggctcctcccattcagaaagttcagaatcttctgattcaatggctcctgtgggagcaagcaggatcactgcaaaatggtggggaagtaagcggattgactatgcgttgtactgtcccgatgtcctgactgcctttccaactgttgctttacctcacctcttccacgcgtcatactgggaaagtacagatgtggtagccttcatactgagacaggtgatgcgctatgaatctgtcaatatcaaagagtctgcacgtttggacccagccgctctgagtccagccaaccccagagagaagtggctgagaaaacgtacacaggtaaaactgaggaatgtgactgccaaccatcgcgcaaatgacgtgatcgcggccgaggatgggccacaggtgttagtgggccggttcatgtacgggcccctggatatggtcgcactgaccggcgagaaagtggacattctcgttatggcagagccttcctctggtcggtgggtccaccttgatacagaaattaccaattcctccggtagaatcacttacaacgtgcctcgaccaagaagactaggcgttggcgtgtaccctgtcaaaatggtagtgcgcggcgatcaaacctgtgctatgagttatcttacagtgcttcccagggggatggaatgtgtcgttttcagcatcgacggtagtttcgcagcgtcagtgtcgatcatgggaagtgaccctaaggtccgacccggcgcggtggatgtggtccgccattggcaggatctggggtacatgattctctacatcactggacggcctgacatgcagaagcaacgcgtggtttcatggctgtcccagcacaatttcccccaagggatgatcttctttagcgacggcctagtgcatgatcccctgcgccaaaaggcgatttttttgcgtaacctaatgcaggagtgctttatcaagataagtgctgcatatggcagcacaaaggatatctcagtgtatagcgtgttaggactgcccgcctcccagatttttatagtgggacgacccaccaaaaagtaccagacacagtgccagtttctgtccgagggttatgccgcccacctggcagcactcgaggccagccatcggagcagacccaagaagaacaatagcaggatgatattgcgcaaagggagctttggcctgcacgcccaacctgagttcttgaggaaaagaaatcatttaaggagaacaatgagcgtacagcagccagatcccccagcagccaatccaaaacctgagcgggcgcagtcgcagcctgagtccgataaggaccacgaaaggcccctgcccgccctgtcttgggcacggggaccacctaagttcgagtctgtgccctag

SEQ ID NO: 128874 - DNA, 609 bp, synthetic construct
  misc_feature 1..609: note = Description of Artificial Sequence: Synthetic coding sequence
  source 1..609: mol_type = other DNA
atggcaaccctcatttatgtggataaggaaaatggagaacccggtacccgagttgtggcaaaagacggattgaagctggggtctgggccctccattaaggcgctggacggccgttctcaggtgtctacgccccgattcggaaaaaccttcgatgctccaccagcccttccgaaagccactagaaaggctttggggaccgtgaatagagcaacagagaagtccgtgaagactaaggggcctctgaagcagaagcagccctcgttctcagccaaaaaaatgaccgagaagacagtcaaggctaagtcgtcagtcccagcatctgacgacgcctacccagaaatagagaaattctttccattcaaccccctggacttcgaaagctttgacctcccggaggagcaccaaatcgcgcacctgccactttccggcgtgcccctcatgatcctggacgaagagagagaattggaaaaactgtttcaacttggcccaccttcccctgtcaagatgccatcccctccatgggagagcaacctcctgcagagcccaagctcaattctgagtacgctcgatgtcgaacttccgccggtctgctgcgacatcgatatttag

SEQ ID NO: 128875 - DNA, 609 bp, synthetic construct
  misc_feature 1..609: note = Description of Artificial Sequence: Synthetic coding sequence
  source 1..609: mol_type = other DNA
atggctactctcatttacgtggataaggagaatggagagccgggaacgcgggtcgtggctaaagacgggcttaagttgggcagtggtcccagtatcaaagctctcgacgggcgttcacaagtaagcactcccaggtttggcaagacattcgacgcacctccagccttgcctaaagcaacaaggaaggccttgggaacagtgaatcgggccactgaaaaatcagtcaagacaaagggacccctcaagcaaaaacagcccagtttcagtgctaaaaagatgacagaaaaaacggtcaaagccaagtcaagcgtgccagccagcgacgacgcatatccagaaattgagaagttctttccgttcaatcctctcgacttcgagagttttgatctcccagaggagcaccagatcgctcacttacctctttctggggtgcccctgatgattctggacgaggaaagggaactggagaagctctttcagctgggccctccaagccccgtgaagatgccatcacctccatgggaaagtaacctactccaaagtccatcttctattctgtctacccttgacgtggaattacctcccgtctgctgtgacatagatatatag

SEQ ID NO: 128876 - DNA, 609 bp, synthetic construct
  misc_feature 1..609: note = Description of Artificial Sequence: Synthetic coding sequence
  source 1..609: mol_type = other DNA
atggcaaccctgatatacgtcgacaaggaaaatggcgagcctgggactcgtgtagttgccaaggacggcctgaaactggggtcgggcccttccataaaggccctggacggccgaagccaggtttccaccccccgattcggtaaaacttttgatgcaccaccggctctgcccaaggccacacgcaaggccctgggaactgtcaatcgagctacagaaaagagcgtgaagaccaagggccctctcaagcagaaacaaccatctttcagcgcaaagaagatgactgaaaagactgtaaaggcaaaatcctccgtgcctgccagtgatgacgcgtatcctgaaatcgaaaagttcttcccattcaatcccctggacttcgagagctttgacctgccggaggagcaccagatcgctcacctgcccctgagcggcgtccctctgatgatattggatgaggagcgggaactggagaaactttttcagctcggccctccctcaccagtcaaaatgccatcacctccttgggagtctaatctgttgcaaagtccaagctcaatcttatctacattggatgtcgaattgcctcctgtgtgttgtgacatcgatatttag

SEQ ID NO: 128877 - DNA, 543 bp, synthetic construct
  misc_feature 1..543: note = Description of Artificial Sequence: Synthetic coding sequence
  source 1..543: mol_type = other DNA
atggcccctggcgtagcccggggacctaccccatactggaggctcagacttggaggcgccgccctcctgctgctgctgatcccagtcgcagcagctcaagagccgcctggagccgcttgtagccagaatactaataagacttgcgaagagtgcctgaaaaacgtctcctgcctttggtgcaacacaaacaaggcttgcctggattaccccgtgacctcagtgctccccccggcctctctgtgtaaacttagctctgctcgttggggcgtctgttgggtcaattttgaggccctgatcattacgatgtccgttgttggtggcacactgctgcttgggatagcgatctgttgctgctgctgctgccgaaggaaacgatccaggaagcccgacaggagtgaagaaaaggccatgagagagagagaggagagacgtattcgtcaggaggagaggcgggccgagatgaagacacggcatgacgagatacggaagaagtacggacttttcaaagaggagaacccctatgcacggttcgaaaacaactag

SEQ ID NO: 128878 - DNA, 429 bp, synthetic construct
  misc_feature 1..429: note = Description of Artificial Sequence: Synthetic coding sequence
  source 1..429: mol_type = other DNA
atggccccaggggtcgcccgcggccccacaccctactggcggctacggctgggcggcgccgccctcctgctgctcctgatcccggtggccgccgctcaggaaccgcccggagctgcctgctctcagaataccaacaagacgtgcgaagaatgtttgaaaaatgtttctgcctgccttaagaaaaaaacccggatgctggacttgaagactactaaggcccttcaacacatctctcccgatgctagttgcgaagtgcacgcgccacaacccagtcccgccgggcggcctcgggggcattgtggactgctgacactggcatccgagcccgcatcactgcctgggcaggcggcaggggaacttccgttgaaggactcacccctggtcttgcagaccggcgacctactctttcctgtacacctctgcttttag

SEQ ID NO: 128879 - DNA, 576 bp, synthetic construct
  misc_feature 1..576: note = Description of Artificial Sequence: Synthetic coding sequence
  source 1..576: mol_type = other DNA
atggcaacactgatctatgtggacaaggaaatcggggaacctggcacacgggtggcagccaaggatgtgctcaaactcgagtctaggcccagcatcaaggcattggatggaatctcgcaggtgcttactcggcgtttcggaaagacctatgacgcacctagcgccctgcctaaagcaacccgaaaggccctgggcaccgtgaatcgagcaactgagaaatcagtgaagactaatgggcctcgcaaacagaaacaacccagtttttccgctaagaaaatgacagaaaagactgtcaaaactaaaagctccgtgccagcttctgacgatgcgtatcccgagatagaaaagttttttccattcaatctgttggacttcgagtcttttgatctgcccgaagagcggcagatcgcgcatctgccccttagcggcgtccctctcatgatcctcgatgaggagggtgagctggaaaagcttttccagctagggccgccatcccctgtcaaaatgccttctccaccttgggagtgcaatctgtttgccgtcagtttcaaacatagtgtcgatccaggttgctag

SEQ ID NO: 128880 - DNA, 2586 bp, synthetic construct
  misc_feature 1..2586: note = Description of Artificial Sequence: Synthetic coding sequence
  source 1..2586: mol_type = other DNA
atgactggccgagccagagcccgtgcacgaggccgggcaagagggcaggagaccgcgcagctggtcgggtccacagcctctcagcagccaggctacatccaacctcgaccacagcctccccctgcagagggcgagttatttggaagaggtcggcagagggggactgccgggggcacagccaagagtcagggcctgcagatttcggctggttttcaggagctgtcactggccgagcgcggaggcaggagacgggatttccacgacctaggggtgaacacacgacaaaacctcgatcatgttaaggagagtaaaactgggtcctctggtattatcgtgcggctctccacgaaccacttccgactgacatcccgtccgcagtgggctctatatcagtatcacatcgactacaaccccctgatggaggcccggcggctgcggtcggccctgctgtttcagcatgaggacctgattgggaaatgccatgcgtttgatggcaccattctcttcctccctaaaagactgcaacagaaggtgactgaggtgttcagcaaaacccgaaacggtgaggacgtcagaatcacaatcaccctaactaacgagcttccccccactagcccaacatgcctgcagttttataatataatctttcgcaggctgctcaaaatcatgaatttgcagcagattgggcggaattactacaacccgaacgatcctatcgacatccctagtcatcggctcgtgatctggccaggattcactacttccatattacaatatgagaatagtatcatgctgtgtactgatgtctctcataaagtcttgaggtccgagactgtccttgacttcatgttcaatttctaccaccagacagaggagcacaaatttcaggagcaggtctcaaaagagctgatcggcctggttgtgctgaccaagtataacaacaaaacttatcgagtggacgatattgattgggatcagaatcccaagagcacctttaaaaaggccgacggctccgaagtttcctttctggaatattatcgtaaacagtataaccaagagattacggacttgaagcagcctgtcttggtgtctcagccaaaaagacgcagggggcccggcggaacattacctggaccggctatgcttattcctgaactctgttaccttaccggccttaccgataaaatgaggaatgactttaatgtcatgaaagatcttgccgtgcatacaagactcactcctgagcaaaggcagagggaagtgggccgtctgatcgactatattcataaaaacgacaacgtgcagcgggagctgcgagactggggccttagtttcgacagcaacctgctttctttctctggcaggattttgcagaccgaaaagattcaccaaggcggcaaaacctttgattacaacccacagttcgccgactggtcaaaggagacacgcggggcgcctctgattagcgtaaagcctctggataattggttgcttatttatacccgccggaactacgaagctgccaactccttgatccagaatttgttcaaggttacgcctgctatgggaatgcaaatgcgcaaggcgatcatgatcgaggtggacgaccggacagaggcttatctgcgggtccttcagcaaaaggtgaccgccgatacccagattgtcgtgtgcttgctttccagcaatcgcaaagacaagtacgatgcgattaaaaaatacctttgcactgactgtcccactccgagtcagtgcgtagttgctcgtaccctgggaaagcagcagacggttatggcaattgcaacaaagatcgctctgcagatgaattgcaaaatgggaggcgagctatggagagtggacatacccttgaagctggtgatgattgtggggatcgattgctaccacgacatgacagctggcaggcgttccattgcagggtttgtggctagcattaacgagggaatgactcggtggttcagtaggtgtatcttccaggacaggggccaggaattagtcgacggtctgaaagtctgcctgcaggctgctctgcgagcttggaactcctgtaacgagtacatgccttccagaattattgtttatcgggacggtgttggagatgggcagctgaagacgctcgtaaattacgaggtgcctcagtttctggattgccttaagtccatcggtcgagggtataatccaaggcttacggtgatcgtagtgaagaaacgggtgaatacaagatttttcgctcagtcaggaggccgactgcagaaccctctgcctggaacagtcattgatgtcgaggtgactagaccagaatggtacgactttttcatcgtctcacaggctgtgagaagtgggtcggtaagccccacacactacaatgtgatctacgacaactcggggctgaagcccgaccacatacagcgcttaacctacaaattgtgtcatatttactataactggcccggagtcatcagagtgcctgccccgtgccagtacgctcacaagttggcatttctcgtaggacagtccatccatagagagccaaacttgtccctgagtaatcggctgtactatctgtag

SEQ ID NO: 128881 - DNA, 369 bp, synthetic construct
  misc_feature 1..369: note = Description of Artificial Sequence: Synthetic coding sequence
  source 1..369: mol_type = other DNA
atgaccggccgtgcaagggctcgcgctagaggaagagcaagagggcaagagaccgcgcagctggtgggcagcacagccagccagcagcctggctatattcaaccgcgtccccaacctcctcccgctgaaggtgaactgttcggcagaggacggcagaggggcactgctgggggcaccgccaagtcccagggcttgcagatttcggctggcttccaggaattatcgctggcagaacgggggggcagacggcgggattttcacgacttgggggtgaatactcgccagaatctggatcacgtgaaagagtctaaaacaggaagtagcggcatcattgtgaggctttcgactaaccattttcggctcacttag

SEQ ID NO: 128882 - DNA, 453 bp, synthetic construct
  misc_feature 1..453: note = Description of Artificial Sequence: Synthetic coding sequence
  source 1..453: mol_type = other DNA
atgacagggagggctcgggccagagcgagaggccgggcacggggccaggagactgctcaactggtgggttcgacagctagccagcaacccggatacattcaaccaaggccacagcctccccccgccgaaggcgagctgtttgggagagggcgccagagaggtaccgctggtggaacagccaagtcacagggattgcagatcagcgccggatttcaggaactgtctctggcagagcgggggggtcggcgccgtgattttcacgatctgggcgtcaacaccaggcagaacctggatcatgtgaaagagtccaaaactgggagttccgggattatcgttcggttgagcacaaatcactttcgattgacttctaggccccagtgggctctttatcagtaccatatcgattacaacccactcatggaggcgcgtagacttaggtctgccctgctttag

SEQ ID NO: 128883 - DNA, 519 bp, synthetic construct
  misc_feature 1..519: note = Description of Artificial Sequence: Synthetic coding sequence
  source 1..519: mol_type = other DNA
atgacaggtcgcgctcgggccagagcgcgcggaagagccagagggcaagaaacagctcagctggtgggtagcaccgcttcgcaacagcctggctacattcaacccaggccccagccgcctccagcagaaggtgagttgtttgggaggggccgacagaggggcactgccggcggcactgctaagagccaagggctgcagatctcagccggctttcaggagttgagtttggcagaacgtggcggccggcgcagagattttcacgatctcggtgtcaatactcgccagaatttagatcatgtgaaggaaagcaaaactggttcatcgggtattatcgttcgactgtctactaaccacttcagactgactagtagaccccagtgggctttataccagtaccatatcgattacaacccactaatggaggcgagaaggctgagatctgccctcctgttccagcatgaagatcttataggtaaatgtcacgccttcgatggcaccattctcttcctgcctaaatag

SEQ ID NO: 128884 - DNA, 498 bp, synthetic construct
  misc_feature 1..498: note = Description of Artificial Sequence: Synthetic coding sequence
  source 1..498: mol_type = other DNA
atgactgggagagctcgagctcgagctcgagggcgcgcacggggccaagagaccgcccagctagtcggcagcactgccagccaacagccaggatatattcaaccaagaccccaacctcctcccgccgagggggaactgtttggaagaggcagacaacgcgggacggcaggggggactgcaaaatcccagggccttcagatttcagccggcttccaggagctaagcctggccgaacgcggaggacgcaggcgggacttccacgacctgggcgtgaacaccaggcaaaacttggatcacgtgaaggagagcaagacagggtcttcaggaattatcgtgcgcctgtcaacgaatcattttaggctgacaagcaggccacagtgggctttgtaccagtatcatatcgattataatcccctgatggaggcccgaagacttcgctccgccttgctctttcaacacgaggatctcatcggaaagtgccacgcatttgacggatag

SEQ ID NO: 128885 - DNA, 2922 bp, synthetic construct
  misc_feature 1..2922: note = Description of Artificial Sequence: Synthetic coding sequence
  source 1..2922: mol_type = other DNA
atggacccattccgacctagttttcgaggccagtctcccatccacccgagccaatgtcaggctgtgaggatgccagggtgctggccgcaggccagcaagccactggatcctgcgctggggcgcggcgcccccgctggccgcgggcatgtcttcgggaaaccagaagaaccaagtacccagcggggtccagcacaaagagaatccgtcggattggtgtccatgttcaggggattagggatcgagactgtgtccaaaacccctttaaaaagagaaatgcttccaagtgggagaggtatactgggccgcgggctaagcgccaatctcgtgagaaaagatagggaagagctcagcccaactttctgggaccctaaagttttagcagcaggtgactctaaaatggccgaaacttccgtggggtggtcgaggactctgggtaggggaagctctgatgcatctttgctgcctctgggccgggcggccggaggaatttcccgcgaggtcgacaagcctccatgcaccttttctaccccctctcgtggcccacctcaactaagctcaccacctgcgttgccacagtcaccactgcatagcccagaccgccccctcgtccttacggtggagcacaaggaaaaagaattaattgtgaagcaggggagcaagggaaccccccagagcctgggcttgaacttagtcaagatacagtgccacaatgaagcggtctaccagtatcacgtcaccttttctccgaacgttgaatgcaagagtatgcggtttgggatgttgaaagatcatcaggccgtaacaggtaacgtgactgctttcgatggctctatcctgtacctgccggttaaactacagcaggtcctggaactaaagtcccagcgaaagacagactccgctgaaatctccatcaaaattcaaatgacgaaaatcctggaaccctgcagcgacctctgcataccattctacaatgtggtgtttagaagagtgatgaagctcctcgatatgaaactggtgggacgcaacttctatgatccgactagtgccatggtgcttcagcagcacagacttcagatctggccaggttacgcggcctcgatccgcagaactgatggaggtctgttcctgctggcagatgtcagtcacaaggtgattcgcaatgactgtgtactggatgtgatgcatgccatctaccagcaaaataaggagcattttcaggatgagtgtactaaactcctcgtcggaaacatcgtgattaccagatacaataaccgaacctataggattgatgatgtggattggaacaaaacccccaaagactcttttacaatgtccgacgggaaagaaatcacattcctggaatactactcaaaaaattacggaatcaccgttaaggaagaggaccagccgctgttgatacatagaccctccgagcgacaagacaaccacggcatgctgctgaaaggggagattcttttgctgccggagctctcattcatgaccggcatcccagaaaaaatgaagaaggattttagagcaatgaaagacctcgcacaacagataaacctgtccccaaagcagcatcatagcgcccttgagtgcctcctgcaaaggatagcgaagaacgaagctgccacaaacgagctgatgcggtggggtctcagactgcagaaggatgttcataagatcgagggacgtgttctgcccatggagcggattaacctaaagaatacctctttcattacgagccaagaacttaattgggtgaaggaggtgacacgcgacccatctatactgactattccgatgcatttttgggctctgttctaccctaagagagctatggatcaggctcgcgagctggtgaacatgctggaaaagatagctggaccgatcggtatgcggatgtctccacctgcatgggttgaattaaaggacgaccggatcgagacatacgtccgcacgattcaatcaactcttggcgcagagggcaaaattcagatggtagtctgcatcataatgggccctagagatgatctgtacggagccatcaaaaaactgtgttgtgtacagagccctgtgccaagccaggttgtgaatgttcggacaatagggcagccaaccagactccggtctgtcgcccagaagatactcctccagatcaattgcaaactgggtggcgaactctggggggttgacattcctctgaaacaactgatggttattggaatggacgtgtaccatgacccttctagaggtatgcgctcagtcgtggggttcgtggcttctataaatttaacactaacgaagtggtattctagagtcgtctttcagatgccacatcaggagattgtggatagtctgaagctttgcctcgtggggagtctgaagaagttctacgaggtgaatcactgtctcccggagaaaattgtggtgtatagggacggcgtgagcgacgggcaactgaagacagtggccaattacgagattccacagctgcagaaatgtttcgaggccttcgagaactatcagccaaagatggtggtgttcgttgtgcagaagaagatatcaaccaatctgtacttagccgctccccagaactttgtcaccccgaccccagggaccgtggtggaccacaccatcacctcttgtgaatgggtggatttttacctcctggcccaccatgtgaggcagggatgtgggatccctacacactatgtgtgcgttctgaacacagccaatctgtcccccgatcatatgcagcgcctgacgtttaagctgtgtcatatgtattggaactggcccgggacaattcgcgtgccggccccatgtaaatacgctcacaagttagcctttctgagcggccacattttgcaccacgaacccgccattcaactgtgcgaaaacctgttctttttatag

SEQ ID NO: 128886 - DNA, 2922 bp, synthetic construct
  misc_feature 1..2922: note = Description of Artificial Sequence: Synthetic coding sequence
  source 1..2922: mol_type = other DNA
atggatccttttcggccatcctttagggggcagagccctattcaccccagccagtgtcaggccgtgcgaatgcccggctgctggccccaggcttcaaagcccttagacccagcacttggcagaggagctccagccggcaggggccatgtctttgggaagcctgaggaacctagcacacagcggggcccagctcagcgggaatctgtgggcctcgtgagcatgttcagaggccttggcattgaaacagtgtccaagacccctttgaaaagagagatgctcccatccggtagaggcattctagggcgaggcttaagtgcgaatctggtgcggaaggacagagaggagctttcaccaactttttgggatcctaaagtgctagcggcgggcgatagcaagatggccgagacgagtgttggttggagccgcacactcggtagaggaagctctgacgcaagcctcctccccctgggtcgggccgctgggggcatcagtcgtgaggtcgataaacccccctgcactttttctaccccgtctcggggccctccgcagctctcctcccccccagctctgccccagtctcctcttcactctcctgatcgtccactggtgctgaccgtggaacacaaggaaaaggagctgattgttaaacaaggctccaaagggacccctcagagtctcgggcttaacctcgtgaaaattcaatgtcataatgaggcggtctatcagtaccacgtcacattctctcctaacgtggagtgcaagtcgatgaggtttggcatgttgaaagaccaccaagcagtgacaggcaatgtcactgcttttgacggctccatcctgtatctgcctgtcaaacttcagcaggttctggagcttaagtctcaacgcaaaaccgatagcgctgagatcagtataaaaattcagatgacaaaaattttagagccatgcagtgacctgtgcatcccattttacaacgtggtgtttagaagagtgatgaaacttcttgacatgaagctggtggggcgtaacttttatgatcctacgagtgcaatggtattacaacaacataggctgcagatttggcctggctacgctgcaagtatcaggcggacagacggggggctctttctgcttgccgatgtgtcccataaggtgatcaggaacgattgtgtgctggatgtcatgcacgccatttatcaacagaataaagaacacttccaggacgaatgcaccaagctgctagtgggaaatatagtgataacccgatacaacaatcggacctatcgtatcgacgacgttgactggaataaaacgcctaaggatagctttaccatgtcagacgggaaagaaataaccttcctggaatattattcaaagaactacgggattactgtgaaagaggaagatcaaccactattgatccaccgcccctccgagagacaggacaatcacggcatgctcctaaagggagagatcttattgctccctgagctgtccttcatgaccggaatcccagagaaaatgaagaaagactttagagccatgaaagacctggcacagcaaatcaacttgtctcccaaacagcaccacagcgccctcgagtgcctgctgcagcggattgcaaaaaatgaggccgcgaccaatgagttaatgcgctggggcctgcgcttgcagaaggacgttcataaaattgagggaagagttctccccatggaaaggataaatctgaaaaataccagctttattacatctcaggagctaaactgggtcaaagaggtcacccgggacccgagcatcctcaccattccaatgcacttttgggcactgttttacccaaagagagctatggaccaggctagagagctcgttaacatgctagagaaaatcgcgggccctatcggcatgcggatgagtccccctgcctgggtggagttaaaggatgatagaatcgagacttatgtacggacaatccagtctaccctgggagccgaaggcaaaattcagatggtggtttgtattataatgggcccccgagatgatctatacggcgccataaagaagctttgttgtgtccagtcaccagtcccctctcaggtggttaacgtgcggactataggccagccaacacgacttagaagtgttgcacaaaaaatcttgctccagatcaattgcaagctagggggggagctgtggggagtagatatccccctgaaacagctgatggtgattggcatggatgtgtatcatgatccctccagaggaatgagaagtgtggtgggctttgtcgcctcaatcaatctgaccctgacaaagtggtactcaagagtggtgttccaaatgccacaccaggaaatagtggactcccttaagctgtgcctcgtggggtctttgaagaaattctatgaagtaaaccactgcttgcctgaaaaaatcgttgtttatagggatggggtgagcgatgggcagcttaagactgttgccaattatgaaattcctcaactccagaaatgctttgaggcattcgagaactaccagccaaaaatggtggtgtttgtggttcaaaaaaagatctcaacaaacctgtatttggcagccccgcaaaacttcgtgacccctacccccggaaccgtggttgatcacaccatcacctcttgcgaatgggtggacttctacctgttagctcaccatgtgagacagggatgcgggatcccgacgcactatgtctgtgttttgaatacagctaaccttagtccagaccatatgcaaagactcacatttaaattgtgtcatatgtactggaactggccgggcacaatcagagtgcctgccccctgcaagtatgcacataaactggccttcctgtctgggcatattctgcatcacgaaccagccatccagttgtgtgaaaacctattcttcctctag

SEQ ID NO: 128887 - DNA, 639 bp, synthetic construct
  misc_feature 1..639: note = Description of Artificial Sequence: Synthetic coding sequence
  source 1..639: mol_type = other DNA
atgaaggtgttcaagttcatcggcctcatgattctgcttacgagtgctttctctgcgggctccggacagtcaccaatgaccgtactgtgctctatcgactggttcatggtgacagtccacccctttatgctcaataatgatgtatgcgtccattttcatgaactccacctgggactgggctgcccgccaaaccatgtccagccacacgcgtaccagttcacctatcgggtcactgagtgcggtattcgggcaaaagccgtgagccaggacatggtgatctactcaactgaaattcactactccagcaaggggacacctagcaagttcgttattccagtgtcttgtgctgcccctcagaagagcccgtggctcaccaaaccctgctccatgcgcgtcgctagcaagtccagagctacagctcaaaaggatgaaaagtgttacgaggtcttcagcttaagccaatcctctcagagacccaattgcgattgtccaccctgcgttttctctgaagaggagcacacacaggtgccttgtcatcaggcaggggcccaggaggcccagcccctgcaaccctctcactttctggacatatccgaggactggtccctgcatacggacgatatgataggctccatgtag

SEQ ID NO: 128888 - DNA, 294 bp, synthetic construct
  misc_feature 1..294: note = Description of Artificial Sequence: Synthetic coding sequence
  source 1..294: mol_type = other DNA
atgcgccctctcttatgtgcactgaccgggcttgcccttctacgagcagccggaagtctggccgccgccgagcctttcagccctccgaggggggatagtgcacaatctaccgcttgcgatcgccacatggccgtacagcgccgcctggacgtgatggaggagatggtggaaaagaccgtggatcatcttgggacagaagtcaagggtttgttaggcttgctggaggagctagcttggaacctcccacccggtcctttcagtcccgcgccggatctgctcggcgacggtttttag

SEQ ID NO: 128889 - DNA, 264 bp, synthetic construct
  misc_feature 1..264: note = Description of Artificial Sequence: Synthetic coding sequence
  source 1..264: mol_type = other DNA
atgcgcccactgctgtgcgcacttaccggactcgccttgctgcgggcggcagggagtctggcagctgcagagccattttccccgccgcgcggagatagcgcccagagtacagcctgtgatcgtcatatggctgtgcagcggaggttagatgtcatggaagagatggccagcgagccatggtcctggtcccccgctgtcggcggcggagctcctgccaggcaaaggccccagaaccagccgtgccctctggactttcttccatag

SEQ ID NO: 128890 - DNA, 168 bp, synthetic construct
  misc_feature 1..168: note = Description of Artificial Sequence: Synthetic coding sequence
  source 1..168: mol_type = other DNA
atggctgtgcagcgccgcttggacgtgatggaggagatggtggagaagacagttgatcatttgggaacagaggtcaagggcctgctggggctgctcgaagaacttgcttggaatctgccccctggccctttcagtcctgcacccgatctcttgggtgatggattctag

SEQ ID NO: 128891 - DNA, 2244 bp, synthetic construct
  misc_feature 1..2244: note = Description of Artificial Sequence: Synthetic coding sequence
  source 1..2244: mol_type = other DNA
atgaaccattctccgctgaaaaccgccctggcttatgaatgcttccaggatcaggataacagcacacttgcattaccttccgatcagaagatgaaaactggaacatccgggagacagagggtgcaggagcaggttatgatgactgtgaagcgacagaagtccaagtcctctcagagcagtactctgagtcattcaaatcgaggctccatgtatgacgggctggcagataattacaactacgggaccaccagcaggtcatcttactattctaagttccaggctggtaacggcagctggggttacccaatctacaacggaactctcaaacgagagccggataacagacggttttcgtcatatagccagatggagaattggtctcgccattatccacggggctcatgcaacacaacgggcgcaggcagcgatatctgcttcatgcagaagattaaagcgagccgctcagagcctgatctgtattgcgaccccagggggaccctgcgcaaaggaacactgggttcaaaaggccaaaaaacaacgcagaaccgctattctttctacagcacgtgcagcggccaaaaggcgatcaagaaatgcccagtcaggcccccctcctgtgccagcaaacaggacccagtgtatataccacccatcagctgcaacaaggacctctcctttgggcactcccgagcatcaagcaagatctgtagcgaggatatcgaatgtagtgggttaactattcctaaagctgtacagtatttgtcatctcaggacgaaaagtatcaggccatcggggcttactacatccagcatacctgcttccaggatgagtcagccaaacaacaggtgtaccaactgggcggaatttgtaaattggtagacctgctgagatcgcctaaccagaatgtgcagcaggcagcggcaggagcgctgagaaatctggtcttcaggtccacaaccaataaactcgaaactcggaggcaaaatgggatccgcgaagccgtgtctctgttgcgccgaaccggtaatgctgagatacagaagcagcttactggactcctgtggaacttgtcttccactgacgagctgaaggaggagctgattgccgatgccttaccagtcctcgccgaccgcgtaataatccctttcagtggttggtgtgatggtaacagcaatatgtcgcgcgaagtggtggacccagaggttttcttcaatgcgaccggatgccttcgaaagcgcctcggtatgcgggaactcctggccctggtgcctcagagagccacaagctcccgcgtgaacctctcctcagccgacgctggacgtcagacaatgcggaactattccggattgattgattctctcatggcctatgtgcaaaattgcgtggctgcctctaggtgtgacgacaaaagcgtggaaaattgtatgtgcgtccttcacaacttgtcatataggctcgatgccgaagtgcccacacgataccgccaactggaatataatgctcgcaatgcgtatactgaaaaatcttccactggctgcttctcaaacaagtccgataagatgatgaataacaactacgactgtcctctcccagaagaggagactaatcccaagggctcgggctggctctaccattcagacgccatacggacctacctaaacctcatgggtaagagtaaaaaggacgctaccttggaggcctgtgctggcgccctccaaaatttgaccgcgtcaaaagggctgatgagttctggaatgagccagctgattgggttaaaagagaagggattgcctcagatcgcacgtctcctccagagcggcaacagtgatgtggtccggtccggtgcttcactcctgtcgaatatgtcacggcacccgcttctgcaccgcgtgatgggcaatcaggtcttcccggaagtaactaggctactaacctcccataccggtaatacatcaaatagtgaggacatcctctctagtgcctgttatacagttcggaacctaatggcctcccagccacaattggccaagcagtacttcagcagttcaatgctaaataatatcatcaacctgtgtcgttcatccgcctcacccaaagccgctgaggcagcccgtctgttattgtcagacatgtggagcagcaaagaattgcagggtgtcctgcgacagcagggattcgatcggaatatgctgggcaccctggccggtgccaactcactgagaaactttacaagtcggttctag

SEQ ID NO: 128892 - DNA, 2244 bp, synthetic construct
  misc_feature 1..2244: note = Description of Artificial Sequence: Synthetic coding sequence
  source 1..2244: mol_type = other DNA
atgaaccatagtcccctgaagaccgcactagcgtacgagtgtttccaggatcaggacaattccacactcgcactgccgagcgatcaaaagatgaagacaggcacgtctggtcgccaacgagttcaagagcaggtaatgatgactgtgaaaagacagaaatctaaatcatcccaatcctctacactctcacatagcaatcgcgggtccatgtacgacggactcgccgacaattacaactacgggaccacatcccgatcctcgtactactccaagtttcaagccggcaacggttcatggggttacccaatttataacggtactctgaaacgggagccagataatcggagattctcctcctacagccagatggaaaactggagtcgacactatccacgcggatcgtgcaatactaccggcgctggcagtgatatctgcttcatgcagaaaataaaggcatctaggtctgaacctgacctctactgtgaccctcgaggcacactcaggaagggaacactgggtagtaagggccagaagaccacccagaatagatactctttctatagtacatgttcaggacagaaggcgattaaaaaatgtccagtcagaccaccgtcctgtgcatcgaagcaggacccagtctatataccaccgatcagctgtaacaaggacctgagctttggtcacagcagggctagcagtaagatatgcagtgaggacatcgagtgctccggattaaccatcccgaaggccgtccaatatctctcttctcaggatgagaagtaccaggcaattggtgcatattatatccagcatacgtgtttccaggacgagtccgctaagcagcaagtgtatcagctggggggcatttgcaagttggtagacctgttaaggtcccctaaccagaacgtgcaacaggcagctgctggtgccctcaggaacctggtgttccgttccacaaccaacaaactggagacacgacgacagaacggaatacgcgaggcagtcagtctcctgagaagaactgggaatgcggagattcaaaagcagttaacaggcctgctatggaatctgagttctaccgacgagcttaaggaggagctcattgcagatgcactgcccgttctcgcagaccgcgtgatcatcccctttagcggctggtgtgatgggaatagcaacatgagccgggaggtagtagaccctgaggtgttcttcaatgctactggatgcctaaggaaacgccttgggatgagagagctactggccctggttccccagcgagctacttcatcccgcgtgaacctatctagcgcagatgccggaaggcagaccatgcgtaactatagtggactgatcgattcactcatggcttacgtgcagaattgcgtcgctgcatccagatgtgacgacaaatcagtcgaaaattgtatgtgcgtgctgcataacctgtcttaccggcttgacgctgaagttcccactcgatatcgccagctggagtataacgcacggaatgcctacacagaaaagtcttctacaggatgtttctcaaacaagagcgataaaatgatgaataataactatgattgtcctttgcccgaagaagaaacaaaccccaagggatcaggatggttgtaccactccgatgccatcagaacttatctgaatctcatggggaaatccaaaaaagacgctacactggaggcctgcgcgggtgccttacagaatttgaccgccagcaagggattgatgtcctctggcatgtcccagctgattggtctcaaagagaaaggcctgccacaaatagcccgcctcctccagagtggaaatagcgatgtggtgaggagtggagcatctctcctcagcaatatgagtaggcatcctctattgcacagggtgatgggcaatcaggtgtttccagaagttacaagactgctgacttcccatacagggaacactagtaactccgaagacatactcagttctgcgtgctacaccgtccgcaacctgatggcgtcccagccacagctcgctaaacaatacttcagttcttcaatgctcaataatatcatcaatctctgtcgcagttctgcatcacctaaggcggccgaggcagcacgtttgctgctctccgacatgtggtcaagcaaggaactccaaggcgttctgcgacagcagggattcgaccggaacatgctgggaacactagccggcgctaactccttgagaaattttaccagccgtttctag

SEQ ID NO: 128893 - DNA, 2181 bp, synthetic construct
  misc_feature 1..2181: note = Description of Artificial Sequence: Synthetic coding sequence
  source 1..2181: mol_type = other DNA
atgaaccactcaccactgaagacggcactcgcttatgagtgcttccaagaccaggacaactcgaccctcgcccttcccagtgaccagaaaatgaagactgggacttctggacgccagagagtgcaggagcaggtgatgatgaccgtgaaacgccagaaaagcaagagctcccagtcctcaacgctgtcacactctaaccgcgggagtatgtacgatgggctggctgacaattacaattacggaactacgagccgatcctcctactactctaagtttcaggccggcaacggcagctggggctaccctatttacaatggcacactgaagcgagagcccgataacaggcgattttcgtcttactcccaaatggaaaattggagccgacattaccccaggggcagctgcaacaccactggggctggatctgatatctgtttcatgcaaaagattaaagccagcaggtctgaaccggatctgtactgcgacccaagaggcacattacggaaagggactttaggctctaagggacagaaaaccacacagaacaggtacagcttctactccacctgctctgggcaaaaggctattaaaaagtgcccagtgcgcccgcctagctgcgcctctaaacaggatcccgtgtacatccctccgatctcctgtaacaaggacctgtctttcgggcatagcagagcctcctcaaaaatctgttctgaagatattgagtgctccggcttgacaatcccaaaagccgtccagtacctgagcagtcaggacgagaaatatcaggccatcggggcctactacatacagcatacatgttttcaagacgaaagtgcaaaacaacaggtctaccaactcggcggaatctgcaaattagttgatttgctaaggtcccccaaccagaatgtccagcaggctgccgccggcgccctccgaaatttggtctttaggtcaaccaccaataaattggagacacgcaggcaaaacgggatacgtgaagccgtgagccttctccggcggactgggaatgccgaaattcaaaaacagttaactgggctcctgtggaatctctctagcaccgatgaactgaaagaggaactgattgcggacgcactccctgtcctcgcagaccgagtcataattccatttagcggttggtgtgatggcaacagtaacatgtccagggaggtagtggatccagaggtattctttaatgctaccggctgcctgcggaacttgtcctctgctgacgcaggcaggcagaccatgcggaactatagcggactgattgattctttgatggcttatgttcaaaattgcgttgccgccagccgatgtgacgacaagtctgtggagaactgcatgtgcgtgctgcacaacttatcatatcgcctggatgctgaggtgcctactcgctaccgccaacttgagtataacgctcgcaatgcgtacaccgaaaagagtagcaccggatgtttttcaaacaaaagcgacaagatgatgaacaataactacgattgtcccctgcctgaagaggagaccaatccaaagggtagcggctggctctaccattcagacgcaattaggacctacctaaacctgatgggtaagagtaagaaagatgcaactctcgaggcctgcgcaggagctctgcagaacttgaccgcctctaagggactcatgtcctcgggcatgtcacagctcattggcttgaaagaaaaggggctgccccaaatcgctagattgctccagtccggcaatagtgatgttgtacgtagtggagcctcactgctctcaaatatgagtcgccatcctcttctgcacagggtcatgggcaatcaagtgtttcctgaggtgacccggctgctaacatctcatacgggtaacacctcaaacagtgaagacatcctgagtagcgcttgctacaccgtgcgtaacctgatggcttcacaaccccagctggctaaacagtatttttcttcttcgatgttgaacaacatcatcaacctttgtagatctagcgcatcaccaaaagcagctgaggccgcgcgcttgttactgagcgacatgtggagctccaaggagctccagggggtgttgaggcagcagggattcgacaggaatatgctggggaccctggctggtgccaacagtttgagaaatttcacatcacggttttag

SEQ ID NO: 128894 - DNA, 2646 bp, synthetic construct
  misc_feature 1..2646: note = Description of Artificial Sequence: Synthetic coding sequence
  source 1..2646: mol_type = other DNA
atggccgctcctggcgcccccgctgagtacgggtacatcaggacagttctgggacagcagattctaggtcaattggatagctcatcactggccctgcctagcgaagcgaaactgaaactcgccggctcatccggcaggggggggcaaacagtgaagtccctgcgcattcaggagcaggttcagcagacactcgcccggaagggaagaagctccgtcggaaatggtaatctgcatcgcacttcaagtgtcccagagtacgtttataatctgcacctggtagaaaacgatttcgtgggggggcggtctccagtcccaaagacctatgatatgctgaaggcagggaccactgccacatatgagggacgttggggcagagggacagcacagtatagcagccaaaagtccgtggaggaaaggtccctgcgtcaccctctgaggcggcttgagatctcccctgattcatcacccgagagagcgcactacacccactcagattatcaatactcacaaagaagccaggccggccacacacttcaccatcaagagtcacgccgggctgcactacttgtcccaccccgatacgcgagatccgaaatcgtcggtgtctctcgcgctggcacaaccagcagacagagacattttgatacttaccaccgtcagtaccaacatggatcggtgtccgatacagttttcgactccatccccgccaatcctgcgctgctaacataccccaggcccggcacatcacgctctatgggtaatctactggagaaagagaactacctgaccgccggactcaccgtgggccaagttcgaccccttgttcctctccagcctgtcactcagaaccgggctagccgttcttcttggcaccagtctagctttcacagcaccaggaccctgcgcgaggcgggcccatccgttgccgtggactcatccggccggcgtgctcacctgaccgtggggcaggctgccgccggaggctcgggaaatctcctgactgagcggtccactttcaccgacagccaattaggcaacgctgacatggagatgaccctggaacgcgcagtgtccatgcttgaagccgaccacatgctcccttcgagaataagcgcagcagcaaccttcatccagcatgagtgcttccaaaagtccgaagcgcgcaagagggtgaatcaactgcgggggatactgaagctcctgcagctcctgaaggtgcaaaatgaggatgtgcagcgggctgtttgcggagcactgcgaaatctcgtgttcgaagacaatgataacaaacttgaagtggctgagctcaacggcgtccccaggctgctgcaggtgcttaaacaaacacgcgatctggaaactaaaaaacaaatcactgaccataccgttaatttacggtctaggaacggctggcccggtgctgttgcacacgcgtgcaacccttcaacccttggaggacagggtggaaggattacccgctctggcgttcgagaccagcctgaccaacacggtctgctctggaatctgtcttctaacgataagctgaagaacctgatgattaccgaagctttgcttactttaaccgaaaatatcattatccccttttctggttggcccgaaggcgattaccctaaggcgaatgggctgctcgatttcgatatattttacaatgtaaccggctgtctgagaaacatgtcttctgcaggggccgatggtaggaaggcaatgagaaggtgtgatgggctgattgattcactggtgcactatgtgcgtgggaccattgccgactaccagcctgacgacaaagctactgagaactgtgtttgtatccttcataatctgtcctaccagttggaggccgaacttcctgaaaaatacagtcagaatatttacattcagaatcgaaacatccagaccgataataacaaaagcattggctgcttcggctcacggagccgtaaggtgaaagagcagtaccaggacgtgccgatgcctgaagagaaatctaacccaaagggagttgagtggctgtggcattcgattgtgatacgaatgtacttgagcctaattgctaagagtgtgcgtaactatacacaggaggccagcctaggcgcattgcaaaacctgaccgccggctctggaccaatgcccacctccgtggcacagaccgtggtgcaaaaggaaagcggactgcagcacacacggaaaatgctgcacgtaggggacccttctgtaaagaagacagctatctcgctactccgcaacctttctcgtaatctgtctctgcagaatgagatcgcaaaagagacacttcccgatctggtgagtattatccccgatactgtcccctcaaccgacttgctgatcgagactacagccagcgcctgctacacccttaacaacataatccagaacagttaccagaacgcacgcgacctgcttaatacaggtggaatccagaagattatggccatctccgccggagacgcatacgcatcaaacaaagcgtcgaaggccgcatcagttctgctgtactcgctctgggctcatacggagctgcaccacgcctacaagaaggcccagttcaagaagactgacttcgtgaatagtcgaacagcaaaggcatatcactctttgaaggattag

SEQ ID NO: 128895 - DNA, 2514 bp, synthetic construct
  misc_feature 1..2514: note = Description of Artificial Sequence: Synthetic coding sequence
  source 1..2514: mol_type = other DNA
atggcagccccaggcgccccagccgaatatggctatattagaacagtcctgggccagcagattctaggacagctggattcctcatccttagccctcccttcagaggctaaactgaagctcgcgggtagctccggacggggaggccagaccgtgaagtctctgcgtatccaggagcaggtgcaacaaactcttgccaggaaggggcgttcttcagtcggtaatgggaatctccatagaacatcctctgtgcctgaatacgtctataatttacacctggtggaaaatgacttcgtgggaggccgatcacctgtcccgaagacctacgacatgcttaaagcaggcacaaccgctacatacgagggtcgatggggacgaggcacggcccagtactcttcccaaaaaagtgtggaagagcgatctctccgccatccactgcgccgtctggaaattagccctgattcttcccccgagcgagcacattacacacacagcgattatcagtacagccagaggagtcaagcaggccacaccctccaccaccaagagtctaggcgcgcagccctgttagtacccccaaggtacgctcggtccgaaattgtaggagtttcgcgggccggaaccacgagtaggcagaggcattttgatacataccacagacagtaccagcatgggagcgtgagcgacactgtctttgacagcatccccgcaaacccagctctcctgacatacccgcgccccgggactagcaggtctatgggcaatctcttggagaaggaaaattatctgactgctggactcaccgtggggcaagtgaggcccctggtacccctgcagccagtcacacagaacagagccagtcgtagctcctggcatcagtcaagtttccattcaacccgaactctgcgagaagccggaccctccgtcgctgttgacagcagtggacgcagagcacatctgaccgtcgggcaggcagccgccggagggtccgggaatctcctgaccgagaggtcaacgtttacagacagccaattgggaaacgccgatatggagatgacattagaacgtgcggtttctatgctggaagccgaccatatgctgccttctaggatttccgccgccgcaacctttatccagcacgagtgttttcagaagtccgaggctaggaagcgggtgaaccaactccgaggtattttgaagctcctccagctgcttaaggtacaaaatgaggacgtgcagcgcgctgtatgtggcgcactgcgaaatctggtttttgaggacaatgataacaaactggaggtggccgagttgaatggcgtaccccggttactgcaggtgttaaagcagacacgcgacctggaaacgaagaagcagatcaccggcctcctgtggaacctgtcttctaacgacaaactaaaaaatctcatgataacggaagcattgctgacactaacggaaaacatcatcatccccttcagcggttggccagagggtgactacccaaaggctaacggattactagactttgatatcttttataacgtgacaggctgcctgaggaacatgtcctcagccggtgcagatggccggaaggctatgagaagatgcgacgggttgatcgactctctggttcattacgtgcgaggcactatagccgattaccaaccggacgacaaagccaccgagaactgcgtgtgcatcctgcataatcttagctaccagctagaagcagaactcccggaaaaatattcgcagaacatctacattcagaatcggaatatccagactgacaacaacaaatccattggctgctttgggtcacgaagccgcaaagtgaaggagcagtatcaagatgttccgatgcctgaagaaaaaagcaaccccaagggggtggagtggctttggcattccatcgtcatacgcatgtacctgtcattaattgcaaagtccgtgcggaactatacccaagaggcctctctaggcgcccttcagaacttaactgctgggtccggtcctatgcctacttccgtggctcagactgtcgttcaaaaggaaagtgggctccagcatactagaaaaatgcttcatgtcggagacccaagtgtgaaaaagaccgcaatatctctgctccgcaatctgtctcgtaatctgtcactccaaaacgagattgcaaaagaaacccttcctgacctcgtttcaatcattcctgataccgttccatctacagacctgctgatagagactaccgccagtgcttgctatacattgaataacatcatccagaattcctatcagaacgctagggacctcctgaacacgggaggcatccagaagatcatggccatctccgcgggggatgcctatgcgtctaataaggcctctaaggccgctagcgttctgctgtatagtctgtgggcccacaccgagctgcatcacgcttataaaaaagcccagtttaagaagaccgacttcgtcaattcaaggactgcgaaagcttaccatagcttgaaagactag

SEQ ID NO: 128896 - DNA, 2475 bp, synthetic construct
  misc_feature 1..2475: note = Description of Artificial Sequence: Synthetic coding sequence
  source 1..2475: mol_type = other DNA
atggccgcgcctggggcacccgcagagtatggctacatacggacagttcttggtcaacagatattggggcagctggattccagctcactggctctgccatctgaggcaaagctgaaacttgctgggtccagtgggaggggaggtcagaccgtgaagagtttaaggatacaagagcaggtgcagcagactctcgccagaaaaggcagatcctccgtgggaaacggtaatttacaccgcactagctccgttccagagtacgtgtacaatctgcacttagtcgagaacgactttgtgggaggcaggtcgccggtgccaaagacctatgacatgctgaaggccggtactacagcgacgtacgaagggcggtggggtcgagggaccgcgcagtattcaagccagaagtccgtcgaagagagatctctgcgccaccctctgaggcgactagagattagtccagacagttctccggagcgggcccattatacgcactctgattaccagtacagtcagcgcagccaagccggtcacacactccaccatcaagaatctcggagagcagcactactggtgcctcccaggtatgctcgcagcgaaattgttggagtaagtcgcgccggtactacctctagacagcgccatttcgacacataccatcgccaataccaacacgggtcagttagcgacaccgtttttgatagcattcctgccaatcccgcgcttttaacttacccgaggcctggcacctccagatctatggggaacctactagagaaagagaactatctcacagcaggactgaccgtgggacaggttcggcccctagtacctctccagcctgtaacacagaatcgcgcatctcgcagttcctggcaccagtcttcatttcactctactagaaccctgcgggaagccggcccaagtgttgctgtagactcttccgggaggagagcccacctgacagtggggcaggcggctgccggaggctctggtaacctgctgactgagagatcgacattcacggactctcagctcgggaatgctgacatggagatgaccctcgagagagcagtgagtatgctcgaagccgatcatatgcttcccagtagaatctctgccgcggccacatttattcagcacgaatgctttcagaagagcgaagccaggaagagggtaaatcagcttcgcggcatcctgaagctgctccagcttctaaaggtgcagaacgaggacgttcagcgcgcagtgtgtggtgccctcagaaatctggtgttcgaggacaacgacaacaagctggaagttgctgaacttaacggggtgccccgcctgctgcaggttctgaagcaaactagggacttggagaccaagaaacagatcaccgaccatactgtgaatctgcgctctcggaacggctggcccggggccgtcgcccacgcttgtaaccctagtaccctggggggccagggtggtaggatcacacgaagtggtgtgagggaccagcctgatcagcacgggctgctttggaacctcagtagtaacgataagctgaagaatctgatgataactgaagctcttctgactttgacagagaacatcatcataccattttctggatggccagaaggcgattacccaaaagcaaatgggctcctagatttcgatatcttctataatgttactggctgtctccgaaacatgtctagcgctggtgcggacggcaggaaagcgatgcgccgttgcgatggcctgatagatagtctggtacactatgtccgggggacaatcgctgactaccagcccgacgacaaggccacggagaactgcgtatgcattctccacaatctgtcctaccagcttgaggcagagctgccggaaaagtattcgcagaatatctatatccagaatcggaacatccaaaccgacaacaataagtcaataggatgttttgggagccggagccggaaagtaaaagagcagtatcaagatgtccccatgccggaggagaaatcaaaccccaaaggggtggaatggctgtggcactcaattgtgatccggatgtatctgagcctgatcgccaaaagcgtccgaaactacactcaagaggccagcttgggggcactgcagaacctcactgccgggagtgggcctatgccgacctcagtggcccagaccgtggtgcagaaggagtccggcttgcagcatactcgcaaaatgctccatgtgggtgacccttctgtgaagaaaaccgccatctcactgctgagaaatctgagcagaaacctgtctttgcaaaatgagattgccaaggagacactgcccgacctggtcagtattatacctgatactgtgccgtccacagatctgttgatcgaaactacagctagcgcttgctacaccctgaacaatatcatacagaattcgtatcaaaatgcccgtgaccttctcaatcgtggccaccctgagaactacgggcactag

SEQ ID NO: 128897 - DNA, 2394 bp, synthetic construct
  misc_feature 1..2394: note = Description of Artificial Sequence: Synthetic coding sequence
  source 1..2394: mol_type = other DNA
atgcaagacggcaacttcttgctatcagctctccaacctgaggcgggtgtgtgttccctggccctgccaagtgacctgcagctcgaccggcgaggcgctgaaggacctgaggcggagcggctgagggccgcgcgcgtccaggagcaggtgcgtgctcgcttacttcagctcgggcagcagcccagacataatggggctgccgaacctgagcccgaagccgagacagccaggggcacctctaggggacaataccataccctacaagctggattctcctccaggtcgcagggtctttctggagataagactagtggattccgcccaattgcaaagcccgcttattcaccggcatcctggtctagcagatcagctgtggacctcagctgcagtagaagactgtcatctgcccataacggcggttccgcctttggcgcagccggctacggaggtgcgcaacctaccccgccaatgcctaccagaccagtatcattccatgaaagaggaggcgtgggcagcagagccgattacgatactctatccttgaggtctctcagacttggtcctggcggactcgacgaccgctatagtctcgtgtccgaacagctcgagcccgctgccacatcaacctacagagcgtttgcttacgaacggcaggcatcatcaagctcatctcgggcaggcgggctggactggcctgaagccactgaggttagccccagccgaacaattcgggccccagctgttcgcaccctacagagatttcaatcctcccatagatctcggggtgtcggcggcgcagtgccaggcgccgtgctggaacccgtggctagggcaccgagtgtgcggtccctgagcttgtctctcgcagattcaggacatctgccagacgtgcatgggtttaatagctacgggtcccacaggacactgcaaagactaagctctggctttgacgatattgacctgccttcagcggtgaagtacctgatggcgagcgaccctaacctgcaggtactgggagccgcatatattcaacataaatgctactccgacgccgcggcgaaaaagcaagcaaggtctttgcaagccgtaccccgcctggtgaagctatttaatcacgctaaccaagaggtgcagcgacacgcaacaggagctatgcgaaatttaatatatgacaatgcagacaataaactggctctggtcgaggagaatggcatcttcgagcttctacggacgctgcgtgagcaggatgacgagttaagaaaaaacgttaccgggatcctgtggaatctgagtagttcggatcatttgaaggatcgcctagctagagatacactcgagcagcttaccgacctcgtgctctcccccctgagtggagctggaggaccgcctctgatccaacagaacgcaagtgaagctgaaattttctacaatgcaaccggtttcttaagaaatctgtcctcagcctcccaggctacaagacagaagatgcgcgagtgtcacggactggtcgacgccctcgtgacatccattaaccatgcactcgatgctggcaaatgtgaagataaatccgtcgagaatgctgtatgtgttctgcggaacttgagctacagactttacgacgagatgcctcccagcgccctgcagaggttagagggccggggccggagggatctggcgggggcaccacctggggaggtggtgggttgcttcacgccccaatcaaggagactccgcgagttacccttggccgcagatgccctaacttttgccgaggttagcaaggatcctaaaggtcttgagtggctgtggtccccacagatcgtggggctgtataacagactgctacagcgatgcgagctgaaccggcacaccacagaggccgcagctggcgctctccaaaacataaccgccggcgacaggagatgggccggcgtgctttctaggctagcccttgagcaggaacggatccttaatccgctcctggatagggtcaggaccgctgaccaccaccagctgaggagcctgactggactgattagaaacttatctcggaacgcacggaacaaagacgaaatgtcgactaaagtcgttagccacttgattgaaaagctgcccggttcggttggagaaaagagtccgccagccgaggtgttggtaaacatcatagcggttctgaacaacttagtagtggctagccccatcgccgcgagggacctgttgtatttcgatggcctgcggaaactcatctttatcaaaaaaaaacgcgactcgcctgatagcgaaaagtcctctagagccgccagctccctgctagccaatttatggcagtacaataagctgcaccgtgactttcgggccaaaggctataggaaggaggactttcttggaccttag

SEQ ID NO: 128898 - DNA, 276 bp, synthetic construct
  misc_feature 1..276: note = Description of Artificial Sequence: Synthetic coding sequence
  source 1..276: mol_type = other DNA
acagccttcaggaggacccccggagaggagttcgcgtggcgggaccctgagctgcctgaagtcatacacatgctgcaacaccagtttccctcagttcaggcaaacgctgccgcatacctacagcatctctgcttcggtgacaacaaagttaaaatggaagtgtgtagactcggaggcattaagcacttagtcgatttgctggatcatagggtcgggtcttcagaggagtgcctctggtgcccgtcaaagcctagattttggcaggtgtacagatag

SEQ ID NO: 128899 - DNA, 3450 bp, synthetic construct
  misc_feature 1..3450: note = Description of Artificial Sequence: Synthetic coding sequence
  source 1..3450: mol_type = other DNA
atgccggcaccagagcaggcatccctcgtcgaggaaggccagccacagactcgccaggaggccgcctccaccggaccgggcatggaaccagaaacgacggccacaacgatcttagccagtgtgaaggaacaggagctgcagtttcagcggctgacaagagagcttgaggttgagaggcagatcgtggcttcacagctggaaagatgtcgcttaggagccgagagtccatccatcgcaagtacaagctcaacagagaagtccttcccctggcgcagcaccgatgtacctaacactggggtcagcaagcctagagtgagtgacgcggtccaaccaaataactaccttatcaggaccgagccagaacaaggaactctgtactctccggaacaaacatccctgcacgagtccgagggcagtctcggaaattcgaggtctagcacccagatgaacagctacagtgattctggataccaggaagccggctcattccataactctcagaatgtcagcaaagctgacaatcgccagcagcactcttttataggcagtaccaacaatcacgtggtacgcaatagcagggctgagggacaaaccctggtccagccctcagtggcaaaccgtgcaatgaggcgggtaagcagcgtgccaagtcgggctcagtccccctcttacgtgatttcaacaggagtgtctccttcaaggggaagcctgagaacttcattaggcagcggtttcgggagtccttctgttacagacccccgaccgctgaacccttccgcatatagctccacaacacttccggcggccagggcggccagtccctatagccagcgtccggcttccccgacggctatccgtcggattggaagcgtgacctctaggcagacaagtaaccctaatggcccaaccccccaataccagaccaccgctcgtgtcgggtctcccctcactctgacagacgcccaaacccgtgtcgcgtctccaagtcaggggcaggttggaagctccagtccaaaaaggagcgggatgaccgcagtgccacagcatctgggtccgtctctccaaagaacagtacatgatatggagcagtttggacagcagcagtatgatatctatgagcgcatggtccctccacgccctgacagtttgacgggactcagatcaagttatgcttcgcagcactctcagcttgggcaggatctgcgcagcgccgtgtcacccgatctgcacatcacgccaatttacgaagggcgtacttactacagtcctgtttaccgcagcccaaaccatggcacggttgagcttcaaggctcccaaacagccctctatcggactgggtccgttggtatagggaatctgcagcgcacaagttctcagagatcaaccttaacataccagcgtaacaattatgcactgaacacaacagcaacttacgccgagccctaccgaccaatccaataccgtgttcaggagtgtaattacaataggctgcaacacgcggtaccagccgacgatggcaccaccagaagcccttccatcgacagcatccagaaagacccgagggagtttgcctggagagaccccgagctgcccgaggtgatccatatgctccagcatcagttcccgtcagtacaggctaatgccgccgcctacctgcagcacctttgctttggagacaataaagtgaaaatggaagtctgccggctgggagggattaagcatctggttgatctgttggatcaccgcgtgttggaggtgcagaagaacgcctgcggagccctaaggaacctggtttttggcaaaagcactgatgaaaataaaattgccatgaaaaacgtcgggggcatcccagcactcctccggctgcttagaaaatcgattgacgctgaagtccgcgagctggtgacaggcgtgctttggaacctcagctcctgtgatgctgtgaagatgacgataatcagggatgctctgtctactctcactaacactgtgatagtgcctcattccggctggaataattcttcctttgacgacgatcataagattaaatttcagacctccctggtgctgcgcaacacaaccgggtgtctccggaacctttctagcgcaggcgaggaggccagaaaacagatgcggagttgcgaaggactggttgatagtttactctatgtgatccacacatgcgtgaatactagcgattacgatagtaaaaccgtggagaactgcgtgtgtactcttagaaacctcagttacagactggagctggaagtacctcaagcaagacttctgggcttgaacgagcttgatgaccttctgggcaaggagtctccatccaaagattcggaaccatcttgctgggggaaaaaaaagaagaaaaaaaaaagaactccacaggaggaccagtgggatggagtaggccctatccccggccttagcaaaagtccaaaaggcgtcgaaatgctctggcatccgagtgttgtgaagccttatctcactttgttagcagagtccagcaatccggccaccctggagggatcagcggggagtcttcagaatctgtcagctggcaactggaaattcgctgcctacattcgtgccgctgtcaggaaggaaaaaggcctacctattttagtcgaacttctcaggatggataatgatcgggtggtttcttccgtggccaccgcgttaagaaacatggcactggatgtgcgcaacaaagagttgatcggtaagtatgctatgagagatctggtgaacagactgccaggtgggaacgggccttccgtgctgtcagatgaaaccatggcagcgatttgttgtgccttacacgaagtgacctcaaaaaacatggaaaatgctaaagctctcgccgatagtggcggaatcgagaagctggttaacataaccaaaggccggggcgatcggtcttccctcaaggtggtgaaggcggccgcacaggtgctgaatactctgtggcagtacagagacttgcggtctatatataaaaaggacggctggaatcagaatcacttcattacccccgtgtccactcttgagcgggatagattcaaaagtcatccctccttgagcaccaccaatcaacaaatgtcccccatcatacagagcggaagctctaaaccttcacccatctacatttctagttactcctcccccgccagagaacaaaaccgccggttacagcaccagcaattgtactatagtcaggatgacagcaacagaaaaaatttcgacgcgtaccgtctctacctccagtctccccacagctatgaggatccttattttgatgatcgcgtgcactttcccgctagtaccgactactcgactcaatatgggctgaaatccactacgaattacgtggatttttacagcactaagcggccaagctacagggctgaacaatacccagggagccccgattcctgggtatag

SEQ ID NO: 128900 - DNA, 3579 bp, synthetic construct
  misc_feature 1..3579: note = Description of Artificial Sequence: Synthetic coding sequence
  source 1..3579: mol_type = other DNA
atgcccgcccctgaacaggctagtttagtggaggagggccagccccagactcggcaggaagccgcctccacaggcccaggcatggagcctgaaactacagccacgaccattctggcatccgtcaaagaacaggagctacaattccagagattaacaagggagctggaagtggaaagacagatcgtggcgtcacaactggagcgctgtaggctgggagctgaatccccgtctatcgcttccacatccagcacagaaaaatcctttccttggcgatccacggatgtgccaaacaccggagtgtccaagcctcgcgtgtccgatgcagtgcaacctaacaattacctaatccgcaccgagcctgagcaggggacactttactcacctgagcaaaccagcttgcacgaatctgagggttcgcttgggaatagccgctcatctacccagatgaatagctacagcgactcaggatatcaggaggccggcagtttccataacagccagaatgtctcaaaagcagataatcggcagcaacatagttttatcggctctaccaacaaccatgtcgtgcgcaacagcagagccgagggccagaccttagttcagcccagtgtggctaatcgtgcgatgaggagggtctcctcagtgccttcaagagcccaatcacctagctatgtgatctctaccggagtttcaccttcaaggggcagtttgaggacatctctcggcagtggcttcggttctcccagtgtgactgaccctaggcccctgaacccgtcggcctactcctctacaacgctgccagcagcgcgcgcagcttccccctacagccagaggccagctagcccaacagccatcagacgcatcggttctgtgaccagccgacaaacctcaaatcccaatggccccacaccccagtaccagaccacagctcgggtcgggagccccctgaccttaactgacgcccagacgcgggtggcatctccttcccagggccaagtggggagcagtagcccaaaacgctcagggatgaccgctgtgccacagcacttgggaccatcgctacagcgcacagtacacgatatggaacagtttgggcaacagcagtacgacatttatgagcggatggtccccccccgccccgactccttgaccggcctcagatcaagctatgcatcccagcattcccagctgggccaggaccttcgctccgccgtcagtcctgacctgcacataaccccaatatatgaagggcggacttattattctccagtgtataggtcgcctaatcacggaaccgttgaacttcagggcagccagacagcactctatcgaaccggctcagtcggcatcggaaatcttcagaggacttcctcgcagcggtccacactcacgtatcagagaaacaattacgccctaaatacaaccgccacatatgcagagccatatcgtcctatacagtatcgcgtccaggaatgcaactacaatcgcctgcagcatgcggtccccgcagacgacggcactacaagatcacccagtattgacagcatacagaaggaccctagggaatttgcctggcgcgaccctgaactccctgaagtgattcacatgttacaacaccagttcccgagtgtccaggccaatgccgctgcctatctccagcacttatgcttcggggataacaaggtgaagatggaggtgtgtaggctagggggcatcaagcatttggtggacctccttgaccacagggtgctggaagtacagaagaatgcatgcggagcccttagaaacctggtgtttgggaaaagcacagatgagaataagatagctatgaagaacgttggcgggattccagctctgctgcgccttttgaggaagagcatcgatgctgaggtgcgggaactcgtgactggcgtgctgtggaacctgtcttcatgtgatgcagttaagatgactataatccgtgacgctctgtctacactgacaaacaccgtgatagtgcctcacagtggttggaacaattcttctttcgatgacgatcataaaatcaagtttcagaccagtcttgtgttgaggaacactaccgggtgcctgcgaaatctctctagcgctggggaagaggcgcggaaacagatgagatcctgtgagggcctcgtagactccttgctgtatgtaattcatacctgtgtaaacaccagcgactatgacagtaagacggttgagaactgcgtgtgcaccttgcgcaacctgtcctataggctggaactggaagtgccacaggcccgcctgctcggattgaatgagctggatgacctcctgggcaaagaaagcccatctaaagactccgaaccaagctgttggggcaaaaaaaagaaaaagaagaagcgcaccccccaggaagatcagtgggatggggtgggccccatacctggcctgtcgaagtcccccaaaggcgtggaaatgctgtggcacccctctgtagtgaagccctatctcaccctgctcgctgaaagctctaatccggcaacactggagggatccgctggctcactgcagaatctgtctgcaggcaactggaaattcgctgcttacatcagagccgccgtgcgcaaagaaaaaggactgcctattctggtcgagctcctgaggatggacaatgacagagtggtgagtagcgtggcaactgcactgcgcaacatggccttggacgtgagaaacaaggagctgatcggaaagtacgccatgagggacttggtgaaccgcctgccaggcggtaatggaccctcagtgctgtctgatgagaccatggctgcaatctgttgcgctcttcacgaggtcaccagcaaaaacatggaaaacgctaaggcgcttgccgattctggtggcatcgaaaagctcgtgaatatcactaaaggacgtggggataggagcagtttaaaagtggtcaaggcggctgcccaagtcctcaatactctctggcagtatcgggacctcagaagcatctataaaaaggacggctggaaccagaaccatttcatcactccggtgtccaccttagaacgagataggttcaaaagtcatccttctttgagcacgactaaccagcagatgtcgccgatcattcaatccgtgggcagcacctccagcagcccagccctcctgggtatccgcgacccgcggagcgaatacgacaggacgcaacctcctatgcagtactacaattcccagggagacgctactcacaagggtctctatcccggctcctccaagcccagcccgatctacatctcttcctatagctctcccgccagagagcaaaatcgacggttgcagcaccaacagctgtattatagccaggatgacagtaaccgcaaaaacttcgatgcatatcggttgtacctgcagtcacctcacagttatgaggacccttattttgatgaccgggtccacttccccgcctccacggactattctacccagtatggtcttaaatctacaactaattacgtggatttttacagtaccaagcgtccgagctacagagctgagcagtacccaggcagcccggattcgtgggtgtag

SEQ ID NO: 128901 - DNA, 1845 bp, synthetic construct
  misc_feature 1..1845: note = Description of Artificial Sequence: Synthetic coding sequence
  source 1..1845: mol_type = other DNA
atgaactcatattccgacagtggctaccaggaggccggctcttttcacaatagccaaaatgtgagtaaagctgacaacaggcagcagcacagctttatagggtctaccaataaccacgtggtgcggaatagccgggccgagggacagaccctggtgcaaccatctgtcgccaatcgcgctatgcgcagagtgtcatcagtccccagcagagcacagtcaccttcttacgtgatctccacaggagtatctccatctagaggatctctaagaactagtctgggatctggattcggcagcccatcggtgacagaccccaggccactgaatccctctgcctattcttccaccacactcccagccgcccgagcagcctcgccttactcacagagacctgcatcccccaccgccatccgacggatcggttcagtgacttctaggcagacatctaatcccaatggtcccactcctcagtatcagacaacggcccgggtcggaagcccacttactcttaccgacgcacaaactcgcgtggctagcccatcacagggacaggttggcagcagctctccaaagcgctcaggcatgactgctgttccgcagcacctggggccaagccttcaacgcacggtgcacgacatggagcagttcggccaacaacagtacgacatctacgaaaggatggtgccccccagaccagattcgctcactgcctacggggtgcccatgttggtgtcaattgtgtctctgggaaagacatttgtgctaccatgcccggatcttcacataacgcccatctacgagggcaggacatactatagccctgtttaccggtcccccaatcacggaacagtcgagctccagggctcacagaccgctctgtataggacaggttcagtgggcattggaaatctgcagcgcaccagttcccagagaagcacgctcacttaccagagaaataattacgcacttaacacgacggctacgtacgcagagccttataggcctatccaatatcgcgttcaagaatgtaactacaaccggctgcagcatgccgtccctgccgatgatggaaccacacggtcaccttccatcgactctatccagaaggatcctcgggagtttgcttggcgagatccagagctgcctgaagtgattcacatgctacaacaccagtttcccagcgttcaggcgaatgcagccgcgtacctccagcatctgtgttttggcgacaacaaggtgaagatggaagtttgcaggctaggggggattaaacacctcgttgatcttctggaccacagagtactggaagtgcagaagaacgcatgtggagctcttcggaaccttgtatttggtaagtccacagacgagaataaaattgccatgaaaaatgtgggtggtattccagctttgctcagattgttgagaaagagtatcgacgcagaggtccgagagctcgtcaccggagtactctggaaccttagcagctgcgacgccgtcaagatgaccataatcagagatgccctgtccaccctgactaacacagtcatcgtcccgcattctggatggaataactcttccttcgacgacgaccataaaattaagttccaaacatcacttgtgctccgtaataccaccggctgcctgcgcaacctcagctccgctggagaagaggcgcgcaagcagatgaggtcttgcgaggggttggtggattccctgctttacgtaattcatacatgtgtgaatacaagcgattatgactccaagaccgtggaaaattgtgtatgcaccctgcgcaaccttataggttggtcgtggcgctgtcctcgcccaggttactgggactag

SEQ ID NO: 128902 - DNA, 1329 bp, synthetic construct
  misc_feature 1..1329: note = Description of Artificial Sequence: Synthetic coding sequence
  source 1..1329: mol_type = other DNA
atgggactcgctatggaacacggtggatcgtacgcaagggctggcggttcaagcagaggctgctggtattacttgaggtatttcttcttattcgtctcactgattcagttccttatcatccttgggctggtgctctttatggtatacggaaacgtccacgtgtctaccgagtctaacctacaggcgaccgagaggagggcggagggactgtattcgcagctgctgggcctgaccgcatcccagagtaacctgaccaaagaactgaattttactacacgcgccaaggacgccataatgcagatgtggcttaatgcccgaagagatctggaccggatcaacgcaagcttccgacagtgccagggagaccgcgtaatctacaccaacaatcaacgttacatggcagcaattatactgagcgagaagcagtgccgcgatcagtttaaggatatgaataaaagctgtgacgctctcctgtttatgctgaaccaaaaagtaaagaccctggaggtcgagatagctaaggaaaaaactatttgcacaaaagacaaggagtcggtactgctgaacaaaagggtcgcagaggaacaacttgtggagtgtgtgaaaacgagagaattgcaacaccaggagagacagttagcaaaagagcagctgcagaaggtgcaggcattatgtctcccacttgacaaggacaagtttgaaatggatctgcgcaacctgtggcgtgattcgatcatcccaaggagtctggacaatctgggttataacctgtatcaccctctgggatccgagctcgccagtattcggcgggcctgcgatcacatgccgtcacttatgagcagcaaagtggaggaacttgccaggtccttacgcgccgacatcgagcgggtggccagagaaaattcagacctgcagcggcagaaactggaggcgcagcaggggctcagggcctcccaggaggccaaacagaaggtggaaaaggaggctcaggctagagaagccaagcttcaagccgagtgtagccgacagacacaactggcactcgaggaaaaggccgtgcttcggaaggagcgggataacctggctaaggagctggaggagaaaaaacgagaggctgaacagctgaggatggagctggccatccggaatagcgccttagatacgtgtatcaaaacgaaaagtcaacccatgatgccggtatcacggcccatgggccccgtgcccaacccccaacccatcgatcccgcatcattagaagaatttaaacgtaagatcctcgaatcccaacgcccccccgccgggattccggtcgccccttccagcgggtag

SEQ ID NO: 128903 - DNA, 291 bp, synthetic construct
  misc_feature 1..291: note = Description of Artificial Sequence: Synthetic coding sequence
  source 1..291: mol_type = other DNA
atggagcacaaggaggtggtgttactactgctcctgttcctgaagagcggtcaaggagagcccctggatgactacgttaacacccagggccctagcttgttctctgtgaccaaaaagcaattgggcgcgggctctcgcgaagaatgcgcggccaaatgcgaggaagacaaggaattcacatgtagagccttccagtaccatagcaaggagcaacaatgtgtgattatggccgagaatagaaagagctcaattatcattcgcatgagggatgccgtattgtttgagaagtag

SEQ ID NO: 128904 - DNA, 291 bp, synthetic construct
  misc_feature 1..291: note = Description of Artificial Sequence: Synthetic coding sequence
  source 1..291: mol_type = other DNA
atggaacataaggaagtggtgttgttgcttcttctatttctgaagtctggtcaaggggagcccttggatgactatgtaaacactcaggggcccagcctgttcagcgtcactaaaaagcagctcggcgcagggtcacgggaggaatgcgccgccaaatgtgaggaagataaggaattcacatgccgggccttccagtatcatagcaaagagcagcaatgtgtcataatggcggagaatcggaagagctccatcatcatacgcatgcgcgacgctgttctgttcgagaagtag

SEQ ID NO: 128905 - DNA, 291 bp, synthetic construct
  misc_feature 1..291: note = Description of Artificial Sequence: Synthetic coding sequence
  source 1..291: mol_type = other DNA
atggaacataaggaagtggtgctgctgttgcttttgtttctaaagtccggacagggagaacctctcgacgactacgttaatacacagggacccagtctgttctctgttaccaagaaacagctgggagccggctcccgtgaggaatgtgcagccaaatgtgaggaagacaaggaattcacatgccgggcctttcagtaccactcaaaagaacagcagtgcgttataatggctgaaaaccgcaagtcatccatcataatccgaatgcgagacgctgtgctgtttgaaaagtag

SEQ ID NO: 128906 - DNA, 492 bp, synthetic construct
  misc_feature 1..492: note = Description of Artificial Sequence: Synthetic coding sequence
  source 1..492: mol_type = other DNA
atggatgcactggagggagagagttttgctctttctttttcctcagcgagcgacgctgaatttgacgccgtggtgggatatctagaggatatcataatggatgatgaatttcagctactgcaacgaaattttatggacaaatattacctcgagtttgaagatactgaagagaacaagctgatctatacccccatcttcaacgagtatatttccctggttgagaagtatatcgaagaacagctgttgcagcggatcccagagttcaatatggccgcttttacgacaacgctacagcaccataaggacgaagttgcaggagacattttcgacatgcttctgacgtttacagactttctggcttttaaagagatgttcttggattatcgagcagagaaagagggcaggggactagatctgtccagcggactggtggtaacatccctgtgtaagagctcctcgctgccagcatctcagaacaatttacggcactag

SEQ ID NO: 128907 - DNA, 1890 bp, synthetic construct
  misc_feature 1..1890: note = Description of Artificial Sequence: Synthetic coding sequence
  source 1..1890: mol_type = other DNA
atggaaaatagcacgaccactatatcacgagaggaactggaagaactgcaagaggccttcaacaaaatcgacatcgacaactcagggtacgtaagcgattatgaattacaagatctgttcaaagaagcctccctcccgctgcctggctacaaagtccgggaaattgttgagaaaattctgtccgtggctgatagcaacaaggatggaaagatttcctttgaggagtttgtgagtctgatgcaagaattgaaaagcaaggacataagcaaaacttttaggaaaataataaacaagcgggaaggcattactgctatcggagggacttctacaatcagctcagaaggaacgcaacattcgtacagcgaggaggaaaaggtggcctttgtgaattggatcaataaagctctcgagaacgaccccgactgtaaacatctcataccaatgaatccaaatgatgatagccttttcaaatccctggccgacggtatcttgctgtgcaagatgatcaacctcagcgagcccgacacaatcgatgagagggcgatcaataaaaagaagcttactcccttcactatatcagagaacctcaatttggctctgaattccgctagcgccattggctgcaccgtagtcaacataggcgcctcagatctgaaggagggtaaacctcaccttgtcctggggctgttatggcaaattatcaaggtgggcttattcgctgacatcgagattagcagaaacgaggctctcatagcattgctgaacgaaggcgaagaactggaagagctcatgaagctgagtcctgaagaactattgctccgctgggtgaattatcacctgactaacgccggctggcacaccatctcgaatttttctcaagatataaaagactccagggcctactttcatctcctcaatcaaatcgcaccgaagggtggagaggacggaccagccattgccatcgatctaagcggaattaacgaaacaaatgatcttaaaagagctggattgatgctgcaagaggccgataaactggggtgcaaacagtttgtcacaccagctgacgtcgtgagcgggaatcccaagctgaacctggcttttgtcgccaacctgtttaatacctatccatgtcttcataagcctaataataacgacattgacatgaaccttttggaaggagaaagcaaggaagaacgcacttttaggaactggatgaattcactcggtgtgaacccctacatcaaccacctgtactccgatctggccgacgcactggtaatcttccagctgtatgagatgatcagggtccctgtgaactggtctcatgtgaacaaacctccatacccagcactaggggggaatatgaagaaaattgaaaattgcaattacgctgtagaactgggtaaaaataaggccaagttttcactggtagggattgcaggacaggacctgaacgagggtaattcgacactgacattagccttggtctggcaattgatgcgaagatatacgctgaacgttttgagcgacttaggggagggagaaaaggttaatgatgagattattatcaagtgggtgaaccagacactgaagtccgcaaacaagaagacctcaatctcaagttttaaagacaaaagtattagcactagcctaccagtcctggacttgatcgacgcaatcgcccctaacgccgtgcgacaggaaatgataaggcgagagaacttgtctgacgaggataaactcaacaatgcgaagtacgcaatttccgtcgcccggaagattggagcaaggatctatgcactgcctgatgaccttgtggaggtaaagcctaaaatggtcatgacagttttcgcctgcctgatgggaaagggcctgaatagaattaagtag

SEQ ID NO: 128908 - DNA, 1890 bp, synthetic construct
  misc_feature 1..1890: note = Description of Artificial Sequence: Synthetic coding sequence
  source 1..1890: mol_type = other DNA
atggaaaactccaccaccacaatctcgcgcgaggagctcgaggagctgcaggaggcattcaataagatagacatcgacaacagtggctatgtatccgattacgagttgcaagacctgttcaaggaggcttccctgccgctgccaggatataaagtgcgcgagatcgtggagaagatcctgagcgtggccgatagtaacaaggacggcaagattagttttgaggagttcgttagcctgatgcaagagctgaagtcaaaagacatctccaagacctttagaaagattatcaataagcgcgaaggtataactgcaatcggcggaaccagcacgatttcctcagaggggactcaacattcttattctgaagaagagaaggtggctttcgtgaattggatcaacaaagcccttgagaatgaccccgattgtaagcacctgatcccgatgaatcccaacgatgacagcctcttcaagagcctcgctgacggcatcttgctgtgcaagatgatcaatctctccgagcctgacacaattgatgagagagccataaataaaaagaaactgactcctttcacaataagcgagaatctgaacctggcgctcaattctgcgtctgcaattggctgtactgtggttaacatcggcgcctctgacctgaaggaaggtaagcctcacctggtgcttggcctgctttggcagattatcaaagtcgggttgttcgccgatattgagatatctcgtaatgaagccctaatcgcactgttgaatgaaggggaagagcttgaggagcttatgaaattgagtcccgaggaactgctccttcgctgggtcaattaccacctcacaaacgctggctggcacaccatctccaacttttcccaggacattaaagacagtcgcgcctacttccatcttctgaaccagattgcaccgaagggcggcgaagatggacccgctatcgcgatagatttaagcggcatcaatgagaccaacgacctgaaacgtgctgggctgatgttgcaggaggctgataaattaggttgcaagcagtttgtgactcccgcagatgtggtaagcggcaatccaaaactgaacctggccttcgtggcgaacctatttaacacttacccttgcttgcataaaccgaacaacaacgacatcgatatgaatttattagagggcgagagcaaagaggagagaacatttcggaattggatgaatagcttgggggttaacccttacatcaaccacctctacagcgatctggcagatgccctcgtaatctttcagctatatgagatgattagggttccagtaaattggtcacacgtgaacaagcccccatatcctgcgctgggcgggaatatgaaaaagattgaaaactgcaattatgctgtggagctgggcaaaaataaggcgaagttttccttagtcggcattgccgggcaagatcttaacgaagggaatagcactcttacactggccctggtctggcagttaatgaggcggtacacccttaatgtgctgtccgacctcggagagggcgaaaaagttaatgatgaaatcataataaagtgggtcaaccagaccctgaagagtgctaacaagaagacctcaatatcctcctttaaagataagagcatctccacttccctgcctgtgcttgaccttattgatgctattgcccctaacgctgttcgacaagagatgatccgtcgtgagaacttatcagatgaggataagctaaataatgccaagtatgcgatcagtgttgccaggaaaatcggtgcgaggatatacgccctccctgatgatctggtcgaagtgaagcccaagatggtgatgactgtcttcgcctgcctgatgggaaagggactgaatcggatcaagtag

SEQ ID NO: 128909 - DNA, 165 bp, synthetic construct
  misc_feature 1..165: note = Description of Artificial Sequence: Synthetic coding sequence
  source 1..165: mol_type = other DNA
atggaaaactccactactacgatctcccgcgaggaactagaggagctgcaggaggcatttaataagattgacattgataacagcggctatgtatccgattacgagctgcaggacctgtttaaagaagcctcactgcctttgcctgggtataaagtgcgcgagtag

SEQ ID NO: 128910 - DNA, 363 bp, synthetic construct
  misc_feature 1..363: note = Description of Artificial Sequence: Synthetic coding sequence
  source 1..363: mol_type = other DNA
atggagaatagtacgaccactatttctagagaggaacttgaggagctccaggaagccttcaacaagatcgacattgacaatagcggttatgtgtccgactacgaattacaggatctgtttaaagaggcctctttgccacttcctgggtataaagttcgtgaaattgtcgagaagatcctgtcagtcgccgattccaacaaggatgggaagatcagtttcgaggagtttgtctcactcatgcaggaactgaagagcaaagacatcagcaagacctttcggaaaatcattaacaaacgcgaaggaataactgccattggtgggaccagcaccatctcgtctgagggaacccagcacagctactag

SEQ ID NO: 128911 - DNA, 360 bp, synthetic construct
  misc_feature 1..360: note = Description of Artificial Sequence: Synthetic coding sequence
  source 1..360: mol_type = other DNA
atggagaattcaacaacaactatctcaagggaggagctagaggagcttcaggaggctttcaataagattgatatagacaattcaggctatgtatcggattacgaactgcaggatctgtttaaagaggcatctttgcccttaccagggtataaagtacgggagatagtagaaaagattcttagtgtggctgattcgaacaaagacggtaagatcagcttcgaagagttcgtgagtctgatgcaggagcttaagagcaaagatatctctaaaacatttcgtaaaattatcaataaacgggaggggattacagcaataggcgggacttccaccatctcaagcgaaggaacccagcattcttag

SEQ ID NO: 128912 - DNA, 102 bp, synthetic construct
  misc_feature 1..102: note = Description of Artificial Sequence: Synthetic coding sequence
  source 1..102: mol_type = other DNA
atggaaaattcaactactactattagccgtgaggagctggaagaactccaggaagcctttaacaaaattgacattgacaatagcggatatgtgagcgactag

SEQ ID NO: 128913 - DNA, 177 bp, synthetic construct
  misc_feature 1..177: note = Description of Artificial Sequence: Synthetic coding sequence
  source 1..177: mol_type = other DNA
atggagaacagcaccactacaatcagccgtgaggaattggaggaactacaagaagcctttaataaaatcgacatcgataacagtggctacgtctccgattacgagttgcaggacctgttcaaggaggcgagccttccactacccgggtacaaggttagagaaattgtggagaaatag

SEQ ID NO: 128914 - DNA, 1890 bp, synthetic construct
  misc_feature 1..1890: note = Description of Artificial Sequence: Synthetic coding sequence
  source 1..1890: mol_type = other DNA
atggagaactctactactacaatttcacgagaagagttggaagagttacaggaagctttcaacaaaatcgacatcgacaatagcggatatgtcagtgactatgaactccaagatctgtttaaggaagcctcccttccactgccaggctacaaagtgcgggagattgtggaaaagatcttgagcgtagccgactccaacaaagatggaaagatcagttttgaggagtttgtgtctctgatgcaagagttgaagagtaaagacatctcaaagacttttaggaagattataaataagcgggaggggatcaccgcgattggcggaacctctaccatttcgtccgagggcactcaacatagctactccgaggaagaaaaagtcgcattcgtgaactggattaataaggccctggagaacgacccagactgtaaacatttgattcccatgaatcctaacgatgatagtctttttaagtcactggcagacggaatcctgttgtgcaaaatgatcaatctctctgaacccgacacaattgacgaacgggctattaataagaagaaactgaccccttttactatatccgagaatctcaatctggccctgaacagcgcttccgccatcgggtgcactgtggtaaacataggggcatccgatttgaaggagggtaagccccatctagtgctgggtttactctggcagatcattaaggtgggcctgtttgctgacattgaaatctcaagaaacgaggccctgattgccctgttaaacgaaggagaggagctggaggagttaatgaaactcagtccagaggaactcttactccggtgggtgaattatcatctgaccaatgccggatggcacacaatctctaacttttcccaggacattaaggacagccgggcctacttccatctgttgaatcaaatcgccccaaaaggaggcgaggacgggccagccattgctatcgatctgtcaggtattaacgaaactaacgatttaaaacgagctggcctgatgttgcaggaagccgataaattaggatgtaaacaattcgtgacaccggctgacgttgtgtctggcaatcctaaactgaacctcgctttcgtggccaatctgttcaatacatacccatgcctccataaacctaataacaatgacatcgacatgaacttactggaaggcgagtctaaagaggagagaacctttagaaactggatgaattcattaggagtgaacccctatatcaatcatttgtatagcgatcttgcagatgccctggtgatattccagttatacgagatgattcgcgtgccagtgaattggagtcacgtgaataagcccccctatcccgcattggggggcaacatgaaaaagattgaaaactgtaactacgccgtggaacttgggaaaaataaggccaaattttcccttgtcggaattgcagggcaggacctcaacgaaggaaattctactctaacactagccttagtctggcaactgatgaggcgctataccctgaatgtgctcagtgacctgggagagggggaaaaggtgaatgatgaaattatcatcaaatgggtcaatcagactctgaaaagtgcaaacaaaaagaccagcatttctagttttaaagataaatctatctcaaccagtcttcccgtcttggacctgattgacgccattgcccctaacgccgttcgacaggaaatgattaggcgcgagaacctgtccgatgaggataagttaaacaatgctaaatatgcaatcagtgtcgcgcggaagattggcgcaagaatctacgcacttcccgatgacctggtcgaggtcaagcctaagatggtgatgaccgtatttgcctgtctgatgggcaagggcctcaaccggattaaatag

SEQ ID NO: 128915 - DNA, 162 bp, synthetic construct
  misc_feature 1..162: note = Description of Artificial Sequence: Synthetic coding sequence
  source 1..162: mol_type = other DNA
atggagaacagtactacgaccatctcccgcgaagaactcgaagagttgcaggaggccttcaacaagatcgatattgacaactccggatacgttagcgattacgaactgcaggatctctttaaggaagccagtctgcctttgcccggttacaaagttcgttag

SEQ ID NO: 128916 - DNA, 1785 bp, synthetic construct
  misc_feature 1..1785: note = Description of Artificial Sequence: Synthetic coding sequence
  source 1..1785: mol_type = other DNA
atgccgctgcctggatacaaggttagagaaataattcagaaactcatgctggatggcgatcgcaataaggacggcaaaatttccttcgatgaattcgtctatatttttcaagaagtgaaatcaagcgatatcgccaagaccttccggaaggcaataaaccgcaaggaggggatctgtgctctgggcggcacttcagagctcagcagtgaaggtacccagcattcgtatagtgaagaagaaaaatacgcctttgtaaactggataaataaggcgctcgagaatgaccctgattgtcggcacgtgatccctatgaacccgaataccgacgacctgtttaaggcggtgggagatggcatcgtgctctgtaagatgattaacctgtctgtaccagatactatcgatgaacgcgctattaataagaaaaagttgacccctttcatcatccaggaaaatctaaacctagcactgaacagcgcatctgccatagggtgtcatgtggtcaatataggggccgaggacctcagagccggaaaacctcatctagtgttgggcctgctgtggcagattattaaaatcggacttttcgccgatattgaactgtcacgaaacgaagcactggcagctttgcttagagacggggagactttggaagaattgatgaagctatcaccagaggaattgcttctgaggtgggcaaattttcatctggagaattccgggtggcagaagattaacaacttttcggcggacatcaaactcatcgacttcagcaatagtgtcaaagactcaaaggcctattttcacttgcttaatcagattgctcctaaaggacagaaagaaggtgaacctcgaatcgatattaacatgtctgggtttaatgagaccgacgaccttaagcgcgccgaaagtatgctgcagcaggcagacaagctcgggtgcaggcagttcgttacgcccgctgatgttgtgtccgggaacccaaaactgaacctcgctttcgtcgccaacctcttcaataaatatcctgcactaacaaagcctgaaaaccaggacattgactggacactacttgagggagagactagagaggagcggacattccgaaactggatgaatagcctaggcgtgaatccacacgtaaatcacctgtacgctgacttgcaggacgcacttgtgatattgcagctctatgagaggattaaggtacccgtggactggagtaaggtaaacaaacctccctatcctaaactgggagccaatatgaaaaagctcgagaattgcaactatgccgtggagctcgggaagcaccccgctaagttctccttagtgggcatcggcggtcaggacttaaatgacggtaaccaaacgctgactctcgcccttgtgtggcagctcatgagaagatacacgttaaacgtgctggaggatctgggagacggccagaaggctaatgacgacatcatcgtcaattgggttaatcggacgttgagtgaggccgggaaaagcacgtctatccagtcattcaaagacaaaactatatcctcctctttggcagtggttgatttaatagatgcaatccaaccaggatgtattaattatgaccttgtgaaaagcgggaatttaactgaggacgacaaacataacaacgcaaaatacgcggtgagcatggcacgtcgcattggggccagagtgtatgcccttccagaggatctggtggaagtgaagccaaagatggtcatgactgtttttgcgtgcctgatgggacgtgggatgaagagggtctag

SEQ ID NO: 128917 - DNA, 1893 bp, synthetic construct
  misc_feature 1..1893: note = Description of Artificial Sequence: Synthetic coding sequence
  source 1..1893: mol_type = other DNA
atggatgaaatggccactactcagatttctaaagacgaactggacgagctcaaagaagcattcgccaaggtggatctgaattcgaatggttttatctgcgattacgaacttcatgagctgttcaaagaagccaatatgcctctgccaggctacaaggtccgggagatcatccagaaactaatgctggatggcgaccggaataaggatggcaagatcagttttgacgagtttgtttatatttttcaagaagtcaagagttcggatatagcaaagaccttcaggaaagctatcaaccgtaaggaaggcatttgtgctctcggtgggacatccgaactgtcttctgaagggacccaacacagctattccgaagaagagaagtatgcctttgtgaactggatcaacaaggcactagaaaatgaccctgattgcagacacgttataccgatgaaccccaacaccgacgatttgttcaaggctgtgggagatgggatcgttctctgcaagatgataaaccttagtgtccctgacacgatcgacgagcgggctattaataaaaagaaattgacaccattcatcattcaggagaacctcaacctagcgctgaattctgcctctgcaatcggatgtcatgtggttaatatcggagccgaggatctccgagccggtaagcctcaccttgttctgggccttttatggcagattattaagattgggctcttcgccgatatcgaattgagtcgtaacgaggcattggcagccttactgagagacggggagacgctagaggagctgatgaagctctcacctgaagagctgctcctgagatgggccaactttcatctcgaaaacagcgggtggcagaaaatcaacaactttagtgctgacataaaggattcaaaggcgtattttcatttgctgaaccagatcgctccaaagggccagaaagagggagagcctcgcatcgacattaacatgtctggttttaacgagaccgacgatctgaagagagcagaatcgatgctccaacaggccgacaaactgggctgtagacagttcgtcacccccgcagatgttgtcagtgggaacccaaagctcaacctggccttcgtggcaaatctgtttaataagtatcctgccctgacgaaacctgagaaccaggatattgactggactttactggaaggcgagacacgggaggagcggacatttagaaactggatgaacagtctgggagtgaatccacacgtcaaccatttgtatgcagatctgcaagatgccttagttatcttacagttatacgagagaatcaaggtccccgtggactggtccaaagtaaataagccaccatacccgaagctgggagctaacatgaagaagctggaaaattgcaactacgcggtcgagctgggcaaacatccagcaaagtttagcctggtcggcataggtggccaagacctgaatgatgggaaccagacgcttacactcgcgttagtttggcagttgatgcggagatataccctgaatgttcttgaggacctcggagacggacagaaggcaaacgatgacataatagtcaattgggtgaatcgcaccctcagtgaagcaggtaaatccaccagcatccagtctttcaaggataagacgatatcaagctcattggcagtggttgacctcattgacgctatccagccaggctgtatcaattatgacctcgtcaagtccggtaatttgactgaggatgacaagcacaacaacgctaaatatgcagtaagtatggcaagacgcatcggggctcgtgtttacgcactacctgaagatctggttgaggttaagcctaaaatggtgatgaccgtgttcgcctgtctcatgggacgcggaatgaagcgagtatag

SEQ ID NO: 128918 - DNA, 1893 bp, synthetic construct
  misc_feature 1..1893: note = Description of Artificial Sequence: Synthetic coding sequence
  source 1..1893: mol_type = other DNA
atggatgagatggctacaacacagatcagtaaggatgagctggatgaactgaaggaagcatttgcgaaagttgatctgaattcgaacggcttcatatgcgactatgagctgcatgagttgttcaaggaggctaatatgcccctccccggctacaaagtccgagaaatcatccagaagctgatgttggatggagacagaaataaagacggaaagatctcgttcgatgagttcgtgtatatctttcaagaggtaaagtcaagcgatattgccaaaacctttcgtaaagccattaatagaaaggagggtatttgtgcccttggtggcacgtcagaactgagctcagagggcacccagcacagctactcagaggaagagaagtacgctttcgttaactggattaataaagcactggagaatgatccggattgccgacacgtgattccaatgaaccccaacacagatgatttattcaaggcggtcggtgacgggatcgtactgtgtaaaatgattaatctgagtgtgcctgacacaatcgatgagagagctattaataagaaaaagctcacacccttcatcattcaggagaatctaaacctagcactgaatagcgcttctgcaataggctgccatgtcgtcaacattggcgccgaggatctgagggccggcaagccacatctggttctgggccttctgtggcagattatcaaaataggattgttcgctgatatcgagctgtcgaggaatgaggctctggctgccctgctgagggatggtgaaactctggaggaattgatgaagttgagccctgaggagcttctgctgagatgggctaactttcacctcgagaactccggctggcagaagatcaataatttctctgctgatatcaaagactccaaagcctactttcacttactgaaccagattgcccctaagggccagaaggagggagagccacgcattgatatcaatatgtccggtttcaacgagactgatgatttgaaacgggcggagagcatgctccagcaagccgataaattagggtgcagacagtttgtgacaccagctgacgtcgtatcggggaacccaaagctaaacctggcattcgttgctaatctcttcaataagtacccggccctgactaagcccgagaatcaggacattgattggaccctgctggaaggcgagacaagagaagaaagaaccttcagaaattggatgaatagtcttggcgtaaacccacacgtgaaccatctatatgcagacctgcaggacgcactggtgatcctccaactatacgagcgaatcaaagttcccgtggactggtcaaaggtgaataaaccgccttacccaaaactgggggccaatatgaagaaactggaaaactgtaactacgctgtggaactgggaaaacaccctgcaaaattttcacttgttggtatcggtggacaggatctgaacgacgggaaccaaacactcaccctggcactcgtatggcagctaatgagaagatataccctaaacgttttagaagatctcggagacggtcagaaggccaacgatgatattatagttaactgggtgaatcggacgcttagtgaagcaggcaaatccacctccatccagtcctttaaggacaagactatctccagcagcctggccgtcgtggatctgatcgacgcaatccagcccgggtgtataaattacgacttggtgaaaagcgggaatcttaccgaggatgacaagcacaataatgccaaatacgcagttagcatggcgcggagaatcggtgcaagagtttatgcattgcccgaagacctcgtcgaggtaaagcctaaaatggtgatgacagtgtttgcttgcttaatgggccggggtatgaaaagggtttag

SEQ ID NO: 128919 - DNA, 1854 bp, synthetic construct
  misc_feature 1..1854: note = Description of Artificial Sequence: Synthetic coding sequence
  source 1..1854: mol_type = other DNA
atggaagacctgaattcaaatggttttatctgtgactacgaactgcacgagctgtttaaggaagctaacatgcctctacctgggtataaggtcagagagattatacagaagctgatgctggacggggaccgaaacaaggacggcaaaatatccttcgacgaatttgtctatatctttcaggaggtgaagtcaagcgatatcgccaagacctttagaaaggccatcaacaggaaggagggaatatgtgcactcggcggcaccagcgaattgtccagcgagggcactcagcactcctacagtgaggaggaaaagtacgcctttgtgaattggatcaataaggccctggagaatgacccagactgtcgacatgtcatacccatgaaccccaacactgacgatcttttcaaagccgtgggcgatggtattgtgctgtgcaagatgataaacttgtccgtgccagacacgatcgacgaacgcgctattaacaaaaaaaagttaactccgtttatcatccaggaaaacctgaacctcgcattgaattcagcatcagcaatagggtgtcatgtcgtgaacatcggcgctgaggatcttcgcgctggaaaacctcatctggtactgggcctcctttggcagattatcaaaatcgggctgttcgcggacatagaactctcccgcaatgaagcccttgccgccttgctcagggatggagagacccttgaggaactgatgaaattgtcaccagaagagctgttgctccggtgggcaaattttcatctagagaattccggttggcagaaaattaataacttctcagccgacataaagttaatcgatttctctaattcagtgaaagattcaaaggcttactttcaccttttaaaccagatcgcccccaagggtcagaaagagggtgagccaaggattgacattaatatgtccggttttaacgagacagacgacctgaagcgggcagaaagcatgcttcaacaggcggacaagttgggctgtcggcagttcgtcacacccgctgatgtcgtgagcgggaaccctaagcttaacctggctttcgtcgcaaatcttttcaataaatatcccgcactgacaaaaccggaaaaccaggatatcgactggaccctcttagaaggggagaccagagaggaaaggacatttaggaattggatgaattctctcggagtcaatcctcacgtcaaccatctgtacgccgacctgcaggatgcccttgtcatcttacagctttacgagaggatcaaggtcccagtggactggagcaaagtcaacaagccaccatatcctaagctgggcgcgaacatgaagaagctggaaaactgcaactacgcggtagaacttgggaaacaccctgcaaagttctccctggtgggcatcggaggacaggatctgaacgatggcaaccagactttaactctggccctcgtttggcagttaatgagaagatacacgctgaacgtgctcgaagatctgggcgatggccagaaagccaacgacgacattatcgtcaattgggtgaatagaaccctgtctgaggccgggaaatcgacgtcaatccagtcattcaaggacaaaaccatatcctcttctctggccgttgtggatcttatagacgcaatccagccggggtgtataaattatgatctggttaaaagcggtaatctaacagaagatgataagcacaacaacgctaaatacgccgtctcgatggctcggcgcataggggctagagtttacgccctcccagaagatctggtggaggtgaaaccgaagatggtgatgacggttttcgcatgtttaatgggcagaggcatgaaaagggtttag

SEQ ID NO: 128920 - DNA, 1758 bp, synthetic construct
  misc_feature 1..1758: note = Description of Artificial Sequence: Synthetic coding sequence
  source 1..1758: mol_type = other DNA
atgccactgccaggctataaggtgagagaaattatccagaagctgatgctggacggtgatagaaacaaagatggcaaaatctcttttgacgaattcgtctacattttccaggaggtcaagtcaagcgacattgccaagaccttcaggaaggctatcaaccgaaaagaaggcatctgcgctctagggggcacctctgagctgtcctctgagggcactcaacacagctattctgaggaggagaagtacgcgttcgttaattggattaacaaagccctggaaaatgacccggactgccggcacgttattcctatgaatccgaacacggatgatttgttcaaggccgtgggtgatgggatcgttttgtgtaagatgatcaatctttctgtgccggacacaatcgacgagagagctattaacaagaagaaactaaccccatttatcattcaggagaacctgaacctggctcttaactctgcatccgctattgggtgccacgttgtgaacataggagcagaggatctgagggccgggaaaccacatctggttctgggcctgctatggcagatcattaaaattggccttttcgccgatatcgaactgtcacgtaatgaggccctggcagcactgttgagagatggggaaactctcgaagaactcatgaagctgtcccccgaggagctgctgctgagatgggccaattttcacctggaaaactctgggtggcagaagattaacaacttcagtgcagacattaaagactctaaggcctactttcacctgctgaaccagattgctcccaagggacagaaagagggagagcctagaatcgatatcaacatgtcgggattcaacgagactgatgatctcaagagggctgagtctatgttgcagcaggccgataaactcggctgtagacagtttgtcactccagcagacgttgtatcaggaaacccaaagttgaacctggcttttgtcgcgaatctctttaacaagtacccggcccttacaaagccagagaatcaggacatcgactggaccctgctggagggcgaaactagagaggagcgcacttttcgcaattggatgaacagtttaggtgtgaatcctcatgtgaatcatctctatgccgacctgcaggatgccctggtgatcttacagttatatgaacgaatcaaagttccggtggactggtcaaaggtaaacaaacccccatacccaaaactaggggctaacatgaagaagctcgaaaactgtaactacgctgtggaactggggaaacatcctgctaagttcagcctagtggggatcggtggccaagacttgaatgacgggaaccagacacttacgctggccttagtgtggcagctgatgagaaggtacacactgaacgtgctggaggacctgggtgacggtcagaaagccaatgatgatattatcgtgaactgggtaaatcgcaccttaagtgaagccggaaagagcacctccatccagtcttttaaagataaaacaatctctagttcccttgccgtggtcgatctgatagacgccatccagccggggtgcatcaattatgacctggtgaaatctggcaatctcaccgaagacgacaagcataacaatgcaaagtacgctgtctctatggccaggagaataggtgcaagggtgtacgccttgcccgaggatctggtggaggtcaagcctaaaatggtgatgacggtctttgcctgccttatggggagaggtatgaaacgcgtctag

SEQ ID NO: 128921 - DNA, 675 bp, synthetic construct
  misc_feature 1..675: note = Description of Artificial Sequence: Synthetic coding sequence
  source 1..675: mol_type = other DNA
atgaattccctaggggttaatcctcacgtcaaccacctgtacgcggatctgcaagatgccttggtgatcctccagctgtacgaacgcatcaaagtgcctgtggactggtccaaggttaacaagcccccataccccaagttaggcgccaatatgaaaaagttggaaaactgcaactatgcggtcgagttaggcaaacatccagctaaattcagcctggtggggatcggtggacaggatttgaacgatgggaaccagacacttacactcgccctggtgtggcaactaatgcgaaggtacaccctcaacgtcctcgaggacctgggagacggacagaaggccaacgatgacattatagtgaactgggtgaaccgcactctttctgaagctgggaaatctacttctatccagtcatttaaggacaaaaccatcagcagctccctagcggtggtcgatctaatcgacgcaattcagccgggatgtataaactacgacctggtgaagagtggtaatctgactgaggacgataagcacaacaatgccaaatatgcagtgtcaatggctagacgcattggcgccagggtttacgccttgcctgaagacctcgtggaagttaaacctaagatggtgatgacagtgtttgcctgtcttatggggagaggaatgaaacgggtctag

SEQ ID NO: 128922 - DNA, 306 bp, synthetic construct
  misc_feature 1..306: note = Description of Artificial Sequence: Synthetic coding sequence
  source 1..306: mol_type = other DNA
atgagctctgccgcagggttctgtgcttcccgcccaggcctcctttttctgggcttacttctgctgcctttagtggtcgcctttgcttccgctgaggccgaagaagatggtgacttgcaatgcttgtgcgtcaaaactacatcccaggtgcggccaaggcatatcacgtctctcgaggttattaaagctgggccacactgtcctacagcacagcttatcgctacgctaaaaaacggtcgcaaaatttgcctggacctgcaggctcccctgtacaaaaagattataaaaaaacttctagagtcttag

SEQ ID NO: 128923 - DNA, 405 bp, synthetic construct
  misc_feature 1..405: note = Description of Artificial Sequence: Synthetic coding sequence
  source 1..405: mol_type = other DNA
atgaagtccctgacatggattctgggattgtgggcactggccgcctgtttcacacctggtgagtcccagcgcggcccccgagggccctaccctcctgggcctttagcccccccacccccaccgtgctttccattcggaaccggcttcgtgccaccccctcaccccccgccatatggtcctggacgcttccctccacccctctcaccaccctacggccccgggagaatccctccctcaccccctccaccttacgggcctgggagaatccaaagccactcgctccctcctccttacgggccggggtaccctcagcctccatctcagcctcgcccgtaccccccggggccccctttttttcccgtgaattctccaacggatcctgcactccccactcccgctccttag

SEQ ID NO: 128924 - DNA, 399 bp, synthetic construct
  misc_feature 1..399: note = Description of Artificial Sequence: Synthetic coding sequence
  source 1..399: mol_type = other DNA
atgagccagggagacagcaaccccgccgcaatcccccatgccgctgaggatatccagggtgacgacaggtggatgtctcagcataaccgattcgtgctggactgtaaagacaaggaacccgacgtgttgtttgtgggggatagcatggtccagctgatgcaacagtacgagatctggcgagaattgttttcaccgctccacgctctaaatttcgggataggcggcgatacaacccggcatgttctgtggagactgaaaaatggtgagttggaaaatatcaagcctaaagtgatcgtagtgtgggtgggaactaacaaccatgaaaacactgctgaagaggtggctggcggcatagaagcaatcgtccagctgattaacacccgacagccgcaggcgtag

SEQ ID NO: 128925 - DNA, 690 bp, synthetic construct
  misc_feature 1..690: note = Description of Artificial Sequence: Synthetic coding sequence
  source 1..690: mol_type = other DNA
atgtcacaaggagacagcaatcctgccgccatcccccacgctgccgaggacattcagggcgatgacagatggatgtctcagcataatagatttgtactggattgtaaggataaagagccagatgtactgtttgtgggggatagtatggtgcaattgatgcagcaatatgaaatctggcgagagctgttctcccctcttcacgccctgaattttggtataggaggcgacaccactaggcacgttctttggaggctgaagaatggcgagctggaaaatattaagcctaaagtaattgtggtttgggtggggacaaataatcacgagaataccgccgaggaggttgccggcggcattgaggctatcgtgcagctgattaatacaagacaacctcaagcaaagatcatcgtccttgggctgcttccccgcggcgaaaagccaaaccccctgagacagaaaaacgccaaggttaaccagctgctgaaggtcagtctccctaagttggcaaacgtgcagctgttggataccgatggcggctttgtccactcagatggcgccatctcgtgtcatgatatgttcgactttcttcatcttacaggcggagggtacgctaagatttgcaagcctctgcatgagctgataatgcaacttctggaagagacgcccgaggaaaagcagaccacgatcgcctag

SEQ ID NO: 128926 - DNA, 468 bp, synthetic construct
  misc_feature 1..468: note = Description of Artificial Sequence: Synthetic coding sequence
  source 1..468: mol_type = other DNA
atgtcacaaggtgatagcaaccctgccgctattccacatgcggccgaagacattcaaggagacgatcggtggatgagtcagcacaatagatttgtcctagactgcaaggataaagagcctgatgtcctcttcgttggcgactctatggtgcaacttatgcagcagtacgagatatggcgtgagctcttcagccccctccatgccctgaacttcggtatcggaggcgacaccacccgccacgtactttggcggctgaagaatggggaactggaaaatatcaaacctaaggttattgttgtgtgggtcggtactaacaaccacgagaatacagccgaagaggtggcgggtggcattgaggccattgttcaactgataaacacacgccagccacaggctaaaatcatcgtcctgattatctactggcaggacgagcaggactaccacgagcgcaaagtgcaaatggattag

SEQ ID NO: 128927 - DNA, 609 bp, synthetic construct
  misc_feature 1..609: note = Description of Artificial Sequence: Synthetic coding sequence
  source 1..609: mol_type = other DNA
atgtcacagggtgactcaaaccctgccgccattcctcacgccgcagaagacatacaaggagatgaccggtggatgagtcagcacaacagattcgtcctggattgtaaagacaaagagccagatgtcttattcgtaggggactccatggtgcagctgatgcaacagtacgagatctggcgcgagttattctcacctcttcacgctctgaattttggcatcggtggggacacgacgcggcacgttctgtggaggcttaaaaatggagagttggaaaacatcaagcctaaagtaatcgtggtttgggttggcaccaacaaccatgagaatacggccgaagaagtggctgggggcattgaggcaatagtgcagttaatcaacacaaggcagcctcaggcaaaaataatcgtgctcggcaaggccgcagccagtaagtattccatttccgaaatcgtgagactcgaacaaggctccgtgaactggagcatcggcacttacccagatgatacccccgcaactacccggcccgccatcctgcagctgtttactggcaagatgtcccgcataacaatgaaagaaaaaagcaggtggactgaggagattcttcactag

SEQ ID NO: 128928 - DNA, 696 bp, synthetic construct
  misc_feature 1..696: note = Description of Artificial Sequence: Synthetic coding sequence
  source 1..696: mol_type = other DNA
atgagtggtgaagagaaccctgccagcaagccaacgccagtccaggacgtgcagggcgacggacgctggatgtccttacatcaccgctttgtggccgatagcaaggataaagagcccgaggtagttttcatcggagactcactggttcagctcatgcatcagtgcgagatctggagggagttgttttccccccttcatgctctgaactttggaattggaggcgacggaacgcagcacgtcctctggcgactggagaatggcgagctggaacatattaggccgaagattgtggtggtgtgggttggaactaacaaccacggccacacggcagagcaagtgaccggcggaattaaagctattgtccagttggtgaatgagaggcagcctcaggctcgggtcgtcgtgctggggctattaccccgtggtcagcaccctaacccactgagggaaaaaaacaggcaggtcaatgaactggtacgggccgcgctggccgggcatcccagagcgcatttcctcgatgccgatccggggtttgtacactccgacgggaccataagccaccacgatatgtatgattatctccacctctctagactgggctacacccctgtgtgtcgcgcactgcactctctccttttgcgcttgctcgcccaggaccaaggacaaggcgcccctctcttggaacccgctccttag

SEQ ID NO: 128929 - DNA, 696 bp, synthetic construct
  misc_feature 1..696: note = Description of Artificial Sequence: Synthetic coding sequence
  source 1..696: mol_type = other DNA
atgtctggcgaggaaaaccccgcgagtaagccaacacccgtgcaggacgttcagggcgatggccgatggatgtcactgcaccatcggtttgtggcagattcaaaagacaaggagccagaggttgtgtttatcggagacagcctagtccaactaatgcatcagtgcgagatttggcgggagttattctcaccacttcacgccctcaattttggtataggcggagacggcactcagcatgtgttgtggagacttgagaacggtgaactcgagcacattaggccgaagatagttgtggtgtgggtgggaactaataaccacgggcacactgcggaacaggtgacaggaggaatcaaggcaattgtgcagctggtcaatgaaaggcagccacaggcgcgcgtggtggtcttaggactcctgccccggggacagcatcccaaccctcttcgtgagaaaaaccgacaggtgaatgagttagtgcgcgctgctttggcaggacatcctcgggctcacttcttggacgccgaccctggctttgtgcactctgatgggactatcagccaccacgacatgtacgattacctgcatctctccagactggggtacacacctgtgtgtcgggccttgcactccctgttacttcgcctgctcgcccaggaccaggggcagggtgccccacttcttgaaccagctccatag

SEQ ID NO: 128930 - DNA, 720 bp, synthetic construct
  misc_feature 1..720: note = Description of Artificial Sequence: Synthetic coding sequence
  source 1..720: mol_type = other DNA
atgaccattaaactgtgggactttcagggcttcgaatgcatccggacgatgcatggccatgaccacaatgttagcagcgtggccattatgccgaatggagatcatatagtcagcgcctcacgggataagacaataaagatgtgggaagttcaaaccggttattgcgtgaagacgttcacagggcatcgcgaatgggtgagaatggtaaggccgaaccaagacgggaccctcatagcctcttgcagtaatgatcagacggtccgcgtgtgggtggtcgcaaccaaagaatgtaaggccgaacttcgcgaacatgaacacgtggttgagtgtatctcttgggctcccgagtcctcctattcgtctattagtgaagccacggggtcagagacaaagaagagcggcaagcctggacctttcctcttgtcagggtcacgggacaaaaccataaagatgtgggacgtcagcaccggcatgtgtctcatgaccctggtgggtcacgacaactgggtccgtggtgttcttttccactccgggggtaagtttatcctgtcatgcgccgacgataagaccttgcgcgtttgggattacaagaataagcgatgcatgaagaccctgaacgcacatgaacacttcgtcactagcctggattttcacaagactgccccttatgtcgtcacgggtagtgtggatcagaccgtcaaggtttgggagtgtagatag

SEQ ID NO: 128931 - DNA, 1233 bp, synthetic construct
  misc_feature 1..1233: note = Description of Artificial Sequence: Synthetic coding sequence
  source 1..1233: mol_type = other DNA
atggtgttgagtcagcggcaacgcgatgagctcaacagggccattgccgactatctccggtctaacggttatgaggaggcatactcagtgtttaagaaggaggctgaactggatgtgaacgaagaacttgacaaaaagtatgctggtctgttggaaaagaaatggacttccgtcatccggcttcagaagaaggtcatggaactcgaatcaaaactcaacgaagctaaggaggagttcaccagcggcgggcccttgggtcagaaacgagatcccaaggaatggataccccgcccccctgagaaatatgccttaagtggccatcgctcacccgtgacccgggtgatttttcatccagttttttccgtgatggtgagtgccagtgaagacgcaacaatcaaagtgtgggactatgagacaggagatttcgaaaggacactgaaagggcacacagatagcgtgcaggatatttccttcgatcacagcggtaaactgctggcatcctgttctgccgacatgacgattaaattgtgggattttcagggcttcgagtgcatacgaactatgcacggccatgaccacaatgtctcctcagtggccataatgcctaatggcgaccatattgtatcggcatctagggacaagaccatcaaaatgtgggaggttcagaccggctattgcgtcaagacatttacggggcaccgtgaatgggtgcgcatggtgcgcccaaaccaggacggaacactgattgcgtcctgttcgaatgaccagaccgtccgggtatgggtcgtagccacaaaagagtgtaaagcagagctgagagagcatgaacacgttgtcgagtgtatttcctgggcccctgagagttcctatagcagtatcagcgaagccaccgggagcgagactaagaagtcgggcaagccaggcccattcttgctgagcggtagccgggataagacaattaagatgtgggatgtgagcaccggaatgtgtctgatgaccctggtgggacatgacaactgggtccgcggggtgttgtttcattccggaggcaaattcatcttatcttgcgctgacgacaagaccttgcgggtctgggattataaaaacaagcgttgtatgaaaactcttaacgcccacgaacactttgtaacaagcctggatttccataaaacggcgccttacgttgtcaccgggagcgtggaccaaactgttaaagtgtgggaatgtaggtag

SEQ ID NO: 128932 - DNA, 618 bp, synthetic construct
  misc_feature 1..618: note = Description of Artificial Sequence: Synthetic coding sequence
  source 1..618: mol_type = other DNA
atgaccataaagctatgggattttcagggattcgagtgtattagaaccatgcacggccacgatcacaacgtcagcagcgttgccattatgccaaacggggaccacatcgttagcgcgtcacgcgataagactatcaagatgtgggaagttcagacaggatactgcgttaaaactttcactggacaccgagagtgggtgcgcatggtgcggcctaatcaggatggcacgttaatcgcatcatgtagcaatgaccagacagtgcgggtttgggttgtggcaactaaagaatgcaaggctgagctgagagagcacgagcacgtagtggagtgtattagctgggcgcccgagagttcctacagctccatctcggaggctactggctctgaggtgggtcacgacaactgggtccgcggggtcctttttcacagcggaggaaaattcatactgtcatgtgcagacgacaaaaccctccgcgtgtgggactataagaacaagcggtgcatgaaaaccttgaacgcccacgagcactttgtcacatcattggatttccacaagactgccccgtacgttgtgacaggctccgttgatcagactgttaaagtttgggagtgtcgatag

SEQ ID NO: 128933 - DNA, 1029 bp, synthetic construct
  misc_feature 1..1029: note = Description of Artificial Sequence: Synthetic coding sequence
  source 1..1029: mol_type = other DNA
atggagccccacgacagctcccacatggactccgagttcagatatactctgtttccaatcgtttactctattatttttgtccttggcgtcatcgccaatgggtacgtgctttgggtttttgctaggctctatccctgtaagaagttcaacgagatcaagatattcatggtgaatctgaccatggccgatatgctctttctgataacgttaccactgtggatcgtgtattaccaaaatcagggcaattggatactgcctaagtttctttgcaacgtggcaggttgtctcttctttatcaacacgtactgtagtgtggcctttctgggggtcataacttataaccggttccaagctgtaactaggccaataaagactgctcaagctaacactcgtaaacggggaatctcattgagcctcgttatatgggtcgcaattgtcggtgctgcgtcatatttcctgatcttggatagcaccaataccgtgccagactcagctgggagtgggaatgtgacaagatgtttcgaacattacgagaaaggttctgtcccagtgctgatcatccacattttcatcgtgttcagcttctttcttgtattcctcatcatcttattctgcaacctggttatcatccggacactcctcatgcagccagtgcaacaacagaggaacgccgaggtcaagcgtagggctctgtggatggtgtgtaccgttctggctgtgttcataatatgttttgttccacatcatgtggtccagctgccctggactttagccgagctgggctttcaggactcgaaatttcaccaggccatcaatgacgctcaccaggtgaccctttgcctgctgagcacaaactgtgtgctcgatcccgtgatctattgcttcctgaccaagaagttccggaaacacctgaccgaaaagttctatagcatgcgctcctcacggaaatgctcccgggccacaactgacacagtgactgaagtggtcgtacccttcaatcagattccaggcaactctctcaagaactag

SEQ ID NO: 128934 - DNA, 1029 bp, synthetic construct
  misc_feature 1..1029: note = Description of Artificial Sequence: Synthetic coding sequence
  source 1..1029: mol_type = other DNA
atggaaccccatgatagcagccatatggattcagagtttcgctataccctattcccaatcgtctactctatcattttcgttctcggtgtaatcgcaaatgggtatgtgctgtgggtatttgcgcgcctgtatccatgcaaaaaattcaatgagattaaaatatttatggttaacttgaccatggccgacatgttatttcttatcaccctccccctttggatagtgtattatcagaatcaggggaattggattcttcctaaatttttgtgtaacgtggccgggtgcctgtttttcatcaatacttattgctccgttgccttcctcggagtgataacctataataggttccaggcggtgacaagacccattaagacagcccaagctaatacccggaagcgagggattagcctgagtctcgtaatctgggtcgcaattgtcggggcggcttcttactttctgattctggattccacgaacactgttccagatagtgctggatctggtaacgtgacacggtgcttcgagcattatgagaagggatcggtgcctgtgttgatcatccacattttcatcgtgttttcttttttcttagtgttcttaattatcctgttctgtaatctggtcatcataagaacccttctcatgcaacccgtgcagcagcagcgaaatgccgaggtgaagagacgtgctctttggatggtgtgcactgtcctggcagtgtttatcatatgttttgtcccccatcacgtggtccaattaccctggacgcttgccgaacttggttttcaggactccaagttccaccaggctattaacgacgcacaccaggtgacgttatgcctcctgagcactaattgcgtgctcgacccagtgatctactgcttccttactaaaaaattcaggaagcatctgaccgagaagttctattcaatgcggagctccagaaagtgttctcgggccaccacagacactgtcaccgaggtcgtagttcctttcaaccagattcccggaaatagcctgaagaattag

SEQ ID NO: 128935 - DNA, 1029 bp, synthetic construct
  misc_feature 1..1029: note = Description of Artificial Sequence: Synthetic coding sequence
  source 1..1029: mol_type = other DNA
atggagccccatgatagttctcatatggacagcgagttcaggtatacgctgttccctattgtatattccatcatttttgtcctcggcgtgattgccaacgggtacgtgctgtgggtgtttgcacggttatatccctgcaagaaattcaacgagatcaagatcttcatggtcaacctgaccatggctgacatgctgtttctgatcacccttcccttatggattgtgtattatcagaatcagggaaattggatcctccctaaatttctgtgtaatgttgctggatgtttattttttatcaatacctattgcagcgttgcgtttctgggcgtgatcacctataatcgattccaggcagtgactcgccctataaaaaccgctcaggctaatacgaggaagagaggcatctcactatctctggtaatttgggttgctattgttggagctgcaagctatttcttaatcctggattcaactaatactgtccccgacagcgccggttccggtaacgtcaccagatgctttgagcattacgagaagggctccgttccagtactcatcattcacatttttatagtattcagtttctttctggtgtttttgatcatccttttctgtaatctcgtcatcatccggacactactaatgcagcccgtacaacagcagcgcaacgctgaggttaaacgtagggctctctggatggtgtgcaccgtcttagccgtcttcatcatctgtttcgtgccacaccatgtggttcagctcccctggaccctcgccgagctggggtttcaggacagcaagtttcatcaagcgatcaatgacgcacaccaggtgaccttgtgtctcctttccacgaactgcgttcttgaccccgttatttattgtttcctgacaaaaaagttcaggaagcatttaacagagaaattttatagcatgagatcttcacgcaagtgcagcagagcaactactgacaccgttaccgaggtcgtagtaccttttaatcagatccccggcaattcactgaaaaactag

SEQ ID NO: 128936 - DNA, 1128 bp, synthetic construct
  misc_feature 1..1128: note = Description of Artificial Sequence: Synthetic coding sequence
  source 1..1128: mol_type = other DNA
atgaaagtttggttgctgctgggactactgctggtacatgaggcgctggaagatgttacaggtcaacatttaccaaaaaataaacgacctaaagagccgggagaaaaccggataaagcctaccaacaagaaggttaagccaaaaatccccaagatgaaagacagggactctgcgaactctgctccgaaaacgcagtccattatgatgcaggttctcgataaaggacggttccaaaagcccgcggctaccctctccctcctggccggccaaaccgtggaattaagatgtaaaggcagccgcataggctggagctatccagcttatctggacacattcaaggatagcaggctcagcgtgaagcagaacgagcgatacggacaactgaccctggtgaacagcacatccgctgataccggagagttctcctgttgggtacagctctgttccggttacatttgtagaaaggacgaagctaaaacaggctcaacctacatttttttcactgaaaaaggtgagttattcgtaccgtctcctagttatttcgacgtggtgtatctcaaccccgaccgacaggccgtggtaccttgccgagtcacagtcctgtctgcgaaggtaacattgcatcgggagtttccagcgaaggagatacctgctaacggcaccgacatagtttacgacatgaagagaggtttcgtctatctgcagcctcattccgagcaccaaggggttgtgtattgtcgtgcagaagccggcggaagatcccagatctccgtcaaataccagctcttatacgtggcagtgcctagcggcccacctagcacgaccattctcgcgtcttctaataaggttaaatccggagacgatatttcagtcctgtgcacagtgctcggcgagccggatgtcgaagtggagtttacttggattttccctggtcaaaaagatgagagacctgtgaccattcaagacacctggaggctgatccacaggggactgggtcataccacccggatcagccagagcgtgataaccgtagaggatttcgaaacaattgacgcaggttattacatctgcactgctcagaacttgcagggacagacaaccgtggccacaactgtggaattcagctag

SEQ ID NO: 128937 - DNA, 1128 bp, synthetic construct
  misc_feature 1..1128: note = Description of Artificial Sequence: Synthetic coding sequence
  source 1..1128: mol_type = other DNA
atgaaggtgtggcttttgcttggattattgctggtccacgaggcgctggaggacgtgaccggacagcatctacccaagaataaacggcccaaggagcccggcgagaaccgaatcaaacctaccaacaaaaaggtaaagcccaagatcccaaagatgaaggatcgggactccgccaactccgctcctaagacacagagcattatgatgcaagtcctggacaagggacgatttcagaagcctgcagccacactttcactgcttgccggccagactgtagaactacggtgcaaaggaagtaggatcgggtggtcttaccccgcctatctcgatacatttaaagattctcggctatccgtgaaacaaaacgagagatatggccagttgacgttggtgaattctacctccgccgacactggcgaattcagctgttgggtccaattatgttcagggtacatttgtcggaaggacgaggcgaaaacgggatctacttacatattcttcactgaaaagggggagctctttgtgcccagccctagttatttcgatgttgtgtacttgaatcccgacaggcaggctgtagtcccttgccgggtgactgtactgagtgccaaggtgaccctgcatagagaattcccagcaaaagaaattccagcaaacgggacggacattgtgtacgacatgaaacgagggttcgtctatctgcagcctcacagcgagcaccagggtgtggtatactgtcgagcagaagcgggtggcaggtcgcagatctcagttaaatatcagcttctttacgtggccgtgccctcagggcccccctccaccacgattcttgcctcttctaacaaggttaagagtggagatgatataagcgtgctgtgcacagttctgggagagccggacgtggaggtcgaattcacatggatcttccctggccagaaggatgagagaccagttacaatccaggatacctggaggctaattcaccggggtctgggacatactactcgcatctcccagagcgtcatcacggtcgaagatttcgaaacaatcgacgccgggtattacatttgcacagcccaaaatctacaggggcagacaactgtagcaaccactgtggaattctcttag

SEQ ID NO: 128938 - DNA, 1128 bp, synthetic construct
  misc_feature 1..1128: note = Description of Artificial Sequence: Synthetic coding sequence
  source 1..1128: mol_type = other DNA
atgaaagtgtggctccttctgggtctgcttctcgtccacgaggccctcgaggacgtgaccggacagcatcttcctaaaaataagcgccctaaggaaccaggtgaaaaccgcattaagcccaccaataaaaaagtgaaaccgaaaatcccaaagatgaaggaccgagattccgcaaattcagcacctaagacgcaatccattatgatgcaggtgctggacaagggtcggttccagaaaccagctgccactctcagtctcttggctggtcagaccgtggaactacgctgcaaagggagtcggattggttggtcttatccggcctatctggacactttcaaggattctcggttatcagtgaaacaaaatgagagatatggtcagcttacgctggtgaattcaacgtctgccgacacaggtgaattttcatgctgggtgcagctttgtagcggctacatatgtcgtaaggacgaggcaaaaacaggctccacctacattttcttcactgagaaaggagagctttttgtgccgagcccttcctactttgatgttgtgtacctcaaccctgaccggcaagctgtggtaccgtgccgggtaactgttctgtctgccaaggtaacactgcacagggagttccctgccaaagaaatccccgccaatggcaccgatatagtgtacgacatgaaacgcggatttgtgtacctgcaaccacattccgagcaccagggggtcgtatactgtcgcgcggaggccggcgggaggtcccaaatctcagtcaagtatcagctgctgtatgttgccgtgccttcagggcccccatccacaaccatactggcgagctccaataaagtgaaatccggagacgacatatctgtcctctgcacggtgctcggcgagccagatgtggaggtcgagttcacttggatcttccccggccagaaagacgaacgccctgtgactattcaagatacctggagattgatacatagaggacttggccatacgacccggatatcccagtcagttattaccgtcgaggacttcgagaccattgatgccggatattacatctgtacagcacaaaatctccagggtcagacaactgtggcaactaccgtggagtttagttag

SEQ ID NO: 128939 - DNA, 3075 bp, synthetic construct
  misc_feature 1..3075: note = Description of Artificial Sequence: Synthetic coding sequence
  source 1..3075: mol_type = other DNA
atggcacaaggagccatgagattttgctctgagggtgattgtgcgatctccccaccaagatgcccacgcagatggctgcctgaggggccagtgccacaatcacccccagccagcatgtacgggtccacgggctcccttttgaggagagtggcagggccagggccccgcggccgggaactagggagggtgacagcaccatgcacgccccttaggggaccgccttccccccgcgtggccccttctccgtgggccccatcgtcacccaccggccaacctccccctggggcacagagctcagtggtgatcttccgcttcgtcgagaaagctagcgtgcgccctctgaatgggctccctgctcctgggggcctgtcaagatcttgggatcttggcggggtctcccctcctagaccaactccggccttagggcccggttcaaacagaaagctacgcctcgaagccagcacgagtgacccactgcccgcccggggaggctcagcactccctgggtcgcgcaatctcgttcacggccctcctgcaccgcctcaggtcggggccgacggcctgtattcttctctcccgaatgggctggggggtccccctgagagactcgctactctcttcggtggccctgcagacactggcttcctcaatcagggcgatacttggtctagcccaagagaagtttcttcccacgctcagaggattgccagagcaaagtgggaatttttctatgggtcactggaccccccgagcagcggcgcaaagccccccgaacaggcgcctcctagcccccccggggtgggatcccggcagggaagcggggtggccgtgggacgcgccgccaaatacagtgagaccgacctcgacactgtacctttaaggtgttatagagaaaccgacatagacgaagttctcgccgagagggaagaggctgacagtgcaatagagagccagccatcttctgaagggccacccggcacggcctaccctccagctccacgcccggggcccctgcccggtccgcatccaagtcttggctcgggcaatgaagatgaggatgatgatgaggctggaggtgaggaggatgtcgatgacgaagtgttcgaagcctcagaaggcgccagaccggggtcacgcatgccccttaagtctcccgtccctttcctgccaggtacatcaccttccgctgatggtccagactccttttcttgtgtctttgaggctatcctggagtcacaccgcgccaaagggacctcttacaccagcctagctagccttgaggctctggccagccctggtccaacacaaagcccattcttcaccttcgaacttcctccccagccaccagccccaagaccagacccgccagctcccgcccccttagccccgctagaaccagactccggtacctcgtctgccgccgatgggccctggacccagcgcggcgaagaagaagaggcagaagctagagcgaagctcgcacctggcagggagcctccttccccctgtcacagtgaagactcgttaggtttgggagctgcacctctcggctctgagcccccactgagccagttagtgtccgacagcgacagcgaactggattccacggaaagactggccttagggagtactgacacattatccaacgggcagaaggccgatctggaggctgcgcaacggctggcgaaacgcctctatcggctagatggttttcgaaaggcggatgtggcccgccatctcggcaagaataatgactttagcaaactcgtggccggtgaatacctcaaattttttgtttttacaggtatgaccctggaccaagccctgcgcgtgttcctgaaggagcttgctttaatgggggagacgcaggaacgggaacgcgtgctagcccatttcagtcagcggtacttccaatgcaatcccgaagctctgtcctcagaagatggcgcccacacgttaacgtgcgctctaatgcttttgaatactgatttgcacggacacaacatcggtaagcggatgacttgtggagacttcatcggaaacttagaaggactgaacgatggcggggacttcccaagggagctgctcaaggcgctgtattcttctatcaagaacgagaagctccaatgggctattgacgaagaagaactgaggcgatcactgtctgagctggccgaccccaatccaaaagtgatcaagagaatttccgggggctcaggatccggatcaagtccttttttggacctgactcctgaaccaggcgccgctgtatataaacatggcgctctcgttcgcaaagtgcatgccgatcccgattgccgaaagactccacgggggaaaaggggatggaaaagcttccatggaatcctaaagggaatgattctgtacttgcagaaagaggaatacaaacctgggaaggctctgtcggagacagaattgaagaacgcaataagcatccatcatgccctggccacccgggccagtgactattccaaacggccccatgtcttttacctgcgaacagcagactggcgggtctttctgtttcaggcccctagcctggagcaaatgcagtcttggattactcggattaatgtagtggctgcaatgttcagtgcccccccctttcccgccgctgtgtctagccagaaaaaattttctcgacctttactcccgtcagccgccaccagactttcacaagaggaacaggttcggacacacgaagccaagctcaaggccatggccagtgaactgcgtgaacacagagcagctcagctgggcaaaaagggcagaggaaaggaggcagaagaacagaggcagaaggaagcatatctggagtttgagaaatcccggtattcaacttacgcagctctgcttagggttaagctgaaggcgggtagtgaggagctggatgccgttgaggctgcactggcgcaggcgggttctaccgaggatggtttaccaccatcacacagttccccctcgttacagccaaagccctctagtcagcctcgcgctcagagacactcaagcgagcccagaccaggggccggatccgggcgacggaaaccgtag

SEQ ID NO: 128940 - DNA, 3075 bp, synthetic construct
  misc_feature 1..3075: note = Description of Artificial Sequence: Synthetic coding sequence
  source 1..3075: mol_type = other DNA
atggcccagggggccatgcgattctgcagcgagggagactgcgccatcagtccaccacggtgccctcggagatggcttcctgaaggacctgttccacagtccccgccagcctctatgtatggctcgaccggaagcctgctcaggagggtggccgggccagggccacgtggcagggagctggggcgggtgactgctccttgcacccctctgcggggtcctccttctccccgggtggcacctagcccatgggcgcctagttctccaactggccagccccctcccggagctcagagcagcgttgtgattttccgctttgtcgaaaaggcctcagtacggcctctgaatgggcttcctgcccccggcgggctcagccgctcatgggatctcgggggcgtcagtcctcctcgccccacgcctgctctgggacctggcagcaatagaaagttgcggctcgaggcctccacatccgatccactgcctgcacggggaggaagcgcccttcccggatctaggaacctcgttcatggccccccagcgcccccacaggtgggggccgatggcttatacagttccctacccaatggattgggaggcccacccgaacgcctggccacccttttcggaggcccggcggatacaggctttcttaatcagggagatacttggtcttctccccgcgaggtaagttcccatgcacagagaatcgcacgcgcaaagtgggagtttttctatggttccctggacccccctagctctggagcgaaaccccctgaacaggctccccccagtcctcctggagttggcagccgccaaggatccggggtggcggtgggtcgcgcagcgaagtacagtgagactgacctggacaccgtccccctaagatgttaccgtgaaacagatatcgacgaggtgcttgctgagcgcgaagaggccgactccgctatcgaatctcagccctcttcggagggccctcctgggaccgcctatcctcctgctcctagacccgggcctttaccaggcccacatccgtctctgggctctggaaatgaggatgaagacgacgacgaagcggggggcgaagaagacgtggacgacgaggtgttcgaggcatctgagggtgctcgaccaggtagccggatgccgttgaaatctcccgtgccttttctgcccgggacctccccatcggccgacggccctgactcttttagttgtgtgtttgaggccatcctcgagtctcatagagctaagggaacgagctacacgagtcttgcgagccttgaagccctcgcttcgcctggtccaacacagtctcctttttttacattcgaactccctccccagccccccgcacctagacccgaccctcctgcacctgcccctctggccccgctggaacctgactccggcacttcctccgccgctgatggcccgtggactcagcgaggggaagaggaagaggccgaagcaagagctaaactggccccaggcagagagccacccagcccctgccatagcgaagactccctgggccttggtgcagctccccttgggtctgaacccccgctcagccaactcgtttctgactcagactctgaactagacagtacggaacgactggcactgggctccactgacacactatctaatggccaaaaagccgacctcgaggccgcacagcggttagccaagaggctgtatcggctggatgggtttagaaaggccgatgtcgcaagacaccttggaaaaaacaatgactttagtaaactggtcgcaggggagtatctgaagtttttcgtgtttaccgggatgaccctggaccaggccctaagagtcttcctgaaggagctggcactgatgggtgagacacaagaaagagagagggtactggcccatttctctcaacgatatttccagtgtaaccctgaagcactctcctctgaggacggcgcacacaccctcacctgtgcgcttatgctacttaatactgacctgcatggacataatatcgggaaaaggatgacatgcggggactttataggaaacttggagggacttaatgacggaggcgacttccccagggaactactcaaggctctttattcttctatcaagaacgagaagttgcagtgggctattgacgaagaagagttgagaagaagtctgtccgaattggctgaccccaacccgaaggtgatcaagcggatatcaggcgggtccgggagcggttccagcccattcctggatctcactcctgagcctggagccgccgtctataagcacggggccctggtccgaaaagtacacgcagatcccgactgcaggaagaccccgcgcggcaaacgcggctggaagtcctttcatggcatcctgaaggggatgatcctgtacctgcagaaagaggagtacaagccggggaaggccctgtccgagaccgagctgaaaaacgcaatttctattcaccacgccctcgctaccagagccagtgattattctaagcgacctcacgtgttctacctccgaaccgctgactggcgtgtctttttattccaggctccctcccttgagcagatgcagagctggatcacacgcataaatgtagtcgcagcgatgtttagtgcaccaccattccctgcagcagtctcgtctcaaaagaaatttagccgtcctctcctaccaagcgcggccacaaggttgagccaggaggaacaggttcgtacacatgaggccaagcttaaagctatggcgagtgagctgcgcgaacatagggctgcccagcttggcaaaaaaggccggggaaaggaggccgaggaacaacgacagaaagaagcttacttagaattcgaaaagagccgttactctacctacgccgccctactaagagtcaagctgaaggctgggagtgaggagctggatgcagtggaggccgcattggctcaagccgggagcacagaagatggcctcccaccaagccactcatccccttccctacaacccaagccttctagtcagccaagagctcagcggcacagttcagagcccagaccaggagccggctcaggcagacgcaaaccttag

SEQ ID NO: 128941 - DNA, 2784 bp, synthetic construct
  misc_feature 1..2784: note = Description of Artificial Sequence: Synthetic coding sequence
  source 1..2784: mol_type = other DNA
caaatctggcgctgtcctctacagcatcacgcagagagcgcaccacctctacctgcacttagttgggctcagcccctgctgtgccttagctcagtcagtgccctgggagaacagagacccacaccagccctcgggccaggtagtaatcggaagttgcggctcgaggcctccacatcagaccccctgcctgcacgggggggcagcgcgttacctggctcccggaaccttgtgcatggccccccagctcccccacaagtaggcgctgatggcctttatagcagtctgccgaatgggttaggtggacctccagaaagactagcaacgttgtttggtggccccgccgacacggggttcttaaatcagggagatacttggtcctccccccgggaggtttcatcccatgctcagcgcatcgctagagctaagtgggagtttttttatgggtctctggaccccccatcctcaggcgcgaaaccccctgaacaagcccccccatcaccacccggagtcggttctaggcagggcagtggcgtggcagtgggaagagccgcaaaatatagcgaaactgatctggacacagtccctctgcgatgctatcgagaaacggatatagatgaggtgctggccgagagagaagaagctgattcagccattgaatcccagccttccagtgaaggaccacctggcacagcctatccgcccgcgccaaggcccgggccactgccagggccccatccatctctgggatccggcaatgaggacgaggatgatgatgaggctggaggcgaggaagacgtcgacgatgaagtgttcgaagcttctgaaggcgcacgccccggctccaggatgcccttaaaatccccggtaccttttctcccagggacttccccctcagctgatggccccgactccttttcctgcgttttcgaggccatcctcgagagtcatcgcgctaagggtactagctacacctctctggcttccttagaggcacttgccagtcctgggccaacacaatcacccttttttacctttgagctcccccctcaacctccagccccacgcccagatccacccgcacctgcacccctagcaccactggaacctgattccggtacatcctccgcggccgacgggccttggacccaaagaggagaagaggaggaggcagaggccagggctaagctggctcccgggcgggaacctccctctccctgtcacagtgaagactccttagggttaggggctgcacccctaggctctgaaccccccttgagccaactggtctctgatagcgacagtgaattggacagtacagaacgactggctttagggtcgaccgatactctgtctaatggccagaaagcagacttagaagcggcacagcgtctagccaagaggttgtacaggttggacggtttccgcaaagccgacgtcgctcgccaccttgggaagaacaacgacttctccaagctggtcgccggagagtacctgaagttctttgtatttactggaatgacactcgaccaggccctcagggtgttcttaaaagagctcgctctcatgggcgaaacacaggagcgcgagcgagttttggctcactttagccaaaggtactttcagtgcaatcccgaggccctgtccagtgaagatggtgctcataccctcacgtgtgccttgatgctattgaacacggaccttcacgggcacaatattgggaagcgaatgacgtgcggagacttcatagggaacctcgaaggcctcaatgatggcggtgattttccccgggagcttctgaaggccctgtacagttctattaaaaatgaaaaattacaatgggccattgatgaggaagagctccgacgtagcctgtctgagctcgccgatcccaatcctaaggtcataaagcgcatatccggcggatctggatcggggtcttccccattcctagacctgacaccagagccgggcgccgctgtctataaacacggtgccctggtgcgaaaggtgcatgcagacccagattgtcgtaagaccccacgcggaaagaggggctggaaaagtttccacggaattcttaaaggcatgatcctgtacctgcagaaggaggaatacaaacccggaaaagcactatcagagacagaactgaaaaacgccatttcaatccaccatgcactggccactcgggcatctgattactcaaaaagacctcatgtcttctacctccggaccgctgactggagggtgttcttatttcaggctccctcgctcgaacaaatgcaatcctggatcactaggatcaatgtggtcgctgctatgttcagcgcccctccatttcctgctgctgtgtcttcacaaaaaaagttttcgcggcctcttctgccctccgcagctacacgactgtcacaggaggagcaggtgcgaacccacgaagctaaactcaaggctatggcaagtgagctgcgagaacacagagcagcacagctgggaaagaagggccgcggaaaagaagccgaggagcagagacagaaggaagcatacctggagttcgagaagagcaggtattcaacttatgccgccctcctaagggtgaagctgaaggcaggttccgaggaactcgacgctgtcgaggccgctctcgctcaggccggctctactgaggacgggctccccccttctcacagttccccttctcttcaacccaagccttcttcccagcctagggcacagcgacattcatccgaacccagacctggtgccggctcgggaaggaggaagccttag

SEQ ID NO: 128942 - DNA, 1542 bp, synthetic construct
  misc_feature 1..1542: note = Description of Artificial Sequence: Synthetic coding sequence
  source 1..1542: mol_type = other DNA
atggggtcttcatggtgcttgtacggttgctgtaacgccggggtgaaaacgacgcgactggaggctcactccgaaatgggaagtactgaaatcttggagaaggaaactcctgaaaacctgtccaacggaacctcttcaaacgtcgaagccgcgaaaagactggccaagcggctgtatcagctggaccggttcaagcgtagtgacgtggcaaaacatttggggaagaacaatgagttttccaaactggtagcggaggagtatctgaaattcttcgactttactggcatgacgttggatcagagccttagatacttcttcaaggctttctcactcgtgggcgaaacccaggaaagggagcgcgtgctcatccacttctcaaacagatatttctattgcaaccccgataccatcgcttcacaggatggagtacactgtcttacctgtgctatcatgctattgaacactgacctacacgggcataacattgggaagaagatgacttgccaagagtttatcgccaatcttcaaggtgtgaacgagggtgtcgacttttctaaagaccttttaaaggcgctatacaattccatcaaaaatgaaaaactcgagtgggccgtggacgatgaagaaaagaaaaagagccccagcgagtctacagaggagaaagctaatggcacacaccctaagaccatctcccgtatcgggtccacaaccaaccctttcttggacatcccacacgatcccaatgcagccgtctacaagtccggcttcctggcccggaagatccacgctgacatggacgggaaaaagacaccacgcggcaagagaggttggaaaaccttctacgcagtgctgaaagggaccgtcctgtatctacagaaagatgagtataaacctgagaaggccctgagcgaggaagatctcaagaatgccgtgtctgtccatcacgcgttggccagcaaggccactgactacgagaaaaagccgaatgtgtttaagctcaaaacagcagactggagggtgttgctgttccaaactcaaagccccgaagaaatgcagggctggataaataaaatcaattgtgtggcagctgtgtttagcgctcccccttttccagctgcaataggctcccagaagaagttcagccgccccctcctgccggccactacgaccaagctcagtcaggaggaacagctaaaaagccacgagtctaagctgaaacagatcactaccgaactggcggagcacagatcgtacccccctgacaaaaaagtcaaagcgaaggacgtagacgaatacaaattgaaagaccattacctggagtttgagaagacaagatacgagatgtacgtatcaatcctgaaagagggcggcaaagagctactgtctaatgatgagtccgaggctgccggcttgaagaaaagtcacagctctcccagcctgaacccagacaccagtccaattaccgctaaggtcaaacgaaacgtttctgagagaaaagaccatcgaccggaaactcctagcatcaagcagaaggttacttag

SEQ ID NO: 128943 - DNA, 3144 bp, synthetic construct
  misc_feature 1..3144: note = Description of Artificial Sequence: Synthetic coding sequence
  source 1..3144: mol_type = other DNA
atggaggggaggagcgccgccgccgagactttcgtgtgggtcaataatgctagcgcccactcacaatctgtcgcgaaggccaagtacgagttcctgttcggaagaagtgagggtaaagctcctgatacatctgatcacggggggtccacgcttctgcctccaaacgtcaccaacgagttccctgagtatgggaccatggaggaagggggcgagggcttgagagcctccctagagtttgacggcgaggccctgccctgtcatcctcaagaacaacagggagttcaacctctgacagggtgtcatagtggactggattctgtgaccgaaggtccaaaagacgtaagagaggcgcccagtcagagccatctgaaagagcagtcattacagccgattgattctctgatatccgcattaaaagccaccgaggcgcggataatttccggaaccttgcaggccacgaaagtcctagaccaggacgccgttagttctttctccgttcagcaggttgaaaaggagttggacaccgcatctagaaaaactcaacgcgtgaataaaaccttgccagccggccagaaaaatctgcctgagatacctttatcagccgaagtgaccaccgaagaatctttctacttgagtattcagaaagacctgaccgccctgctcactggcgatacccaggctgagatctcccagatcatgaataatggaaggaagggtgccgtctgtgttcaggaaccatcctgtccactggcttcactgggtagcagtgccgtgacatgtcattcagctggctctgtgggtttcctgaaggaacagaggtccgctctgggtcgggaacatcccggagggtgtgaccgctcatcctcaatggggcgtccgggtcgggtcaagcatgtcgagttccaaggtgtggaaattctctggaccggaggcgacaaaagggagacgcagcacccgatcgactttgagacatcgctccagagaaccgcttccccagacagcaaggagtcttctaaagtcccgagacatctgatttcatcagccgggctgtgtaattcgagttcattaaccgaaaacgtgtgggatgagtcctggaaagcaccatccgagcgacctggcacctcctcggggaccttcagccccgtacgcctggacgagagcggggaagacgaggttttcctgcaagagaataaacagcacctggagaagacccctaagcctgagcgggaccgggaaaggatttctgaacaggaagagcacgtgaaaggagaagacgaagatatccttggccctggatacacagaagacagcaccgacgtgtattcaagccagttcgagacaatcctggacaatacatctctctattattccgctgaatcattggagaccctatattcagagcctgattcgtatttcagtttcgaaatgcctctgacaccgatgattcagcagaggatcaaggaaggcggacagtttttagagcggactagcggggggggacaccaagacattctgtccgtttctgctgacggaggaatcgtcatgggatacagctcaggcgtgactaatgggctcaacgatgcctctgactctatttacacgaagggaacacctgaaattgccttctggggatcaaacgcgggggtcaagaccacccgcctggaggctcatagcgagatggggagcacggaaatcctcgaaaaagagacacctgaaaatttgtccaacggaacttcatcaaacgtggaagctgcaaaacgtttagctaagcgcctctaccagctggaccgattcaagaggtccgacgttgctaagcacctagggaaaaataatgagttttctaaactagttgctgaagagtacttgaaattttttgatttcactggcatgaccctcgatcagagcttgcgatatttttttaaagccttttcgttggtcggcgaaacacaggaaagggaaagggtactcatacacttcagcaacaggtacttttattgcaacccagatacaatcgcttctcaggacggtgtgcattgtctcacatgtgcaatcatgcttctgaataccgacctccacgggcataacatcgggaaaaaaatgacctgtcaggaattcatagccaacctgcagggagtgaacgaaggtgttgatttcagcaaggatttactcaaagcattgtacaattctattaagaacgaaaaattggaatgggctgttgacgatgaggagaagaaaaagagccccagtgagtctaccgaagagaaagcaaatggtacccaccccaaaacgatttcccgcatcggatccaccaccaacccatttctggacatcccacatgatccgaacgctgccgtttacaaaagcgggttcttagctcggaagattcacgcggacatggatgggaagaagactcctcggggtaagaggggatggaagaccttttacgccgtgcttaagggcacagtgctctatctgcaaaaggatgagtataagcccgagaaagcactgtctgaggaagatttgaagaatgcagtttccgtccatcacgcactggcctctaaggcaaccgattacgagaagaagcctaacgtctttaagctgaaaaccgctgattggagggtcctgttatttcagacacagtcccctgaggagatgcagggctggatcaacaagataaattgcgtggcagcagtgttctcagctccacctttccctgccgcgatcggctctcaaaaaaaattttctcgccctttactgcctgctacaactactaaattatcgcaggaagagcagttgaaatcccacgaatcgaagctcaagcagatcactacagaacttgccgaacacaggtcatatccacctgataagaaggtgaaggccaaggacgtggacgagtacaagctaaaagaccactacctagagttcgaaaaaacccgctatgaaatgtatgtgtctattttgaaggaaggaggtaaggaattgctctcgaatgacgaatccgaagcggccgggctgaagaaatcacattcatccccatccctcaaccccgatacatccccgatcacggctaaagtcaagagaaacgttagcgagcggaaggaccatcgcccagaaacaccctcgataaagcagaaagttacttag

SEQ ID NO: 128944 - DNA, 810 bp, synthetic construct
  misc_feature 1..810: note = Description of Artificial Sequence: Synthetic coding sequence
  source 1..810: mol_type = other DNA
atgattggggtcaactctgtgcagtccgcatctaaggttcgggttcgcacatccggaagtgtgaaatactcccgcgaggattcaataaggaggcagtctcacaggtcaaaatctatgaagatttctaatagcagcgagttcagtgcaaaggagaataaagccctgtacaacagcatcaaaaatgaaaaactcgagtgggccgtggatgatgaggagaagaaaaaatctcctagcgagtctacggaagaaaaagcaaatgggacacatcccaagacaatttccaggattgggtccacaacgaacccattcctcgacattcctcacgatcctaatgcggctgtatataagtctgggttccttgcacgaaagatccacgcggacatggatggaaaaaagacgcctagggggaagcgcggatggaagactttctatgccgtgctcaagggcactgtgctgtatctgcagaagcacgaatctaagctaaagcaaatcaccaccgaactggctgagcatcgatcctacccccctgataagaaagtgaaggccaaagatgtagatgagtataaactcaaagatcactaccttgaattcgagaagacaagatacgagatgtacgtgtcaattctgaaggaagggggaaaagagctgttgagcaacgacgagtccgaagctgctggcttgaaaaagtcacactcaagtccgtccttgaacccggataccagccctattaccgctaaggttaagcgcaatgtgtccgagaggaaagaccaccgcccagagacgccatcaataaagcagaaagtgacctag

SEQ ID NO: 128945 - DNA, 3150 bp, synthetic construct
  misc_feature 1..3150: note = Description of Artificial Sequence: Synthetic coding sequence
  source 1..3150: mol_type = other DNA
atggaagggaggtccgcagctgcagaaacttttgtgtgggtgaataatgccagcgctcattcccagtcagtcgcgaaggctaaatatgagttcctttttgggaggtctgaggggaaagcccccgacacaagtgaccacggcgggagtactctactgcctcccaacgtgaccaatgaattccccgagtatggaaccatggaagaggggggcgagggactccgggcatccctggagttcgacggggaagctctaccctgccacccacaagaacaacaaggcgttcagccgcttacaggatgtcatagcggcctcgacagcgttaccgaaggtccaaaggatgtgcgcgaggcaccttctcaaagtcatctcaaagaacagtcattgcaaccaatcgattcactgatttctgcattgaaagctactgaggcccggattatatccgggaccctgcaggccacaaaggtgctcgaccaggacgccgtgtccagtttttctgtgcagcaggtggagaaggaattagacacagcctccagaaagacgcagcgagtgaataaaactcttcctgctggccaaaagaacctgccagagatcccactgagcgcagaagtgacaacagaagaatcattctatctgtctatccagaaggacttaactgctctgctgacaggcgatacgcaggccgagattagccagatcatgaataacgggcgcaaaggagcggtctgtgtgcaggagccatcatgtccactcgctagcctggggtcctcagccgtaacctgtcacagcgccggttccgtgggattcttaaaagagcagcggtctgcactgggacgggaacatcccggggggtgtgatagaagctcatcaatgggaagaccaggtcgggtgaaacacgtggaatttcaaggcgtggaaatcctctggacgggcggcgataagagggaaacccagcacccaattgactttgagacatcactacagcgtacagcttcacctgattctaaggagtcctcgaaagtgcctagacatctgatatcgtccgccggcttatgcaacagctcctctctcactgaaaacgtgtgggatgagtcatggaaggccccctctgagagacccgggacatccagcggaacatttagcccggtgcgcctggatgaaagcggagaagatgaggtgtttctgcaggagaacaaacagcacctggaaaagaccccaaaaccggagagagatagggaaagaatcagcgagcaagaggagcacgtgaaaggtgaagacgaagacatcttgggtcctggttatacagaagattccaccgacgtgtattcaagccagtttgagactattctcgacaacacgtctctctactattctgcagaatcactggagacactttattcagagcccgactcctactttagtttcgagatgcccttaaccccgatgatccaacagcggataaaggaaggcggacagttcctagagcgaactagtggcggaggccaccaggatatcctgagtgtttcggcagacggcggcatcgtgatgggatactccagcggggtcacgaatggcctaaatgatgcaagcgattcaatttacaccaagggcacacccgaaattgcgttctggggcagcaatgcaggcgtaaaaacgacccggttggaggctcacagcgaaatgggatctactgaaatccttgagaaggagacccccgaaaacttgtccaatgggacctcttctaatgtcgaggccgccaaaaggctcgccaaacgtctctatcagctggaccggttcaagcgttccgacgtggccaagcacctgggaaaaaataatgagttctcaaaactggtggctgaggagtatctcaaattttttgacttcacgggtatgacactcgatcagtctcttagatacttttttaaagctttttctctcgtgggcgagacccaagagagggaacgagtgctgattcacttttctaaccgatacttctactgcaaccctgacacaatcgcctctcaggatggggtgcactgcttgacatgcgcgatcatgctgttaaatactgatctccatggccacgtgtccaacatagggaagaaaatgacatgccaagaattcattgccaatctgcagggtgtgaacgaaggagtagatttctctaaagatctactgaaagccctatacaactccattaagaacgagaaactggaatgggcagtcgacgacgaggaaaaaaagaaaagtccaagcgagagtaccgaggagaaggcgaacggcacacaccccaagactatttctcgtatcggctccactaccaatccattcttggatattccccatgatcctaacgctgctgtttataaatcaggtttccttgcgagaaagatccatgcggacatggatggcaaaaagacaccccggggcaagaggggttggaaaaccttctacgctgttctgaagggtacagtgctttacctgcagaaagacgagtataaaccagagaaagccctctctgaggaggatctgaaaaacgccgtttcagttcaccacgccctagcttcaaaagccaccgattatgagaagaaacctaatgtcttcaagttaaagacagcagactggagggtgctcctgtttcagacccaaagtccagaagagatgcaggggtggatcaataagattaactgcgtggcggccgtcttttctgcaccgccctttccagcggccattggcagccagaaaaagttctccagaccgttgttgccagcaacaacaacgaagctttcccaggaggagcaactgaagtcacacgagagcaaactgaagcaaataacgactgaactggcagaacaccgcagctatcctccagacaagaaggtgaaagccaaagacgttgacgagtacaaacttaaggatcactacttggagttcgagaagactaggtatgaaatgtacgttagtatactgaaggaaggaggcaaggaactcctgagtaacgacgagtcggaggccgccggtctgaaaaaatcacactctagtcccagcctgaaccctgacacctctcccattacagccaaagttaagaggaatgtgagcgagcgcaaagaccacagaccagagacacccagtatcaagcagaaggttacttag

SEQ ID NO: 128946 - DNA, 3171 bp, synthetic construct
  misc_feature 1..3171: note = Description of Artificial Sequence: Synthetic coding sequence
  source 1..3171: mol_type = other DNA
atgatgggcgactaccgcctacccgatcatccacagcctatggagatcctcaatctctaccttggagattctctggagccacacccaggtgaatgtccccgagagacctgttctcacgaagatccacccgaaccctttgaggagcagacctgggccaccgaccctccagaaccaactcggcagaacgttcccccatggggatccggtgtggaattgacgcatctgggctcctgggtgcaccaggacggactggagccttgtcaggaacagacaagggcaacggacccgcccgaaagcactcgtcaggatgcccccccctggggcagtggagtagaactgacccacctaggtagcccatctgcacagagggaacatcggcagaacaccgcaagcccaggcagtcccgttaattcccacctgccaggatcccccaagcaaaataggagtacgagtacgcaggtggtgttctgggctgggatcctgcaagcacagatgtgtgtgctcgacctggaggaggaactagagaaaactgagggccttaaggccggactcaaatgttgtcttcccactcctcccgtggacctaccaggggacaccggcttgcactcctcacctccggaaaatgaggactctggggaagactcatcggaacccgagggcgagggccaggcctggctcagggagggaacacctgactcgtccccgcagtggggggcagaggaagagtcaatgtttttctccaatccactgttcttggccagtccttgcagtgaaaactccgcaagcggcgagtgcttctcttggggagcttccgatagccacgccggtgtcagaacaggccctgagagccccgccacactggagccccccctccctgaggacaccgtgctgtgggaactggaatccgaaccagacctgggggacggtgcggcaatctcaggccactgcacaccaccttttcctgtacctatctacaaacctcacagcatctgttgggcctcagtcgctgctgccgaaggggctcccgctgccccaccaggccatggcgagtctgaaggggaccgcctaggcccagccccatccgccgcgccctgtgttgatgaggccttgacctgggaatcagggtgcgtcggtagcgatctgggaccagcggcgcacccagtgcagccctgggcaagcctttcccccgaaggttggcaacgaggaggccccttctggccacaagtcacactgaacagccaggatcgtgatgagagggaaggcggtcatccacaggaaagcctgccatgtacgctggctccatgcccctggcggtcacctgcgtcatctccagagccaagcagccccgaatctgagtcgagagggccagggccccgcccatctcctgcatcttcgcaggagggaagcccccagctccaacaccactcgagcggtatcttaccaaaatggaccctggacgccagccaatcatccctccttgagacagacggggaacagccctcatcactgaagaagaaagaggcaggagaggctccaaaaccaggcgaagaggtcaagtcagaagggaccgcccgaccggctgaaacgggagacgtgcagccagatatacacttgacgagtgcggagcacgagaacctgaggaccccaatgaacagttcatggctgcccggcagcccaatgccccaagctcagagccctgaagagggacagcggccccctgcaggagataagctcgcaaatggagtcagaaacaacaaagtcgcttggaacttagccagtcggctctatagattagagggcttcagaaaatctgaagtggccgcctatctgcagaaaaacaacgatttttcacgcgccgtggccgaggaatatctgtccttttttcagtttggcggacagagtctggacagggccctgcgtagctttttgcaggcactggttctctccggtgagacacaggaacgggaaagaatcctgtaccagtttagccggcggttccatcattgtaacccaggaatctttccttccgtcgactcggtgcatacactgacatgtgcgatcatgctgctgaatacggacttgcatggtcagaatatcgggaagtcaatgagctgtcaggaatttatcacaaatttaaacgggctaagggacggcggaaatttccccaaagaattgctgaaggccttgtattggtcgatcaggagcgaaaagctggagtgggctgtggatgaagaggatacagctaggcccgagaaggctcagcctagtctcccagccggaaaaatgagcaaaccctttctgcaactcgcccaagatccaaccgtaccaacatacaaacagggcatccttgctcgcaaaatgcaccaggatgctgacggcaaaaagacaccctggggaaagcgggggtggaaaatgtttcacaccctgctgagaggaatggtcctctatttcttgaaacagggcgaagatcattgtttagaaggggaaagcctggtgggacagatggtcgacgagccagtgggggtgcaccatagcctggccactcccgccacacattataccaaaaagccccacgtgttccagttgaggacggctgactggcgcctctacttatttcaggcccccacagcaaaggagatgtcctcctggattgctagaattaacctggccgcagccacacacagcgctccaccctttccagcggctgtcggctcccagcggaggttcgtgagaccgatcctgcctgtgggtcccgctcagtctagtctggaggaacaacataggagccatgagaactgtctcgacgccgctgcagacgatctcctggatttacagcgcaacttaccagagagaagaggacgcggcagggagctcgaggaacaccgtctcagaaaggaatacctggagtatgaaaagacaaggtacgagacctacgtacagttgctagttgccagactgcactgtccatccgacgccctggatttgtgggaagagcaattgggacgggaagctggagggacaagggagcccaagctttctctaaagaaatcacacagtagccctagtttgcatcaagacgaggcacctactactgccaaagtgaagcggaacatttccgaaagacggacgtatagaaaaattatcccgaaacgcaatcgcaatcagctatag

SEQ ID NO: 128947 - DNA, 1152 bp, synthetic construct
  misc_feature 1..1152: note = Description of Artificial Sequence: Synthetic coding sequence
  source 1..1152: mol_type = other DNA
atgccatatgtcgacaggcagaataggatttgcggctttttggatatcgaggagaatgaaaactctggaaaattcctgaggcgatacttcatcctggacacaagggaggatagttttgtgtggtacatggacaacccccagaatttacccagcggctcgtccagagtgggcgcaattaaactgacttacattagcaaggtgtccgatgcgacaaaactgcgcccgaaggccgaattctgtttcgtgatgaatgctgggatgaggaaatacttcctgcaggcaaatgatcagcaggatctggtggagtgggtaaatgtcctgaataaagccatcaagatcacagtgcccaagcaaagcgattctcaaccaaatagcgacaacctcagccgccacggcgaatgcggcaagaaacaggtgagctatcgtaccgatatcgtggggggcgtcccgataataaccccgacacagaaagaggaagttaacgagtgtggtgaatccatcgaccgtaacaacctgaaaagatcgcagagccacttaccctattttactcccaagcccccgcaggatagcgccgtgatcaaggcaggctactgtgtgaagcagggcgcggtgatgaaaaattggaagagaagatattttcagctagatgagaataccataggctattttaaaagcgagctggaaaaggaacctctgcgtgttattcctctgaaggaggtccacaaggtacaagagtgcaaacagagcgatatcatgatgagggataatttattcgaaattgtgactacgtccaggaccttctacgtccaggccgattcacctgaagagatgcatagctggattaaagccgttagcggggcgatcgtcgcccagaggggacctgggagatctgcttcttccatgcgtcaggcccggcggctgtcaaacccgtgcattcagcggagcattccgccagtcctgcagaatcctaacactctgtctgtgttacctacgcaaccgcccccaccccacattccccagcctttggctgcaacgctgtggtcccagccactgccatggaggagcgaggattttacaagccttctgcccagatctagccagggcacttcgagaagccgtctcagtttacaggagaatcagctgccaaagtag

SEQ ID NO: 128948 - DNA, 1152 bp, synthetic construct
  misc_feature 1..1152: note = Description of Artificial Sequence: Synthetic coding sequence
  source 1..1152: mol_type = other DNA
atgccatacgtcgaccgacagaatagaatttgtggattcctcgatatcgaggaaaatgagaattccggaaaattcctacgcaggtattttattctcgatacgcgggaggactctttcgtctggtacatggataatccacagaacctgccgagcggcagctcacgcgtcggcgctatcaagctcacctatataagcaaggtgagcgatgctactaaactgagaccaaaagctgaattttgctttgtcatgaacgcaggtatgcggaagtacttcctccaggccaacgaccagcaagatcttgtggaatgggtgaacgtgctgaacaaggcaatcaagatcaccgtgcctaaacaatctgactcccagccaaattctgataatctgtcccggcacggtgagtgcgggaaaaagcaggtgagctatcggacagacatcgtggggggtgttcctattatcacaccaacacaaaaagaggaagtgaacgagtgtggggaatccattgaccgaaataacctcaagaggagccaatcccatttgccctattttactccaaagcctccacaagactcagctgtcatcaaagcgggctattgtgttaagcagggtgcggtcatgaagaactggaagcgccgctactttcagttagacgagaacacaatcggttattttaaatccgagctagagaaagagccacttagagtgatacccctgaaggaagtgcataaggttcaggagtgtaagcagtcagacatcatgatgagggataatctcttcgaaattgtgactacatcaaggacgttttatgtgcaagcagattcacccgaggagatgcattcctggattaaggcagtgagtggcgccatcgtagcccagaggggccccggacgcagtgccagtagcatgcgccaagcacggcgactgtccaacccatgcattcaacgctcaattccgcctgtactgcagaatcctaatacactgagcgtcctccccacccaaccacccccccctcacatcccccaacccctggctgcaacattatggagccaacctctaccttggaggagtgaggacttcacctctcttttgccccgcagctcacagggcacctcccggagccgactctcgctccaagagaatcagctacctaaatag

SEQ ID NO: 128949 - DNA, 1215 bp, synthetic construct
  misc_feature 1..1215: note = Description of Artificial Sequence: Synthetic coding sequence
  source 1..1215: mol_type = other DNA
atgccatacgttgatcgccagaatagaatttgtgggtttctggatattgaggaaaacgagaactctgggaagttcctccgtagatacttcatcctcgacacacgagaagatagcttcgtatggtacatggataatcctcagaacctgccatctggctcttcccgtgtgggggcaatcaagctgacatatatttctaaggtcagtgatgccactaaacttcgccccaaggctgagttttgcttcgtaatgaatgcaggaatgcgcaaatatttccttcaggctaatgaccagcaggacctggtggagtgggtcaatgtgctgaacaaggccataaagataactgtgccaaagcaaagcgacagccagcccaattccgacaacttatctaggcatggcgaatgtggtaagaaacaagtttcttatagaacagacatcgtggggggcgtgcctataattacaccaacacagaaggaggaggtgaatgagtgtggcgagtctattgataggaataacctgaagagaagtcagtcacatctcccctactttacccctaagccaccccaagactcagctgtgattaaggcggggtattgtgtcaagcaaggagccgtcatgaaaaattggaaacggcgttattttcaactagatgaaaacactatcgggtactttaagtccgagctggaaaaggagcccttgcgggtgatcccacttaaagaggtccacaaagttcaggagtgcaaacagtcagacatcatgatgcgcgacaacctgttcgaaatcgtcactaccagcagaactttctacgtacaggccgacagccctgaagagatgcactcctggatcaaagccgtatccggcgccatagtcgctcagcgcggacctggccggtctgctagttctgagcatccccccggcccttccgagtctaaacacgcctttcgcccgaccaacgcggccacagctacttcgcattctacagctagcaggagcaactccttagtgagcaccttcactatggagaaaaggggattctacgaaagtctcgcaaaagtaaagcctggaaattttaaagtccagaccgttagccctagggaacccgcatccaaggttaccgagcaagccctcctgcggccgcagtctaagaatggccctcaggagaaagactgcgatctcgtggaccttgatgatgcttcactccccgtgtcggacgtctag

SEQ ID NO: 128950 - DNA, 345 bp, synthetic construct
  misc_feature 1..345: note = Description of Artificial Sequence: Synthetic coding sequence
  source 1..345: mol_type = other DNA
atgccctatgtagatcggcaaaaccgaatttgcggatttctggatattgaggaaaacgagaatagcggtaaattcctaaggagatattttattctggacactagagaggacagcttcgtgtggtatatggataacccccagaatcttccatctgggagcagccgagttggtgcaatcaagctaacatatataagtaaggtgtcagacgcaacaaaactccgccccaaagcagagttctgtttcgtgatgaatgccggtatgaggaaatatttcttgcaagcaaatgaccagcaagacttggtggaatgggtcaacgtacttaacaaggctatcaaaattacctag

SEQ ID NO: 128951 - DNA, 1215 bp, synthetic construct
  misc_feature 1..1215: note = Description of Artificial Sequence: Synthetic coding sequence
  source 1..1215: mol_type = other DNA
atgccgtacgtggatcgacagaatagaatctgtggttttctggatattgaagaaaacgagaacagcggaaagtttttaaggagatattttatcctggacacacgagaagactcattcgtttggtacatggacaaccctcagaatctgccctcgggaagcagtcgcgtcggtgcaattaagctgacctacatatcgaaagtgtctgacgctaccaaacttagacctaaggcagaattctgcttcgtcatgaacgccgggatgcgaaaatacttcctgcaagctaacgatcagcaggacctggtagagtgggtgaacgtgctgaataaggcaataaagattaccgtcccaaagcagtctgacagccagcctaatagtgataacctgtccagacacggcgagtgtggaaaaaaacaagtgagctataggacagatatcgtgggcggtgtgcccattataacgcccacgcagaaagaagaagtgaacgaatgtggcgagagcatcgacaggaataatctgaaaaggtctcagagtcatctgccgtacttcactcctaaaccaccccaggactctgctgtgattaaggctggatactgtgttaaacaaggcgccgttatgaagaactggaagcgaaggtacttccaactcgacgagaataccatcggatatttcaagagcgaattggagaaggagccactgcgggtaatacctttgaaggaggttcataaggtgcaggagtgcaagcagagcgatatcatgatgagggacaacctgtttgagattgtaactacaagccgcacgttctatgtccaagctgatagccccgaggagatgcactcctggatcaaggctgtgagtggggccatcgtcgcgcagcgtggcccgggacgtagtgctagcagtgagcaccccccaggccctagtgagagtaagcacgcattcaggccaactaatgccgcgactgccacctcccatagcaccgcttcacgctccaatagtttagtgtcgacatttactatggaaaagagaggtttttatgagtcactggctaaagtgaagccgggcaacttcaaagtgcagacggtgagtccaagggagccagcatctaaggttactgagcaggcactgcttagaccacaatcaaaaaacgggccacaggagaaggactgtgatttggtagatctggacgatgcctctctgccagtgtcagacgtgtag

SEQ ID NO: 128952 - DNA, 1215 bp, synthetic construct
  misc_feature 1..1215: note = Description of Artificial Sequence: Synthetic coding sequence
  source 1..1215: mol_type = other DNA
atgccttatgtcgatcgccagaacagaatttgcgggttcttagacatagaagagaatgagaacagcgggaaatttctgcgccggtatttcattttggatacacgggaggactcattcgtgtggtacatggataatccacagaatttacctagtgggagctctcgcgtaggcgccattaagcttacctacatatccaaggtctctgatgccaccaaactgcgccctaaagcagaattttgtttcgttatgaacgctggtatgcgaaaatatttcctgcaagccaacgaccaacaggatttagtggagtgggtaaatgtcctcaacaaagccatcaagattaccgtccctaagcagtcagactctcaacccaattcagacaacctgtctcgccatggcgaatgtgggaaaaaacaagtgagctacaggacagacatcgtgggcggggtaccaatcatcacacctacgcagaaggaagaagttaacgaatgcggtgaatcaattgataggaacaacttaaaaagatcccaatcacatctcccctacttcacccccaaaccgccgcaggattccgcagtgattaaggcaggatattgcgtgaaacaaggagcagtgatgaagaactggaaaagaaggtactttcagctggatgagaacactattgggtacttcaaaagcgaattggaaaaggagcccctgagggtgatcccgctaaaagaagttcacaaggtgcaggagtgtaaacagagcgacatcatgatgcgggacaacctatttgaaatcgttaccaccagccggaccttttacgtgcaagccgatagccctgaggagatgcatagctggatcaaggcggtgtcaggcgctatcgtagcacagagagggcctggccggagcgcttcaagcgagcatccgcctggaccaagtgaatctaaacatgcattcaggccaacaaacgctgcaaccgctaccagccactctaccgcgtcccgctcgaatagtctggtcagtaccttcacaatggagaaaagaggcttttacgagtccctggctaaggtgaagcccgggaattttaaggtacagaccgtctccccacgagaacccgccagcaaggttactgaacaggccctactgaggccgcagagcaagaatggccctcaagagaaggactgtgacctcgtggacctagacgacgcatccctccccgtgagcgacgtatag

SEQ ID NO: 128953 - DNA, 1005 bp, synthetic construct
  misc_feature 1..1005: note = Description of Artificial Sequence: Synthetic coding sequence
  source 1..1005: mol_type = other DNA
atgccctatgtagacaggcagaataggatatgtggatttctcgatattgaggagaatgagaactctggaaaatttctgcgacggtattttatcttggatacccgcgaagactccttcgtctggtacatggacaacccgcagaaccttccctccggcagctctcgagttggtgccattaagctgacatacataagcaaggtgtctgatgccaccaagctacgcccaaaggcagagttttgttttgtaatgaatgccggaatgcgcaagtatttcctccaggctaacgatcaacaggacctggtggagtgggtcaatgtgctcaataaggccattaaaattactgtacccaagcagagcgattcccagccaaacagtgacaatttatctcggcatggcgagtgcgggaaaaaacaagtgtcttaccggaccgatatcgtgggcggcgtgccaatcattacaccaacacaaaaggaggaggtgaatgaatgcggagagtctatagatagaaacaatctcaagcgctcccagagccatttaccatatttcactcccaaacccccccaggatagcgctgtgatcaaggccggctactgtgtgaaacagggggccgtcatgaagaattggaaacgccggtacttccagctggatgagaatactattggctacttcaaatcggaattagaaaaagagcccttaagagtgattccactcaaagaggttcataaagtccaggagtgcaagcaatcagatattatgatgcgcgataatctatttgaaattgtgaccactagtcgcacgttttacgtgcaggcagacagccctgaagagatgcacagctggattaaggcagtttcgggtgctatcgttgcccagcgtggtcccggtagatctgcctcaagtatgcgacaggcacgtcgcctgtccaacccatgcatccaacgctatacgtcacgagcaggggagtgttccacctatgtggggtctcatgctaatgtgccaagttag

SEQ ID NO: 128954 - DNA, 1278 bp, synthetic construct
  misc_feature 1..1278: note = Description of Artificial Sequence: Synthetic coding sequence
  source 1..1278: mol_type = other DNA
atgccctatgtcgatagacagaacaggatctgtggctttcttgacatagaagaacacgaaaattctggtaagtttctcaggcgctacttcatcttggatacacaggccaattgcttactgtggtatatggacaatccacagaatctggcgatgggggcgggggcggtgggagccctccagctgacatacatctccaaggtgtcgatcgccacacccaaacagaaacctaagacaccattctgcttcgttataaacgctctctcacaacggtactttttacaggccaacgaccagaaggatatgaaagactgggtggaggccctgaaccaggcgtctaaaatcaccgttccaaaaggcggggggcttcccatgaccacagaggtgctaaagagcctggccgcccccccagccctggaaaagaagccacaggttgcctacaaaaccgagattattggaggagtagtagttcatacaccaatttcccaaaacggtggggatggacaggaaggcagtgagccgggtagccatactatattacggaggtcgcaaagctacataccaacctccgggtgcagggcctctactggcccccccttgatcaaaagtggttactgtgtgaagcaagggaatgtgaggaagagttggaagaggaggtttttcgcactggatgatttcacgatctgctacttcaagtgcgaacaagacagggagcccttgcgtacaatctttttgaaagatgtactgaagacgcatgagtgcctcgtgaagtcaggggacttattaatgagagacaacctgtttgagatcattaccagttctcgtacattctacgtacaagccgacagtcccgaggacatgcactcttggattaaggaaataggggccgccgtacaggcgcttaagtgccatcccagggaaacatctttctcgaggtccatttcactcacccggccaggcagctcctcactttcatcaggccccaattccatcctgtgtagagggaggccaccacttgaagagaagaaggccctgtgtaaagcgccgtccgtggctagcagttggcagccttggacacctgtaccacaagcaggtgagaagctgctaccacccggggacacctctgaggactcacttttcactccaaggccaggcgagggatctgcgcctggcgtcctaccatcatctaggattcggcacaggtccgagccccagcaccctaaggagaagccctttatgtttaatttggatgacgaaaacatccgaacctccgatgtatag

SEQ ID NO: 128955 - DNA, 348 bp, synthetic construct
  misc_feature 1..348: note = Description of Artificial Sequence: Synthetic coding sequence
  source 1..348: mol_type = other DNA
atgccctatgtggacaggcagaatcgcatttgtggctttttagacatagaagagcacgaaaactccggaaagtttctacgccggtacttcattttggatacccaagccaattgtctgctctggtatatggataacccccagaacttggccatgggcgcaggagccgtcggtgccctgcaactgacctacatctccaaggtgagcatagcaaccccaaagcagaagcctaagaccccattttgttttgttatcaacgctctgagccaacgctatttcctgcaggctaacgatcagaaggatatgaaagactgggttgaagccctgaaccaggcctcaaagatcacctag

SEQ ID NO: 128956 - DNA, 1128 bp, synthetic construct
  misc_feature 1..1128: note = Description of Artificial Sequence: Synthetic coding sequence
  source 1..1128: mol_type = other DNA
atgggggccggcgctgtgggcgctctccagctgacatacatttctaaggtctctatcgccacccccaagcagaagccgaagaccccgttttgtttcgtcattaatgctttgtcccaacggtacttcctgcaggctaatgaccagaaagatatgaaggattgggtggaagctctgaaccaagctagcaagataacggtgccaaaggggggaggcttacccatgaccactgaggtcttgaagtccctcgcagcaccacccgccctggagaaaaaaccccaggtggcctacaaaaccgagattatcggcggcgtcgtagttcatacgcccatttcccagaatggcggagatggccaagaggggtccgaacctggttcccacacaatcctgcggagatcacagtcttatatccctacaagcggttgtagagcaagtaccgggcccccacttataaagtctgggtattgtgtaaagcagggtaacgtgaggaagagttggaagcgccgtttttttgcattggatgatttcaccatctgctactttaagtgcgaacaagacagggagcccctacgcaccatttttttgaaggacgtgttgaaaacacatgagtgcttagtaaaaagcggggacctgctgatgcgggataatctcttcgagatcattacaagctctcggactttctacgtgcaggcagacagccctgaagatatgcacagctggatcaaggaaatcggggccgccgtgcaggccctcaagtgccacccgcgggagaccagcttctcacggagtatttccctgacaagacctggtagcagcagccttagcagtggtccaaattccattctgtgcaggggcagaccgcccctggaagagaaaaaggcactctgtaaggctccaagcgtggccagttcctggcagccatggacccccgtccctcaggctggcgagaagctgctgccccctggagatacttccgaggattctctatttaccccacggcctggggaggggtccgccccgggcgtactcccatcttcccgaatcagacacaggtccgaaccccagcatcctaaagagaagccttttatgttcaatctggatgatgagaacattcgcacctcagacgtttag

SEQ ID NO: 128957 - DNA, 4083 bp, synthetic construct
  misc_feature 1..4083: note = Description of Artificial Sequence: Synthetic coding sequence
  source 1..4083: mol_type = other DNA
atgagcagacagagtacactctattccttttttcccaagagccccgctctgagtgatgctaataaagcctccgctcgcgcaagtcgtgagggaggccgtgcagccgccgccccgggagccagcccatctcctgggggcgacgctgcgtggtccgaagccggaccaggcccgagaccccttgcgcggtcagcatcgcctcccaaggcgaagaacctgaacggtgggctgcgtcggagcgttgctcctgcagcaccaacgagctgtgacttttcacccggtgatctggtttgggccaaaatggagggttacccttggtggccctgccttgtctataaccatccctttgacgggacatttattagggaaaagggcaagagcgtgagagtacatgtccagtttttcgacgatagtcctacaagggggtgggtttcgaaacgactcctcaagccctacaccggatcgaaatcaaaagaagctcagaaggggggacacttctacagcgccaagcccgaaatccttcgggcaatgcagagagctgatgaggctttgaacaaggacaaaatcaagcgacttgaactggccgtctgtgacgaaccgtcggagcctgaagaagaggaagagatggaagtcggaactacatacgtaaccgacaagtctgaagaggacaacgagatagaatccgaggaagaagtgcaaccgaaaacgcagggatcacgaagatcatccaggcaaatcaaaaagaggcgagtgattagcgactctgaaagtgatatcgggggatccgacgtggagttcaagcccgacaccaaggaagaggggtcttctgatgagatttcctccggcgtgggggatagtgaatccgaggggttaaattctcccgtgaaggtcgccagaaagcgtaaacgaatggttacagggaacggctccctgaagaggaagtcatcgaggaaggagacaccctccgcaactaaacaagcaacaagcatctcttccgagaccaaaaatactttaagggctttttccgcgccccagaattccgaatcgcaggcccacgtgtccggtggcggagatgactcctctcgcccgactgtgtggtaccacgagacactggagtggttaaaggaggaaaagagacgcgatgaacacaggagacgcccggatcatcccgattttgatgcgagcaccctgtacgttccagaagattttcttaacagctgcactcccggcatgaggaagtggtggcagatcaaaagccaaaattttgatttggttatatgttacaaggtagggaaattttatgaattgtatcacatggatgccctgataggggtgtccgagctcggtctcgtcttcatgaagggcaactgggctcattccgggttcccagagatcgcgttcggtagatacagcgactccctcgttcagaagggatacaaggtggcccgagtcgagcaaacggaaacaccagagatgatggaggctcggtgccggaaaatggcccatatatccaaatacgaccgtgttgtgagacgcgaaatatgccggatcattaccaagggtacacagacttactctgtgctcgaaggcgacccctccgagaattactctaagtatctgctcagtcttaaggagaaggaggaagattccagtggacacacacgcgcctatggcgtttgttttgtggatacgagcttaggaaagtttttcatcggccagttctccgacgaccgacactgttctcgtttccgcactctggtcgcccattaccccccggtccaggtcttgttcgaaaagggtaatctcagcaaggaaaccaagactatccttaaatcttctctgagctgcagcctccaagaagggctgatcccaggctctcaattctgggacgcctctaaaacgctgcgtactctactggaggaggaatacttccgcgagaaactttccgacggaatcggcgttatgcttccacaggtcctgaagggcatgaccagcgaatccgattccataggcctcacccccggcgagaagtcggagctggccctttctgcactaggcgggtgtgtgttttatctgaaaaaatgcctcattgaccaggagctcttatccatggccaatttcgaggagtacatccctttggatagcgacaccgtgtcgacaacgagatccggggccatcttcaccaaagcctaccagaggatggtcctggacgcggtaactctgaacaacctggagatttttttaaacggcaccaatggcagcactgaggggacactcctggaaagagtagacacatgtcacacacccttcggaaaaaggctcctcaaacagtggctgtgcgctccactgtgcaaccactacgcaatcaacgatcgattggacgccatcgaagatctcatggtggtaccagataagatcagcgaggtcgtggagctgttaaaaaagctcccagacctggaaagactcttgagcaaaatccacaatgtggggtccccattgaaaagccagaatcaccccgacagccgggccatcatgtatgaagagaccacatattctaaaaagaaaatcatcgactttctgagcgctttggagggttttaaggtcatgtgtaaaattatcggcatcatggaggaagtggcagatggtttcaagtcgaagatactgaagcaagtgattagtctgcagactaagaaccccgaggggagattccccgatttgacggtcgagcttaaccgctgggacacggctttcgaccacgagaaggctcgtaaaacaggtcttataacaccaaaagctggcttcgacagcgactatgaccaagcactggccgatattcgggagaacgagcaaagcctgctggagtatcttgagaagcagcgcaaccggatcggctgtagaaccatagtttactggggcatcggtaggaataggtaccaacttgaaattcccgaaaatttcacaaccagaaatcttccggaggaatacgagctgaagtccacaaagaaagggtgtaaacgatattggacaaagactattgagaagaagttagccaacctgataaatgcagaggaaaggcgagacgtgtcgctgaaggactgtatgcggagactcttctataatttcgataagaattataaagattggcagtctgccgtcgagtgtatcgccgtactcgacgtgctactgtgtctggctaactactccaggggaggagacggtcccatgtgcaggcccgttattttgctgccagaggacacgcccccattcctggagctgaagggctctagacacccgtgtattaccaaaactttctttggggacgactttatccctaacgacatattgattggctgcgaagaagaggaacaggagaatggcaaggcctactgtgttctggtgaccggccccaatatggggggaaagagcacgctaatgcggcaggcaggtctgttggccgtaatggcccagatggggtgttatgtgccagcagaggtctgtcggcttaccccgatcgacagagtgtttacccggctgggcgcctcagacaggatcatgagtggcgagtccacgttcttcgtcgagctgagcgaaacggcctcaatcctcatgcatgccacagcccattccctggtattggtggatgagctgggcagaggaaccgccacatttgacgggaccgccatcgccaacgcagtcgtgaaggaattggcagagacaattaaatgccgcactctttttagcacgcattaccactcactggtcgaagactatagtcagaacgttgccgtgcggttagggcacatggcttgcatggttgaaaacgagtgcgaggatccgtctcaggaaactatcactttcctgtacaaattcattaagggcgcttgcccaaagagctatggattcaatgcggcgaggctagcaaacctgcccgaggaggtgatccagaagggccaccgtaaggccagagagtttgaaaagatgaaccagagtctgcgactatttcgcgaggtctgcttggcttcggaacgcagcaccgtcgatgctgaggccgtgcacaagttacttaccctcatcaaggagctatag

SEQ ID NO: 128958 - DNA, 2340 bp, synthetic construct
  misc_feature 1..2340: note = Description of Artificial Sequence: Synthetic coding sequence
  source 1..2340: mol_type = other DNA
atggagggctcacgtcctagaagctctctgtcactggccagctctgcatctacaatctctagcctctcatctctctcacccaaaaaacctacgcgggcagtaaacaagatacatgcattcggaaagcgagggaatgctctgagaagggaccccaaccttccagtgcatatccgcggttggctccataaacaggactccagcggcctccgattgtggaaaaggcgctggtttgtgctgtctgggcattgtctgttctattataaggatagtagggaggaatcagtattgggatctgttctactgccctcatataatattcgccccgacggtcccggggcaccccggggccgccgtttcaccttcaccgctgagcaccctggcatgcgtacatatgtgctggccgccgacaccctcgaggacctgagaggctggctgcgggccttgggaagagcttcacgggctgagggggatgactacggacagccccgctctcctgcccgcccacagcctggggaaggcccgggcggaccaggaggtccaccagaagtgtctcgtggggaagaggggcgcattagtgagtctcccgaggtgactcgcttgagcagaggaaggggccgaccacggcttcttacaccttcaccaacaaccgatctacactccgggttgcagatgcggagggccagaagccctgacttattcacccccctcagtaggccgccaagtcccctgagcctcccgaggcctcgcagtgccccagctcggaggccgcccgcaccgtcgggtgacacggctcctcccgcccggcctcatacccccctctcacggatcgatgtaagacctcccctggattggggtccacagagacagacactcagtagacccccaacaccgcgccggggccccccttcggaggctgggggcgggaaaccacccagatcgccccagcactggtctcaggagccaaggactcaggcacattcaggctcccctacgtatctgcagcttcctcctaggcccccaggcactcgcgcctctatggtgctgttaccaggcccacctctcgaaagtactttccaccaatcgctggagacagataccttactcacaaagctgtgcggccaggatcgcctcttgagacgcctgcaagaggagatcgaccagaaacaggaggaaaaagaacagctggaagctgctttggagctgaccagacaacagttagggcaggccacccgggaggctggggcccctgggcgtgcctgggggaggcagagattgctgcaggataggctggtttcggttcgggcgacgctgtgtcatctaacccaggaacgcgaaagggtgtgggatacatactcagggctcgaacaggaactaggtaccctgcgtgagacactggagtacctgctgcatcttggttctccacaggatcgagttagcgcccagcagcaattatggatggtcgaagacacactagctgggctaggtgggcctcagaagccccctccacacaccgaacccgatagcccttcccccgtgctccaaggagaagaatcgtctgagcgagaatcccttccagagagcctggaattgagcagcccacgcagcccagagacggactggggtcgcccccccggtggggacaaggatctcgcgtctcctcaccttggcctgggcagtcctcgtgtctcaagagcatcaagtcctgagggaagacacttgcctagcccacagcttggaaccaaggccccggttgctcggccccgtatgagcgctcaggagcagctggaaagaatgcgtcggaaccaggagtgtggtagacctttccccaggcctacttcgccacgcttgctcacgctgggccggaccctgagcccagctagacgccaaccagatgtggaacagagacccgttgtgggtcattcaggcgctcagaagtggcttaggtcgtccggatcttggagctcgcctagaaacactaccccatatctgccaacatccgaaggtcaccgcgagagagttctcagcctgtcacaagccctcgccacggaggcctcccaatggcacaggatgatgacaggaggcaatttggactctcagggagatccactgccgggggtacctttgccaccctcagaccccacccgtcaagagactcccccaccccggtctccaccagtggcgaactccgggtccaccgggtttagtaggaggggttcaggaaggggcggcggccctactccttggggacctgcctgggacgccggcattgctccccctgttttaccacaggatgaaggtgcatggcccctgcgtgtaaccctgctgcagtccagcttctag

SEQ ID NO: 128959 - DNA, 1752 bp, synthetic construct
  misc_feature 1..1752: note = Description of Artificial Sequence: Synthetic coding sequence
  source 1..1752: mol_type = other DNA
atggaagggagtcgccctcgtagcagtttgtctttagctagctccgcctccaccattagcagcctgtcaagtctgtcccccaaaaaacctaccagagctgtcaataagatccatgcttttgggaaacggggcaatgccctcagaagagatcccaatctaccagtgcacatcaggggctggctccacaagcaggactccagcgggttacgcctctggaagcgacggtggtttgtccttagcggtcactgtctgttttactataaagactctcgagaggaatccgtgctcggctccgtactgctcccttcctacaatattcgtcccgatggtcctggggcaccccggggcaggcggtttaccttcacggctgagcaccccggaatgaggacctatgttctggccgcagacaccctcgaagatctgcgagggtggttacgcgccctcggtagggcatccagggcggagggcgacgattatggtcagccgcgcagcccagcgagaccacaaccaggagagggacccggcggtcctggcggaccgcccgaggtttctcggggtgaggagggacggataagcgaaagtcctgaagtcaccagacttagcagggggaggggcaggccccggcttcttacaccatctccgaccactgatctgcatagtgggctgcagatgcgtcgcgcccgctcgcctgacttgttcacgcccctttcccggccaccttctcctctctccttgccgagaccccgaagtgcgcccgctcggaggccacccgccccgtcgggtgatactgcccccccggcccggccccacacacccctcagccgcatcgatgtcagacctcccctggactggggaccccagaggcagaccctgtcacgccctcctacgccaagaagagggccaccctccgaggctggcggcggtaaaccccctcgtagtccacagcactggtcacaggaacctaggacccaacccggtcctcctctggagagcacctttcaccagtccttggagaccgatacattacttacgaagttatgtggccaggaccgactgctccggcgcttacaggaggagatcgaccagaagcaggaagagaaagagcaactggaggccgcgctggagctgaccaggcagcaactcggtcaggccacgagagaagctggggcacccgggagggcgtggggaagacagagactcctccaggacaggctggtttctgtccgagctaccctgtgccacctaactcaggagagggaaagggtgtgggatacttactctggattggagcaggaactgggaacactgcgggagaccctagagtatctgttacacttagggagccctcaggatagagtaagcgcccagcagcagctttggatggtggaagacactctcgctggtctgggagggcctcaaaagcctcctccacacactgaaccggatagtccaagccccgtgctccaaggcgaagagagcagcgaacgtgaaagcttacctgaatcgctggaactgtcatcgcctaggtcacccgagaccgactggggacgccctccaggcggggataaagatctggcctccccgcatcttgggttgggttcgccacgcgtgtcccgcgccagcagtcccgaggggaggcacctgcccagtccacaattggggacaaagtcaaaggagcaccaccccctcctggctgactttcggcgaagccccggagctggctctcaacctctgccatcaccgggctattag

SEQ ID NO: 128960 - DNA, 3366 bp, synthetic construct
  misc_feature 1..3366: note = Description of Artificial Sequence: Synthetic coding sequence
  source 1..3366: mol_type = other DNA
atggcagccgctaccgtggggcgagacaccctgcctgaacactggtcctacggcgtctgcagggatggacgtgtcttcttcattaatgaccagttgaggtgtacaacatggctgcatccacgtactggggaaccagttaactccggccatatgatccgaagtgacctaccacggggttgggaagagggtttcacggaggagggagcttcctacttcatagaccataaccagcagacgactgcgttccgacatcctgttacggggcagttttctcccgagaattcagaattcatcttgcaggaagaaccaaatccccatatgtccaagcaggacaggaatcaacgtccttccagcatggtgagcgaaacctctacagctgggacagcctccacactggaagctaaaccaggtcctaagatcattaagtcgtccagcaaagtacatagtttcggtaaaagggatcaggctatccgacgtaatccaaatgttccggtagtggtccgcgggtggctacacaaacaggactcatcaggaatgagattgtggaaacgacggtggttcgtcctggccgattactgcctgttctattacaaggatagtcgcgaggaggccgtgctaggaagcataccattgccttcatacgtaatcagtccggtggccccggaggatcgaatctcaaggaaatactctttcaaggccgtacacaccgggatgcgagcgctaatttacaattcctctaccgctgggtctcaggcagagcagtcagggatgcggacttattatttctccgctgacactcaggaggacatgaacgcatgggtgagagcgatgaaccaggctgcacaggtgctgagccgctcgtcacttaagcgcgacatggagaaggttgagagacaggctgtacctcaggcgaatcacacggaatcttgtcacgagtgtggacgcgttggaccgggacacacacgcgactgtcctcacagagggcacgacgacatcgtgaacttcgagcgccaagagcaagagggggagcaatataggtcccagcgtgatccacttgaaggaaaacgggatcgaagtaaggcccgctccccttatagtccagccgaagaggatgctctttttatggatttgcccaccggcccacgtgggcaacaagcgcagccgcagagagcggagaagaacggcatgttgcccgccagttatggcccgggtgaacagaatggtaccggaggctatcaacgggctttcccgccacgtacgaatcctgaaaagcattcccagaggaagtctaaccttgcgcaggttgagcactgggcgcgagcccagaagggggacagcaggtcactgcccctcgatcagacgctgccccggcaaggtcctgggcagtccctaagttttccagagaattaccagacactgccgaagagcacaagacaccccagcggtggaagtagtccgcctccccgaaatctcccttctgactacaaatatgctcaagaccgagcctcccatctgaaaatgtccagtgaggagagacgggctcacagagacggcacagtctggcagctgtacgagtggcagcaacgacagcaattcaggcatggaagccctaccgcccctatctgtctaggctcacccgagttcaccgatcagggtagatcacgttctatgctggaggtcccgcgtagcatctcggttcctcctagcccctcagacattccccctcccgggcccccccgggttttccctccacgacggccacacacccctgcagagagagtgaccgtgaagccaccggatcagagacggtccgtggatattagcctcggggatagtcctcgccgggcccgagggcatgctgtcaagaacagtagccacgtggatcgacgatcaatgccgtcgatgggatacatgacccacaccgtttctgcacctagcctgcacggaaaaagtgccgacgatacttacctacagctgaagaaggacctagaatatctggatttgaaaatgacaggccgcgatttgttgaaagaccgttcgttaaagccagtcaagattgcggaatcagacacagacgtcaagctgtctatcttttgtgaacaggaccgtgtgcttcaggatctcgaagacaaaatccgggctctgaaggagaataaggaccagctggagtccgtgctcgaggtactgcacagacaaatggagcaatacagggaccagcctcaacaccttgagaaaatcgcttaccagcagaaactcctccaggaggacttggtgcacattagagcagagctgtcccgggaatctactgaaatggagaatgcttggaatgagtatctgaagctcgagaatgacgtagagcagctcaagcaaactctgcaggaacagcatcgccgtgctttttttttccaagaaaaatcacagattcagaaagatttgtggcgaattgaagacgtcactgctggactatcagccaacaaggagaatttcaggatcctggtggagagtgttaagaatccggagcgcaaaacagtgccattatttccacatccccctgtccccagcctctctacatctgagtccaagccgccgccccagccaagcccccctacgagccctgtccggactcctctcgaggtcagactgtttccacagctccagacttatgttccataccgaccacacccaccgcagctgaggaaggtgacctcccctctgcagtctcctacaaaagctaaacctaaagtggaggatgaggcacctccccgacctccattacccgaattatatagtccagaggaccagccccccgccgtccctccgttgccaagagaggcaacaattatccgccatacctctgtaagaggtctgaagcggcaatctgatgagcgcaagagggatcgggaactggggcagtgtgtgaatggcgattccagagtggaactgcgctcttatgtgagcgagcctgagctggcgaccctctctggggacatggcacagccaagccttggactggtaggccccgaaagcagatatcagaccctgccaggccggggcttgagcggttcaactagcagattgcagcagtcatctaccatcgccccatatgtcacactcagaaggggccttaacgctgagagctcgaaggcgacttttcctagacctaaaagtgctctcgagagactatattcaggcgaccatcaacgcggcaaaatgtccgcggaggaacaactggagcggatgaagcgccatcaaaaggcacttgtccgggaaaggaaaaggactttaggtcagggagagcgcacagggctcccctcctctagatacctatctagaccattgccaggcgacctgggtagcgtctgttag

SEQ ID NO: 128961 - DNA, 3369 bp, synthetic construct
  misc_feature 1..3369: note = Description of Artificial Sequence: Synthetic coding sequence
  source 1..3369: mol_type = other DNA
atggcagccgcgaccgttggcagagatactctgccagaacattggtcatatggcgtttgtagggacgggagggttttcttcattaacgaccagcttcgttgtaccacttggcttcatccccgcaccggcgagccagtcaactctggccatatgattcgctccgacctgccaaggggctgggaggaaggattcaccgaggagggagcttcctattttatagaccataaccagcaaaccacagccttccggcaccctgttaccggccagttttcccctgaaaattcagagttcatcctgcaggaagagcctaaccctcatatgagtaagcaggatcgcaaccagagaccaagttcgatggtgagtgagacctcaaccgccggaacagcgagcactttggaggccaaaccgggtcccaagatcataaagtcttctagtaaggtgcatagtttcgggaagagggatcaggccatccggcgtaaccctaatgtgccagttgtggtccgggggtggcttcataagcaagacagctcaggaatgagactgtggaagagaaggtggttcgtgctggctgattactgcttgttttattacaaggactcccgcgaggaggcagtgctcggatcaattcccttgccctcttacgtgatctctccagtggcacccgaggatcgtatcagtagaaagtactctttcaaggcggtccacacaggcatgcgtgcactgatatacaattcaagcactgcaggatcacaagctgagcagtccgggatgaggacctactacttctctgcagacactcaggaagacatgaatgcctgggtgcgagccatgaaccaggccgcacaggtgttgtcccgttctagtctcaaacgtgacatggagaaggtggagcgtcaggccgtgccgcaggcaaaccatactgaatcatgccatgagtgcgggagagtaggccctggacatactcgggattgtccgcaccggggccacgacgacattgtgaacttcgaacgccaggaacaagagggtgagcagtacaggtctcagagggatccgttagagggtaaacgagaccggtctaaagcgcggtccccatattcccctgctgaggaagatgcgctcttcatggatctgcccaccggaccaagagggcaacaggcccagccccaacgcgcagagaaaaatggcatgctacccgctagctacggaccaggggaacaaaatggtaccggggggtaccaacgcgcgtttcctccccgcacgaatccagagaagcatagccagagaaaatccaatctcgcgcaggtggaacattgggcacgagctcagaaaggcgacagcagatccttgccgctggaccaaacactccctaggcagggacccggacagagcctcagtttccccgaaaactatcagaccctgcccaaaagtacacgccatccctccgggggttccagtcctcctccgcgcaatctgccatcagactataaatatgcacaggatagagcaagtcatctaaaaatgagtagcgaagagcggagagctcacagagatggtacggtttggcaactgtatgagtggcagcagagacagcaattccgacacggatcccccaccgcccccatttgccttggcagcccggaatttacggatcagggccgcagtagatcaatgttggaggtgccacgtagcatttccgtgcctccaagcccatcagacatcccgccgcccggccctccgcgggtgtttccacctcgcagaccccacactcccgctgagcgagttacagtcaaaccgcctgatcagagacgatccgtggacatcagcctgggcgactctcccaggcgcgctcgtggccatgccgtgaagaactcttcccacgtcgaccgcaggagcatgccctcgatgggatacatgacccacactgtgtccgcccccagcctccacggaaagagcgcagatgacacatacctgcaactcaagaaggacttagaatatctggacttgaagatgaccgggcgggacctgctgaaggaccggagcctgaaacccgtcaagatagccgaatccgacacagatgtgaagctctccattttctgcgagcaagatagggtacttcaagacctcgaggacaagattcgggcacttaaagagaacaaggaccagcttgaatccgttctcgaagtactgcacagacagatggagcagtatcgtgaccagccccagcatttggagaaaattgcctatcagcagaaactgctacaggaggatctcgtgcacataagagcagaactctcccgggaaagcacagaaatggagaatgcatggaatgaatacctcaagctcgagaacgacgtggagcaacttaaacagacacttcaagagcaacacaggagggcatttttttttcaggagaaaagccaaatccaaaaggatctgtggaggatcgaggatgtgaccgctggcctgagcgctaacaaagagaacttccgaatcctcgtcgaatcagtgaaaaatcccgagcgtaagactgtgcccctcttcccacacccccccgtaccctcattgtctacttctgagtccaagccccctccccagcccagcccaccaacatctcccgtgcgcacacctttggaggtaagactgttcccacagctgcaaacctatgtgccctataggcctcacccaccacagctgcggaaagtgacctctcccctgcagtccccaacaaaagctaaaccaaaggtgcaagaagatgaagctccgcctaggccacccctaccagaactgtacagtcccgaagatcagcctcctgctgtaccaccgctcccaagggaggcgactatcatacgccacacaagcgtacggggccttaaacgtcaatccgacgaacgaaagcgcgatagagagttgggtcagtgcgtgaatggggactccagggtcgaactccgctcgtacgtcagtgagcccgaactcgctaccctgagtggcgacatggcgcagccctcactaggactggtgggacctgagagtcggtatcagacactgccagggcgcggattgtctggcagtacatcccggcttcagcaatcaagcactattgctccctacgttacacttaggagaggcttaaacgcggagtcatcaaaagctacctttccccgtcctaaaagcgctttggagaggttgtactcaggcgaccaccagagaggcaagatgtccgctgaggaacaacttgaaagaatgaaacgccatcagaaagccctggtacgagaacggaaacggaccctgggtcagggggagaggaccggtctacctagctcacgttatctgtctcgaccattgccaggcgacctcggttcggtttgttag

SEQ ID NO: 128962 - DNA, 2262 bp, synthetic construct
  misc_feature 1..2262: note = Description of Artificial Sequence: Synthetic coding sequence
  source 1..2262: mol_type = other DNA
tgagatgcgctgtttatggacctgcccaccgggccccgggggcagcaggcccagccccaaagggcggagaagaacggcatgttgcctgcctcctatggaccaggtgagcaaaatgggacgggcggttaccaacgcgcttttcctccgcgaactaatccggagaagcattcgcagcgtaagtcgaatctggcccaagtcgaacactgggcgcgcgcgcaaaagggtgactcgcgctccctaccactcgatcagactctaccccgccaaggccctggccagtcactgagctttcccgagaattatcagaccctcccaaagagcactaggcacccttctggtggttcaagccctccccctcggaatctcccctcagattacaagtacgcccaagacagagcctcccatctcaaaatgagctctgaggaacgcagagctcaccgcgatggaacggtttggcagctttacgagtggcagcagcgccagcagtttagacatggaagccctacagcaccgatttgtctggggtcaccagaattcacagatcaagggcgcagccggagcatgctggaagtgccacgtagcatcagtgtgcctccttcaccttcagatatcccgcctcccggaccacccagagtcttcccccccagacggccccatacaccagctgaaagagttacagtgaagccacccgatcagcggaggtccgtggatatctctctgggggatagtccgcggcgtgcacgcggccacgcagttaagaacagctcacatgttgatagacgatcaatgccgtcaatggggtacatgacacacacggtatctgctccaagcttgcacggcaaatctgctgacgacacctacctgcagttgaaaaaagatctggagtacctggacttgaagatgacgggtcgagatcttctgaaggaccggtctctgaagcccgtgaagatcgcagaatcagacacagacgtgaaactgtccattttctgtgagcaagacagggtcctacaagacctggaagacaagattcgggctttaaaggagaacaaggaccagctcgagtccgtcctcgaggtgctccatcggcagatggagcaataccgagaccagcctcaacacttggaaaaaatcgcttatcagcaaaaactgctccaggaggacttggttcacattcgcgccgagttgtctcgcgagtccactgaaatggagaacgcctggaacgagtacttgaagctcgaaaacgatgtggaacagctgaaacagaccttacaggaacagcaccgtagagctttcttctttcaggagaaatcccagatacagaaggacctatggcgcatcgaagacgtgaccgccggcctgtcagcaaacaaggaaaattttaggatactggtggaaagtgtaaagaatcccgaacgcaagacagttccactgttcccgcatccgccggttcccagtctctcaacctcggagagtaagccacctccgcagccttccccacccacaagtcccgtgcggacacccttggaggtgcgcctctttccgcagttgcagacttacgtgccataccggcctcacccacctcagctgcgtaaggttacatctcctctccagtcccctacaaaagccaagcctaaagtgcaggaggatgaggcccccccaaggcccccactgccagaactgtacagcccagaggaccagcctcctgctgttccccccctccctagagaggctaccattataaggcatacgagtgttagggggctgaagagacagtcggatgagaggaagcgtgatcgcgagttggggcagtgtgtaaatggcgattcccgagtcgagctaagatcttacgtctctgagcctgaattggctaccctgtcaggggatatggcacagcccagtctggggttggtgggtccagaatctagatatcagactttgccaggacggggcctgagcggctccacatctagactgcagcagagctctaccattgccccttacgttactctgaggagaggattaaatgctgaatcatccaaagctacttttccaaggcctaagagtgctcttgagcgtctctatagcggtgaccaccaaagaggcaaaatgtcggccgaggaacagctggaaaggatgaaaaggcatcagaaggcattggtgcgggagcggaagcggaccctgggtcagggggaacgaactggattaccaagctcaaggtacctgagtcgacccttgccaggcgatctaggatccgtatgttag

SEQ ID NO: 128963 - DNA, 816 bp, synthetic construct
  misc_feature 1..816: note = Description of Artificial Sequence: Synthetic coding sequence
  source 1..816: mol_type = other DNA
atgctgcaagcgtgtaaaatggagggtttccctctggtccccccccaaccttcagaagacctggttccctatgatacagacctctaccagcggcaaacccacgagtactatccctacttaagttccgacggggagagtcacagtgatcattactgggattttcatcctcaccatgtgcactctgagtttgagtcatttgccgaaaacaattttacagaactgcagtcggtgcagcctccacagctacagcagctgtacagacacatggaactcgaacaaatgcacgttctggacaccccaatggtccccccccacccaagtctggggcaccaagtgtcatatcttccaaggatgtgtcttcaataccccagcttatctccagcacagcccagcagcgacgaagaggaaggtgagcggcagtcgccgcctcttgaagtgagcgatggggaggccgacggtctcgagcctggaccaggtctgctccccggcgagactgggtctaagaaaaaaattaggttataccagttccttctcgatttgctgcggtctggagacatgaaggactctatttggtgggtggacaaggacaaagggacatttcagttctcatctaagcataaagaggccctcgcacatcgttggggcattcagaagggaaacagaaagaagatgacttatcaaaagatggcccgggccttgcgcaattacggcaagaccggagaggtcaagaaggtgaagaagaagttaacgtatcaattctcaggtgaagtactggggagaggtggactggcagagcggagacatcctccacactag

SEQ ID NO: 128964 - DNA, 732 bp, synthetic construct
  misc_feature 1..732: note = Description of Artificial Sequence: Synthetic coding sequence
  source 1..732: mol_type = other DNA
atgtccccagccgccccggtacctccagacagcgcattggaatcaccttttgaagaaatggcactggtccgaggcggatggctttggcgacagagctctatcctcaggcggtggaagaggaactggtttgcgctgtggctggacggaacacttggctactaccatgacgagactgcccaggatgaagaggacagagttctgatccactttaacgtgagggatatcaaaattgggccagaatgtcatgacgtgcagccacctgaagggcggtcacgcgacggcctgctaacagtgaacttgcgcgaaggcggccgcctccacctatgcgccgaaactaaggacgacgccctcgcctggaagacagccttgctggaggcgaatagtactcccgctcccgccggcgccactgtccccccgcgttccagacgggtctgttcaaaagtcaggtgtgtgacgcggagctggtccccttgcaaggtcgagagaagaatctgggtgcgggtctactcgccttatcaagactactatgaggtggtgccgccaaacgctcacgaagctacgtacgtgcgatcttattatgggcccccttatgccggaccaggcgtaacacatgtgatcgtccgtgaggatccatgttactcagcgggcgccccgcttgctatgggcatgctcgctggagccgcaaccggggcggcattaggctccttaatgtggagcccatgctggttctag

SEQ ID NO: 128965 - DNA, 627 bp, synthetic construct
  misc_feature 1..627: note = Description of Artificial Sequence: Synthetic coding sequence
  source 1..627: mol_type = other DNA
atgtcacccgcagctccggtcccccctgacagcgctcttgaatcacctttcgaagagatggcacttgtgcggggaggatggctttggcgacaatccagcattctgaggagatggaaacggaattggttcgcactgtggctcgacgggacactgggctactatcacgacgagactgcccaggatgaagaggatcgcgttctgatccactttaatgtccgggatatcaaaattggaccggaatgccatgatgttcaacccccagagggccggtccagagatggactgctgacagttaacctacgcgagggcggcaggcttcacttgtgtgccgaaacaaaggatgatgcgctggcttggaagaccgccctgctggaagcaaattcaactccggtccgcgtgtacagtccctatcaggactactatgaggtggtgcctccgaatgcgcacgaggctacttacgtcaggtcctactacggtcccccttatgccgggcccggcgtcactcacgtcattgtgagagaggatccatgctattcagcaggggccccgctggccatgggaatgctggccggggcagcaaccggcgccgccctcggatcattaatgtggtccccgtgctggttctag

SEQ ID NO: 128966 - DNA, 675 bp, synthetic construct
  misc_feature 1..675: note = Description of Artificial Sequence: Synthetic coding sequence
  source 1..675: mol_type = other DNA
atggccttggtacgtggagggtggctgtggagacaatcatcaatcttgcgtcggtggaaacgaaactggttcgctctgtggctggatggaaccctcgggtactatcatgacgagacggcccaggatgaggaagatcgtgtgctgattcactttaacgtacgggatataaagattggacccgagtgtcatgacgtccaacctccagaaggcaggagccgcgacgggctcctgacagtcaacctgcgggaaggaggtaggctgcacctttgcgctgagacgaaggatgatgccctggcttggaaaacagcattactcgaagctaacagcactcctgcaccagcaggagctacagtgcccccccgttccagaagggtatgcagtaaagtgcggtgtgttacaagatcttggagcccttgtaaagtggagagacgaatctgggtgcgggtttactcgccgtatcaagactattatgaagtcgtgcctcctaacgcacatgaagccacttatgtgcggtcatattacggccctccgtacgcggggccgggcgttactcatgtaatcgtgcgggaggacccatgttacagcgccggagccccactagcgatgggaatgctcgccggcgcagctacgggtgcagccctaggttctcttatgtggagcccctgctggttctag

SEQ ID NO: 128967 - DNA, 570 bp, synthetic construct
  misc_feature 1..570: note = Description of Artificial Sequence: Synthetic coding sequence
  source 1..570: mol_type = other DNA
atggccctcgtccgcgggggctggctctggcggcagtccagcatcttgagacgttggaaacgcaattggtttgctctgtggctggatggcaccctagggtactatcacgatgaaacagcacaggacgaggaggaccgtgtgctcatccattttaatgtccgcgacattaagattggtcccgaatgccatgatgtacagccgccagaggggcggtccagagacggactgctaacggttaatcttcgcgagggaggccggctccacttgtgtgccgagaccaaggatgatgccctagcatggaagacagctctcctggaagccaattctacacccgtgagagtgtattccccataccaggattactacgaagttgtgccccccaacgcgcacgaagctacctatgtacgcagctactacggacccccttatgcgggccctggcgtgacccacgtcattgtccgcgaagacccgtgttattccgccggggctccattagccatgggcatgctcgcaggagcggccacaggagccgcgttgggttctttaatgtggtcgccttgttggttctag

SEQ ID NO: 128968 - DNA, 354 bp, synthetic construct
  misc_feature 1..354: note = Description of Artificial Sequence: Synthetic coding sequence
  source 1..354: mol_type = other DNA
atggcacttgtgaggggagggtggctgtggaggcagagcagcatcttgcgcaggtggaaaaggaattggttcgctctgtggctggacggcactctcggctattatcacgacgaaacagctcaggatgaggaagacagggtactgatccattttaatgtgagggatatcaaaatcggacctgagtgtcatgatgtgcagcccccagaaggaagatccagggatggcctcctgaccgtgaatctccgggagggtggacggctgcatttatgcgccgagacgaaagatgacgcactggcctggaagacagcactactggaggccaattctacacctgttcgcgtttactcaccatag

SEQ ID NO: 128969 - DNA, 492 bp, synthetic construct
  misc_feature 1..492: note = Description of Artificial Sequence: Synthetic coding sequence
  source 1..492: mol_type = other DNA
atggcgctcgtacggggcggatggctgtggcggcagagctcaattctaagacgatggaaaaggaattggttcgcactctggttagatggtacactcggatactaccacgatgagactgctcaggacgaggaagatcgcgtactcatacacttcaatgttagagatatcaaaattggcccagaatgccatgacgtgcagcccccggaagggcgttcacgggacgggctgctaacagtgaatttgcgcgagggcgggagattgcacctgtgcgctgaaacaaaggacgatgcgttggcctggaaaaccgcgcttctggaggcgaacagcacacccgtgagagtgtacagcccatatcaggattactacgaagtcgtgcctcccaacgcccatgaagctacttacgttcgatcttactacggaccaccctatgctgggcctggtgtgactcatgtaatagtacgggaggacccgtgctattctgccggtgcatag

SEQ ID NO: 128970 - DNA, 480 bp, synthetic construct
  misc_feature 1..480: note = Description of Artificial Sequence: Synthetic coding sequence
  source 1..480: mol_type = other DNA
atggcactcgtgagaggcggctggctctggcggcagtcaagcatcttaagaaggtggaagcgtaattggttcgcgctctggcttgatgggaccctcggatattatcatgatgaaactgcccaagatgaagaggacagggtgctgatacatttcaatgtacgagatattaaaattggcccagagtgtcacgatgttcaaccacccgaaggcaggagcagggacggactgctcaccgtgaacctgcgcgagggtgggcgactgcatctgtgcgccgagacaaaagacgacgcattagcgtggaagactgccctcctagaagcaaattctacacccatgattagactgaagcttattcatcctcacaacaagtacttactgagttgctacagtgccggagctcccttggccatgggcatgcttgccggtgctgccacgggggccgctctggggagtttgatgtggagcccatgttggttctag

SEQ ID NO: 128971 - DNA, 483 bp, synthetic construct
  misc_feature 1..483: note = Description of Artificial Sequence: Synthetic coding sequence
  source 1..483: mol_type = other DNA
atggccctggtaagaggaggctggctttggagacagtccagtattctccgtaggtggaagaggaactggtttgccctgtggctggatggcacgctggggtactatcatgacgagaccgcacaggacgaagaggaccgcgtgttaattcactttaatgtgcgggatattaagatcggacccgagtgccacgacgtgcagcctcctgagggaaggtctcgagacggactactgacagttaacctacgcgagggaggacggctccacctctgtgctgaaaccaaagacgatgccctggcctggaaaaccgccttactggaagcaaactctactcctgcccccgccggtgccacggtcccacccagaagtaggagggtttgcagcaaagtccgctgcgtcacccgctcctggtcaccttgtaaggtggagcggcggatatgggtgagagtctactctccctaccaggactactatgaagtggtctag

SEQ ID NO: 128972 - DNA, 465 bp, synthetic construct
  misc_feature 1..465: note = Description of Artificial Sequence: Synthetic coding sequence
  source 1..465: mol_type = other DNA
atggcactcgtccgcggaggttggttatggcgccaaagctctattctccgaagatggaagagaaattggttcgctctatggctggacggcactctgggttactaccatgatgaaacagcccaggacgaggaggatagagtgctcattcatttcaacgtgagggacattaagatcggtccagaatgtcacgacgtacaacctcccgagggacgaagcagggacggtctgcttactgtcaatttgcgtgaaggaggccggcttcatctgtgcgccgagaccaaagatgatgcactggcttggaagactgctttactggaggcaaatagcacgccagtgagggtctattctccctaccaggattactatgaagtggtgccaccaaacgcacatgaggcaacctatgtcaggagttactacgggcctccctacgcaggccctggggtgacacacgtaattgtgcgctag

SEQ ID NO: 128973 - DNA, 258 bp, synthetic construct
  misc_feature 1..258: note = Description of Artificial Sequence: Synthetic coding sequence
  source 1..258: mol_type = other DNA
atggccctggtgaggggagggtggttgtggaggcaaagctccattctgcgaaggtggaaacgaaattggtttgctctctggctcgacggcaccctggggtactaccacgatgaaaccgctcaggatgaagaggacagagtactcatacatttcaatgtgagagacatcaagataggacccgagtgccatgatgtgcagcctcccgaagggcggtcacgggatgggttgttgaccgttaacctgagggaggggggctag

SEQ ID NO: 128974 - DNA, 3576 bp, synthetic construct
  misc_feature 1..3576: note = Description of Artificial Sequence: Synthetic coding sequence
  source 1..3576: mol_type = other DNA
atggagaggcccctggagaacggcgacgagtctcctgattcccagggccacgccacggactggaggtttgctgtgtgttctttccgggacgcctgggaagaggaggagcctgcatctcagatgcatgtcaaggaccctgggcctccccgccctcctgccggcgcgactcaggacgaagaactacagggtagccccttgagtagaaagttccagctacctccagccgcagacgagagtggcgatgcccaacgcgggactgttgagagtagttcagttttatcagaaggccctggcccatccggagttgagtctctcctgtgccctatgtccagccacttgagcttggcccagggagagtctgacaccccaggagtcggtctggttggggaccctggcccctcacgagcaatgccatcggggctgtcccctggagccctggacagcgaccccgtaggcctcggggatccactatcagagatcagtaagctgttagaagccgccccaagcggatcgggcttacccaagcccgccgactgcttactggcacaggatctgtgctgggagctcttggctagtggaatggctacgctccccggcacccgagacgttcagggacgcgctgtccttctcctttgcgcacacagtccggcttggcttcagtcagagtgttcatctcaggagctcatacgcttgctgttgtatctccggtcaattccgcggcccgaggtccaggcactgggtttaactgttctcgtggatgccagaatctgcgccccctcaagctctctcttttctggtctgagccagctgcaggaggctgcccccggtgcagtttatcaagtgttgctggtgggaagcaccctgctgaaggaggtcccatccgggttgcagctggagcagctgccatcccaatcccttctgacgcatattccaacagcaggactgcctacttctctgggcggaggcctaccctactgtcaccaggcttggttggacttccgcagaaggctggaagcactcctccaaaattgccaggcagcgtgcgccctgctccagggcgctattgagagtgtgaaggctgttccacagcctatggaacccggcgaagtggggcagcttcttcaacaaacggaggtgctcatgcaacaggttttggacagcccatggctggcatggctgcagtgccagggaggaagagaactcacatggctcaagcaggaagtgccagaggtgactttaagtcccgattaccgaactgccatggacaaggcagatgagctttacgaccgagtagacggcttacttcaccagttaactctgcagtccaatcagagaatccaggcactggaactagtgcagacgctggaggcccgggagtctggccttcaccaaattgaggtttggctgcagcaagtcggatggcccgcacttgaagaagccggcgaacccagtctggacatgctcttacaggcacagggatcttttcaggagctataccaggttgcccaagaacaggtccgccaaggtgagaaatttctccaaccactgaccggctgggaagccgccgagctggacccaccaggggcacgcttccttgctctgcgcgcacaattgaccgagttctctagggcgctcgctcagcgctgccagaggcttgctgacgcggagagactgtttcagctgttccgtgaggccctcacctgggctgaagagggccagagggtgcttgcagagctcgagcaggagagacctggcgtcgtccttcaacagttacagctgcattggacccgacacccagacctcccaccagcccatttccgcaaaatgtgggctcttgcaactgggctaggctccgaagccattcggcaagagtgtagatgggcatgggcacgctgccaggacacatggctggcattggatcagaaactggaagcctcactaaagctaccgccagtgggatccactgcgtctttgtgcgtgtctcaggtgccagcagcacccgcacatcctccactgaggaaagcctattcgttcgataggaacctcgggcagtctctaagtgaacccgcttgccattgccaccacgcagctacgattgcagcctgccgcaggcctgaggccgggggaggtgcgttgccccaggcatcaccaacggtgccacctcctgggtcttcagatccaaggagcttgaaccggctgcagctcgtcctggctgaaatggtagctaccgagcgcgaatacgtcagagctttggaatacacgatggaaaattactttcctgagctggacaggccggacgtgccacaaggccttaggggccaaagagcacacctatttggcaacctggagaaacttcgcgactttcactgccacttctttcttagagaactggaggcctgcaccaggcatccaccccgtgttgcatacgcattcttaaggcatagagtccagtttggtatgtatgcattgtactccaaaaacaagccccgttcagatgctttgatgtcatcttacggtcacacattctttaaggacaagcagcaagcgctgggcgaccatttggacttggctagttacctgctgaaaccaatccaacggatgggtaagtatgctctcctgctgcaggaactggctcgtgcttgtggcgggcccacccaggagctatcagccctcagggaagcacaaagtctggttcatttccagctacgccacgggaatgaccttcttgctatggatgctatccagggctgtgatgtcaacctgaaggagcagggccaacttgtgcgccaggacgagtttgtggtgcggactggaagacataaatctgtgcgtcgtatcttccttttcgaagagctgctgctattttccaaacctcgacacggcccgacaggagtggacactttcgcctataaacgcagctttaaaatggccgatttggggctgaccgagtgctgtgggaactccaatctccgctttgaaatttggtttaggcggagaaaggccagagacacctttgtgctacaagcctcatcactggctatcaaacaggcatggactgctgatatatcacatttactgtggcggcaggcagtacacaacaaggaagttcggatggcggaaatggtttccatgggagtcggcaacaaagcatttagagatatcgctccgtcagaagaggcaataaatgaccgaacggttaactacgtgcttaagtgtagggaagtgagaagtagagccagcatcgctgtagcacccttcgatcatgattcactctacctcggtgcaagtaactctctgcccggcgatcccgccagctgcagtgtcctgggctccctgaaccttcacctctatcgagaccctgccctgttgggcctgcgatgcccactatatccttccttccctgaggaggcagcgctcgaggccgaggctgagcttggggggcagccgtcgctcactgctgaggacagcgaaatctcaagtcagtgccccagcgctagcgggagcagcggtagcgatagcagctgcgtcagcggtcaggctctgggacgcgggctcgaagatttgccttgtgtgtag

SEQ ID NO: 128975 - DNA, 3576 bp, synthetic construct
  misc_feature 1..3576: note = Description of Artificial Sequence: Synthetic coding sequence
  source 1..3576: mol_type = other DNA
atggaacgtcctttggaaaatggggacgaaagcccagatagccagggacacgcgacagattggcggtttgctgtctgtagctttagggacgcatgggaggaggaggaacccgcttcccagatgcatgttaaggacccgggcccccctagacctccagccggggcaacccaggatgaggagctccagggcagccccctaagccgcaaatttcaactgcctccagcggccgatgaatctggagatgctcaacgtggcactgtggagtcctcttccgttttatccgaaggtcccggtccttctggggtggaaagtttgttgtgtcctatgagctcccacctttcactagcccagggagagagcgacacccctggggttgggctcgtgggtgatcccggacctagtcgagccatgcctagcgggctgtcacccggggctctcgattcagatcccgtgggcctcggcgacccactcagcgagatctcaaaactgctcgaggctgcaccaagcggatctggtcttcccaaacccgcggattgcctgctggcccaagatctctgctgggaactgctggcctctggtatggcaaccctgcccggaacccgcgatgtccaaggtcgggccgtattactgctctgcgcccatagccccgcctggcttcaaagtgagtgcagtagccaggaactcattcgtctactactgtaccttcgaagcatacccaggccggaagtgcaagccttgggattaacagtgctggtcgatgctagaatttgtgctccatcgtccagcctgttttctggactctcacagctccaagaagctgcccccggggctgtctatcaagtcctccttgtgggatccactttgctgaaagaggtccctagcgggctgcaattagagcagttaccatctcagtccctgctgacccacatacccactgcaggcctgcccacatcgctgggtggcggattgccttattgccatcaagcgtggctggattttcgcagaagactcgaggccctactccagaattgtcaggccgcctgtgcccttctacagggggcaatcgaatccgtgaaggccgttcctcaacccatggaaccgggggaagtaggtcaactgttgcagcagacggaggttcttatgcagcaggtgctcgatagcccctggctcgcctggctgcagtgtcaaggtgggcgagagctgacatggcttaaacaagaggtgcctgaggtaacactctcacctgattatcgcacagccatggacaaggcagacgagctctacgaccgcgtggatgggctactccaccagctgaccctccagtccaaccagagaatacaggctctggagctggtgcagaccctagaggcccgcgaatcaggcctgcatcagatcgaagtgtggctccagcaggttgggtggcccgccctggaagaagctggagagccatccctagacatgcttctgcaggcccagggctcattccaggagctgtatcaggtggcccaagaacaggtgaggcagggggaaaaatttcttcagccacttactgggtgggaggcagctgagctagatccccccggcgcgcgatttcttgccctgagggcacagctaacagaattttcacgggctctcgcccagaggtgtcaacgactcgccgacgcggaacggctgttccagctgttcagggaggccctaacctgggccgaagagggacaaagggtactcgccgagctcgagcaggagcggccaggtgtcgtgctgcaacaattgcagctacattggacgcgacatcccgatctcccaccggctcacttccgtaagatgtgggctctcgcaactggcttaggatctgaggcaatccgccaggagtgccgatgggcttgggcccgctgtcaggacacttggttagcccttgatcaaaagttagaagcgtctctaaagctgccccctgtgggttcaaccgctagcctgtgtgtgagccaagtgcctgctgcccccgcccatcctcccttgaggaaggcatattcattcgaccgcaatctcggccagagccttagtgagcccgcatgccactgtcaccacgctgcgactatcgctgcgtgtcgccggccggaagctggaggaggtgccttaccccaagcctccccaacggttccaccgccaggaagcagtgatcccaggtccctaaaccgactgcagctggtgttagctgagatggtggccaccgaacgggagtacgttagagctcttgagtatacaatggaaaactactttccagaactcgaccgaccagacgtaccgcaggggctcaggggacagcgagcacacctgttcggaaatctggagaagctcagggattttcactgccacttctttttgagagagctagaagcatgcacccgacaccccccccgtgtggcttacgcttttcttcgccaccgggtccagtttggcatgtacgctctgtacagcaaaaacaagcccagaagcgacgctctcatgtccagctatggccacacattctttaaggacaagcagcaggctctgggcgatcacttggatcttgcttcttatctactaaagccaatccagagaatgggcaaatacgcattgcttctgcaagagttggcccgcgcttgtggtggacccacccaggaactaagtgcactaagagaggctcagtcactcgtgcacttccagctgagacacggtaatgacctcctcgcaatggatgccatccaggggtgtgacgtgaatcttaaggagcagggccaactcgttaggcaagatgaattcgtagtacgaacaggcagacacaaaagcgtgagacggattttcctctttgaagagttactactgttcagcaagccacgccacggcccgacaggtgtggacacatttgcctataaacgctcttttaaaatggccgacttaggtcttacagagtgctgcgggaactcgaacctgcggtttgagatttggttccgtcgtcgcaaagcaagagacaccttcgtgttgcaggcaagttccctggcaatcaaacaggcctggaccgccgatattagccatctcctgtggcggcaggcggtgcataacaaggaggtccggatggccgagatggtgagcatgggcgtggggaacaaggcctttagggatatcgcaccatctgaggaggccattaacgacaggactgttaattacgttctgaagtgtagagaggtacggtcacgcgcctccatcgcagttgcaccctttgatcacgattccctgtatcttggcgcctcaaactccctgcccggagatcctgcatcttgcagtgtccttggatccctcaatctccatttgtacagagatcccgcactcctgggtttgaggtgtcccctgtacccatcatttcccgaggaggcagcactggaagctgaggccgagctcggtggccaaccctcactgaccgctgaggacagcgagatcagcagccaatgtccaagtgcttcaggatcttcgggctccgattcaagctgcgttagcgggcaggctctggggcgaggtctggaggacttgccgtgtgtgtag

SEQ ID NO: 128976 - DNA, 582 bp, synthetic construct
  misc_feature 1..582: note = Description of Artificial Sequence: Synthetic coding sequence
  source 1..582: mol_type = other DNA
atggaacgaccactggagaatggagatgaatccccagatagccagggccacgctaccgactggagattcgcagtatgttcttttcgggatgcatgggaagaggaagagcctgccagccaaatgcacgtaaaggacccaggtccaccacgacctcctgccggagcaacccaggacgaggaactgcagggcagcccattatctcgtaaatttcagttgcctccagccgcggacgagagcggggacgcacagcgagggaccgtagaatcctcatctgtgttgtcagaggggcctgggccttctggagtggaaagcctcttatgcccaatgagtagtcacctaagcctcgcccagggggaaagcgacactccaggtgtcggactggtgggagaccccgggcctagtcgggcaatgccctccggattaagtccgggcgctctggactccgatccagtgggacttggggacccattatcagagatctccaaactattagaggctggcaaggagggatgggctagggaggtctgggaaggaaatggagatgcgtggagagacgagtgtcaggactttggcggactgtag

SEQ ID NO: 128977 - DNA, 3576 bp, synthetic construct
  misc_feature 1..3576: note = Description of Artificial Sequence: Synthetic coding sequence
  source 1..3576: mol_type = other DNA
atggagaggcctctggagaacggggacgaaagccccgattctcaagggcacgctactgattggaggttcgcagtgtgtagctttagggatgcctgggaggaggaagaaccagcctcgcagatgcacgtaaaggatccagggcctccccgaccaccagccggggctactcaggacgaggagctccagggtagccccctgagtaggaaatttcagctccctcctgcagccgatgaaagcggagatgcgcagagaggaactgtcgaatctagctccgtgctgtcagaggggcccgggccaagcggggttgagagtctcttgtgtcctatgtcgagccacctgtccctggctcaaggagagagcgacacaccgggggtcgggcttgttggcgatccaggaccatctcgcgcaatgcctagcgggctgtctccgggcgcacttgattccgacccagtcggcctgggcgacccactctccgagatcagtaaactgctcgaggcagcaccatctggttccggtctgcccaaacccgctgactgcttgctggcacaggatctgtgctgggagctgctggccagcggcatggccactttgcctggaactcgggacgtccaggggcgggcagtgctgttactatgtgcacattctcctgcctggctgcagtccgaatgctctagtcaggagctcatccgtctgctcctttacctacgaagtatcccgcgcccagaggtccaggcgctgggcctaaccgtcctagtagacgcgaggatctgcgccccctcaagcagcttgtttagcggactgtcccagctgcaggaagccgcccccggagcagtttatcaggttttactggtgggttcaacacttctcaaagaagtccctagtggactccagctggaacagttgccctctcaaagccttctgactcacattcctacggctggcttgccgacctcactcggaggtgggcttccttactgccaccaggcctggttagactttcgcagacgcttggaggcactcctacagaactgccaagctgcctgtgctcttctgcagggcgcgattgaaagcgtaaaggcagttcctcagccaatggagccaggagaagtggggcagttgttgcaacaaactgaagtcctcatgcaacaggtcctggacagtccatggctggcttggctgcaatgtcagggaggcagggagcttacttggctcaaacaggaggtgccggaagtcacgctgtccccggattatagaacagccatggacaaggccgatgaactctacgaccgtgtcgatggcttactgcatcagctcaccctgcaatctaatcagcgaatccaggccctggagctagtccagaccctggaagcgagagaatctggtctgcaccagatcgaggtctggctgcagcaggttggttggcctgcactagaggaagccggtgaacctagtctcgacatgttgctccaggcgcaggggtcttttcaggagctctaccaggtggcacaagaacaagtaagacagggggaaaagtttttacagcctttgactgggtgggaggcggccgaactggacccccccggggcaagatttctcgctctgcgagcccagttaaccgaattctctagggccttggcacagcgttgccagcggctcgctgatgctgagcggctgttccagctattcagggaagcgttgacatgggccgaggaggggcagcgcgtgctggcagagctggagcaggagcgcccaggtgttgtgctgcaacaactccagttgcactggaccaggcatccagacttgccccctgctcactttcggaagatgtgggcacttgccactgggctgggctctgaggccatcagacaggagtgtcgatgggcgtgggcccgatgtcaagacacatggctggccctggatcagaaattggaggcctccctgaagctgcctcctgttggtagtacagccagcctttgcgttagtcaggtccccgcagccccagcccatcccccactgcgcaaggcttatagctttgataggaacctcggacagagcctgtctgaaccggcgtgtcactgtcaccacgctgcaacaatagccgcctgtagaagacccgaagccggaggcggtgcactgccacaggcaagcccgacagtgccacctccgggttcttctgatccgcgctctctaaaccgcctccagctagtgctggccgagatggtagcgacggagagagagtacgtccgcgcattagagtatacaatggagaactactttcctgaactggatagacccgatgtgccccagggcctacgcggccaacgggcacatctgtttggaaaccttgaaaagctcagggactttcactgtcacttctttctgagagagctggaggcctgcacgcgccaccctcctagggtggcatacgccttcttgaggcacagggtgcagttcgggatgtacgctctgtacagcaaaaataaacctagaagcgacgccttgatgagcagctatggacatactttttttaaggataagcagcaggccctcggagatcatctggacctggcaagctacctgctgaaacctatccagagaatgggcaaatacgctctgctcctccaggaacttgctcgtgcttgtggcggacccactcaggagctctccgccctgagagaagcccaaagcttggtacatttccagctccgccacggaaacgacttgctggctatggacgctatacaaggttgtgacgtgaatctcaaggaacagggccaattagtgagacaagacgaatttgtggtgagaacaggcagacataagagtgtcaggcggattttcttatttgaggagttattgctcttctccaagcctagacacgggcctaccggagtagacacattcgcctataagcgcagttttaaaatggccgatctgggcctgaccgaatgctgcggaaacagcaacctacgattcgagatctggtttaggcgccggaaagcccgggacacatttgtgctgcaagcttctagtctcgccataaaacaggcatggacagcagatatctctcatctgttgtggaggcaggctgtgcacaataaggaagtgcgtatggcggaaatggtgtcaatgggcgtgggcaataaggccttcagagacatcgccccgtccgaagaggccattaatgaccgcaccgtgaattatgtgctaaaatgtagagaggtgcgctctagggctagtattgctgtggctccgttcgaccacgactcactgtacctgggagcttcaaactctctacctggcgaccccgcaagctgcagcgtgctgggcagcctcaacttgcatctctatagagaccccgctctgctcggtcttcgctgtcccctctaccccagttttcccgaggaggccgcactggaagccgaggctgagctgggggggcagcccagtctgacggccgaagattctgagatttcaagccagtgcccctcagcaagcgggtcttccgggagcgattcctcatgcgtcagcggccaggctctgggaagaggtcttgaagacctgccctgtgtttag

SEQ ID NO: 128978 - DNA, 3333 bp, synthetic construct
  misc_feature 1..3333: note = Description of Artificial Sequence: Synthetic coding sequence
  source 1..3333: mol_type = other DNA
atggagcgcccgttagagaatggcgatgagtctcctgactctcagggtcacgcaactgattggaggttcgcagtgtgtagctttagagacgcgtgggaggaagaggaacctgcctcacagatgcacgtgaaggatcctggtcccccccggcctccagccggcgctacccaagacgaggagctgcaggggagcccactgagtagaaaatttcagctgccccccgctgctgacgagagcggagacgcacagagaggaactgtggagtcatcctccgtcctgtccgagggccctggacccagcggggtggaatctttgttgtgccctatgtcctctcacctaagcctagcccagggcaccagggacgttcagggccgggcggtcctgttgctgtgcgctcattctcccgcatggctgcagtctgagtgctctagccaggagctcattcgactgctgctatatttgcgttccatcccacgcccagaggttcaggctcttggacttactgtgttggttgatgcaaggatctgcgcaccttcatcaagcctgttcagtggtttatcccagctccaagaagctgctccgggcgcagtgtatcaggtgctccttgtagggagcacccttctgaaagaggtaccctcaggactgcagctcgagcaattacccagccagagtctgctaacacacatcccaaccgcagggctgccaacctcattagggggaggtttaccttactgccatcaggcatggctggactttagaagacgccttgaggcccttttgcagaattgccaggcagcctgcgccctgctgcaaggtgctatcgaatctgtcaaagcggttcctcagccaatggagcctggagaggttgggcaactgctgcagcaaacagaggtcttgatgcagcaggtcttggactcgccttggctggcctggctacagtgtcagggggggagggagctaacatggctcaaacaagaagttccagaggtcacactgtcccccgactacaggactgcgatggataaagcagacgagctctacgatcgggttgacgggttattgcaccagctaaccctgcagtcaaaccaacgtatccaggctctcgagcttgtccagaccttggaagcccgggagagcggcctgcaccagattgaggtttggctgcaacaggtgggctggcccgccctagaagaggcaggtgaacctagtttggatatgctcttgcaggcccagggctcctttcaagagctctaccaggttgctcaagagcaggtccgccagggggaaaagttcttacagcctctgaccggatgggaagcagccgaactggatcccccaggggccagatttctagctctgcgggcccaactcacggagtttagcagggctctagcacaaaggtgccagcgactggctgacgccgagcggctctttcagctgttccgcgaagctctaacttgggccgaggaggggcagcgggtactcgccgagctggagcaagaacgccccggtgtggtgctccagcagttacagctccactggacccgtcaccccgatcttcctcccgcccactttaggaaaatgtgggccttggctacggggctgggaagcgaagccataaggcaggaatgccggtgggcatgggctagatgccaagacacttggcttgccctggaccaaaaattagaagcttcgttgaaactgcccccggtgggcagtaccgcatccctctgcgttagccaggtccccgcagctcctgcccacccaccattgaggaaggcttacagttttgacaggaacctcgggcaatcgctgtcagagccagcctgccactgccatcatgctgctacaatcgccgcatgccgccgccctgaagccggagggggcgccctcccccaggcaagtccaactgtcccgcctccaggatcaagtgatcctcgcagtctgaaccggcttcagttggtcctggcagaaatggttgcgaccgagcgcgagtatgtccgtgcactcgagtacaccatggagaattacttcccggaactagaccgccccgatgtgccccagggcctgcggggtcaacgtgcccacctctttgggaatcttgagaaactgcgggactttcactgtcatttctttttgagggaactagaggcatgcacaagacaccctccgagagtggcctatgctttcctgagacatcgcgtgcagttcgggatgtatgccttgtattctaagaacaaaccacgctccgacgcccttatgagttcctacggacacaccttttttaaggataagcagcaggctcttggggaccacctcgacctcgcatcatatctcctgaagccgattcaacgcatggggaaatacgcccttcttttgcaggaactggctcgtgcctgtgggggcccaactcaagaactgtcagctctgcgagaagcccagtctcttgtccacttccagctccgccacgggaacgacctcttagcaatggacgccatacaaggttgtgatgtcaaccttaaggaacagggccagttggtaaggcaagacgaattcgtggtaagaacgggtaggcacaagagtgtacggcgaattttcctcttcgaggaactgctgctcttcagcaaaccacggcacggacccacgggggttgatacatttgcgtacaagcgctcctttaagatggctgacttggggctgacggaatgctgcggcaattcaaatttaaggtttgagatttggttcagacgcagaaaagcccgcgatacattcgtgctgcaagcatcttctctggccattaaacaggcatggacggcagatatctctcacctgttatggagacaggcggttcacaacaaagaggtgagaatggccgagatggtaagtatgggtgtgggcaacaaggctttcagggacatagctccttccgaggaggccataaacgatcgcacagtgaattacgtcctcaaatgccgagaagtccgttccagagcctcaatcgccgtggcgccattcgatcatgactctctgtacttgggcgccagcaatagtctccctggcgatccagcatcttgtagtgtgttgggcagtctcaatctacatttataccgggacccagctctgctaggactgagatgccccctgtaccccagttttcccgaggaggctgccctcgaagcagaagccgaactgggtgggcagccaagtcttacagcggaggattctgaaatttcctcacaatgtcccagtgctagcggcagcagtggctctgatagcagttgcgttagcggacaggccctaggcaggggcctggaggacctcccttgcgtctag

SEQ ID NO: 128979 - DNA, 3021 bp, synthetic construct
  misc_feature 1..3021: note = Description of Artificial Sequence: Synthetic coding sequence
  source 1..3021: mol_type = other DNA
atgcactacgatggccatgtacgcttcgacctccctccacagggatcggtgttggcccggaatgtcagcactcgatcctgcccgcctcgtacgtcgcccgccgttgatctcgaagaagaggaagaagagtctagtgtagatggcaagggggaccgtaaatctactggtctgaagttgtccaaaaagaaagcccggcgacgccacactgatgatcccagtaaagagtgcttcactctcaagttcgacttgaacgtggacatcgagacagaaattgtacccgccatgaagaagaagtctttgggggaggtcttactgcctgtgttcgagcgaaaaggcatcgccttgggtaaagtggatatctacttggaccagtccaacacgcccttgagcctgacattcgaagcttacagattcggcggacactatctccgggtgaaagccccagccaagccaggcgacgaagggaaggtcgaacaagggatgaaagatagtaaaagcctgtcactccccatcttacgcccggcagggacaggcccccctgccctcgagcgggtagacgcccaatcaagacgtgaatctctagatattctcgcgcctggcagacgcaggaaaaacatgagtgagtttctaggggaggccagcatccctggacaagaacccccgacaccctcttcctgctcacttccaagcggaagctccggctcaacaaacaccggcgactcctggaagaacagggccgccagcagattcagcggctttttctctagcggcccaagcacaagtgcctttggtcgcgaggtcgacaaaatggagcagttggagggtaaactccacacatattccctctttggactcccacgtttacccaggggcctgcggtttgatcacgatagctgggaagaagagtacgatgaagatgaagacgaagacaatgcttgtctccggctggaagacagctggcgggagctcatagacggacacgagaaactcactagacggcaatgtcaccagcaggaagccgtgtgggaattgttgcataccgaggcatcctatattaggaaactacgggttataataaatcttttcctgtgctgtttactgaacctgcaggagagcggtttactctgtgaggtagaggctgagagacttttcagtaacattccagagattgcacagttacacagaagactgtgggcttctgtaatggcccctgtcctcgagaaggcacgaaggacgagagcattattgcagccaggagatttcctaaaaggcttcaagatgttcgggtctttatttaaaccctatataaggtattgcatggaggaagaggggtgtatggagtacatgcgggggctcctcagggacaacgatttattccgtgcctatataacatgggctgaaaaacacccgcagtgccagcggttaaagttgagcgatatgttagctaaaccacaccaacggttgaccaagtatcccttgcttctgaagtctgttctgcgaaagacagaggaacctcgagccaaggaggccgtggtggccatgattgggtcggtggaaaggtttatacaccacgtaaacgcttgtatgagacaacgccaggaacgacagcgattggccgccgtagtgtcgcgcattgatgcctatgaggtagtggagtcctctagcgatgaggttgataagttgctgaaggagtttctgcatctggaccttacagccccaatccctggtgcatcgccagaagagacccgacaattgctcctcgagggaagtcttagaatgaaagaagggaaagattccaaaatggacgtgtactgctttctcttcaccgacttgctgctcgtgaccaaagctgttaaaaaagccgaacggaccagggtgatcaggccccctctcctagtggacaagatcgtgtgtagggagctgcgggatcctggttcattcttgctgatctaccttaacgagttccactcggcagttggtgcctacaccttccaggcctctgggcaggcactgtgcagaggttgggtcgacaccatctacaatgcgcagaaccagctccagcagcttagagcccaggagccaccaggatcacaacagccccttcagtccctggaggaagaagaggacgagcaggaggaagaggaggaggaagaggaagaagaggaggaaggcgaggatagcggcacctctgccgcctcttctccaacaattatgcggaagtctagcggctctcctgacagccagcactgtgcttccgatggaagcactgaaaccctcgcaatggttgtggtggagccaggtgatactttaagctcccccgagttcgacagcggccctttcagcagccaatccgacgaaacctctctctcaacaacggcaagctctgctacgcccacatctgaattgctccccctcggcccggttgatggtagatcgtgttccatggattctgcttatggaaccttgagccctacgagcctccaggacttcgtggctccgggcccgatggccgaattggtgcctcgggctccggagagcccccgggtgccatccccccccccatcaccacggcttaggagacggacccctgtccagctcttgagttgcccaccgcacctgcttaagagtaagagcgaggcctccctgttacagcttctggctggggccggtacacacgggaccccttccgcgccatcccgctctctgtccgaactctgtttagccgtgccagctccggggatcagaacccagggtagcccgcaagaggccggcccctcctgggactgtaggggggctcccagccctggcagcgggcccggactagttggctgtctggcaggagagccagctgggagtcatcgtaagcgctgcggcgatctgccctcaggagccagtccacgggtgcagcctgagccccctccgggcgtgtctgctcagcacagaaaacttaccctggcccagctgtaccgaatccgtacaacattgctgcttaactccaccttgactgcctctgaggtctag

SEQ ID NO: 128980 - DNA, 2793 bp, synthetic construct
  misc_feature 1..2793: note = Description of Artificial Sequence: Synthetic coding sequence
  source 1..2793: mol_type = other DNA
atgcattacgacggtcacgtccgctttgatcttccaccccaggggagtgtgctcgcacgcaacgtcagtaccagaagctgtccaccccgtacctcccctgctgttgacctcgaagaagaagaggaagaatcctcagtggacggaaaaggcgaccgcaagagcacaggcttgaagctgagtaaaaaaaaagcccgccggagacacacagatgaccctagcaaggagtgcttcacgctcaaatttgacctgaacgtggatatagagaccgagatcgtgccagccatgaaaaagaaatcattgggggaggtgctgctccctgtttttgagcgtaagggaattgcactaggtaaggtagacatatacctggatcagtcaaatacaccactgagtctcacattcgaggcgtacaggttcggaggacattacttgcgagttaaggctcctgccaaacccggagacgagggtaaggtggagcagggcatgaaagatagtaagtcactctcactgcccatcttgcgtccagctggcaccgggccacccgcactggagcgtgtcgacgcccaaagccgcagagagtccctggatatcctggctccagggcgtagaaggaagaacatgagcgagtttctaggtgaagcaagtattcctgggcaggagcccccaactccctccagttgcagcctgccatcagggagctctgggtcaactaataccggagactcctggaaaaatcgcgctgccagtcggttctcaggattttttagttctggtccttctacatcagcatttggaagagaggttgataagatggagcagctggaaggcaaacttcatacctatagcttatttggattaccccgcctgcccaggggcctgcggtttgatcatgattcttgggaggaagaatacgacgaggatgaggacgaggacaacgcgtgtctcaggctggaggacagttggcgggagcttatcgatgggcacgaaaagttgacacgcagacagtgccaccagcaggaggcggtctgggaattgttacacacggaggctagctatatccggaaactccgtgtgattatcaatctttttctctgttgcttgttgaaccttcaggagagtggacttttatgcgaagtcgaagctgagcggctcttctccaacatcccggagatagcgcaactgcacaggagactgtgggctagtgtgatggctcctgtactagagaaggccaggagaacacgagccttgcttcaacccggggattttctgaagggcttcaagatgtttggcagtctgtttaaaccctatattaggtattgtatggaggaggagggctgtatggagtatatgcggggcctgctgagagacaacgatctttttcgggcatatatcacatgggctgaaaaacacccccagtgtcagcggttgaaactgtccgatatgctggccaagccacaccaacgactcacaaagtatccactcctgctaaagtccgtcctcagaaaaacagaagaacccagggctaaggaagctgtcgtcgccatgataggttccgtcgaaagatttattcaccacgtgaatgcctgtatgcgacaacgccaggagcgacagcgacttgccgctgtggttagcagaatagatgcctacgaagttgtggagagtagttcagatgaggttgacaagctgttgaaggaatttctacacctagatctcactgctccgatcccaggtgcatccccagaggaaactcgccagctactactcgaaggctcccttcgcatgaaggaaggaaaggacagtaaaatggacgtttattgtttcctgtttacagacctgctattggtaaccaaagccgtcaaaaaggcagagaggacccgagtcattcgtccccccttattggtggataagatcgtgtgtagagagctgagggaccccggctcctttctgctgatctacttgaatgaattccacagcgccgtgggtgcctatacattccaggcatcaggccaagcactgtgtcgcggctgggtcgatactatatataacgctcagaatcaactgcaacagctccgcgcacaggagccccccggctctcagcaacccctgcaatcattggaggaagaagaagacgagcaggaagaggaggaggaagaagaagaggaggaggaagagggcgaggactctggcacttccgccgcttcttcacctacgattatgcgcaagagctctggcagtcccgacagtcagcactgtgccagtgacggcagcaccgagaccctggcaatggtagtggtggagccaggagacactctctcctcacccgaattcgatagcggccctttctcctctcagagcgacgagacttctctgtctactacagctagcagtgcgacacccacctcagaactgctgccgcttggaccggtggatgggcgcagctgttccatggactctgcctacggcaccctgagccctacaagtttacaggattttgttgcacctggacccatggccgagcttgtgcccagagcccctgaatccccccgcgtcccaagcccacctccatcaccccgactccgacgtcgaaccccagtccagctgctgtcgtgcccaccacacctgcttaagagcaagtccgaggcgagcctactgcagttgcttgcgggcgcaggaacccacggtacaccttcagcgccttctcgctccctttccgagttatgcctcgctgtccccgcccctgctcaagaggccgatcctggcccagccttgcccaatcaagatcaccccgctgcctag

SEQ ID NO: 128981 - DNA, 3021 bp, synthetic construct
  misc_feature 1..3021: note = Description of Artificial Sequence: Synthetic coding sequence
  source 1..3021: mol_type = other DNA
atgcattacgacgggcatgtgcgtttcgacctgcccccccaggggagcgtcctggcacggaacgtctccacaagatcctgtccccctagaacatcaccagctgttgatctggaagaggaagaagaagaaagttctgttgacggtaaaggggacagaaaatccacgggtcttaaactgtccaaaaagaaagctcggcgacgtcataccgacgacccctctaaggagtgctttactctgaagttcgatcttaacgtggacattgaaacagagattgtgcctgccatgaagaagaagtcgctgggagaagtgctgcttcctgtgtttgaacgcaagggcattgccttgggtaaggtcgacatttacctggatcagagtaacacccccctgagcttgaccttcgaggcttacaggtttggcggtcattatctgagggtcaaggctcccgcgaagcccggagatgaaggtaaggtcgagcagggcatgaaagactcaaaatcccttagcttacccattctgcggcctgccggcacaggtccaccggccttggagcgggtcgacgcccaatcgaggcgcgaatcccttgacattcttgcaccgggtcggcgcaggaagaacatgtctgaatttttgggagaggcttccattcccggtcaggagcctccaaccccctctagttgctccctcccgtccggctcatctggttccactaatacgggtgactcctggaagaaccgagccgcctccagattttcagggttttttagctctggcccctctacttctgcattcggtcgagaggtcgataagatggaacagctggaggggaaactgcatacttacagtttgtttggtctgccgcggctccccagaggcctcaggttcgatcatgattcatgggaggaggagtatgatgaggatgaagatgaagacaacgcttgcctccgactggaagatagttggagagaactaatcgacggacacgagaaactgacgagacggcagtgccaccagcaagaggcagtgtgggagctgttgcatacagaagcaagctatattagaaagctccgcgtgataatcaaccttttcctgtgctgcttactgaacctacaggagagtggtctgctgtgcgaggtggaggcggaacgccttttctctaacataccagaaattgctcagctccaccgccgactttgggcgagtgtaatggcaccagtgcttgaaaaggcaagacgaacccgggcgctgctccagccgggtgattttcttaagggcttcaagatgttcgggtctctcttcaagccatacatccgctactgcatggaagaggagggctgtatggaatacatgcgggggttactgagggacaacgacctcttcagagcgtatatcacctgggccgagaagcatccgcagtgccagcgactgaaactttctgacatgctggccaagccccaccagcgtttaaccaagtatccccttctgcttaaatctgttctgcgaaagactgaggagccccgggccaaggaggcagttgtcgcaatgatcggatctgttgagcgatttatccaccatgtcaacgcttgtatgcgtcagcgacaggagcggcagcgcctggccgccgtggtaagcagaattgatgcctatgaggtggtggagtcgagcagcgacgaagtggacaagctgcttaaggagtttttgcacctcgatttgactgctccgattccaggcgctagtccggaggagacgaggcaattgttgttagagggctcccttaggatgaaggaaggaaaagacagcaaaatggacgtttactgcttcctgtttaccgatttgttactggttacaaaagccgtaaaaaaagccgagaggactagagttatcagaccgccgttactggtggacaagattgtgtgcagagagcttagggatccaggttcatttctcctcatctacctgaacgagttccatagcgctgtgggggcctacactttccaggcatctggccaggctttgtgcaggggctgggtggacacaatttacaacgcgcagaatcagctccaacagctgcgtgcccaggagccgcccgggtcccaacaacccctgcagtccctcgaggaagaagaggacgagcaggaggaagaagaggaggaggaggaggaggaagaagagggtgaagactcgggcacatccgccgcgtcctcgcctaccattatgcggaagagctcaggatcacctgattcccagcactgcgcgagtgacgggtctacggaaaccctggcaatggttgtcgtcgaaccaggagataccttgagtagcccagaatttgattctggtcctttcagctcccagtccgatgaaactagtctcagcacaacggctagtagcgctacccccacctcggagcttcttcccctgggccctgttgacggccgcagctgctcaatggacagcgcgtacggtacgctgtcacctacttcattacaggatttcgttgccccaggtcccatggcggagctggtgccaagagcacctgaatctccccgggtgcccagtcctccaccaagcccacgattgaggcgtcgcaccccagtacagctgttatcctgtcctccacacctgttaaaatcaaaatctgaggcatccctgctgcaactccttgcgggagcagggactcacggtactccttcagccccttctaggtctttatcagagctgtgtcttgccgtccctgcacccgggatccgcactcagggaagcccccaagaggctggtccatcgtgggactgccgcggagccccctcccctggctctggcccaggtctggttggatgcctcgctggagaacctgcaggaagccatcgaaagcggtgcggcgacctgccaagcggagcctcaccgcgggtccagccagagccaccgcctggtgtctctgctcagcacagaaaactcaccctcgctcagttgtaccggattagaacaacactgcttctgaatagcaccctgacagcttccgaggtgtag

SEQ ID NO: 128982 - DNA, 3132 bp, synthetic construct
  misc_feature 1..3132: note = Description of Artificial Sequence: Synthetic coding sequence
  source 1..3132: mol_type = other DNA
atggataaggggcgcgcagcaaaggtctgtcatcacgcagactgccaacagctacataggagagggcctttaaatctctgtgaagcatgcgactcaaagtttcactccaccatgcattatgacggccacgtgcgctttgatttgccaccccaggggtctgtcctggctcgcaacgtatctacaaggagttgcccccccaggactagccccgcagttgacctggaagaagaagaagaggagtcatccgtggatggtaaaggagacagaaaatctactgggttgaaactctccaaaaagaaggcaagacgcaggcacaccgacgaccctagcaaggaatgttttaccctgaagttcgatctgaacgtggacatagaaaccgaaatcgtgcccgcaatgaagaaaaagagcctcggggaggtgcttctaccagtctttgaacgcaagggtatcgccttaggcaaggttgatatctacctggaccagagcaacacccccctcagcttgacctttgaagcataccggttcggcgggcactatctcagagttaaagcccccgcaaagccaggagacgaaggaaaggtggaacagggaatgaaagattcaaagtccctaagcctgcctatactacgacccgcagggactggcccccccgccttggagagagtcgatgcccagtctcgacgtgagtccttggacattttggccccaggccgacgccgcaaaaacatgtccgagttcctaggtgaggcaagcataccaggccaggaaccccccacacccagctcctgttccttaccttccgggagctccggttcgacaaacacaggcgacagttggaaaaacagagcagcaagcagattctcagggttcttttcctctgggccttctaccagcgcattcggccgtgaggtagacaagatggagcagctggaagggaaactgcacacgtatagcctgtttggcctgcctaggctgcctagaggcctgaggtttgaccatgattcatgggaggaagagtatgacgaggacgaggatgaagacaacgcatgtctgcgcctcgaagattcctggagagagcttatagatgggcatgagaagttgacgcgccggcaatgccatcagcaggaagcagtgtgggagcttcttcataccgaggcctcctatatccggaagctccgcgtgatcatcaatctctttctgtgctgtctgctgaacctgcaggagagtggcttactttgcgaagtcgaagccgagcgactctttagtaatattccagagatagcacaactccatcgccgactgtgggctagcgtgatggcaccggtgttagagaaggcaaggcgtaccagggccttgctacagcctggagatttcctcaaaggatttaagatgtttggaagcctctttaaaccctatatacggtattgtatggaggaagaagggtgtatggagtatatgcgcgggcttctgcgggataacgacctcttcagggcttatattacgtgggcggaaaagcacccccagtgccagcgcctcaagctgtccgacatgcttgcaaagccccaccagagactgacaaaatatcccctccttttgaaatcggtccttcgcaaaactgaggagccccgtgccaaagaggccgttgtagcaatgatcggctctgtggagcggtttattcaccatgtaaatgcttgcatgcggcagcggcaggagcggcagcgcctcgccgccgtggtgagcagaatcgacgcctacgaggtggtggagagctcctctgacgaggttgataaactgctgaaagagtttctccatctggacctaacagcaccgatccccggagcatccccagaggaaactcgccagctcctgctagaggggtcattgaggatgaaggaagggaaggatagtaaaatggacgtgtactgttttctgtttacagatctgctcttagtcaccaaggccgtgaagaaagccgagagaactagagttataagacccccactgctggtagacaaaatagtatgccgcgaactgcgggacccaggatcatttctgctgatctatttaaatgaatttcacagtgcagtaggggcttatacgtttcaggcttccggccaggctctttgccgcggctgggtggatacaatctataatgcacaaaatcaattgcagcaacttcgagcccaggaaccccctggctcacagcaaccactgcagtctctcgaagaggaggaggacgagcaggaagaagaggaggaggaagaagaagaagaagaggagggcgaggattcaggaacatccgccgcttcttccccaaccatcatgcgaaaatccagtggttctccagacagccagcattgtgcatctgacggatcgaccgaaactctggcaatggtggtggtagaacctggggatacactatcatccccagaattcgatagcggtccattttcaagccaaagtgacgagacaagcctcagtacaactgcttcctccgccacgcccacatccgagctgctgccgcttgggccagtcgacggcaggtcttgtagtatggattccgcctatggaacgcttagcccaacgagcctccaggacttcgtggcacccggccctatggcggagctagttccccgggcacccgagagcccaagggttccatccccgccaccaagtcccaggttacggcgccgcacaccagtacagctgctttcatgccccccccacttgctgaaatctaaatcagaggctagcttgctgcagctgctggctggagccggaactcacggaaccccttctgcgccatctcgaagcctcagtgagctctgtctggctgtgcctgcgcccggcatacggacccaggggtctccccaggaggctgggccttcatgggactgtcgcggagccccctcacctggcagcgggccgggactggttggctgcctggctggggaacccgctggttcgcaccggaaacgctgtggtgatcttccaagcggcgccagtccaagagtccaacccgagcctccaccaggcgtatccgctcagcaccgaaagcttactctggctcagctataccgcatcagaacaaccctccttctgaatagtactctgaccgcttctgaggtgtag

SEQ ID NO: 128983 - DNA, 3021 bp, synthetic construct
  misc_feature 1..3021: note = Description of Artificial Sequence: Synthetic coding sequence
  source 1..3021: mol_type = other DNA
atgcattatgacggacacgtacgtttcgacctccccccacaagggagtgttctcgcaaggaatgtctccacccgttcttgtcccccacggaccagccccgccgtggatttggaagaggaggaagaggagagctccgtggacggcaagggagaccgtaaatcgaccgggctcaaactttccaagaagaaggctaggagacgccacaccgacgatccctcaaaggaatgtttcaccctgaagtttgacctcaacgtagatatcgagactgagattgttcctgctatgaagaagaagtcgttaggcgaagttctcttgcctgtgtttgaacgaaagggcatcgctctgggtaaggtggatatctatctggatcaaagtaacactcccttaagcctgactttcgaggcgtatcgtttcggaggccactacttacgggttaaggcaccggctaaacccggcgacgaggggaaggtggaacaaggcatgaaagactccaagtcacttagtctgcctatcttacgtcctgccggaacagggcctcccgccttggaacgagtcgacgcgcagtcacgcagagagtcccttgacatcctggccccgggaagacggcgcaagaatatgtcagaatttctgggtgaggcgagtattcccggacaggagccacccaccccaagctcctgctccctcccatcaggctcttcgggttcgacgaatactggagatagctggaaaaaccgtgcagcctctagattcagtgggtttttctccagtggcccttccacctcagcattcggcagagaggtggacaagatggaacaactggagggaaaactccacacctactccctatttggcctcccgcggctgccaaggggtctgagatttgatcacgactcatgggaggaagagtatgatgaagatgaagacgaggacaacgcttgccttcgtctcgaagactcatggcgagaacttattgacggccatgaaaagcttaccaggcgccagtgtcaccaacaagaagcagtgtgggaactgttgcatacagaagcatcttatatcaggaagcttcgtgtcattatcaatctgttcctttgttgcctcttgaatctgcaagaatcaggacttctgtgcgaagtagaagctgaaaggttgtttagcaacattcctgagattgctcagctgcacaggagactgtgggctagcgtaatggcccctgttttagagaaggcaaggaggacaagggccttgcttcaaccaggcgactttctgaaaggcttcaagatgttcggcagccttttcaaaccttatatcaggtactgcatggaggaagaaggctgtatggaatacatgagagggctcttgcgagacaatgatctctttagggcttacatcacatgggctgaaaaacaccctcaatgccagcgcctgaaactatcggatatgctcgcgaaaccgcaccaacggctcactaaatatcccttactgctgaaatccgtgctgcggaagacagaggagccgcgcgctaaagaagccgtggtggcaatgatcgggtctgtggagaggtttatccaccatgtgaatgcctgtatgcgacaacggcaggagcgccagaggctcgcagctgtcgtgtctcggatagatgcatacgaagtggtggaatcctcgagcgacgaggtggacaagctcctcaaagagttccttcatcttgacttaaccgcacccatccctggggcgtcccctgaggagactaggcagcttctcctggaagggagcctgaggatgaaggaggggaaggattccaaaatggatgtgtactgctttttatttaccgatcttctgcttgtgaccaaggccgtcaagaaggcagagcgaacccgagtgatccggcctccgctgctcgtagataagattgtctgcagggagctacgtgacccagggtcattccttttaatctacttgaatgaatttcatagtgctgtcggcgcctatacctttcaggctagcgggcaggcactgtgcagagggtgggttgacaccatctataacgcacagaaccagttgcagcagctgcgggctcaggagccaccgggaagccagcaacctctgcagagtctcgaagaggaggaagacgaacaagaagaggaggaagaggaggaggaagaagaggaggagggggaagacagtgggacctccgccgcgtcctccccaaccataatgcgcaaaagctcagggagtcctgacagccagcattgcgcctccgatggtagtacagagaccctcgctatggtcgttgtagagcccggcgataccctgtcctctcctgagttcgatagtggtccattctcatctcagagcgacgagacatctctgagcaccacagcatccagcgcaacccccacatctgaattgttgcctctagggccggttgacgggcgctcctgttccatggatagtgcctacggcactttgagccccacgtccctgcaggatttcgtggcaccaggccccatggcggagttggttcccagagcccccgagagcccacgcgttccatcaccccccccctcaccacgattacgcagacgtacccctgtccagctgctgtcctgcccacctcacctgctgaagagcaagtctgaggcatcccttctgcagctgctggccggcgcaggcacgcacggaactccttctgcaccgtctcgttctctctcggaactctgccttgctgtcccggccccaggaatacgtacacaggggtcaccacaggaggcaggccccagttgggactgtcggggtgctccgagccctgggtcaggaccaggcctcgtgggatgccttgccggagagccagcaggttcccatcgtaagcgctgtggagatctgccctcaggggcctctccacgagtccagcccgagcctccgcccggagtgtccgctcagcatagaaagttgaccctggcccaactttacagaatccgcactacactgctgctcaatagcacactaaccgcctctgaggtctag

SEQ ID NO: 128984 - DNA, 2559 bp, synthetic construct
  misc_feature 1..2559: note = Description of Artificial Sequence: Synthetic coding sequence
  source 1..2559: mol_type = other DNA
atgaattcagtgctaacaaagcatggtagtccaccgaggtcctggctctccctgtgtagtggcacagacgaccagtctcctgctgagaagaagggtctgcggtgtcagaacccggcgtgcatggacaagggacgagcagctaaggtgtgtcaccatgcagactgtcagcaacttcatcggagggggcctttgaacttatgtgaagcctgcgactcaaagttccacagtactatgcattatgacggtcatgtgcgattcgatctgccgcctcagggaagcgttttggcgcgcaacgtctctactcggagctgtccgcctaggacatcccctgccgtggatcttgaggaggaggaagaggaaagctctgtggacgggaaaggcgatcgaaagtcgaccggattgaaactgtcaaaaaaaaaggctagaagaaggcatacagacgatccatctaaggagtgcttcacccttaagtttgacctgaacgtagacatcgaaacagaaattgtgccagccatgaaaaaaaagtcactgggcgaggttctgctacctgttttcgaacgcaagggaatcgcactagggaaagttgacatctatctggatcaatccaacaccccactgagtttaacctttgaagcgtatagattcggtggacattacctgcgcgtgaaggcccctgccaagccgggagacgagggcaaggtggagcaggggatgaaggattccaaatcactgagcctgcctattctgcgtcctgcggggactggccccccagccctcgagcgtgtcgatgcacagagccgacgagagtccctggacatcctagcccccggtaggcggcgaaagaatatgtcagaattccttggggaagcctccataccgggacaggagccgccaacaccgtcttcttgctctttaccatctggtagctccggatccaccaatacaggagactcttggaagaatagggccgctagcaggtttagcggattttttagttctgggccatctacttcagccttcggtagggaggttgataagatggagcagctggagggaaagttgcatacatacagtttgttcgggctgccgcgcctgcccagggggctgcggttcgaccacgacagctgggaagaggaatacgatgaggacgaagatgaagataacgcgtgtttgcgcttggaagactcctggcgagaacttattgacggacatgagaaactcacacgccggcagtgccaccagcaggaagccgtgtgggaactgctacatactgaggctagttatattcgcaagttgcgcgttatcataaacctgttcctttgttgtcttctgaatttgcaggagagcggcttgttgtgcgaggtggaagccgaaagactgttttctaatattccagaaatagcacagcttcatcgacgcctctgggctagcgtgatggctcctgtacttgaaaaagctcggcggactcgggccctgctccagcccggagatttcctaaaaggatttaagatgttcggaagcctgtttaagccctatatccgctactgcatggaggaagaaggctgcatggagtatatgaggggcctgctgcgggacaacgatctcttccgggcgtatataacctgggcagaaaagcaccctcagtgtcagcgacttaaactatctgatatgctggctaagccacaccagcgtctcacgaagtaccccctcctgttgaagagtgtgctgagaaagactgaggaaccgcgtgctaaggaggcagtggtggccatgatcgggtctgtcgaacgattcatccatcacgttaacgcatgcatgagacaacgccaggaaagacagcggcttgcagccgtggtgtcacgaattgacgcgtacgaagtggtcgaaagttcatccgacgaagttgataaattgctgaaagagttcctgcatctcgacctgacggccccgatccccggggcctctccagaggaaacgcgccagcttctcctggagggctccctgagaatgaaggaggggaaggatagcaagatggatgtgtactgcttcttgtttactgatctgctcctggttactaaagcagttaaaaaggcagaaagaacgagagtgatccgacctcctctcctggttgacaagattgtctgtagagagctgcgggacccagggagctttttgctgatttacctgaatgagttccatagcgccgttggcgcgtatacattccaggccagtggccaggccctgtgtagggggtgggttgacaccatttataacgctcagaatcagctgcaacaacttagagcccaagaacctcccggctctcagcaaccgcttcaatccctcgaagaggaagaagatgagcaagaagaggaggaggaggaagaggaagaagaggaggagggtgaggatagcggcacgtccgccgcatccagcccgacaataatgcggaaatcaagcggctcccccgatagtcagcattggaagctaactttagcgcagctgtataggatcaggacaactttacttctcaatagtaccctcaccgcttctgaggtgtag

SEQ ID NO: 128985 - DNA, 3252 bp, synthetic construct
  misc_feature 1..3252: note = Description of Artificial Sequence: Synthetic coding sequence
  source 1..3252: mol_type = other DNA
atgaattccgtgctcacgaaacatggctcccctccacgatcttggctgtcactgtgctcaggcacagacgaccagtcgcctgctgaaaaaaagggccttaggtgtcagaatcccgcatgtatggacaaaggcagagcagctaaagtgtgtcaccatgctgactgtcagcagctgcatcggcgtggacccctgaacttatgcgaggcatgcgactcaaaatttcatagcactatgcattatgacgggcatgtgcgatttgacctaccccctcagggatctgtgctggctcggaatgtttcgacacggagctgcccgccacgtactagcccagcggtggacctggaggaagaagaggaagagtcctctgtcgacggaaagggggacagaaaaagtacaggcctgaagctcagcaaaaagaaggcccggagaaggcacaccgacgaccctagtaaggaatgctttactctgaagtttgacctaaacgttgacatcgaaacagagatagtacccgctatgaaaaaaaaatccctcggcgaagtgctgttgcctgtctttgagcggaagggtatcgcactgggcaaagtagatatctacctcgatcagagcaacacaccgctctctcttacgtttgaagcctacaggtttggtgggcactatctgcgggtcaaggccccggccaaacctggggacgaaggcaaggtagaacagggtatgaaggacagtaaaagtctgtcactgcccatactgagacccgctgggactggcccacccgctctggaaagggtggacgctcaaagccggcgggagtcactggatatcctggcgccagggcgcagacgcaagaacatgagcgagtttctcggcgaggcttcgattcctggccaagagcctccaacaccgtcgtcgtgttctctgccttcaggatcatcaggaagcaccaacaccggagacagttggaagaatagagccgctagccgatttagcggattcttctcttccggcccgagcacatccgcattcggccgcgaagttgataaaatggaacagcttgagggaaaacttcatacatatagtctgttcgggctaccccggctgcccagaggcctgaggttcgaccacgactcctgggaggaagaatatgacgaagacgaagacgaagacaatgcttgtttgcgcctggaggattcatggagagaactcattgatgggcacgagaaactgactcgacgtcagtgccaccagcaggaggccgtgtgggaactgctgcatacggaggcctcatatattcgaaagcttcgggtgatcatcaatctgtttctatgttgtctgctgaatctccaggaaagcggcctcctctgcgaggtcgaggccgagcgcctgttcagtaacatacccgagatagctcagcttcatagaaggctgtgggcaagtgttatggcacccgtgttagaaaaggcacgccgcactagagcactactgcagcctggcgatttcctcaaagggttcaaaatgttcggctcccttttcaagccatacattaggtattgtatggaggaagaggggtgcatggaatatatgagaggcctgctgcgcgacaatgacctttttagggcttacattacatgggcagagaagcatccccagtgtcaaaggctcaagctgtcggatatgcttgcaaaaccccatcagaggctcacaaagtacccattactcctgaagagcgtactgaggaagacagaagaacccagagccaaagaggctgtcgtggccatgatcggctcagtggagcgcttcatccatcacgtcaatgcgtgtatgcggcagcggcaagagagacagcgcctggccgcagttgtgtcacgtatagacgcgtacgaggtcgtggaatcatcgtctgatgaagtggacaagctgctgaaggaatttctccacctggacctgaccgcacctatccccggggcaagtccagaagaaacaaggcagctgctgctggaaggatcccttcgaatgaaggaaggcaaggactctaaaatggacgtgtattgctttctgtttactgatcttctattagttaccaaagcagttaaaaaagccgaaagaacacgagtgatccggcccccactcctggtggacaaaatcgtctgtagggagctccgcgacccagggtccttcctgctcatctacctaaatgaatttcatagcgcagtgggtgcatacacctttcaggccagtggccaggcactctgccgaggatgggtggacactatttataacgcacaaaatcagctgcagcaattaagagcacaggagcccccaggttctcagcagcccttacaatccctagaggaagaggaggacgaacaggaagaagaagaggaagaggaggaggaagaggaggaaggcgaagattccggtacatcagccgctagcagcccaacaatcatgcgcaagagctctgggagtcctgattcccagcactgtgcatcagacggcagtaccgaaactctggccatggttgtcgtagagcccggagacactctgtccagtccagagtttgactccggacccttctctagccagagcgatgaaacttcattgtccaccactgcctcatccgctacaccaacttccgagttgttgcctttgggcccggtggatggcaggtcatgttctatggactcagcgtacggtactctttcacccacatccctgcaggacttcgtcgctcccggccccatggccgagttggtcccaagggcccccgagtcacctcgggtcccaagccctcctccctcccccaggttgcgacggagaactccagtgcagctcctctcctgccccccacacctgcttaagtccaaatccgaagcatctctgcttcagcttctggctggggctgggacacatggaaccccatccgcccccagccgcagcttgagcgagctgtgtctagctgtgcctgcccccggcatcagaacccagggctcgccacaagaggctggcccaagctgggactgccgcggtgccccctcacccggatctggcccgggtctggttggctgtttggctggagagccggctggctcccatagaaagcgttgtggagatttaccatctggagcgagtcctcgagtccagccggaaccaccacccggtgtgagtgcccaacatcggaaactgactctcgcccagctgtaccggataagaacaaccctgctactaaatagtaccctgaccgctagcgaggtctag

SEQ ID NO: 128986 - DNA, 3021 bp, synthetic construct
  misc_feature 1..3021: note = Description of Artificial Sequence: Synthetic coding sequence
  source 1..3021: mol_type = other DNA
atgcactatgacgggcatgttaggtttgaccttcccccacagggtagcgtcctggcacgcaacgtatcgacccgtagctgccctcctagaaccagccctgccgtcgacttggaggaggaggaagaggagagttccgtggacggtaaaggcgacagaaaaagcaccggcttgaaactaagtaagaagaaagcccgacgacgtcatacagacgacccctctaaagagtgcttcacgctgaagttcgatttgaacgtggatattgaaacagaaattgttcccgccatgaagaaaaagagtctgggggaggtcttgctccctgtgtttgaacgaaaggggattgcactcggcaaggtggacatttacttggaccagagtaatacccctctgtcgcttacttttgaggcctatcggttcggcggccattacctgcgcgttaaagcacccgccaagccgggcgacgagggaaaggtggagcaagggatgaaggatagtaagagtttatccctgccaattctgcggccagctggcaccggcccacctgctctggaacgtgttgacgctcaatcccggcgagagtcattggacatactagcgccagggcggcgcaggaagaacatgtccgaatttctgggtgaagcatctatcccaggacaggagccacctacaccatcttcctgtagccttccatctggctcatctggcagcactaacacaggggactcttggaaaaaccgcgctgcctcaaggttctctggtttcttctccagtgggccatcaacgtccgcatttggaagggaggtggacaagatggagcagctcgagggcaagttgcatacctactccctgttcggcctgccgaggctgcccagggggctcagattcgatcacgacagctgggaggaagaatacgacgaggacgaggatgaagataatgcctgcctcagactggaggacagttggcgcgaactgatcgacggccacgagaagctgaccaggcgtcagtgccaccagcaggaggcggtgtgggagcttctgcataccgaggcctcttatatcaggaaattacgtgtgatcatcaatttattcctgtgctgtttactcaacctacaggagtccggcctactttgcgaggttgaggccgaaagactgtttagtaatattcctgagatagcccagctgcacagacggttgtgggcatctgtaatggcgccagtgctggaaaaagccagaagaaccagggccttactccagcccggcgatttcctgaagggattcaaaatgttcgggtcactgttcaagccctacattcggtattgcatggaagaggaaggctgtatggagtacatgcggggactgcttagggacaacgacttgttccgtgcctacataacctgggccgagaagcatccacagtgccaaagactgaagttaagcgatatgcttgccaagccacatcaacgcttaaccaaatacccactcttgctaaaatccgttcttcgcaagactgaagagcccagagcaaaggaggcagtggtagctatgatcggttccgtcgaacggttcatccaccacgtgaacgcttgtatgagacagcggcaggagcggcagaggctggcggctgtagttagtcggatcgacgcttatgaggttgtggaatcttcaagcgacgaagtggacaaattgctgaaggaatttttgcacttggatctgaccgcccccatccccggggcctctccagaggaaacaaggcagctcttgctggagggttcactgaggatgaaagagggtaaggacagcaaaatggatgtgtactgtttcctatttactgatctgttgcttgttaccaaagccgtgaagaaggccgagcgcacccgagttatcagacctcccctgctggtcgataaaattgtgtgtcgagagctccgggatccggggtcattcctcctgatttacctaaacgagttccattccgccgtcggagcatatactttccaggcatcaggacaggccctgtgtaggggctgggtggatacgatatataatgcacagaaccagctgcagcagttgcgggcacaagaacccccaggctctcaacaacccctgcagtccctagaggaagaagaagacgagcaggaagaagaagaggaggaggaggaggaggaggaagaaggcgaggactccgggacctcagcagcctcgtcgccgactataatgcgcaagagctctggctcccccgatagtcagcactgcgccagcgatggctcgacagagactcttgccatggtggtggttgagccaggtgacactctctccagccccgagttcgattccggacctttctcgtctcaaagtgacgagacttctctgtctacaactgcctcatccgcgactcccacaagcgaattgctcccgcttggacccgtcgatggcaggagttgctctatggactcggcctacggtacactctccccgaccagtctacaggatttcgtggccccgggccccatggcagagctggttccgcgcgcccccgagtcaccacgcgttccctccccacctccctcacccaggctgcggcggagaacaccagttcagctgctctcctgccccccccatcttttgaagtccaagtccgaggccagcttgctgcagctgctcgcaggggccggtacccacggaactcctagcgctccatctaggagcctctcggaactgtgcctggctgtccccgctcctggcatccgaacacagggtagcccgcaggaggcaggaccgagctgggattgtaggggcgctcctagccctggaagcggtccaggcctggtagggtgcttagcgggagagcccgctgggagtcaccgcaagagatgtggagatcttccgagtggagcgagccctcgcgtacagcccgagccgcctcctggagtgtctgcccaacatcggaaattaactctagcccagctgtatagaatccgaaccactctcctcttaaatagcaccttgacagctagtgaggtctag

SEQ ID NO: 128987 - DNA, 3189 bp, synthetic construct
  misc_feature 1..3189: note = Description of Artificial Sequence: Synthetic coding sequence
  source 1..3189: mol_type = other DNA
atggacgatcagtcacctgcagaaaagaaggggttacgatgccaaaatcctgcctgcatggataagggtagggccgccaaggtgtgtcatcatgccgactgccagcagcttcatcgtagagggccgcttaatctgtgcgaagcgtgtgattctaaatttcacagcacaatgcactatgacgggcatgtgcgattcgatctgcctccccagggatcggtgctggcccggaacgtctcaacaaggtcttgtccgccccgcacatctcctgccgtcgacctggaagaggaagaggaggagtctagcgtggatgggaagggagacagaaaaagcacgggacttaaactgtcaaaaaaaaaagcacggcgccgacacaccgacgatcccagcaaggagtgtttcacactcaagttcgacctcaacgtggatatagaaactgaaatcgtgcctgctatgaaaaaaaagagtctgggcgaagttttgctccctgtgttcgaaaggaaaggaatcgccctcggcaaggtggatatatacctggatcagagtaatacacccctgagcttgactttcgaggcatacagatttggcggtcattatctcagggtaaaagctcccgctaaaccaggcgatgaaggtaaggtcgaacaaggcatgaaggacagcaagtctttatctttaccaatcctaagaccagcaggaacaggcccgccagcgctggagagagtggatgcacagtctagacgagagagcctcgacattctcgcaccggggcgccggcgcaaaaacatgtctgaattcctgggggaagcaagtattcctggacaggaaccccccactccctcatcatgctccctcccttctggaagttcgggttctaccaacaccggagactcctggaagaaccgggcggcttctcgcttcagcggatttttctcttccgggcccagtacttctgccttcggacgggaagtagacaagatggaacagctggagggcaaattacacacatactcactgttcgggctgccccgcctcccacgcggcctgagatttgatcatgatagctgggaggaggaatacgatgaggatgaggatgaggacaacgcctgcctacgactggaggacagctggagggagctcatagacgggcatgagaaattgacaaggcggcagtgccaccagcaagaagcagtctgggagcttctgcatacagaggcttcttacatacggaaactcagggtcattatcaacctgtttctctgttgtctcctgaacttgcaagaaagcgggttactgtgcgaggttgaggcagaaaggctgtttagcaatatacctgaaatcgctcagctgcacagaagactctgggcttccgtgatggctccagttctggagaaagctcgtcgcaccagggccctgctacagcccggggattttctgaaaggttttaagatgtttggaagcctttttaaaccttacatcaggtactgtatggaggaggaaggctgcatggagtacatgagggggctgctgcgtgataatgatctgtttcgtgcctatattacatgggccgaaaaacacccgcagtgtcaacgtctgaagctgtccgacatgctggccaaacctcaccagagacttacaaagtatcccctcctgctaaaaagcgtcctgcgcaagacggaggaaccgcgggcaaaggaagcggttgtcgcaatgatagggtctgtcgaaagatttatccatcacgtcaatgcctgcatgcgccagcggcaggagcggcagcgcctggctgccgtggtcagtcgaatagacgcatatgaagtagtggaatcatctagcgatgaggtggataaactactgaaagaattcctccacttggatctgacagcgcctattccaggagcttcaccagaggaaaccagacagctcttactggagggcagcctgcgcatgaaagaaggaaaagactctaaaatggatgtgtattgttttttgtttactgatctcctgcttgtaactaaggccgttaaaaaagcagagagaactagagtaattcgccccccactcctggtcgacaaaattgtttgtagagagctcagggaccctggctctttcctcctaatctacttgaatgagttccattccgcggtgggcgcatacacttttcaggcttccggccaggctctctgccgggggtgggtggacactatctacaatgcccagaaccagctgcaacaactcagggcgcaagagcctcccgggtcccagcagcccctacagtctttggaagaagaagaggatgaacaggaggaagaagaggaagaggaggaggaagaggaagaaggtgaagactccggcacgtcggccgccagtagcccaacgatcatgagaaagtccagtgggtcccccgacagccaacactgtgcctcggacgggtcgacggagacgttggccatggtggtagtggaaccaggcgacacactgtcctctcccgaatttgatagcggtccattcagttcccagagcgacgagaccagtctgtccaccaccgccagtagcgctacacccacctccgaactcttgccgctcgggcccgtggatggccgatcttgctcaatggattcagcgtacggtacattgagtccgacttcccttcaggatttcgtagctccggggccgatggccgagctcgtgcctcgggcccctgagagtccgcgagtgccatcacccccacccagcccacgactgcgccgccgaaccccagtgcagttattgtcctgccccccacatttgctgaaatcaaaaagcgaggcttcactcttgcaactgttggcaggggcagggactcacgggacgccctccgctccctcgcggtccctttctgagctgtgtctggcggttccagctcccggtatacgcactcagggaagtcctcaggaggccgggccatcgtgggattgtaggggtgctccatctcctggaagtgggccaggattggtgggatgccttgcgggtgaaccagccggatcccaccggaagcggtgcggcgaccttccaagtggagctagccctcgtgtgcagccagagcctcccccaggagtctccgcccagcaccgtaagctaaccctggcccagttatatcgcatcagaaccacgctcctgctcaattctactttgacagcctccgaggtatag

SEQ ID NO: 128988 - DNA, 3228 bp, synthetic construct
  misc_feature 1..3228: note = Description of Artificial Sequence: Synthetic coding sequence
  source 1..3228: mol_type = other DNA
atgggcaccggtccgggagtctctgggaggctagctgctagcaggcccggacctggcttgcccttgagggattctgagccttcatgggccggcggaagggccagggatggtgattcgcaggtgtgtcaccacgcggactgccagcagctccatcggcgcggccctctgaacctctgcgaagcttgtgacagcaaattccattccacaatgcactacgatggtcacgtgcgtttcgacctcccgccccaggggagcgtgctggctaggaacgtcagcacccgtagttgccccccacggacatcaccagccgttgaccttgaggaagaagaagaggagagcagtgtcgacggtaagggtgatagaaaatcaacaggcctcaagctctctaagaagaaggcaaggaggaggcataccgatgaccctagtaaagaatgctttactctgaagttcgatctgaacgtcgatatcgagaccgaaatcgtacctgccatgaagaaaaaatctctgggggaggtgctgctgcccgttttcgagcggaagggaatagccctcgggaaggtcgatatctatctggaccaatccaacactccgctttcgcttacattcgaagcatacagattcggtggacattatctcagggtaaaggccccagcaaagcctggggacgaggggaaagtggaacagggtatgaaggacagtaagtccttaagccttcctattttgcgacccgctgggaccggaccaccggccctggaacgcgtagatgcacagtcaaggagagaatctctggacatcctggcaccaggcaggcggcgtaagaatatgagcgaatttctgggcgaggcctccatacccgggcaagagcccccaaccccctcttcctgtagcctgccgagcggttctagtggaagcactaataccggtgactcttggaagaaccgggccgcttctaggttctccggtttcttctcctccgggccaagcacctctgcattcggtagggaagttgacaaaatggagcaacttgagggcaagttgcacacatatagcctttttggcttgccccggctcccaagaggactacggtttgatcatgactcctgggaggaggaatatgatgaggatgaagatgaagataacgcctgcctgcggcttgaggacagctggcgggaactcattgacgggcatgaaaagctgaccagaaggcaatgccaccagcaggaagccgtttgggagctcctccacaccgaggcgagttacataaggaagttgagagtaattataaacttattcctgtgctgtctgttgaaccttcaggagtccgggctgctgtgcgaagtcgaggctgagcgtttattcagtaatattccagagatagcacagctgcatcgacggctgtgggcttccgtgatggcacccgttctggagaaggctaggcgtacccgtgcgcttttacaaccaggcgattttctgaaggggttcaagatgtttggctccctgtttaagccctatatcaggtactgcatggaggaagagggctgcatggagtacatgcgaggactgctgagggataacgacttgttcagggcatacatcacctgggccgagaagcatcctcagtgtcagcgcctgaaacttagtgatatgttggctaaaccacatcaaaggctgacgaagtaccctctcctccttaagtccgtacttagaaagactgaagaaccaagggctaaagaagccgtagtcgctatgattggatcagtggaaaggtttatccatcacgtcaatgcgtgcatgcggcaacggcaagagagacaaaggcttgcagccgtggtcagtcggatcgatgcttatgaggtggtcgaaagttcttctgacgaggttgataagctgctcaaagaattcctgcacctcgatctgacagcgcctatccctggcgccagtcctgaagaaacacgccagcttctgctagaaggctccctaagaatgaaggaaggtaaagattcaaaaatggacgtgtattgcttcctgtttacggaccttctgttagtgactaaagccgtgaagaaagcagagcgtacgcgcgtcatcaggccacctctgctggtggacaagatcgtctgccgcgaactgagggatccagggtcatttttactgatttatctgaatgaatttcactccgccgtgggcgcctatactttccaagccagcggtcaggctctgtgccgtggatgggtggacacgatctataatgcacagaaccagttgcagcaactgagggcccaggagcctccaggttctcaacaaccgcttcagtccctggaggaggaagaagacgagcaggaagaagaggaagaagaggaggaggaggaggaagaaggagaagacagtggtacttctgccgcatctagcccaacaatcatgaggaaatcgtccgggtctcctgactctcagcactgcgctagcgacggcagcaccgaaactctggccatggtggtggtcgaacctggcgatacactctcaagccccgaattcgactccggcccattcagtagccagtccgacgagacatccctatccacaacagcaagtagtgctacaccaaccagtgagctgctcccgctcgggccagtcgatgggcgtagttgttccatggactctgcctacggcacattgagcccaacctctctacaggacttcgtagctcctggccctatggctgagctggttccccgggcccccgagagcccacgcgtgcccagcccacccccctccccacggcttagaaggcggactcccgtgcagctattgagctgtccgcctcatttgctcaaaagcaagtctgaggcctcattgctacaactcttggccggcgctggtacgcacgggactccatcagctcctagcagaagtttgtctgagctatgtctggctgtgccagcccctgggattaggactcaggggtcgccccaagaagcaggacctagctgggattgcagaggcgcaccatcccctggaagcgggccaggcttggtgggatgcctggcgggggaaccagccgggagccatcggaagagatgcggcgatcttccatccggggcatcaccccgcgtgcagccagagcctcctcccggagtttcagcacaacataggaagctcactttggcccagctgtatcgcattagaactacactgctgctgaactctaccctgaccgctagcgaggtttag

SEQ ID NO: 128989 - DNA, 2739 bp, synthetic construct
  misc_feature 1..2739: note = Description of Artificial Sequence: Synthetic coding sequence
  source 1..2739: mol_type = other DNA
atgaagaagaagtctctcggcgaggtgcttttgcctgtatttgagcgtaaggggatcgcgctggggaaggtggatatttatttggatcagagtaacacacccctgtccctgacctttgaagcctaccgtttcggtgggcattacttgcgggtaaaggcgcccgctaagcctggcgacgagggcaaggtggaacaggggatgaaagactccaaatccctgagcctgccaatactacggccagcaggcactggccccccagcactggagagagttgatgcacagtcacgcagggaatccttagacattctcgcccctggccggagacggaaaaatatgagtgagttcctgggcgaagccagcattccaggccaggagccccctaccccctcttcctgcagccttccctccggatcaagtggatctactaatactggggattcttggaagaacagggccgcctctagattctcggggttcttctcgtctgggccttcgacttcagctttcgggagagaagtggataagatggagcagttagagggaaaactccacacctattctcttttcggccttccacggttgcccaggggtctccgattcgatcatgattcttgggaggaggagtacgatgaagacgaggatgaggacaacgcttgtctcagattggaagacagctggagggagctgatcgatgggcacgagaaactgacgcgtcgtcagtgccaccagcaggaggccgtctgggagttgctacataccgaggcctcttacatccggaaactgcgcgtaataattaacctgttcctatgctgtctactaaacctgcaggagagcgggcttctgtgtgaggttgaggcagaaagacttttctccaacatcccagagattgcccagctccataggagactgtgggcttccgtcatggctcccgtgctcgagaaggcaagaagaaccagagctctattgcagcccggagattttctgaaaggctttaaaatgttcggctccctctttaagccgtacattagatactgtatggaagaagagggctgtatggagtatatgcgcggcctgctgagggataatgatttatttagagcgtatatcacttgggcggaaaagcacccacagtgccagcggctgaaactcagcgacatgctcgccaaaccccaccaacgtctcaccaagtatcccttgcttcttaaaagcgtactgcgaaaaaccgaggaacctagggccaaggaggctgtggttgcgatgatcggaagcgtggagcgtttcattcatcatgtaaacgcttgtatgcgccagcggcaagagcggcaaaggctggctgcggttgtttcaaggattgatgcatacgaagttgtcgagagctctagtgacgaggtcgacaaacttctaaaagaattcctccatctagacctcacagcacctattcctggagcttcgcctgaggaaaccaggcagttgttgctggaaggcagcctgaggatgaaagaaggcaaggactccaagatggacgtgtattgttttctttttacggacctgttactcgtgacgaaggcggtgaagaaagctgagcgaacccgcgtaatacgcccaccactcctcgtcgataagatcgtgtgccgggagctgagggatccaggtagttttttgctgatctatctgaacgagttccattccgcagttggcgcctacacctttcaggcatcaggacaggcactctgtcgcggctgggtcgatactatctacaacgctcagaaccaactgcagcaactgcgggcccaggagccacccggatctcagcagccactgcagagcttagaggaagaggaggatgaacaagaggaggaggaagaggaagaggaagaagaggaggagggagaagatagtggaaccagtgctgcatcgagccctactattatgaggaagtccagcggctcgccggattcacagcattgtgcctcagatggctcgaccgagactttagcgatggtcgtagtcgagcccggcgatactctgagtagtccagagtttgactccggaccgttttcgtcccagagtgacgaaacgagtctgtctaccacagcttccagcgcgacccctacaagcgaactgttgcccctcggccccgtggatggtaggtcctgtagcatggattctgcttatggaaccctatcacctacctccttacaggatttcgtggcccctggcccaatggctgaactggttccccgagcccctgaatcaccgcgggtgccatcccctcctccatctcccaggctgcgccggcgcactccagtgcagctcctgagttgccccccccaccttctaaaatctaagagcgaggcctcactcctgcagctgttggctggagccgggactcatggaactccgtccgcacccagccgatcgttgagtgaattgtgcctggctgtgccggcgcctggaatccggacccagggatccccacaggaggcgggcccctcatgggattgccggggcgctccaagccccggatcggggccaggactcgttgggtgcctagccggcgagccggcgggttcacacaggaaacgttgcggggatcttccaagtggagcctccccccgtgtgcagcccgaacccccccctggcgtgtctgctcaacaccggaagctgacactggctcagttgtatagaatccggacaactctgctcctcaatagcacgcttacagcttctgaagtgtag

SEQ ID NO: 128990 - DNA, 3258 bp, synthetic construct
  misc_feature 1..3258: note = Description of Artificial Sequence: Synthetic coding sequence
  source 1..3258: mol_type = other DNA
atgtcactaggtgagagaggatcccctcaaacatttggaggcagttccgtcagcaaaggtagcgatgccggccacgatcagtcacctgccgagaaaaaggggctccgttgccagaatccagcatgtatggacaagggcagggccgcaaaagtttgccatcacgccgattgtcaacaactgcatagacgaggccctctgaatctgtgtgaggcttgcgactcgaagttccacagcaccatgcattacgatgggcatgtgaggttcgacctgccaccccagggaagcgtgctggcccggaatgtgagcactcggtcatgcccaccaagaacatcccccgctgttgatctcgaagaggaggaggaggagagctctgtggatggcaagggggacaggaaaagcacgggccttaagttgtctaaaaagaaagccaggcgccgccataccgatgaccctagcaaggagtgcttcacccttaaatttgacctaaatgtagatatcgagactgagattgtgcctgcaatgaagaagaaaagcttgggagaggtcctgctgcctgtctttgaacgcaaaggtattgccctggggaaagtcgacatatacctggatcagagcaatacaccgctgtccctaacattcgaggcctatcgctttgggggacactaccttcgcgtgaaggcgcccgcaaagcccggagacgagggaaaagtggagcaagggatgaaggactctaagagcttatcacttccaatattgcggcccgccggaacaggcccacctgccttagaaagagtggacgcgcagtccagacgcgagagcttggacattttagctcccgggcgtcgccgcaaaaatatgtccgaattcttgggtgaagcctctattccaggacaggaaccccccaccccctcttcatgttctcttcctagtgggtcttcaggttcaactaataccggtgattcatggaagaatcgcgctgccagtcgcttttctggcttcttcagctctggcccaagcacatcagcgttcgggcgggaggttgataagatggagcaactggaaggcaaactccacacctacagcttgtttgggctgccaagactgccgagaggcctgcgatttgaccatgatagctgggaggaggagtacgatgaagacgaagatgaggacaacgcatgcctgcggctagaggactcatggcgtgagctcatagatggtcatgaaaagctgaccaggaggcaatgtcatcagcaggaggctgtatgggagttgctccacaccgaggccagctacatcagaaaattgagggtcattataaatctgttcctgtgttgcctcctcaaccttcaagagagtggactcctttgcgaggtagaggcggagagattgttttctaatattcctgagatcgctcaacttcacagaagactgtgggcctccgtgatggcacctgtcttggagaaagctcgacggactcgggccctactccagccaggtgactttctgaagggcttcaagatgtttggaagtctctttaagccttatatccgttactgtatggaagaggagggatgcatggaatatatgcgggggctcctgagagacaatgatctcttccgcgcatacatcacctgggctgagaagcatcctcagtgccagagattaaaattaagcgacatgctggcaaaaccccaccagcgactcacaaaataccccctcttgctgaagtccgtgttacggaagacggaggaacctcgcgccaaggaggccgttgtggcgatgattgggtccgttgaaaggttcatacatcacgtgaatgcctgcatgcgccaacgacaggagagacagcgcctggctgcggttgttagccggatcgatgcctacgaggtggttgagagctcttcggacgaagtagacaagcttctcaaggagtttctgcatttggacttgaccgccccaataccaggtgctagtccagaagagacgcgtcaactgctgcttgaaggaagtctgcgcatgaaggaggggaaggacagcaagatggacgtctattgctttctctttactgatctgttattggttaccaaggcagtgaagaaggccgagcgtacacgtgtcataagaccaccactactggtggacaaaatcgtgtgtcgcgagctgagggacccgggctccttcctgcttatttatctgaatgaatttcattctgctgtgggcgcgtacacttttcaggctagcggacaggccctctgtcgggggtgggtggacacaatctacaatgcccagaatcagttacaacaattgagggcacaggaaccgcctggatcacaacagccattgcagtcccttgaagaagaagaggacgagcaggaagaggaagaggaggaagaggaggaagaggaggagggcgaagacagcggcacttcagcagcgtctagtccaactattatgaggaaatcatcggggagtcctgactcacagcattgcgccagcgatgggtcaacagagacgctggctatggttgtagtggagcccggtgacacacttagctcacccgaattcgacagcggacctttctcttcccagtcggacgaaacttccctctcaacaacagcctcatcagctacaccaacatctgagctcctcccactggggcctgtggacggccggtcgtgctccatggacagtgcttatggaaccctgtcacccacaagtttacaggacttcgtggcgcccggccctatggctgagcttgtcccccgcgcacctgagagtccacgcgtgccatcccctccaccttctcccagactgcgaaggcgtacccccgtccagctcctctcatgccctcctcacttgttaaaatctaagtcagaggcttcgctgttgcagctgctagccggggcagggactcacgggactccttccgcacctagcagatccctgagtgagctgtgcctggccgtgcctgctccaggaatccggacgcaggggtcacctcaagaggctggcccaagttgggattgccggggtgcgcccagccccggtagcggcccgggactggtgggctgccttgccggggagcccgcagggtcacaccgcaagcgctgcggggacctcccctccggcgccagcccacgggtccagccagagcccccccctggcgtgtccgcccagcatcggaagcttacattagcgcaattgtaccggataaggactactctccttctgaactccacgcttaccgcaagcgaagtatag

SEQ ID NO: 128991 - DNA, 2793 bp, synthetic construct
  misc_feature 1..2793: note = Description of Artificial Sequence: Synthetic coding sequence
  source 1..2793: mol_type = other DNA
atgcattacgacggccatgtaaggtttgatctgccgccccaaggctcagtcctcgctcggaatgtgtctacaaggagctgccctccccggacatcccccgctgtggaccttgaagaagaagaggaagagtcctctgtcgatggtaaaggggatcggaaatcgactggactgaaactctccaagaaaaaagctaggagaagacacactgacgacccctccaaggagtgctttactctgaaatttgatttgaacgtggacatagagaccgagattgtgcctgctatgaagaaaaaatcgctgggagaggttctcctgcctgtgttcgagcgtaagggcatagccctgggcaaggtggacatctatttggaccagtcaaatactcccttgtccctgacttttgaagcctatcggtttggcggccattaccttcgtgtaaaggcacccgccaagccaggtgacgaagggaaagtcgaacagggtatgaaggatagcaagtctttgtctctccctatcctaagaccagcaggcacggggccgccagcgttggaacgcgtggatgcccaatccagacgtgagtcactggacatccttgcgcccggtagacgaaggaaaaatatgtccgagttccttggggaagctagcattcctggccaggagccacctactccctcctcatgcagtctgcccagtggatcctccggaagcactaatactggcgatagctggaagaaccgggccgcttcaaggttctcaggctttttctcttctggcccgagcacctcagcgtttgggcgtgaagtagataaaatggaacaactagaagggaaactccacacttatagtttgtttggactcccccgtctgccacggggcctgcgcttcgatcacgacagctgggaagaggagtacgatgaagacgaagacgaagacaacgcctgcttaaggttggaagacagttggcgggaactaatagacgggcacgaaaaactgacgcgccgccagtgccatcaacaggaggcagtgtgggagctgctgcacacagaggcctcatatatccgaaagctgcgggttatcatcaatttgttcctttgttgccttctgaacctacaggaaagcgggctcctgtgtgaagtggaagcagaacggctgttttctaatatccctgaaatcgcccagctccaccgccggttatgggcctccgtgatggctccagtcctggagaaagcacgacgcacccgggcactgttgcaacccggtgatttcctgaaaggattcaagatgttcggcagtttgtttaaaccctatataaggtactgcatggaggaggaagggtgtatggagtacatgagagggctgctccgtgacaatgacctgttccgcgcttacattacttgggcggagaagcacccccaatgccagagactgaagctgtctgacatgctcgcaaaacctcatcagaggctgaccaagtacccactgctccttaaatccgtgctgaggaaaactgaggagccacgggccaaagaggccgtggtggccatgatcggttccgtagagcggttcattcaccacgtcaatgcctgcatgaggcagcgacaggaacgacagagattggcagccgtcgtcagtaggatcgacgcctacgaagtggtcgaaagcagctccgacgaagtcgataagctgctgaaagagtttctccacctcgatctaaccgctcccataccgggcgcgtccccagaagagacacgtcagttactcctagagggcagtctgagaatgaaggaaggcaaagacagcaagatggacgtgtactgctttctgttcaccgatctgctcctggtcactaaagccgtcaagaaggcagagagaacccgggtgatcaggccccctttactggtggacaaaattgtctgcagggaactccgagatcccggctcgttcctgcttatttatctcaatgaattccattccgcggtaggcgcctacacctttcaagcctcaggtcaggcactgtgccgcggttgggtggacactatctacaatgcacagaaccagctgcaacagctgagggcccaggaaccaccaggcagccaacaaccattgcaaagtttagaagaagaggaagacgaacaagaagaagaagaagaggaggaggaggaagaagaagagggagaggattccggcacttccgccgcctcaagtcccacgatcatgcgtaagtcttctggctcccccgacagccagcattgcgcctcagatggaagtacagaaacgcttgctatggtggtggtggaacccggcgacactttgtcgagtccagagttcgacagcggccctttcagtagccaaagcgacgaaacctctctgagcacaactgcttctagtgcgacgccgacctctgagttactccctttaggccctgtggatggacgctcctgctcaatggactcagcgtatggtacacttagtcctacaagtctacaagattttgttgcccctggacctatggccgaactggtgccgcgcgcacctgagagcccccgcgtgccaagcccccctccgtcaccacggttaaggagaaggacccccgtccagctgctgtcctgcccgccgcacctgctcaagtcgaagtccgaggcgtcactgctgcaactgttggccggagctggcacccacggtacaccatccgccccttcccgtagtctctctgaactgtgccttgccgtgcccgctcctgctcaggaagctgaccctgggccagcactgcccaatcaggaccacccggcggcctag

SEQ ID NO: 128992 - DNA, 2373 bp, synthetic construct
  misc_feature 1..2373: note = Description of Artificial Sequence: Synthetic coding sequence
  source 1..2373: mol_type = other DNA
atgaaggcctttggaccaccccatgagggccccttacaggggctcgtcgccagccgtatcgaaacatacggaggccgccaccgagcttccgcccagtcaaccgctggccgtctgtaccctagagggtaccccgtgttggacccatcccggaggagactgcagcagtatgtgccctttgccagaggcagcggtcaggcccgcggattgtccccaatgagactgcgtgatccagaacctgaaaagagacatggcgggcacgtgggagccggactactgcattctcctaagctgaaggagttgaccaaggctcacgagctcgaggtgcgcctgcacacctttagtatgttcggtatgccccgcctccctcccgaagatcgacgccattgggagattggcgaaggcggcgatagcgggttgacaatcgaaaaatcctggcgggagctggtgccaggccacaaggaaatgtcccaagaactgtgccatcagcaagaggccctgtgggagctgctgacaacagagttgatttatgtgagaaagctcaagatcatgactgacttgttggcggctgggctcctgaacctgcaacgagttggattactaatggaggtatctgccgaaaccctcttcggaaacgtccccagcctgatcagaacacatcgatctttttgggatgaagtgttaggccctactttggaagaaactagagcatcagggcagccactagaccctataggcctccagtccggttttctgactttcgggcagcgtttccacccttatgtgcagtattgccttcgggtgaaacagactatggcatatgccagggaacaacaggagactaatcctctgtttcacgccttcgttcagtggtgtgagaaacacaaacgctccggacgccagatgctatgcgacctcttaattaagcctcaccagcgaattaccaaataccccctcctattacatgcggtgctgaagaggtcccctgaggcccgagcccaggaggctctgaacgcaatgattgaggccgtcgaatcctttctcaggcatatcaacgggcaggtgcggcaaggagaggaacaggaatcccttgctgcggctgcgcagagaatcggcccatacgaagtgctggaacctccaagcgacgaagttgaaaagaacctgcgacccttctcaaccctcgacctcaccagccccatgcttggggttgcatccgagcacacaagacaactgctactggaaggtcccgtcagggtgaaagagggacgcgagggcaagctggacgtctatctgtttctgttctccgatgtgctattagttacaaagccccaacgaaaggcagacaaagcaaaggttatccggcctcccctcatgctggagaagctggtttgccagcctctcagggatccaaactccttcctgctgattcatttgacagaatttcaatgcgtgtcctcagccttactagttcactgcccctcccctaccgatagagctcaatggctggaaaaaacccagcaagcacaggcagccctgcagaagctgaaggccgaagagtatgtgcagcaaaagagagagctgctaacgctctaccgggatcaagacagagagtccccgagcacccgcccaagcaccccgtcattggagggctcacagtcgtcagctgagggtaggactccagaatttagcacgatcatccctcatctggttgtgactgaagacaccgatgaggacgctccactggtgccggatgacacctctgattctggttacggaactctgattcccggcactcccaccgggagtaggtcccctctgtctcgcctgagacaacgggcgttaagacgtgaccccaggctgacattcagcactctcgagctgagagatattcccctgcggccacacccccctgacccccaggcccctcagagacgctcagcccccgagcttcccgagggcatcttaaaagggggatcattgccccaggaggatcccccaacttggtcagaggaggaagacggcgctagtgaacggggcaatgtcgttgtggagaccttacaccgcgctcgtctgcgtgggcagctgcctagtagccccacgcacgccgattctgcgggtgagagtccttgggagagctctggggaagaggaagaggagggccccctttttcttaaagctgggcatacatcactgcgccctatgagagccgaagacatgcttcgggagattagggaggagttagcctcacagagaattgaaggagccgaggagcctcgcgactcacgaccacgcaagttaactcgggctcagctccagcgcatgcgaggacctcatataattcagctagatacacccctaagtgcttccgaggtttag

SEQ ID NO: 128993 - DNA, 963 bp, synthetic construct
  misc_feature 1..963: note = Description of Artificial Sequence: Synthetic coding sequence
  source 1..963: mol_type = other DNA
atgtgcccaagggagggtggcagggcatcgactattcatcaaaagaccgaaaaggcattcggtcagctgctgtgccagcccttaggggaacccaagatccagcaccccttaaaggcagccctgcagaagttgaaagctgaggaatacgtccagcagaaaagagagcttctgacgctctatagagatcaggatagggaaagcccttccactaggcccagcacaccatccctcgaaggcagtcagtcatccgctgagggtcgtaccccagagttttcaactatcatcccacatctggtagttaccgaggatactgatgaggacgccccgcttgtgcccgatgacacatccgattcgggatacgggacactgatcccagggactcctaccggttctagaagcccgcttagccggctccgtcagcgcgcgctccgcagggacccccgtttaacattctcaaccttagagttgcgggatatccccttgcgaccgcacccgccagatcctcaggccccacaaagaaggagcgcaccagagctgccagagggcatactgaagggcggatctctacctcaggaggatccacccacatggagcgaggaggaggatggggcttccgaacggggcaacgttgtggtcgagactttacaccgcgcccggctgcgcggtcaattgcccagctcacccacacacgccgattccgctggtgaaagtccctgggagtcctcaggagaagaggaggaggagggccccctgtttctcaaagctggccacacctcactgcgcccaatgcgtgcggaggatatgttgagggaaattagagaggagttagcctctcaacgcatcgaaggcgcagaggaaccccgtgattctcggccccggaagctgactcgcgcccagctacagagaatgcggggaccccacattatccagctggatactccattgtcagcatccgaagtgtag

SEQ ID NO: 128994 - DNA, 2373 bp, synthetic construct
  misc_feature 1..2373: note = Description of Artificial Sequence: Synthetic coding sequence
  source 1..2373: mol_type = other DNA
atgaaggcattcggcccccctcacgagggacctctgcaaggtctggtagcaagccgcattgagacctacgggggaaggcaccgcgcttccgcacaatctaccgctggacgactgtaccctagaggctaccccgttctcgacccaagccggcgtcgcctccaacagtacgtccccttcgcaagggggtctggccaggccagaggtctgagccccatgagactcagggatcccgaacctgagaaacggcacggaggccacgtcggggccggcctcctccatagccctaagctgaaggagctcacaaaagctcacgaactagaggtgagacttcatactttctcgatgtttggtatgccccgattgccacccgaggaccggcggcactgggagatcggggaaggcggagacagcggcctcaccatcgaaaagtcctggagggaactggtaccaggacataaggagatgtctcaggagttatgtcaccagcaagaagctctgtgggagctgctgaccaccgagctgatttatgtgcgaaaacttaagattatgacagacctgctggctgcaggcctcctcaacctacagagggtcggattgctgatggaagtttcagcggaaaccctgtttggaaatgtgccatctctgatccgcactcacagaagtttctgggacgaggtccttgggcctaccttagaggagacacgtgccagcggacagcccctggatccaatcgggctccaatccggattcttgacgtttgggcagagatttcacccttatgtgcagtattgtctccgcgttaaacagactatggcctatgctcgggaacagcaggaaactaatccattgtttcatgccttcgtgcagtggtgcgagaagcacaaaaggagcggacggcagatgctgtgcgacctcctgattaagccacatcaaaggatcaccaaatatcccctcctcctgcacgccgttcttaagaggtctcccgaggctcgggcccaggaagcactcaacgcaatgatcgaggccgtggagtcattcttgcgacatattaacggacaggtgcgccaaggcgaagagcaggaatctttagctgctgctgcccaaagaatcggcccttatgaggtactggagccacccagtgacgaggttgagaagaacctgaggccattctctaccctggatctaacttctccaatgctgggggtggcatcagagcacactcggcagctgctgctggaagggccagtcagggtcaaagagggccgcgagggcaaactggacgtctacctgtttctattttccgacgttcttctggtgacaaagccacagcgcaaggccgacaaggccaaggtgatccggcctccactcatgctggaaaaattggtgtgccagccactgcgagatcccaactcttttttgttgatacacttgacggagttccagtgcgtttccagtgccctgctcgtgcattgcccgagccccaccgacagggcacaatggctcgaaaaaactcagcaagcccaggccgcactccagaagctcaaagccgaagagtacgtccagcagaaacgagaattgctaaccctgtatcgggaccaggatcgcgagtccccatctacccggcccagcaccccatcattggaaggcagccagtccagtgccgaaggtaggactcccgagttcagcactattattcctcatttggtggtaacagaagacaccgacgaggacgcacctttagttcccgacgacactagcgatagcgggtacggcacgctgatccccgggaccccgaccggatccaggagtcccttgagccgattaaggcagagggccttgcgcagagacccccggctgaccttttccaccctggaattaagagacattcccctgcggcctcacccgccagacccccaggccccacaacgtcgctctgcccccgagctgccggaaggcatactcaagggcgggagcttgcctcaggaagatccccccacatggtctgaggaggaagacggtgcttcggagcgtggtaatgtagtggtcgagacactgcaccgggctaggcttcgtggtcagcttccgagctctccaacacatgccgactctgcaggtgagtcgccttgggaatcctctggagaagaggaggaagagggacccctatttctgaaggctgggcatacatcattacgccccatgagggccgaagatatgctgagagagatcagagaggagctagcaagccaacgtatcgagggggcagaagagccgagagacagccgaccacgtaagcttacccgggcccagctccagcggatgagaggcccacacattatccagctggatacaccactgtcagccagtgaagtatag

SEQ ID NO: 128995 - DNA, 2277 bp, synthetic construct
  misc_feature 1..2277: note = Description of Artificial Sequence: Synthetic coding sequence
  source 1..2277: mol_type = other DNA
atgggatgcagactgcatgcccccggtgagaaggctgcccacgatcccagtcgccgtcgtttgcagcagtacgttccgttcgcaaggggatcgggccaggcccgcgggctgtcccctatgcggcttagagacccagagccagaaaaacgacatggcgggcatgtgggggcaggcctgctgcattcacccaagttaaaggaactcactaaggcccatgagctggaggtgaggcttcacactttcagcatgttcggcatgccccggcttccacctgaggaccggcgccactgggagataggagaagggggcgattctgggctcaccatcgaaaaaagctggagggagctagtccctgggcacaaggagatgtcacaggagctgtgccatcagcaggaagcattatgggagctgttgacaaccgagctaatatatgtgagaaagctaaaaatcatgacagacctgttggccgccgggctcttgaacttacagcgcgttggtctgctcatggaggtgtctgccgaaaccttgtttggtaacgtaccatctctgattcgcacacacaggtccttttgggacgaagtacttggacctactctggaagaaactcgcgcaagcgggcagccacttgatcccatcggtctgcagagcggcttcttaaccttcggtcagcgcttccatccttacgtgcagtattgccttagagtcaagcagacgatggcatatgcccgtgagcagcaggagacaaatcccctttttcatgcctttgtacagtggtgcgagaaacataaaagaagcggccgacagatgctttgcgatctgttaatcaaaccccaccagcgcatcacaaaataccccttattgttgcacgccgtgttgaaaagaagccccgaagctagggcacaggaggccctgaacgcaatgatcgaggcagtcgaatctttcctgagacacattaacggccaggtcaggcagggcgaggagcaagagagcctggcagcagccgcccaaagaatcggaccctacgaagtccttgagccaccatcggacgaggtagaaaagaacctgaggccgttttctactctggatctcacatcaccaatgctaggtgttgcttccgagcacactcgccagctattgctggaaggccccgtccgcgtgaaggaggggcgcgagggaaagttagatgtatacctgttcctgttttccgacgttcttttagtgactaaaccccagaggaaggccgataaggctaaagtaatcaggccaccacttatgttagagaagctcgtgtgtcagccactgagagatccaaactccttcctcctgatccacttgacagaatttcagtgcgtaagcagtgcactgcttgtgcattgcccatctcccactgatcgagcacagtggctcgaaaaaacccaacaggcccaagctgcgcttcaaaagctaaaggctgaggagtacgtacagcagaagagggagcttttgacgctctatagggatcaagaccgagaatccccctccactagaccatctaccccatcccttgaaggatctcaaagctcagctgaaggacgcacacctgaattctccactatcatccctcatcttgttgttactgaagataccgacgaggatgcgccactagtccctgacgacacgtcagactctggatatggaaccctcatccccgggactccaactggatctcgctctcctctgtcacgactccgacagcgagctttacgtcgggaccccagattaactttctccactcttgaattgcgagacataccattaagaccacatccccctgacccacaagcacctcagcggaggagtgccccagagcttcctgagggcatactgaagggcgggtctctgccacaggaggaccctcccacttggtccgaagaggaagacggggcttctgagagaggcaacgtggttgtggagactctgcatcgcgctcgcctgcggggccagcttcctagcagtcctacgcatgctgattcagcgggggagtccccgtgggagtcgtctggagaggaagaagaggaggggcctttgttcctcaaagctggccatacttctcttcgacccatgcgagccgaggacatgctacgcgaaatccgcgaagaactcgcatctcagcgcatagaaggcgccgaagaacctagagactctcgtcctcgtaaacttaccagagcccaactgcagaggatgcgaggaccgcatatcatacagctggatacacctctgagcgcctcagaggtttag

SEQ ID NO: 128996 - DNA, 4482 bp, synthetic construct
  misc_feature 1..4482: note = Description of Artificial Sequence: Synthetic coding sequence
  source 1..4482: mol_type = other DNA
atggctgaactcagcgagcctgaggggcctgtcgactggaaggagcgctgtgtggccctggagtctcagcttatgaaattccgtgtgcaggcctctaagatcagggaactgctggcggagaagatgcagcagctcgagagacaggtcatcgacgcagagcgccaagccgaaaaagcttttcaacaggtccaggtaatggaggataagcttaaagctgcaaatattcaaacttctgaatccgagacgagactgtacaacaagtgtcaggacctggagtccttgattcaagagaaggatgatgtgattcagaatcttgagctccagcttgaagagcagaaacagatccgaattcaggaggctaaaattattgaagagaaggccgcaaaaattaaagaatgggtgactgtgaagttgaatgagctggagctggagaatcagaacctgagactcatcaaccaaaaccaaacagaagagattcgtaccatgcaatccaaactccaggaggttcaggggaaaaagtcatcaacggtgagcacattgaagttgtcggagggccagagactgtcaagcctcacctttggctgcttcctctcccgagcccggagcccaccacaggttgtgaagtcagaggaaatgtcaaagatctcgtctaaggagcctgaatttactgagggaaaagatatggaggaaatggagatccctgagaaatcagtcgataaccaggtgctagaaaacaatcgaggacagaggacgctgcatcagactccctgtggctcagaacaaaaccgcaagacacgcacttcctttgctaccgatggtggcatttcccagaattcgggcgccccagtgtccgactggtcttcagacgaagaggatggctccaagggacgctcaaaaagccggtgtacaagcactctcagttctcacacttcagaggagggtgttcagtgcagtcggatgggatcggaaatgtacctcaccgcttccgacgattcgtcatctatcttcgaggaggagacctttgggatcaaaagacctgaacataaaaaactgtattcgtggcagcaagaggcccagtggaaagccttaaactcgccgctgggcaagggtaacagcgaactgagcaaaaaagagcaggacagctcaagtgatgagctgaacaagaaatttcaatctcaacggctcgattactccagctcatcaagtgaggcgaacacaccctctcctatcttgacccccgccctgatgccgaagcatccgaactctctctccggtaaggggacccaattggtaccctcgagtcatctgcctccccccaaacttcggattccaaatgttttctcaatctctgtagctctcgctaaaagacacctgagccagccgcagctaagttccgaccgcatgttcggaaccaatcgcaacgccatatcaatgattcgacccctgagaccgcaggaaacagatctggacctggtggatggcgactccactgaggttcttgaaaacatggacacaagctgtgacgacggcctgtttagctacgattctctggacagtcctaatagtgatgaccaggagcactgtgatagtgcgaagaaggtcgcgtattccaaaccccccactccaccactccatagattcccgtcctgggaatctcgcatttacgctgttgctaagtccggtatcaggatgagtgaggcttttaacatggaatctgtgaacaagaattccgccgccaccctgtcctatactacatctggtctgtacacgagtctgatttacaagaatatgactacgccagtttataccactctgaaaggcaaggccacacagatcagcagctctccattcttggatgactcttcgggctcggaggaggaagattcctccaggagttcctcccggacgtctgaatccgactcccggagcagaagtggccccggaagcccgagggccatgaaaagaggagtaagcctatcaagtgtcgcttctgaaagtgattacgccatacccccagacgcgtattccaccgataccgaatatagccagcctgaacagaagctgccaaaaacttgtagttctagctccgacaacgggaagaatgagccactggaaaaatccggatacctactgaagatgagcggcaaagtgaaaagctggaagaggcggtggttcgtcctgaaaggtggtgagttgttatattataaatcaccttccgatgtaataagaaaaccgcagggccatatcgaattgagtgctagctgcagcattctgcgaggggataataaacagaccgtgcagctgactactgagaaacatacgtactacctcaccgccgattctcccaatatcttggaggaatggattaaagtgttacagaacgtgttgcgggtgcaggcagcaaatcccctctccctgcagccggaaggcaaacctactatgaaagggctgctgacgaaagtcaagcatggctacagcaagagggtgtggtgcaccctgattgggaaaaccttgtactactttcgaagtcaagaggacaagtttcccctggggcaaattaagctctgggaagccaaggtggaagaggtagatcgatcttgcgattccgatgaggactatgaagcatccggaaggtcactgctgtccactcattatactatcgtgatccacccaaaagatcaggggccaacatatctcctgatcggcagtaaacacgagaaagatacgtggctgtatcacctcacagtggccgccggatccaacaatgtcaatgtcggatcagaatttgaacagctggtatgtaagttgttgaatatcgacggagaacctagttctcaaatctggcgtcaccctacactctgccatagtaaagagggcatcattagccccttgacaactttgcctagtgaagcactccagaccgaggcaattaagttgtttaagacttgccagctgttcatcaatgccgcagttgactccccagcgatcgattatcatatttcgttagcacagagcgcactccagatttgcctcacacaccccgaactgcagaatgagatttgctgccagcttattaaacagacccggcgtcgtcagccacagaatcagcccggccctcttcaggggtggcagttactggccctgtgtgttgggctgttcctgccacatcacccttttctgtggctcctgagacttcatcttaaacgaaacgccgactctcggaccgaatttgggaaatatgccatttactgtcagcggtgcgtcgaacgaacccaacaaaacggagatagggaagctcggccctcaaggatggaaattttaagcaccctgcttcgtaacccttatcaccatagtttgcccttttcgatcccagtgcatttcatgaatggtatctaccaagtggtcggcttcgatgcgtcaaccaccgtcgaggaattcctgaataccctgaatcaagacacgggtatgaggaagccagcccagtccgggtttgctctgttcactgatgaccctagcggccgcgatctcgagcattgcctgcagggcaacattaagatttgtgacatcatctctaagtgggagcaagcctctaaagaacagcagccagggaagtgcgagggcacgcgtaccgttcgcctgacgtataagaaccgcctgtacttctctgtccaagcgcggggggaaacagaccgcgagaaattgttgctcatgtaccagacaaacgatcagattattaatggactgtttccactgaataaagacctggcactggagatggccgccctcttgtcacaggtcgaaattggcgacttcgaacggccgttttcgactccagctggacatgtgaccaatcagtgtaaagtgaatcagacactgaagcaggtgatcgagaagttttacccaaagcggtacagggatggatgcagtgaggaacagctgcggcagttgtgccagcggttgagtactcgatggatggcacttagggggcattcggctgcagactgcgtacgtatctacttgacagtcgccaggaaatggccattttttggagccaaattattcctcgccaaacctattactccttcctcgctgggatccactttcttatggcttgccgtccacgaagacggactgtcactactagaatacaactcgatgaggctgatcgtgagctatgtttacaagtctttgatgacattcggggggtaccaggacgactttatggtggtgatcaataacactcactccaaggataaacccacggagaaactactttttgctatggcaaagcccaagatcctggaaataacactacttatagcttcgtatataaacaatttccaccaacagaaggctgccttccatcatctcagcgcccctgccctcctcagtgcacagacgcgtggaccccaggccagaatgatgggtagtcagcccctgctctcctcatctcggcccaccaagggtccaacacttctttag

SEQ ID NO: 128997 - DNA, 2904 bp, synthetic construct
  misc_feature 1..2904: note = Description of Artificial Sequence: Synthetic coding sequence
  source 1..2904: mol_type = other DNA
atggactggactccacgcctcccaagcaggcacattataagtgaactcgagcacctcacattcgtcaataccgatgtcggccgctgtcgagcctggttacggttagcactcaatgacggactgatggagtgttatctgaaactgctcctccaggagcaagccagacttcatgaatactaccagccgaccgctctgctcagggacgccgaggaaggagagtttctcctgtctttcctgcaaggcttaacaagtctgagctttgagctgtcttataaatcggccatacttaacgaatggaccctcacccctctggccctcagtgggctttgcccactgtcggagcttgaccctctgtccacttccggcgcggagctgcaaaggaaggagagcctagacagcatctcccatagctccggctcagaagacatagaagttcatcacagcggtcataagatcaggcgcaatcagaaattaaccgcctctagtctgtcacttgataccgcatcttcctcccagctgagctgttctcttaattccgactcgtgcctgctgcaagaaaatgggagcaagtcacctgaccactgtgaggaacccatgtcctgtgacagtgatctgggaacagctaatgccgaagattcggaccgcagtcttcaggaggtccttttagaattttctaaagcccaagtgaacagcgttccaactaatggcttgagccaggagactgaaatccccactccccaggcaagtctgtctcttcacgggctgaacacgtctacctacctgcattgtgaggctccagcagaacccctacctgcacaggccgctagcgggacacaggatggagtgcacgtccaggaaccccgaccccaagcgcccagcccccttgaccttcagcagccagttgagtccactagtggacaacagcccagtagcacggtgagtgagaccgcccgtgaagtgggccagggtaacgggctccagaaagcgcaagctcatgacggcgccggacttaagttagtggtctcttcgcccacttcaccaaaaaacaaatcttggataagtgaagatgacttctaccggccttcccgggagcagcccttggagagcgccagtgaccaccccattgcttcataccgcgggaccccaggcagtagaccaggtctgcataggcacttttcacaggagcctcgcaaaaactgctccctaggcgctctcgaccaagcctgcgtgccctcacccggcaggcgtcaggcacaggccgctccatcccagggtcacaaaagctttcgcgtggtccaccgcaggcagatgggcttatccaatcctttcaggggtttgatgaagcttggaacagtcgagagaaggggagctatgggaatatggaaggagttgttctgtgagctgtccccccttgagttccgcctctacctgtccaacgaggaacacacctgtgtcgagaactgctcgctgttgagatgcgaatctgtcggtcctgcgcatagtgacggccgattcgaattggttttcagcgggaaaaaacttgcgctgagagcctccagccaggacgaggcggaggattggctagacagggtcagggaggccttgcaaaaggtgcggccacaacaggaggatgagtgggtgaatgtgcagtatccggatcagccagaggaacctcctgaagcccctcaaggttgtctgagtccttccgacctgctaagcgagcccgccgcacttcaggggactcagtttgactggtcctcagctcaagttccagagcctgacgccatcaaggaatctctgctctatctgtatatggacaggacttggatgccatatatattcagccttagtttagaggccctgaagtgttttcgtattcgcaacaacgagaaaatgctcagcgatagccatggtgttgaaacaatccgcgatatcctgcccgacactagtctcggtggcccttctttcttcaagataattaccgcaaaagccgtgctgaaacttcaagccgggaatgcggaagaggccgcactctggagagatctggtaagaaaagtcttagcctcatacctggagactgccgaggaggcagtgacgctcggcgggtccctcgacgaaaattgccaggaggtactgaagtttgccacccgggaaaatggattcctgctccagtacctagtggcaatacctatggagaaagggttagattctcagggttgcttttgcgcaggctgtagccgtcagataggctttagttttgtgcggcccaagctgtgcgcatttagtggtctttattattgcgacatttgccaccaagatgatgcatccgtgattccagctcggattatccataattgggacttgacaaagaggcctatctgcagacaggccttgaagtttctgacgcagatccgagcacagccactcattaatttacagatggtaaatgcgtctttatatgagcatgttgaacggatgcacctgatcggccgcaggagggagcaactgaagctgctaggagattacctgggcttatgcagaagtggggctctgaaagaactcagcaagaggctgaaccatcgcaattacctgcttgaatcacctcaccggttcagcgtcgcggatctgcagcagattgccgatggagtttatgaagggtttctcaaggctctgatcgagttcgcatcccaacacgtgtaccattgtgatctgtgtacacaaagaggtttcatctgccaaatctgtcaacaccacgatatcatttttccctttgagttcgacacgacggtgcgctgtgccgaatgtaagaccgttttccaccagagttgtcaggctgtagtgaaaaaaggctgtccgaggtgtgccagaagacgcaaataccaggaacagaacattttcgcatag

SEQ ID NO: 128998 - DNA, 3171 bp, synthetic construct
  misc_feature 1..3171: note = Description of Artificial Sequence: Synthetic coding sequence
  source 1..3171: mol_type = other DNA
atgctctccgtggtggaaaatgggttagatccgcaggctgctatcccggtaatcaagaaaaagctggtgggctccgtgaaggcattacaaaagcagtacgtgtccctggacacagtcgtaacctcagaagatggtgacgccaacactatgtgctcagccctggaggcggtgtttattcatggcttacatgctaagcacatacgggcggaagccggaggtaaaaggaaaaagagcgcccatcagaagcccctccctcagccagtgttctggcctctccttaaggccgtaactcataagcatatcatctccgaattggagcatctgaccttcgttaatacggatgttggaaggtgtagggcctggctcagactcgccctgaacgatggcctgatggagtgctaccttaagctgctgcttcaggagcaggcccgcttgcacgaatattaccaacccaccgccctgctccgtgatgcggaggagggcgaatttctactttctttccttcagggcctcacctcactctctttcgagttatcatacaaaagcgcgatcctaaacgagtggaccctgactcccctggcgttatctggcctgtgcccactaagcgaattggatcctctgtcaacatccggggccgagctccaacgcaaggagagcctagatagcattagccattcttcaggaagtgaagatatcgaagtgcatcattccgggcacaaaatcagaaggaatcagaaactcactgccagttctctgtctctcgacaccgccagctcctcccaactctcctgtagtctgaacagtgactcatgtttgttacaggagaatggatcaaaatctcctgatcactgtgaagaaccaatgtcttgtgattccgacctgggtaccgccaacgcggaggattccgacaggagtttacaagaggttctgttagagttctccaaggcccaagtgaactctgtgccaaccaatggcctcagccaggaaacggagatccccactccgcaggcctcattatcgctacatgggttgaatacctccacataccttcactgcgaggctccagctgagcctctgcccgcccaagccgctagtggtacccaggacggggtccatgtgcaagaaccacgccctcaggccccttcaccactagatcttcaacagcccgtggagagcacctccgggcagcaaccttcgtctaccgtgtctgagacagctcgggaagttgggcagggcaatggactgcaaaaggcccaggcacacgacggagcagggctcaaattagttgtgtcctctcctacttccccaaaaaacaagtcatggatctccgaagatgacttttataggccaagcagagaacagcctttggaaagcgcctccgaccaccctattgccagttatagaggtacccccgggtctcgccccggacttcatcgacacttttcccaggagccccgcaagaactgtagcctgggcgctctggatcaggcttgcgtgccgagccctggccggcgccaagcccaagccgctccctcccagggccacaagtcatttcgtgtagtgcacaggaggcagatggggctctcaaatccttttcgcggccttatgaagctggggaccgttgagaggagaggcgcaatgggtatctggaaggaattgttttgcgaactgtcaccactggagttccgcttatacctgtctaatgaggagcacacctgcgtggaaaattgctcactgctgcggtgcgaaagcgttggtccagcccactctgatggacgatttgaactggtattttccggtaagaaacttgcgttgcgagcatctagccaagacgaggcagaagactggttggaccgggttcgtgaggcactgcagaaggtgcggccacagcaggaggatgagtgggtgaatgtccagtacccggaccaaccagaggagcctccagaagctccccagggatgtttgtcgccatctgatctactgagcgagcccgcggcattgcagggcacacagtttgactggtccagcgcccaggttccagagccagatgccattaaagagtcactgctttacctctatatggataggacatggatgccatatatcttttctctgtctctggaagcactgaaatgcttccgtataagaaataacgagaagatgcttagtgacagtcacggtgtggagactattcgggacatcctgccggacacttctctcggcggcccatcgttcttcaaaatcatcactgccaaggcggtactgaaactccaggccggcaatgcagaggaggccgccctgtggagggacctggtgcggaaagtcttggcttcctaccttgagacggctgaggaagctgtgactctcggggggtctctggatgagaattgccaggaggtcctgaagttcgcaactagagaaaatggcttcctgcttcaatatctggtggcgattcctatggagaagggcctggacagccagggctgcttttgcgctggctgcagtcggcagatcggcttttctttcgtcaggcccaaactctgtgcgtttagtggcctctattactgtgatatatgccaccaggacgatgcctccgttataccagccaggattattcataactgggacctgaccaaaagacctatctgtagacaggcccttaagtttctcacacagatcagggctcaaccgctgattaatctgcagatggtcaatgcctcactgtacgagcatgtggagcgcatgcaccttattgggaggcggagggagcagttgaagctgcttggtgactatttgggtctatgtcgcagcggcgcactgaaagagctcagtaaacgtcttaatcacagaaactatctacttgaaagtccacacaggttttctgtagctgaccttcagcagatagccgatggtgtgtacgagggctttctgaaggcactcattgagttcgccagccagcacgtgtaccactgcgacttatgtacgcagcgcgggttcatttgccaaatctgccagcatcacgatataatattccccttcgagttcgataccacagtgcgatgtgcggaatgtaagacagttttccaccaatcttgccaggctgtggttaaaaaaggctgccccagatgtgctagacggaggaagtaccaggagcagaatatattcgcctag

SEQ ID NO: 128999 - DNA, 3003 bp, synthetic construct
  misc_feature 1..3003: note = Description of Artificial Sequence: Synthetic coding sequence
  source 1..3003: mol_type = other DNA
atggtggagtgttttgaaagtgggggaacgagactctcactgtccagctttaacgtgtcatgtgactccttgagagagcaactacgggagtggagatgcttccagtggtggaggatggactggaccccaaggctgcccagtcgccacatcatcagcgaactcgagcacctgactttcgttaataccgatgtggggcggtgcagggcctggcttagacttgcattgaacgatgggctgatggagtgctatctgaaactcttgctccaggaacaggctcggctccacgaatattaccagcccaccgccctgcttagagacgccgaggagggtgagttccttctgtcatttttgcaaggcctgacatccctgagcttcgagctcagctataagagcgcaattctcaatgagtggactctgacgccattggccctgagtggactctgccctctgtctgagctggatcctctaagtacttccggtgccgagctccagagaaaggagtccctggatagtatctcccacagcagcggcagcgaggacatcgaagtgcaccactccggccataagatcaggagaaatcagaagctgacagcctccagtctcagtctcgatacggcttcgtcaagtcagttgagttgtagcctgaattccgactcctgcctgctgcaagagaacggcagtaagtcacccgaccactgcgaggagcctatgtcatgtgacagcgacttgggcacggccaacgcagaagattcagacaggagcctccaggaggttctactcgagttttcaaaggctcaagtcaacagcgtacctaccaacggactcagtcaggagaccgagatacctaccccacaggcatcactgagcctgcacggcttgaatactagcacctacctacactgtgaagcgcctgctgaacctcttccagcccaggcggcttctggcactcaggacggagtgcacgtgcaagagccccgccctcaagccccttccccactcgatctccaacagcccgttgaatccactagcggccaacagcctagcagcacggtgtcagagacagcaagagaagttggccaaggcaacggactgcagaaagcccaggctcacgacggggctggcctgaaattggtagtgtctagtcctactagccccaagaataagtcttggatttctgaagacgacttttatcggcctagtcgcgagcaacccctggagtcagcatccgatcaccccatcgcttcctacagaggtacccccggctccagacctgggctgcaccgccactttagtcaggagccccggaaaaattgtagcctgggagcgcttgaccaggcctgtgttccctcccccggccgacgccaggctcaggccgctccttctcaaggtcacaaaagttttagagtagttcacaggcgccagatggggctgtcaaacccgtttcgaggactgatgaaactcggaactgtcgaacggcgaggcgccatgggaatatggaaggagttgttctgcgagctgtctcctctcgagtttcgcctatatctctccaacgaagagcacacctgcgtcgagaactgttcactcttgcgctgcgaatctgtcggcccagcccattctgacggacgctttgagctggtgtttagcgggaagaagctagcacttcgggcgtccagtcaggatgaagccgaagactggcttgatagggttagagaggcgcttcagaaagttaggccacaacaggaggatgagtgggtaaatgtccagtatcctgatcagcccgaagagccccccgaagctccacagggttgtttgtctccttcggacctgctatctgagccagcagccctccagggcacgcagttcgactggagctctgctcaggtccccgagccggatgccataaaagagagtctgctgtacctttacatggacaggacctggatgccctacatcttttccttgagcctggaggcattaaaatgtttcagaatccgcaataacgaaaaaatgttgagcgactcgcacggtgtagaaacaatacgtgatattctgccagatacatctctaggaggtccctccttttttaagattataacagctaaggccgttctgaagctccaggccggcaatgccgaagaggctgccctgtggcgggacctggtgcgcaaggtcttggcctcttatctagagacagctgaagaggcagtgaccctgggaggtagcctggacgagaactgtcaggaagttctgaaattcgcaacccgtgagaacggcttccttctgcaatacttggtggcaatcccgatggaaaagggactggacagtcagggttgtttttgcgccggttgtagccggcaaatcggcttctcttttgtgaggcctaagctgtgcgcctttagcggactctattactgcgacatctgccaccaggatgacgcttctgtgatcccagcacgcatcatccacaattgggatctaactaagcggcctatctgccggcaagccctcaagttcctgacacagattagagctcagcccctgattaacctgcaaatggtgaacgccagcctctacgaacatgtggagcgcatgcacctgattggacgtcgtcgggagcagctgaagttgttaggggactacctcggcctttgcagaagtggagcattaaaggagctttcaaagcgcttaaaccatagaaattatctcctggaatctccccaccgtttttccgtggctgacttacagcagatcgccgacggtgtgtacgagggcttctcccctaaagtgccctctgaggcggccggcttacgcccatggggggccaggagtcccgaggccgcaagtgcattcagatgtattgattcttcaaggttaccctctctgcggaaggtggtgccgactctgttcctgaaatgttacttcatgcagtatacagtgccctcagagcagggctctggtcccgaggaaagcctacagtgtattgaaggaatagccgcggtctag

SEQ ID NO: 129000 - DNA, 5466 bp, synthetic construct
  misc_feature 1..5466: note = Description of Artificial Sequence: Synthetic coding sequence
  source 1..5466: mol_type = other DNA
atgtcatgtgagcggaagggattgtcagagcttcgaagcgagctgtattttttaatagcgcgctttctggaagacggcccttgccaacaggccgctcaagttctgatcagagaggtagccgagaaagagctgctgccacggcgcaccgactggactgggaaggaacacccacgcacctaccagaacttggtcaagtactatcggcacctggcccctgaccatcttctacagatatgccatcggttaggtcccctcctggagcaggaaatccctcagtccgtcccaggcgttcaaactttgctcggtgcgggacgacagtcgttacttaggaccaataagagctgtaagcatgtggtgtggaaggggagcgccctcgccgccctccattgtggccgcccacctgagtcacctgtgaattatgggtctccaccaagcatagctgacaccctcttcagcagaaagctgaacggtaagtataggctcgaacgtttagtccccactgcagtgtaccagcatatgaaaatgcacaaacggatactgggccaccttagctctgtctactgtgttacttttgaccgtaccgggaggagaatatttaccggttctgatgactgtctcgtcaagatatgggctacagacgatgggcgacttcttgccactctgaggggacatgccgccgagatctctgacatggctgttaactatgagaataccatgatcgccgcaggaagctgcgataaaatgataagggtttggtgtttacgcacatgcgcccctctggcggttttacaaggacactccgcaagcatcacaagcttgcagttctcacccctctgctccgggagcaaaaggtatctgagtagcacaggagctgacggcaccatttgcttttggctgtgggacgccggcactcttaaaattaaccctcgccccgccaagtttactgaaaggcctagaccaggtgttcagatgatttgctctagcttcagtgccgggggaatgtttctcgcaacaggatctaccgaccatatcatccgcgtgtacttcttcggctcaggccaaccagagaaaataagtgaattggagtttcacactgacaaagtcgattcgatccagtttagcaacacttcaaatagattcgtgtccgggagccgggacggcaccgctcggatctggcagttcaaaagacgcgaatggaagtcaattctactggatatggccaccaggcccgccggtcagaacttacagggtattgaggacaagattaccaagatgaaggtcactatggtggcatgggatcggcatgacaatacagtgattacagcggtcaacaatatgaccctgaaggtctggaacagctacacggggcaattgatccacgtgctgatggggcacgaagacgaggtatttgttctggagccccatcctttcgatcctcgggttttgtttagcgccgggcacgatggcaacgtgatcgtgtgggatctcgctaggggcgtcaagattcgatcatacttcaatatgatcgaaggacaaggtcatggagcagtctttgattgcaaatgttccccagatgggcagcatttcgcgtgcacagatagtcatggccatctgctcatttttggctttggctcctcgtctaagtatgacaagatagcagatcagatgttcttccatagcgactatcgaccactgattcgcgatgccaacaatttcgtgttggatgagcagacccagcaggctccacatctcatgccccctccttttcttgtcgatgtagatggcaatcctcacccctcccgctaccagagacttgtcccgggtcgagagaactgcagagaagaacaactcatacctcaaatgggggtcactagctcaggtctcaaccaggtgctatcccagcaagctaaccaggaaatttcacctttggattcgatgatacagcgactacagcaggagcaggaccttcgcagaagcggcgaggctgtgatatccaatacaagccgcctcagccgggggtctatcagctcaacaagcgaagtacactcccctccaaacgtcgggctgcgtcgctccggacagattgagggggtgcgacaaatgcattccaacgctcctaggagcgagattgctacagagagagatctcgtcgcttggtccagaagagtggtggtccccgaattgtctgcaggggtagcatcccgacaggaagagtggcgaaccgccaagggcgaggaggaaattaagacctacagaagcgaagagaaacggaagcacctcaccgtccctaaggagaacaagatacctaccgtgagtaagaaccacgcacacgagcactttttagatctcggagaaagcaaaaaacaacagacaaatcagcacaactacagaacaaggagcgccctggaggaaacccccagaccttccgaggagatagaaaatggctcatcaagctccgacgaaggagaagttgttgccgtgagtgggggtacgagtgaagaagaggaaagggcctggcactccgacgggtccagctctgactattccagcgattacagtgattggacagcagatgcaggcatcaacctgcagcctccaaagaaagtgccgaagaacaaaactaagaaagcagagtcatccagtgacgaggaagaagagtctgagaagcagaaacaaaagcaaatcaagaaagaaaaaaagaaagtaaatgaagaaaaggatgggcctattagcccaaagaagaagaagccgaaggagcgaaagcagaaaagactggctgttggagagctcaccgagaacgggctcaccctggaggaatggctgccttctacttggatcactgataccatcccccgtaggtgtccctttgtccctcagatgggtgacgaggtttactacttcagacagggacacgaagcatatgttgagatggccaggaaaaacaagatctacagcattaacccgaaaaagcagccctggcacaagatggaacttcgcgaacaggaactaatgaaaatcgtgggcattaagtacgaagttggtcttcccaccctgtgctgtctgaaactggccttcctagacccagatacgggcaagctcacaggaggatcctttactatgaaatatcacgatatgccagacgtcatcgattttttggtgctcagacagcagtttgatgacgcaaaatacagacggtggaacatcggtgaccgctttagaagcgtgattgatgacgcttggtggttcggcaccatagagagccaggagccccttcaattggagtatcccgatagcctgtttcagtgctataatgtgtgttgggacaatggagacactgagaagatgagtccttgggatatggagttgattcccaacaacgctgtctttccggaggagttgggtacctcagtaccactgactgatggcgagtgtcgctcgctcatctataagccactggatggcgaatggggaacgaatccccgggacgaggaatgcgaaaggattgtggcaggcatcaaccagttgatgacactggacatcgcctctgcctttgtggcacccgtcgatctgcaagcatatcccatgtactgcacagttgtggcctatccaactgatctcagcacaatcaaacagagactcgagaaccgtttctacaggcgggtcagcagcctgatgtgggaggtgaggtatatcgagcacaataccaggactttcaatgaacccggaagtccaatcgtgaagtctgccaagttcgtgactgatctgttactgcatttcatcaaggaccagacgtgttataatatcattcccctgtacaacagtatgaagaaaaaggtcctgtccgactctgaggatgaggaaaaggatgctgatgtccccggcacatccacgcggaaaaggaaggaccaccaaccgcgccgtaggcttaggaaccgcgctcaaagctatgacatacaagcttggaagaaacaatgcgaagaactgcttaacttgatatttcagtgtgaagacagcgagcccttcaggcagcctgtggatctcctggagtaccccgactaccgtgatattatcgacactcccatggacttcgcaaccgtgcgtgaaaccctggaggcaggtaattatgaatctcccatggagctgtgcaaggacgttagactgatttttagcaactcaaaagcttatacaccaagcaagagatcccgaatatatagcatgagtcttcgactctctgcgttctttgaggagcatataagttccgtgttgtccgattacaaatcagccctgaggtttcacaaacggaacacaattacaaagagacgcaaaaagaggaatagatcgtcaagcgtgtcatcttctgctgcctcctcccccgaaaggaaaaagaggattcttaagccacagctgaaaagcgaatcaagcacctctgcctttagcaccccaaccaggagtataccgccacgccataacgccgcccagattaacggcaagaccgaatcttcttccgtggtacggacccggagcaacagggtagtggtggacccagtggtaacggaacagccaagtacttcttccgcagcgaagactttcatcactaaagccaacgcttccgccattcctggaaaaaccatcctggagaattccgtgaagcacagtaaagctttaaatactctttctagccctggtcaaagcagcttcagtcatggcacccgcaacaactcagccaaagagaacatggaaaaggagaagcccgtcaagcgaaaaatgaagagcagcgtgcttcccaaggccagtaccttgtctaagagttcggctgtgattgagcaaggggattgcaagaataatgccctggtcccgggtactatacaggtgaatggacatggtggccagcctagcaagctggtgaagcgtggaccgggcaggaagcctaaggtggaagttaacaccaacagtggggagataatacacaagaaaagaggacgcaagccgaaaaaactgcagtatgccaagcctgaggacctggagcagaataacgtccacccgatacgggatgaagttctgccatcctcaacttgtaattttctgtccgaaactaacaacgttaaggaagacttgcttcagaaaaaaaaccgcggcgggcgtaagccaaagaggaagatgaagacccaaaagctggacgcggacctgcttgtgccggcgtctgtgaaggttttgcgtcgttcaaaccggaaaaagatcgatgaccccattgatgaggaggaggaattcgaggagctgaagggctctgagccacatatgaggacccgcaatcaaggccggaggaccgctttctacaatgaagacgatagcgaagaggaacaacggcagctgttatttgaggatacttccctgacattcggaacctcctcacggggtcgagtgaggaaactcactgaaaaggcgaaggcaaatctgatcggctggtag

SEQ ID NO: 129001 - DNA, 1197 bp, synthetic construct
  misc_feature 1..1197: note = Description of Artificial Sequence: Synthetic coding sequence
  source 1..1197: mol_type = other DNA
atgaagaagaaggtgctgtctgattcagaagatgaagagaaggacgccgacgtgccagggaccagcacgaggaaacgaaaggatcaccagccccgccgtcgattgagaaaccgcgcgcagtcctacgatatccaggcctggaaaaagcagtgtgaggagcttctgaatttaatattccagtgcgaagactctgagccattccgtcaacccgtggacctgctggagtatcctgattatcgagacattattgacacccctatggacttcgccaccgtgagagaaacactcgaagccggcaactatgaatctcccatggaactctgtaaggatgtgaggttaattttctcgaacagtaaggcatacaccccaagcaaacggagtcggatctattcgatgtccctgcgcctctcagcatttttcgaggaacatatttctagcgtattatctgactacaagtcagccctgcgtttccataagcggaacaccatcaccaagaggcgtaagaaacgcaataggagtagtagcgtcagctcttcagccgcctcctcccctgaacgtaaaaagcggatactgaagcctcagctcaaaagcgagtcttccacgtccgcgtttagtacacctactagatccatcccgcctcggcacaatgcagcgcaaatcaacggcaaaacggagagtagctccgtggtgcggacgcgatctaaccgggtggttgtggatcctgttgttactgagcagccgtccacctcctcagcggccaaaactttcataacaaaggctaatgcaagcgctatacccggcaagacaatcctggagaacagcgttaagcacagtaaagccctgaatactttgtcaagtcctggccagtctagtttctcgcatggcaccagaaacaatagcgcaaaggagaacatggagaaagaaaagcccgttaaacgtaaaatgaaatcgtctgtgcttccaaaagcttccactctgagtaaaagctcagccgtgatcgagcagggggattgtaagaataacgcactggtgcccggcaccatccaggtcaatggacatggcggccaaccaagtaagctcgtcaagaggggacctggaagaaagccaaaggtggaggtcaatattgtcgtgaagctctacacacgcaaaggggtggagagtcccaagtcttactccatgcagagtcagaagatctag

SEQ ID NO: 129002 - DNA, 1206 bp, synthetic construct
  misc_feature 1..1206: note = Description of Artificial Sequence: Synthetic coding sequence
  source 1..1206: mol_type = other DNA
atgagacgggcccctgctgctgagcggttgctcgagttggggttccccccccgatgcggcaggcaggaacccccctttccgttgggggttacacgaggctgggggagatggccgatccagaagagacgcgaaggggcccggcctgtaccattcagcgaaaggtctcaggaagatgggcgcgggcctgctgcccgttctagcgggactctctggaggattaggactcggctttcattgtgccgtgacccagaacctccaccccccttgtgcctcttgagggtgtcactgctgtgcgcgcttcgcgccggcggccgcgggtcaagatggggggaggacggtgcgcggctgctcctgttgcctcctgcacgagctgctggtaacggtgaggccgaacccagtggtggcccgtcgtatgctgggcgcatgttagaaagttccgggtgtaaagcccttaaagagggagtccttgagaaaagatcagatggcctgctgcaactgtggaagaagaaatgctgtatactcacagaggaaggactcctactcatcccccctaagcagttgcagcaccaacaacagcagcagcagcagcaacaacagcagcaacaacaacagccgggccagggccccgcagagccatcccagccctccggccctgcagtcgccagcctcgaaccccctgttaagttaaaagagttgcacttttccaatatgaaaacagtggactgtgtagagcgcaaggggaagtacatgtactttaccgtggtgatggcagaaggaaaggaaatcgactttcgttgcccgcaggatcagggatggaacgctgagatcacacttcaaatggtccagtacaaaaatagacaggctatcttggctgtcaaatcaaccaggcagaagcaacaacatctggttcaacaacagcctccgagccagccacagccacagcctcagttgcaaccccagcctcagccacaacctcagccacagccacagccccagtctcagccacagcctcagccccagccaaagccccagccccagcagttacacccttacccccaccctcatcctcacccacacagccacccccatagtcacccccatcctcacccacatcctcacccccatcaaatcccgcacccccacccacagccccactcgcaacctcatggacaccgtctcctgcggagcacatctaattctgcgtag

SEQ ID NO: 129003 - DNA, 660 bp, synthetic construct
  misc_feature 1..660: note = Description of Artificial Sequence: Synthetic coding sequence
  source 1..660: mol_type = other DNA
atgctcgaatcctcaggttgcaaggcgttgaaggagggcgtgctggaaaagagatccgacggcttattgcagctctggaaaaaaaagtgctgcatactgacagaggagggtctattactgataccacccaaacagcttcagcaccaacagcaacagcagcagcagcagcagcaacagcagcagcagcagccaggccagggacctgcagaaccaagccagcccagtggaccagccgtcgctagtctggaaccaccagtcaaactgaaggaattgcacttttccaacatgaagaccgttgattgcgttgagaggaagggcaagtacatgtacttcacggtggtaatggctgagggcaaagagatagatttccggtgtccccaggaccaagggtggaatgccgaaattacgctgcagatggtacaatacaaaaacagacaagccattctcgcagtaaaaagcactcgacagaagcagcaacatctggtgcagcagcagctgcacccctaccctcatcctcatccgcatcctcatagtcatccccacagtcacccacatccacacccccacccccacccacatcagattccacacccacacccccagccacattctcagccgcatgggcatcgcctgttgcgctccaccagcaactctgcctag

SEQ ID NO: 129004 - DNA, 459 bp, synthetic construct
  misc_feature 1..459: note = Description of Artificial Sequence: Synthetic coding sequence
  source 1..459: mol_type = other DNA
atgaaaagcccggacgaagtgctcagagaaggcgagctggagaaacggtccgattctttgttccaactttggaagaagaagcgaggagtgctgaccagcgacaggttgtctctttttccagctagccctcgagctagaccaaaagagctgcgttttcactctattctcaaagttgattgtgtggagcggaccggcaagtacgtgtactttaccatagtgacaactgaccataaggagatcgacttcaggtgtgcgggggaatcatgctggaatgcggcaattgccctcgcactcatcgatttccaaaacaggcgagctcttcaggattttcgatcccggcaagagaggactgcccctgccgcccccgcggaagacgccgtcgccgccgccgccgctgccccttctgagccttctgaaccgtctagaccctccccccagccgaagcccagaactccttag

SEQ ID NO: 129005 - DNA, 3960 bp, synthetic construct
  misc_feature 1..3960: note = Description of Artificial Sequence: Synthetic coding sequence
  source 1..3960: mol_type = other DNA
atggacgcccttaaccggaaccagattggaccaggctgtcagactcagacgatggtacagaagggcccgctcgatcttattgagactgggaagggactgaaggttcagaccgataaaccacacctggtcagcttggggtctggccgcttatccacggctattaccctcctccctctcgaggaggggagaactgtaataggaagtgccgcccgcgacatctcactgcagggaccgggactcgcgccagagcactgctacatcgagaatcttcgaggtactcttaccttgtacccctgcggcaacgcctgcacaattgacgggctgcccgtgcgtcaaccaacccgattgactcaaggctgtatgctctgcctcggccagtctacatttttgcggttcaaccaccccgctgaggctaaatggatgaagtccatgatcccagccgggggtcgcgcacctggacctccctattccccagtcccagctgaaagcgaatcattggttaatggtaaccataccccccagacggccaccaggggaccctcagcttgtgcatctcattcatcccttgttagtagtatcgaaaaagacctacaggagattatggactcccttgtgctagaggagcctggcgcagcaggtaagaagccagccgcgacatcacctttgtcaccgatggccaatggcggccgatacctgctcagcccacccacctcacccggggcgatgtcagtggggagcagctacgagaacactagccctgccttctcacccctgtcaagtcctgcaagcagtggcagctgcgcttcccacagcccctctggtcaagagcccggcccttcagtgcctcccctggttcccgctcggtctagctcctaccaccttgccctccagcccccccagtcaagacccagcggggcccgcagcgagtcaccacggctctctaggaaagggggacacgagaggcctccaagtcccggtctgcggggcctgttaaccgactcccctgccgctacggtcctcgcggaggccagaagggctacagagtccccaagactaggcgggcaactccctgtcgtggctatttccctgagcgagtatcctgctagtggcgccctttcacaaccgactagcatccctggaagccccaagtttcagccgccagtgccagcccccaggaataaaattggaaccctccaggataggccaccaagcccatttcgagagccccctgggtcagaaagggtgctcaccacttccccgtcaaggcaactggtgggacggaccttctctgatggattggctactagaacacttcagccccctgagagtcccagactgggccgtcgcggcctggacagcatgcgggagctgcctccactgtcaccatcattaagcagacgggccctgtcaccccttccaacccgtactacacctgatcccaagctgaatagagaagtggcggagtcaccacgaccgagaagatgggctgcccacggagctagtccggaagatttttctttgaccttgggggcgaggggccggagaaccagatccccttcaccaactctaggggaatccctggctccccacaaaggaagcttcagcggtagactgtcgcccgcatactcactgggcagcttgacaggggcttccccatgccagagtccatgtgtgcaacgcaaactttcctccggggatctgagggtcccagtcacacgtgaacggaaaaacagcatcaccgagataagcgacaatgaagatgacctgcttgagtaccaccggcggcagaggcaggagcgcttgcgcgaacaggagatggaaagactggagcgtcagcgcctagagactatcctgaacctgtgcgctgaatactcacgagccgatgggggaccagaggcaggggaactaccatccatcggagaggccacagctgccctcgcgctggccggtagaagacccagtaggggcctggcaggcgcaagtggtagatcttccgaggaaccaggcgtcgctacccagaggctctgggaaagtatggaacggtccgacgaagaaaacctcaaggaagagtgctcgtccacagagtccacccagcaggagcatgaagacgcaccctctaccaagcttcagggggaagtgctcgcactggaggaagagagagcccaggtgctgggccacgtggagcagttgaaagtccgtgttaaggagctggaacagcaattacaagagtccgcaagggaagcggagatggagagagccctcctccagggggaaagggaggctgagagagcactgcttcaaaaggaacagaaggctgtagaccagttgcaagaaaagttagtggcactggaaactggaattcagaaagagagagacaaagaggccgaggcgttagagactgagacaaaactattcgaagacctggagtttcaacagctggaacgtgaatctagggtggaagaggaacgggaactggcagggcagggtctcctgcggtccaaagctgagctgctgcggagcatcgccaagagaaaggagagactggctattctcgactcacaggccgggcagattagagcacaggcagtgcaggagtcagagcgcctagcacgtgacaagaatgcttccctgcagttgctgcaaaaggagaaagaaaaactgaccgtgcttgaaagacggtaccatagcctcacgggcggacggcccttcccaaaaaccacctccacgttgaaggaggtctatcggtccaagatggacggtgaggccacaagtcctcttccacgcacgaggagtggaccactgccatcttcctccggaagtagcagcagttcatcccagctgtcagtggccacactcggccgatcgccgtcccctaagagcgctctattaacacagaacgggaccgggtcactgcctcgcaaccttgccgcaacccttcaggatatcgaaactaaaaggcaacttgcactacagcagaagggccagcaggtaatcgaagaacagcgaagacgacttgcggaactaaagcagaaggccgctgccgaggcccagtgtcaatgggatgctctccacggcgcagcaccattcccagccggccccagtgggttcccaccactcatgcatcactccattctccaccacctccccgctgggcgcgagcggggggaggaaggtgagcacgcctatgatactctctccctggagtcttccgacagtatggagacgtctatttctacagggggtaattcagcctgctccccagacaatatgtcaagcgcctctggacttgacatgggaaaaatcgaggagatggagaagatgctgaaagaagcacatgctgagaaaaataggttgatggagagccgggagcgggagatggagctgcggcggcaggcactggaagaagagagacggaggcgcgagcaggtcgaacgccggctccaatcagaatcagctcggcgacagcagctggtcgagaaagaagtgaaaatgagggaaaagcaatttagtcaggccagaccactaacgaggtacctgcctattaggaaagaagattttgacttaaaaactcatattgagtctagtggacacggggtcgacacctgtttgcatgtggtcctctcttccaaggtctgtcgcggctatctagtgaagatgggggggaaaattaagtcatggaaaaaaaggtggttcgtgtttgaccggctaaaacgcaccctgagttattatgttgataagcacgagaccaaattgaagggtgttatctacttccaggcaatcgaagaggtctactacgatcacctgaggagcgccgcgaagtctcctaatcctgccctgacattctgcgtgaagacacacgataggctatactacatggtggcaccttctgcggaagccatgaggatctggatggacgtgatagttacaggcgccgaaggctatacccaatttatgaactag

SEQ ID NO: 129006 - DNA, 2193 bp, synthetic construct
  misc_feature 1..2193: note = Description of Artificial Sequence: Synthetic coding sequence
  source 1..2193: mol_type = other DNA
atggagagaagtgatgaggagaatcttaaagaagagtgctccagtaccgaaagtacgcagcaggaacacgaagacgcaccgtccacaaaactgcagggagaagtgctcgctctcgaggaggaaagagcacaagtcttaggccacgttgagcaactcaaggtgcgcgtgaaggagctggaacaacaactacaggaatctgcaagagaagcagagatggagcgggcactgttacagggagaacgcgaggccgagcgcgctctgctccagaaggaacagaaggcagttgaccagctgcaggagaaactggttgcactggaaactggaatccaaaaagagcgagataaagagagagccgaactcgcagctgggcgacggcatctggccagacaggctctctacgcagaactccaaactcagttagataattgtcctgagtctgttcgggagcagctgcaagaacagctccgccgggaggctgaggccctcgagacggaaaccaaactattcgaggacctggagtttcaacagctggaaagggagagtcgtgtggaggaagagagggaattagctgggcagggcctgctgcgcagtaaagctgagctgctgcgctctatcgccaagcgcaaagaaagactggcgattctggattcccaagcaggccaaattagagcccaggcagtgcaggagtcagaaagactggccagggacaagaacgcatcactacagcttctgcagaaagagaaagagaaattgacagtgctggagaggcgttatcactcactgactgggggcagaccttttcccaagaccacctccactttaaaggaaatggaaaaactacttctgcctgccgttgatctcgagcagtggtaccaggagttgatggctggactgggtacgggccctgcagccgccagcccacactcttccccaccccccctccctgcaaaagcctcccggcagctccaggtttaccgaagtaaaatggatggcgaggcgacctctccactgccaagaactcgctccggaccccttccttcatcttctggttcctcatcctcgtcctcccagctctcggtggcaaccctggggagatcgccttctccaaaatccgcacttctcacacagaatggcactggatcactgccccgaaacctggccgcaacgcttcaggacattgagaccaagcgacagttggctctgcagcagaagggtcagcaggtgattgaagagcagcggcgccgtctcgcagagttaaagcagaaagcagccgccgaggcccaatgccagtgggatgcccttcatggcgccgcgccattccctgcaggcccgtcagggtttccaccactaatgcaccactctatactgcatcacctgccagctgggagggagagaggagaggagggagagcatgcttacgacacgctctccttggagtcctctgacagcatggaaacctcaatttctaccggcgggaattccgcctgctcaccggacaatatgtcgagtgcatcagggcttgacatgggcaaaatcgaggaaatggagaaaatgttgaaagaagctcacgcagagaagaatcgcttaatggagagccgcgaacgggagatggaactgaggaggcaagctcttgaagaggagaggcggaggagagagcaagtcgagcggcgtctccagtcagagtctgctcgtaggcagcaattggtggagaaagaagtgaaaatgagggaaaagcagtttagccaggccaggcccctgacccgctacctgccgatacgcaaggaagacttcgatctgaaaacccacattgaatctagtggacatggagtcgacacttgtttgcatgtagtcctgtcttccaaggtctgtcggggttacttggtcaagatgggtgggaaaattaagtcttggaaaaagaggtggtttgtatttgaccgccttaagaggaccttaagctattacgttgacaagcatgagaccaagctgaagggcgtcatctattttcaggccatcgaggaggtgtattacgaccatctgagatctgccgccaagtcacctaatcccgctttaacattttgcgttaagacccatgatcggctctactacatggtggcacccagtgccgaagccatgagaatctggatggacgtaatcgtgaccggcgctgaaggttacacccagttcatgaattag

SEQ ID NO: 129007 - DNA, 4134 bp, synthetic construct
  misc_feature 1..4134: note = Description of Artificial Sequence: Synthetic coding sequence
  source 1..4134: mol_type = other DNA
atggatgcccttaatcggaaccagatcggaccagggtgtcagacgcagaccatggtccagaaaggaccattagaccttatcgagaccggcaaaggccttaaagtgcaaaccgataaaccccacctcgtctcactcggcagtggtagacttagcaccgcaataacattactcccattggaggagggcaggacagtgatcgggagcgccgctcgcgacatcagcttgcagggtcccggcctagctcctgagcattgttatattgagaacttgcggggtacactgactctgtacccatgcggtaacgcctgcaccattgacggcctgcctgtacgtcagcccacccggctcacacagggttgtatgctgtgtctggggcagagtacctttctgcggtttaaccaccctgcagaggcaaagtggatgaagtcaatgatccccgccggagggcgggccccggggcccccgtattctcctgtgccagctgagtccgagtctctggtgaacggaaatcacacaccgcagacagctactagagggccctcagcctgtgcctcccatagctccttagtcagtagtattgagaaggatctgcaggaaatcatggatagtctggttcttgaggaacctggtgctgcaggcaaaaagccagctgctacatcccctctgagcccaatggctaatggtggtcgttacttgcttagtccgccaacatctcccggtgctatgtctgtgggttcctcttatgagaatacttctccggctttcagccccctgtcctcccctgcctcctccggctcatgcgcatctcactccccgagcggtcaggagcctggtcccagtgtgccaccccttgtcccagctaggtcctccagttatcacctggcacttcagccgccgcagtcccgtcctagcggcgccaggagcgagtcaccaaggttgtctagaaagggggggcacgagcggcctccaagtcctggcttacgaggtctgttgaccgactcaccagctgcaactgtgttagctgaggctcgtagagccaccgagtctccaaggctggggggccagctcccagtggtggccataagcctcagtgagtaccctgctagtggggccctgtctcaacccacatcgatcccaggctcacctaaattccagccccccgtgcccgcccctcggaacaagatcgggacactgcaggatcggccaccaagcccatttagagagccccccgggagcgagcgcgtccttaccacgtcaccatcacgccagttggtagggcgaacattttccgatgggcttgctacgcgcaccttgcagcctccagaatccccacgccttggcaggagggggctggatagtatgcgggagctcccaccactttccccttctctgagccggagagccctctcacctctgcctacgcgtacaactccagatccaaagttaaaccgagaagtggcagaatcaccccgacctagacgatgggctgctcacggcgcttcgcccgaagacttcagcctgaccctgggagcacgcggccggaggacacggagtccatcacccaccctgggggagtctctcgcgccccacaaaggtagtttctctggacgtctctcccctgcgtatagcctcggatcgctgaccggtgcctctccttgccagtcaccctgcgttcagaggaagctgagctctggagatctgagggtcccagtgacccgcgaacggaagaactcaataactgaaatttccgataatgaggatgaccttctcgagtatcacaggcggcagaggcaggagaggttaagggaacaggaaatggagaggcttgaaaggcagagactcgagacaattctgaacctgtgcgcagaatactcacgagcggatggggggcccgaagccggcgagctgccttctataggcgaggctacagctgcattggctttggctgggaggcggccttcacgagggctggccggcgcatctggcaggagctcagaagagccgggtgttgcaacacagagactatgggaatcaatggaaaggagcgacgaagaaaatctgaaggaggaatgttcgtccaccgaatccacacagcaggagcacgaggatgctcccagcaccaaactgcagggggaagttctcgcattggaggaggaaagggctcaggtgcttggccatgtggaacagctgaaagtacgtgttaaggagctggagcaacagctgcaggagagcgcccgtgaagctgagatggagagggccctgctgcaaggggaacgcgaagctgagagggccttactacaaaaagaacaaaaagcagtggatcagctccaggagaagctggttgccctggagacaggaatccagaaagaacgggataaggaagcggaagccctcgaaactgagacaaagctgttcgaagacttagagttccagcagttagagagagagtctagggttgaggaggagagagagctcgcagggcaaggtctgcttcgcagcaaggccgagcttctccgttccatagcgaagcggaaagagcggctggctattctggactctcaagctggacaaattagggcccaggcggtccaggaatctgagaggctagcgcgagataagaatgccagcttacagctgctccagaaagaaaaagaaaagctgacggttcttgaaagaagataccactctctcacaggcgggcgcccattcccgaaaaccacctccactttgaaggagatggaaaagctcttgctgcccgccgtggatctggaacagtggtaccaggagttaatggctgggctgggtaccgggccagcagccgcctcgccacacagcagtccaccgcctttgcccgcaaaagcctccaggcagctccaggtctacaggtcaaaaatggacggggaggccacttctcctctgcccagaactagatctgggccactaccttcatcgagcggctcttcgtcttcgagctctcagctaagcgtcgccacgttggggagatcaccctccccaaagtccgctctgctgactcagaatggcactggatcgctccccagaaatctcgccgccacactccaggatatagaaacaaagaggcaattagctctgcagcagaaaggccagcaggtcattgaagaacaacggagacgtctagcagaactgaaacagaaagccgctgcggaagctcagtgtcagtgggatgccttacatggcgcagcaccgtttcctgcaggaccaagtggttttccgccattgatgcatcactcaattcttcatcacttgcccgccggtcgggaaagaggcgaggagggtgagcacgcatacgacacattgtccctggagagtagcgactctatggagacgagcatcagtactggaggcaatagcgcttgttcacccgataatatgagcagcgcctctgggctggacatgggaaagatcgaggagatggagaaaatgctgaaagaggcccatgcagagaaaaatagacttatggaatcaagggagcgggaaatggagcttcggcgacaggcacttgaagaagaacggaggcggagggaacaggtggagaggcggctccagtctgaaagtgcgcgtcggcaacaactggtagagaaggaggtcaaaatgcgggaaaagcagttctcccaggctcgccccctaacgcgatatttgcctattagaaaggaagacttcgacttgaaaacacatattgaaagctctggacacggagtggatacttgtttgcatgtggttctaagttccaaagtgtgtagaggctatctggtgaaaatgggtggaaagatcaaaagctggaaaaagcgctggttcgtgttcgatcgcctcaagaggaccctgagttactatgttgataagcacgagaccaagctgaaaggagtcatttacttccaagctattgaggaggtgtattatgaccatctgagaagtgcagcaaagaagaggtttttcagatttaccatggttacagagtccccaaaccccgcgttaaccttctgcgtcaagacccacgaccggttgtactatatggtggccccatctgctgaggctatgcgtatctggatggacgttatcgtgaccggcgcggagggttatacacagtttatgaattag

SEQ ID NO: 129008 - DNA, 3423 bp, synthetic construct
  misc_feature 1..3423: note = Description of Artificial Sequence: Synthetic coding sequence
  source 1..3423: mol_type = other DNA
atgtctgttggctcctcctatgagaacacgtcacctgcttttagtcccctttcttcgcctgcttccagcggctcgtgtgccagtcacagtcccagcggccaagagcccggcccctcagtgcccccgctcgtcccggcacggagttcttcctaccatcttgcactgcagccccctcaatcgagacccagtggggcaaggtcagaaagccccagactgagccggaagggaggacatgagaggcctcccagtccaggccttcgtggcctactgaccgattccccagctgcgacagttctggcagaagcaaggagagccactgagagtcctaggctgggtggtcaactcccagtggtcgcaatcagtctgagcgaatatcccgccagcggcgcgttgagtcagcctacatctattccgggatctcctaaatttcagccacccgtgccagccccccggaacaagatcggtaccttacaagacaggcccccttccccatttcgcgagccccctggctccgagagagttctgaccactagcccgtctcgacagctggttggaagaactttttccgacggtctggcaactcggacactgcagccaccagaatccccacggctcgggcgccgcggcttagattctatgcgcgagctgccaccactatctcctagcctgtcccgcagagccctaagtcctctgcccacaagaaccacacccgatcccaaactcaacagagaagtggcagagagtcctagaccccgccgctgggctgctcatggagcttcacctgaggatttctctctaaccctcggagcaaggggacggaggacgcggtccccctcgccaacattgggcgaatcactcgcccctcataaggggtcgttctctgggagactgtctcctgcatattctttgggaagtttgactggagccagcccctgccagagcccttgcgtccagaggaaactgtcctctggtgacctgagagttccagtcacccgcgagcggaaaaatagcatcacggagatatcagacaacgaagatgatctactggaatatcacaggcggcaacgacaagagcggttacgggagcaggagatggaaagattagaaagacaaagattagagacaatactgaacctatgtgccgaatactcccgcgccgacggtggtcctgaagccggagagttaccgtcaatcggggaagctaccgcggccctggctttggccggacgcaggccttcgcgaggtttggccggggcctccggcagaagttctgaggaacccggtgtggcaactcagcgactctgggaatcgatggaaaggtcggacgaggagaacctaaaggaggaatgctcatccaccgagtctacccaacaggagcatgaagacgcacccagtaccaagctccagggagaggtgcttgctctagaagaagaacgagctcaggttttgggtcatgtagagcagttgaaggtaagagtgaaggaactggaacagcagttgcaggagtcagcgcgagaagccgagatggaacgagccctactccagggggagagggaagctgaaagggcactgcttcagaaagaacaaaaggccgtcgatcagctgcaagagaagctcgtggccctggaaacaggcattcaaaaagagcgcgacaaagaggctgaagcactcgagactgagaccaaactgtttgaggacctcgagttccagcagctggagagagaaagcagagtagaggaggaacgagaactggcgggtcagggcttgctgagatctaaagcggaactgctcagatcgatcgctaaacgtaaagagagacttgctatcctcgattcccaggcggggcagattcgtgcccaggccgtccaggaatcagaaaggcttgcacgagacaaaaatgcaagcctgcagttgttgcagaaggaaaaagagaagctgacagtcctggaacgaaggtaccacagcctgacgggcggacggccgtttcctaagacaaccagcacattgaaagagatggagaagttgctcctgccagccgtcgatttggagcagtggtatcaggagttgatggctggcctggggaccgggcccgcagctgcgagcccgcactcctcaccaccgccccttcccgccaaggcttctcgccagctccaggtgtaccgaagcaaaatggacggagaagccacaagccctcttcctagaacacggagcggacccctaccatcttcgtccggaagctcgagctcgagtagccaactctcagtagccacactcggaagatccccttcgccaaagtcagccctgctcacccagaatggaacgggttccctcccacggaatctcgctgccaccctgcaggatattgagacaaagagacagttagcgctgcaacaaaaggtggagtcactgccagctgaacctctcccaacggatgatccggccggccaacaggttatcgaggagcagcgccgtcgtctggccgaacttaaacaaaaagccgctgcggaagcacagtgccagtgggacgcgctccatggcgccgccccttttcccgcaggaccatcagggttcccgcccctcatgcatcactcaatcctccatcatctaccagctggccgtgaaaggggcgaggagggggaacatgcctatgatactctttctcttgagtcctcagattctatggaaacgagcatttcaactgggggcaacagcgcgtgctctcctgataatatgtcctccgcaagtggactagatatgggcaaaattgaggagatggagaaaatgctgaaagaggcgcatgcagagaaaaatcgtctgatggaaagtagagagcgggagatggagttgaggcgtcaggcattggaggaagagcggcgccggcgggagcaagtggaaagaagactgcagagcgagtccgctcggcgccagcaactggttgaaaaggaagtcaaaatgcgggagaaacagttctctcaggctcggccccttactagatacctgcccattcgaaaagaggattttgatttgaagacccatatcgagagctccggacatggcgtggatacctgcctgcacgtagtgctaagcagcaaggtgtgccgtggctatcttgtgaagatgggcggaaagatcaaatcgtggaagaaacggtggttcgtctttgacagactcaagaggacgttatcttactatgtagacaaacacgagactaagcttaaaggggtgatttacttccaagccatagaggaagtctattatgatcaccttcgctctgccgctaagtcgccaaatccagccctgaccttctgcgtcaagacgcatgatagactctactacatggtcgcgcctagcgctgaagccatgaggatttggatggacgtaatcgtcaccggagcagaaggatacacccagttcatgaattag

SEQ ID NO: 129009 - DNA, 306 bp, synthetic construct
  misc_feature 1..306: note = Description of Artificial Sequence: Synthetic coding sequence
  source 1..306: mol_type = other DNA
atgggtggtaaaatcaagtcatggaaaaaacggtggttcgtgtttgacaggctgaaaagaaccctgtcctactacgtagacaaacacgagacaaaactgaagggcgtgatctattttcaagccatcgaggaagtctactacgaccatctgcggtctgccgctaaaagtcctaatcctgcactgacattttgcgttaagacacatgaccgactctattacatggtcgcccccagcgccgaggccatgagaatatggatggacgtgattgtgacaggcgcagaggggtatactcagttcatgaactag

SEQ ID NO: 129010 - DNA, 1119 bp, synthetic construct
  misc_feature 1..1119: note = Description of Artificial Sequence: Synthetic coding sequence
  source 1..1119: mol_type = other DNA
atggatgctctgaaccgcaaccagattgggcctgggtgccagacacagacgatggttcaaaaggggccgcttgatctgatcgaaacgggcaagggactgaaagtccagacggacaagccccatttagtatccctaggtagcggcagactgagtacagcaatcaccttgcttcccctggaggagggaagaaccgtgatcggctccgccgcccgcgacatatctctgcagggacccggactagcacctgaacattgctatatagagaatttaaggggtaccctcaccctttatccctgcggtaacgcttgcaccatcgatggattgccagtgagacaaccaacgaggctgacacagggatgcatgctttgtctaggccagtccacctttctcaggtttaatcacccggccgaggcaaaatggatgaaaagtatgattcctgccgggggccgagcacccggccctccctatagcccggtgccggagtcagagagcctcgtaaatggaaatcataccccacaaacagccactcggggacccagcgcatgcgccagccattcaagcctagtatcatctattgagaaggaccttcaggagataatggattccctggtacttgaagagcctggagccgctggcaagaaaccggcagctacctcccccctgagtcctatggccaacggtggccggtacctgttgagccccccaacgagtcccggggcaatgtccgtgggctcgtcttatgaaaatacttctcccgctttctccccactgtctagtccagcgtcttcagggagctgcgcttcccacagccctagcggccaggagccagggccgtccgtccctccactggttcccgcccgcagctccagttaccaccttgccttacagcccccacagtctaggcctagcggagccagaagcgagtctcctagactgagtagaaagggtggccacgaacgaccccccagtccaggtctacggggccttctgactgattccccagccgcgaccgtcctggcggaagcacgcagagccacagagtccccacggctggggggccagctgcctgtcgtcgccataagcctctcggagtacccagcagcgcgccgttgcacctag

SEQ ID NO: 129011 - DNA, 744 bp, synthetic construct
  misc_feature 1..744: note = Description of Artificial Sequence: Synthetic coding sequence
  source 1..744: mol_type = other DNA
atggatgcgttgaacagaaaccagatcgggccaggctgtcaaactcagacaatggttcaaaaaggcccactggatctgattgaaaccggcaagggtctgaaagtgcaaaccgataagcctcatctggtgtccctgggatcggggcgactctctaccgcaatcaccctcctgcctctcgaagagggccgaactgtgatcgggtctgccgcccgcgacatctctctccagggacctggcctcgcccccgagcactgctacatcgagaatctgcggggaacactgaccctttacccctgcggtaacgcctgtaccattgatggccttccagtgagacagcccaccagactgacccagggatgtatgttgtgtcttgggcagtccaccttcctgagatttaaccaccccgcggaagcgaaatggatgaagtccatgataccagccggcggacgcgcccccggccccccttactcccctgtgccagcagaaagtgagtcacttgtgaacggtaaccataccccccagactgccaccaggggacctagcgcctgcgcatcgcacagcagtttagtttcatctattgaaaaagatctgcaggagatcatggatagcctggtgctggaggaaccgggcgctgccgggaaaaaacctgctgctaccagcccactttctccgatggctaacggcggacgctacctcctgagcccacctactagccctggacacgtatgcgggctgcagttatag

SEQ ID NO: 129012 - DNA, 14055 bp, synthetic construct
  misc_feature 1..14055: note = Description of Artificial Sequence: Synthetic coding sequence
  source 1..14055: mol_type = other DNA
atggtagctggcatgctgatgcctcgcgaccagctaagggccatctacgaggtcttgtttcgggagggagttatggtggcaaagaaagacaggcgaccccgcagtcttcatccccacgtacccggcgtcacaaaccttcaggtcatgcgggcaatggcctctttgagggcgaggggacttgtccgggagactttcgcctggtgccatttttactggtacctgacaaacgaggggatcgcccatttacggcagtatctacacctaccacctgagattgttcccgcaagtctgcagcgcgtacggagacctgtagcaatggtcatgcctgctcgtcgcactccccatgtgcaggccgtccagggccctcttgggtcacctcctaaacgggggccactgcccacggaggaacaaagagtgtaccgccgcaaggaactcgaggaagtaagtccggaaaccccagtggtaccggccaccacgcagcgcacgctggccagacccggaccggagcccgctcctgcgactgacgagagggaccgtgtgcaaaagaaaacgtttacgaagtgggtcaataaacacctgattaaggcccagaggcatatcagcgatctgtacgaggatctaagggacgggcacaatcttatcagtttactggaagttctgtcaggggacagtctaccacgggagaagggcagaatgcggttccacaaactgcagaacgtgcagattgccctcgattatctgagacaccgtcaggtgaaactggtgaacattcgtaacgacgacatcgccgacggtaaccctaaacttacattaggattgatttggacaattatactccactttcaaattagtgacattcaagtttccggacagagtgaggatatgacagccaaagagaaactcctgctttggtctcagcggatggtggagggctaccagggcctgaggtgcgataattttacttctagttggcgcgacggacggttgtttaatgcgatcatccacagacacaaacccctgctaatcgacatgaacaaggtgtaccgacagactaatctcgagaaccttgatcaagctttttcagtggctgaaagggacctgggcgtaacacggcttctcgaccctgaggatgtggatgtgcctcaacccgacgagaagtccattatcacttacgtgtcttcactctatgacgcaatgccacgggtacctgacgttcaggacggagtaagggctaatgagctacagctcagatggcaggaatatcgggaactagtgctgctcctgttgcagtggatgcggcatcataccgcggcctttgaggagagacgattcccatcttcctttgaggaaattgaaattttatggagccagtttctaaaattcaaagagatggagctgcccgctaaggaggcggacaaaaaccgatcgaaaggcatttatcagagcctcgagggagctgttcaggccggccagctgaaagtaccccctggctaccaccccttagacgtcgagaaggagtggggaaagctccatgttgcaattttggaacgcgaaaagcagctcaggagcgaattcgaacgacttgaatgtctgcagagaatcgtgaccaagctgcagatggaggcaggactctgtgaggagcagctgaaccaggctgatgccctgctgcaatccgacgtgcggctgttggctgccggaaaggttccccagagagctggcgaggtggagagggatttggataaggccgacagtatgatccgcctgctcttcaatgatgtgcagaccctaaaggatggcagacatccacagggcgagcagatgtatcggagggtgtataggttgcatgagcgcctcgtggctattcggactgagtataacctccggctgaaggccggagtcgctgcgcccgcgacacaagtggcgcaggtaacacttcaatcagtgcaaagaaggcctgagctggaagatagcaccctgcgctacctgcaggatttactggcatgggtcgaagagaaccagcacagagtcgatggggctgaatggggtgtggacctacctagcgtagaggctcagctgggaagccaccgcgggcttcaccaatcaatagaggagtttcgcgccaaaattgagagagcacgaagcgatgaggggcagttatctcccgcaactcgtggcgcctaccgcgactgcctgggccggctggatctccagtacgccaaactacttaattcaagcaaagctcggctgaggtctttggagagcctgcactcgtttgtcgctgccgccaccaaagagctgatgtggctcaacgagaaagaggaggaggaggtcggatttgattggagcgaccgtaacaccaacatgaccgcgaaaaaggaatcttatagcgctctaatgcgggaactcgagctgaaagagaagaagattaaggagctgcaaaacgccggggacaggctcttaagagaagaccaccctgctcggcccacggtggaatcctttcaggctgccctgcaaacccaatggagctggatgctgcagctgtgttgttgtatcgaggcccacctgaaagaaaatgcagcctacttccagttctttagtgatgttagggaagcagaaggtcagctccagaagctgcaggaagctctgagaaggaaatacagctgtgataggagcgctactgttactcggctggaggacctgttgcaggacgcccaggatgagaaagaacagctcaacgaatataaggggcatctgagcgggctcgccaagagagcaaaagcggttgttcagctgaagccaagacaccccgctcatcctatgagagggagactgcccctgcttgcggtatgtgattacaaacaagtggaggtcactgtgcataaaggggatgagtgtcaactggtcgggcccgcacaaccttcacattggaaggtcctgagctcctcaggaagcgaggccgccgttccctccgtatgtttcctcgtcccaccgcccaaccaagaagcccaggaggcggttacacggctcgaggctcaacatcaggctttagtgactctgtggcatcaactgcacgtcgatatgaaatccctactggcatggcaaagcctgcgcagagatgtgcaattgatccggtcatggagtcttgctacattccgcacactgaagcccgaagaacagaggcaggcactccacagtcttgaacttcactaccaggccttccttagggattctcaagacgccggggggttcggtccagaggatcgattgatggctgagcgggagtatggcagctgctcacaccactatcagcagctgttgcagtctttggagcagggcgcccaagaagaaagccgatgtcagcggtgcatcagtgagctgaaagatattcgactgcagctcgaagcttgcgagacaaggaccgtacaccgattgagactgccgctggacaaggagcccgctcgggagtgcgcccagcggattgcagaacaacagaaggctcaggccgaggtggaagggctcggaaaaggcgtggcccggctcagcgccgaagcagaaaaggttctggcacttcctgagcccagcccagctgcccctactttaagaagtgaactggagctcaccctcggaaagcttgaacaggtgcgctcgttgtccgcgatttatctggagaaactcaaaacaatctctctggtaattagaggaacccaaggcgcagaggaagtgctgagagcccatgaggaacagttgaaagaggcccaggcagtgcccgccaccctgcccgaactggaagccacaaaggctagcctgaagaagctacgggcacaagcagaggctcaacagccaactttcgatgctcttagagacgagctgcggggggcccaagaagtgggggaacgcctacagcagaggcatggcgagagggatgtggaagtagagcgatggagagaacgtgtggctcaactgctcgaaaggtggcaagctgtcctggctcaaaccgacgtgaggcagcgcgaactggaacagctgggaagacaattacggtattacagggaatccgcggatccgctgggtgcctggctccaggacgcaaggaggcggcaagagcaaatacaagctatgccactggccgactcccaggctgtacgcgaacagttgcgacaagaacaagccctgttggaagagatcgagcggcacggcgagaaagtcgaggagtgccaaagattcgctaaacagtacatcaatgccatcaaagattatgagctgcagctggtgacctataaggcccagctcgaacctgtcgcgagccctgcaaaaaaaccaaaagtgcaatcaggaagtgagagcgttatacaggagtatgtcgacctcaggactcactacagtgagctaacaacactgacgtcccagtacattaagtttatctctgagactctccggcgcatggaagaagaagaaagactggcggaacagcagcgggcagaagagcgcgaaagattggcggaggttgaggccgcactggagaagcagcggcagctggccgaggcccacgcacaggccaaagcacaggccgaaagagaggcgaaggaacttcaacagcgtatgcaagaggaagtggtgcgccgggaagaggctgcggtggatgctcagcagcagaaacgcagcatacaggaagagctccagcagctgcgccagagcagcgaggccgaaatccaagccaaagccagacaagccgaagcagccgagcggtcacgactgcggatcgaggaagaaataagggtggtgagactacagctcgaggcaacagaaagacagcggggcggtgccgagggagaacttcaggccctgagagcccgtgccgaagaagctgaagcacagaagagacaagcccaggaagaggcggaacggctcaggcggcaggtgcaggacgaatcccagcgcaaaaggcaggctgaagttgaactcgcctcgagggtgaaggcagaagccgaggccgcacgtgaaaaacaacgggcactgcaggcccttgaggaactccgactgcaggcagaggaggcagaacggagactccgtcaagcagaggtagagagagcacggcaggtgcaggtggctcttgagaccgctcagcgctcagccgaagctgagttgcaaagcaaaagggcatcattcgctgaaaagacagcacagctggaacgcagcctgcaagaggagcacgtggctgtggcgcagcttagggaagaggccgagcggcgagcacagcagcaggcggaagcagaaagagcgagagaagaagccgagcgtgaactcgagaggtggcagctgaaggctaacgaagcactgagacttaggcttcaggcagaggaggtcgcccagcagaagtcactggcacaagccgaagcagaaaagcagaaggaggaagccgagcgtgaggcgagacggcggggaaaagctgaagaacaggccgtcagacagcgtgaactcgcagagcaggagctggaaaaacagcggcagcttgcggaaggcaccgcgcagcagcgtcttgccgctgaacaggagttaattcgcctacgggctgaaaccgaacagggcgagcagcagcgtcaattgcttgaggaggaactggcccgcctacagcgcgaagcagctgccgccacgcaaaaaaggcaggagctggaggctgaactggccaaggtcagggcagagatggaggtactgctcgcaagtaaagctcgggccgaggaggaatccaggagcacaagcgagaaatccaaacaaaggctcgaggcagaggccgggcggtttagagaactggctgaagaggccgcgcgactccgcgccctggcagaagaggcaaagcgccagaggcagcttgcagaggaggacgccgcacggcagagggccgaagcagagcgtgttctggctgagaaactcgcagccataggagaagccactcgtctgaagaccgaagctgagatcgctctgaaggagaaagaggccgagaatgagcggttgaggaggctcgccgaggacgaagcgttccagcgtaggaggctagaggaacaggctgcgcagcacaaggccgatattgaggagagacttgcccagctccgaaaggcctccgattccgagctcgagagacagaaaggtcttgtcgaagacacgctgagacagcgcagacaggtcgaagaggaaatactcgcccttaaagcgtccttcgagaaagcggccgcaggcaaagccgaactggagcttgagcttggaagaattcggagcaatgctgaagacaccttgaggagcaaggaacaggcagaactagaagccgcccgccagcgccagcttgcagccgaggaggaaagacgacgacgcgaggcggaagagagggtccaaaagagtctagctgcggaagaagaagcagcccggcaacgtaaggccgccttggaagaggtggaaagactcaaggcgaaggtagaggaggctcgccgcctgcgagaaagagctgaacaggagtcagcccgtcaacttcagctggcacaggaggccgctcagaagaggctgcaggcagaagagaaagctcacgctttcgctgtccagcaaaaggagcaggaactgcagcagaccttgcagcaagaacagtctgtgctggaccagttgagaggtgaggccgaggctgcacgcagagctgcggaggaagccgaggaagcgcgggtccaggccgagcgggaggccgcacagagtaggagacaagtagaagaagccgaacgtcttaagcagagtgctgaagagcaggcacaggctcgggcccaggcacaggcagcagcagaaaaattacgcaaagaagcagagcaagaagccgcaaggagagcccaggcggaacaggccgctttgcgtcagaaacaggccgcagacgctgaaatggaaaaacataaaaaatttgccgaacagaccctgcgtcagaaggctcaggtggagcaggagttgacaacactacgactacagctcgaggaaactgaccaccagaaaaacctcctagacgaagaactccagagactgaaggctgaagcgaccgaggcagctaggcagcgttcacaggtggaggaagagttattttccgtgcgggtgcagatggaggagctgtctaaactcaaggcgagaattgaagctgaaaatagggcactaattctgagagataaggacaacacccaacgcttcctccaggaggaggctgagaagatgaaacaggtggctgaagaagccgctcggttaagcgtggcggctcaggaggcagcaaggcttcgccagctcgctgaagaagacctggcgcagcagagagccctggctgaaaagatgctgaaagaaaagatgcaggctgttcaggaagcgaccaggctgaaggcggaggccgagctcctccagcagcagaaagaactcgcacaggaacaggcgcggcggttacaagaagacaaggaacagatggcccagcaactggctgaagagactcagggatttcagcgcactttagaagcggaaagacaaagacagctagagatgtccgccgaagcagagcggctcaagctaagagttgctgagatgtctcgcgcccaggccagggcagaagaggacgcccagagattccggaaacaagccgaggaaattggagagaagctgcacagaacagagttagccacgcaagagaaagtaactttagtgcaaacactggaaattcagcggcaacagtctgatcatgacgctgagcgactgcgggaggccattgcggagctcgaacgagagaaagagaaactgcagcaggaagccaaactgttgcagctaaaaagcgaggaaatgcagaccgtacagcaggagcagctgctacaggagacccaggcccttcaacagtcctttctgtctgagaaggattccctgctacagagagagagatttatcgagcaggagaaggcgaagctcgagcagctgttccaggacgaagtggcaaaagctcagcagctccgggaggagcagcagcgacagcaacagcaaatggagcaggagaggcaaagactggtcgcaagcatggaggaagcaaggcgacggcagcacgaggcagaggaaggggtccggagaaagcaggaggaactccaacagctggagcagcagcgccgtcagcaagaagaactgctggccgaggaaaatcagagacttagagagcagctgcaactattggaagagcagcacagggccgcacttgcccactcagaagaagtgacagcctctcaggtcgcggccaccaagacacttcccaatggtcgggatgcgctggatgggccggccgcggaagcggaacctgagcatagcttcgacgggctccggagaaaggttagcgcccagaggcttcaggaggccggcatcctgtccgccgaggagttgcaacgattggctcagggccatacaactgtcgacgaactcgcaaggcgggaagacgttaggcattatttacagggcagatcaagtatcgctggccttctgttgaaagccactaacgagaaactttctgtctatgctgcattacagcgccaattgttgtctccagggacagcacttatacttctggaggcccaggccgccagcggcttcctcctggacccagtacgcaataggagactgacggtaaacgaggcagtcaaggaaggcgtcgtgggtcccgagttgcaccacaagctcctgtccgcagaacgggctgtaacagggtataaggatccctacacaggccagcagatttcgctgtttcaagcgatgcagaaggggctcattgtcagagagcacggaatccgcctactcgaagctcagatcgcaactggtggcgtaatagacccggtccattcccacagagtccctgttgacgtcgcttatcgccgcgggtactttgacgaggagatgaatcgcgtcctggctgacccctccgacgatactaaggggttctttgatccaaatacccacgagaatttaacctatctccagcttctcgaaagatgtgtggaggatcctgaaacaggtctgtgcctactgccattgacagacaaagccgctaaaggcggggagttggtgtatacagacagcgaggccagagacgtgttcgagaaggccactgtcagcgccccattcggtaaattccagggcaagactgttaccatctgggagattatcaactccgaatatttcactgctgagcaaagacgcgacctgttacgccagtttagaacagggcgtattacggtggagaagattataaagatcataatcaccgtcgtggaggagcaggaacagaagggcaggctctgcttcgagggccttcgttccctcgtcccggcggctgaacttttggaatccagagtaatcgaccgcgaactttatcagcaacttcagcggggcgaaaggagcgtgcgcgatgtcgcggaggttgatacagttcgtagggccctaaggggcgctaacgtgattgctggcgtctggctcgaggaggcagggcagaagctcagcatttataacgctttaaagaaggatttgctgccttctgacatggccgtagcgttactcgaagcccaggcaggtacagggcatatcatcgatcctgcaacttctgcaagattgacagtcgacgaagcagtaagggccgggttggtgggacctgaattccacgaaaaattgttaagtgcagagaaggctgtgactgggtaccgagacccctacacgggacagtcggtttccctcttccaagcactgaaaaagggactaatacctagagagcagggactgagactgcttgatgcccagctgtctaccggtgggattgtggatccttccaaatcgcaccgtgtccccctcgatgtggcctgtgcgaggggctgcctggatgaggagacttcacgcgctctgtctgcccctagggccgacgctaaagcttactccgatcctagcaccggcgaacctgctacatacggcgaattacaacagcgttgcagaccagaccagctgaccggcctgtcactgctgcctctctcggagaaagcggcaagggcccgacaggaggaactgtactctgagcttcaggcccgcgagacatttgaaaaaacgcccgtcgaagtgccagtcggtggattcaaaggaagaaccgttaccgtgtgggagctgatttcatccgagtacttcacggccgagcagcgtcaggaactgctccgccagtttaggactggaaaggttacggtggaaaaggtcataaagattttaatcacaatagtggaggaggtggaaactttacggcaggagagattgtctttttctgggttacgcgccccggtaccggctagcgaattgttagcttcaggggttctgagccgtgctcagtttgaacagctgaaagacggcaagaccaccgttaaagatttgtcagagcttgggtcagttcgcacactgctacaaggaagcgggtgcctggctggcatctatctggaagacacaaaagaaaaggtgtcaatttatgaagctatgcgcagagggctgctgagagctacaaccgcagcgttgctccttgaagcacaagctgcaacagggttcctggtggatcccgtgcggaatcagaggctttatgtccacgaagctgtgaaggccggggttgtcggccccgaacttcacgagcagttgctatcagctgaaaaggctgttacaggttatagagatccttactcgggctctaccatcagtctgtttcaagctatgcaaaagggattggtcttaagacagcacggcattagacttctagaggcacagatcgccacaggaggcataatcgatcctgttcatagccacagggtgccggtcgatgtagcttaccagaggggatacttctcagaggaaatgaatcgggtactcgccgacccaagcgacgatacaaaaggcttcttcgatcccaatacgcacgaaaatctgacctatcgccaacttcttgaacggtgtgtggaagaccccgaaacaggcctgaggttgctccccctcaaaggagcagaaaaggccgaagtagtagagacaactcaagtgtacacagaagaggagacacgacgtgcttttgaggagacccagattgatattccgggcggcggcagccacggtggaagcaccatgtctttgtgggaggttatgcagtccgacctgattcctgaggaacagagggctcagttgatggctgacttccaggccggaagagtgaccaaggagagaatgattattatcattatcgagataatcgagaaaaccgagataattaggcagcaggggctcgccagttacgattatgtcaggcgcagactgaccgccgaggacttgttcgaggcaagaatcatctctttagaaacctataacctgctccgagagggaacccgctctctgagagaagccctggaagccgagtccgcatggtgctacttatatggcaccggatcagtcgccggggtgtatcttccgggcagtaggcagactctgtccatttatcaggctctgaagaaggggctgctctccgccgaagtggcccgtctcctgctggaggcacaggcggctactggattcctgctggaccccgtcaagggggagcggttaaccgtggacgaggcggtgcggaagggcctcgtggggccagaattgcacgacaggctgctttcagccgagcgggccgtgacaggctatcgggacccgtacactgaacagacgatctctttgttccaggccatgaagaaagagctgattccgactgaagaggcccttagattactggatgcgcagttggccaccggagggatcgtagatcctaggctagggtttcatttacctctagaagtcgcctaccagagaggataccttaataaggacacacacgatcagttgtctgaaccctcagaagtgcgatcatacgtcgatccgtccaccgacgagagattgtcatacactcagctcctgcgccgctgcaggagagatgacggtaccggacagttactcctccctctgtcagacgcccgcaaactgactttccgcgggctgcgaaagcagatcacaatggaggagctggtccgctcgcaagtcatggatgaggctaccgctttgcagctgagagaggggctcaccagtatcgaggaggtcacaaaaaacttgcaaaaattcctcgaggggacctcctgtattgccggagtgttcgtagatgctacaaaagaacggctctctgtgtatcaggccatgaaaaaaggcattatcagaccaggcactgcttttgagttgctggaggcccaagcagccactgggtatgtgatcgatcccatcaaagggctcaaactcactgtcgaggaggcggtcagaatggggatagtgggcccagaattcaaggacaaactgctcagcgccgaacgcgcagtcacaggatataaagatccctacagtgggaagctgatcagcctgttccaggccatgaaaaaggggctgatcctcaaggatcacgggatacgactgttagaggcccagatcgcaacaggagggatcatcgacccagaggaatcgcatcggttgccagtagaagttgcctacaagaggggtctgtttgacgaagagatgaacgaaattttaactgacccctcagacgatacaaaaggctttttcgacccaaacacagaggagaacttgacatatctgcagctaatggaacgatgtataactgaccctcagacaggactatgtttgctgcctcttaaagagaagaagagggaaaggaaaacgtccagcaaaagctcagtgagaaagcgccgggtggtgattgtggatcccgaaacgggcaaagaaatgtccgtgtacgaagcatataggaagggattaatcgaccatcaaacatatcttgaactctctgagcaggagtgtgaatgggaggagatcacaatttcctcgagcgatggagtggtcaagtctatgatcatcgatcgtcgaagcgggcggcagtacgacatagatgacgccatcgctaaaaatctgattgacaggagtgcactcgatcagtacagagcaggaacgctgagcattactgagtttgccgatatgctgagtgggaacgccggtgggtttcgatcgcggagtagttccgtaggaagcagcagcagctaccctatttcgcccgctgtcagccggactcagctcgcttcctggtcagaccctacagaggagaccggccccgttgctggaattttagatactgagaccctggaaaaagtaagcatcaccgaagctatgcatagaaacctggttgataatataacaggacagaggctactggaagcccaggcgtgtaccggcggtatcatcgatccgagcactggggagcgctttcccgtgacagatgctgtcaataagggcttggtggacaagataatggtcgaccggataaacctggcccagaaggccttctgtggatttgaggatccacggactaagaccaagatgtcagctgctcaagcactgaaaaaggggtggctctactacgaagccggccaaagattcttggaagtccaatacctcactggcggactgattgagccggatacccccggccgggtccccctggacgaggccctacagcgcggcaccgtcgacgctcgcacagcccagaagttaagggacgttggtgcttacagcaaatacctgacctgccccaaaaccaagctcaaaatctcctataaagacgccctcgaccgttcaatggtcgaagaggggactgggcttcgcctgctcgaagcagccgctcagtcgaccaaaggctactatagcccctacagcgtgtctggctcaggatcaacagctgggagccggactggctcccgcacagggtcacgcgccgggagcagaagagggagttttgatgcaactggatcaggcttctccatgacattctcttcctcatcctactcctcaagcggctatggtagaagatacgcctccggctcttcagccagcctcggcggtcctgagtccgccgtcgcctag

SEQ ID NO: 129013 - DNA, 13644 bp, synthetic construct
  misc_feature 1..13644: note = Description of Artificial Sequence: Synthetic coding sequence
  source 1..13644: mol_type = other DNA
atgtctcaacaccagttacgagttccacagccggaaggcttgggtcgtaagcgcacaagtagtgaggacaacctatatctcgcggtgttacgggcttctgaaggaaagaaagatgaaagagatcgcgtgcagaagaagacatttacaaagtgggtcaacaagcatctgattaaggcccagaggcacattagcgatctctacgaggatctgcgggacggacataacctcatcagcctcctggaagtactgtccggggattctttgccccgagaaaaagggcggatgcggttccacaagttgcaaaacgtgcagatagctcttgattatctgaggcatcggcaggtgaagctggttaacattcggaatgatgatatcgccgatggcaaccctaaactgacactgggcctgatctggacaattatccttcactttcagattagcgacatccaggtgagtgggcagtccgaggatatgaccgctaaggagaaacttttactttggagccagaggatggtcgaagggtatcagggcctgcgctgcgacaatttcaccagctcctggcgggacggacggctgtttaatgcaatcattcatcggcataaacccttactgatcgacatgaacaaggtgtaccgccagaccaacctcgagaatttggatcaggccttctccgtcgccgaacgcgatctcggagtgacaagactcttggaccctgaggacgtcgatgtccctcagcccgacgaaaaatcaattatcacttatgtgtcttctttatatgacgcaatgccaagggtaccggatgtgcaagatggagtgcgcgctaacgagttacagcttcggtggcaggagtatcgtgagttggtcctgttgctcctgcagtggatgaggcaccacactgccgcattcgaggaacggcggtttccttccagcttcgaggaaatcgagatcctctggagccagttccttaagtttaaagagatggagttgcctgccaaagaagctgataagaaccgatctaagggcatataccagtctctggagggggccgttcaagcaggacaactcaaggttccacccggctatcaccccctagacgtggaaaaagaatggggcaagttgcacgtggccatcctggagagggaaaaacagctgcgttctgagttcgaaaggctggaatgcctgcaaaggatcgtcacaaagctgcagatggaagctggactgtgcgaggagcagttgaatcaagctgatgcactccttcaaagcgatgtccggttattagcagcggggaaggtgccccagcgtgccggagaagtggagcgggacctggataaagcagactcaatgatcaggctcctgtttaacgacgtgcagacactgaaggatggacgacatccacaaggagagcagatgtataggcgtgtctatagactgcacgagaggctggtggccatccggaccgagtataacttgcgcttgaaagccggcgttgcagcccctgctacgcaggtggcccaggttacgctgcagtcagttcagaggcggccagagctggaggactctacgctgcgctatctccaggacttgctcgcttgggtggaggagaatcagcaccgagttgatggcgcagaatggggcgtggatctaccctctgtggaagcccagctgggcagccatagagggctgcaccagtctatcgaagaattccgtgccaagatcgagcgcgctcgctcggatgaaggacagctaagtccagcgacaagaggagcctaccgcgattgtcttggcaggctggacctacagtacgctaaactgctcaattcaagtaaggcacggcttaggtccttggaatcactgcacagcttcgtcgccgccgcgaccaaagaactaatgtggctgaatgagaaggaagaggaagaggtaggttttgactggtctgacaggaacacaaatatgactgccaaaaaggaatcctatagtgcgttgatgcgcgaattggaactgaaggagaaaaaaatcaaggagttgcagaatgctggcgaccgcctcctcagagaagaccacccagctcgccccactgtggagagtttccaggcggctttacaaactcagtggagttggatgttgcagttgtgttgctgtatagaggctcatctgaaagagaatgccgcgtacttccaattcttttccgatgttcgtgaggcagagggccagctgcagaagctccaggaggccttgagaaggaagtattcctgtgacaggtctgcaaccgttacaagactggaggacttgctgcaggatgcgcaggacgagaaggagcagctgaatgagtataaaggccatctgtctgggctggccaagagagccaaggctgtggtccaactgaagcctcgacacccagcccatcctatgcgcgggcgactacctttactggcagtgtgtgactataaacaggtggaagttacagtgcacaagggggacgaatgccagttggttgggccagcccagcctagtcattggaaggtcctgtcaagctctgggtccgaggcggccgttccctcggtgtgttttctggtgcccccaccgaaccaggaggcacaggaggccgtgactcggctcgaggcacaacaccaggcccttgtgacactgtggcaccaactgcatgtagacatgaaaagtctgctagcttggcaaagtctgcgtcgggacgtacagctcataagaagttggagcctggccacatttcgaacactgaagcccgaggagcagcggcaggcattgcatagtcttgaacttcactatcaagcctttctcagagactctcaggacgctggcgggttcggcccagaagatagattaatggccgagcgtgaatacggctcttgtagccaccattaccaacaacttttgcagagtttggagcagggcgcccaggaagagtccagatgtcagcggtgtatatccgagttgaaagacatccgactgcaattagaggcttgtgaaacccgcactgtacataggttacggctgcctctcgataaagaaccagctcgggaatgcgcacagcggatcgcagagcagcagaaagcgcaagccgaagttgaagggctcgggaagggcgtcgcccggctcagcgccgaagcggagaaggtcctggctctgcccgagccaagccccgccgcccccacactgagatctgagcttgaattaaccctcgggaaactcgaacaggtcaggtctctgagcgctatttatctggaaaaactgaaaacaatcagtctcgtgatccgcggtactcagggcgcagaggaggtactgagagcgcacgaagagcagcttaaggaagctcaggccgtcccggccacccttcctgagctggaggcaactaaggcctccctgaagaagctgagagcccaggccgaagcccagcagcctactttcgacgcactccgcgacgaactcaggggagcccaagaggtgggagaacgcctacagcagcggcacggggaaagagacgtggaggtcgagcgttggcgtgagcgtgtcgctcagttactggagcgttggcaggccgtgttggcccagaccgatgtgaggcagcgcgagctggagcagctgggcagacagctccggtattaccgggagtcagccgacccattaggcgcttggctgcaagacgcccgtcggagacaggagcagattcaggctatgccgctggcagactctcaggcagtccgagagcagctgaggcaggagcaggccctcctggaggagattgagcgacacggggagaaagtcgaggagtgtcaacggtttgcaaaacagtacataaatgctataaaagattacgagctgcaactggtgacatataaggcacaacttgagcccgttgcttcccctgcgaagaagccaaaggttcaatctggctcggagtccgtcatccaggagtacgtggatctgagaactcattactccgagctcaccacgctcacctctcagtacataaagtttatttccgaaacgctccgaagaatggaagaagaggagcgcctggctgaacagcagagggccgaggagagggagcgattagctgaggtggaagccgcccttgagaagcagcggcaactcgcggaggctcacgcccaggcgaaagcacaagcggagcgcgaagctaaagaactgcagcaacgaatgcaagaggaagtggtgaggagagaagaggcagccgtggacgcccagcaacagaagagatcgattcaggaggagctccagcagctcaggcaaagcagcgaagcggaaatacaagctaaggctcgtcaggctgaagcagccgagcgcagtcggctgcggattgaggaagagatccgtgtcgtgcgcttgcagcttgaagctacagaaagacagcggggtggggccgagggcgaactgcaagctctgcgcgccagggcggaggaggccgaggcgcagaaacgtcaggctcaggaggaagctgagcggctgagaagacaggtacaggatgaaagccagcggaagcgccaagccgaagtggagctggccagcagggtgaaggccgaggccgaagctgctagggagaagcagcgagcactccaggccctggaagaacttaggctgcaggcagaggaagcggagcggcggctcagacaggcagaggtcgaacgcgcacgccaagtacaggtggcgctggagacagcccaacggagtgccgaagccgagctccaatcaaagcgggcatccttcgccgagaagactgctcagctggaacgatcactgcaggaagaacacgtcgcagtggcacagttgagagaggaggctgagagacgcgcccagcaacaggcggaggctgagcgagccagggaggaggccgagagggagctggagcggtggcagctgaaggccaatgaagctcttaggctgcgcctgcaggcagaggaagtcgcccaacagaaaagccttgcccaggccgaagccgagaaacagaaagaggaagctgagcgcgaggcgcggagacgaggaaaagcggaggaacaggcggtgcgccagcgtgaacttgcagagcaggaattggaaaaacagcggcagctagctgaaggtacagctcagcagaggctggctgccgaacaggaactgatccgtctgcgggcagaaaccgaacagggcgaacagcagcggcagcttctcgaggaggagttggctcggctgcagcgagaggccgccgctgctacccagaagagacaggagctcgaggccgaactcgccaaggtccgtgctgaaatggaggtgctgttagccagcaaagcccgagctgaggaggagtcaagatcgacctctgagaaatcaaagcagaggctggaggctgaagcagggcggtttagagaattagccgaggaagccgcccgactgagggctcttgccgaggaggctaaacggcaacgccagctcgccgaagaagatgcagcccggcagcgggcagaagcagagcgggttctggccgaaaagctagccgccattggcgaggcgactaggctaaagacagaagccgagatagccctaaaggagaaggaagctgagaatgaaagactgcggagactagccgaagacgaggcctttcagcggcggcgtctggaggaacaggccgcccagcataaagctgatatcgaggagcgacttgcacagctgaggaaggcgagcgactccgaactggaacgccaaaaaggactcgtggaagatacccttaggcaacggcggcaggttgaggaggaaatattggcactgaaagcttcattcgagaaggccgcagcgggaaaggccgaattagaactagaactagggaggatccgttcgaatgctgaggacactctccgcagcaaagagcaggccgaactggaggccgctagacagaggcagttggccgcagaggaagaaaggcgaagacgcgaggccgaggagcgcgtacagaaatccctcgcagccgaggaagaggccgcacgacagagaaaggccgccctggaagaagtggagcgcctgaaggcaaaggttgaagaagcccgccgactgcgagagagggcagagcaggaatctgcccgacagctgcaacttgcacaggaggctgcccaaaaaagactccaagccgaagagaaggctcatgccttcgccgttcagcagaaggaacaagagctccagcagactctacaacaagagcagagcgttcttgatcaactgcgaggtgaagctgaggcagcccgtagggcagcagaggaggcagaagaggcacgagtgcaggccgaacgggaagctgcacagtcgaggaggcaggtcgaagaggctgagaggctgaagcaatcagctgaggagcaggcgcaagcaagggcgcaggctcaggctgcggctgaaaagctccggaaagaggctgaacaagaggcggccaggagagcacaggccgaacaggccgccttaaggcagaagcaggcagctgacgctgagatggaaaagcacaagaagttcgctgagcagaccctccgacagaaagcacaggtggagcaggagctgacgaccctgaggctgcagttggaggagaccgatcaccagaagaatcttctagatgaagagttgcaaagactgaaggcagaggccactgaggccgcccgtcagagaagccaagtggaggaagagcttttttccgtgcgcgttcagatggaggagctttctaagctgaaggcccgcatcgaagccgaaaatagagcgctgatcctgagggacaaggacaatacccagagatttctccaggaagaagcagaaaagatgaaacaagtggccgaagaggcggccagactttctgttgctgcgcaggaagccgccaggctgcgccagctggctgaagaagacttagctcaacagcgcgctctcgccgagaaaatgttgaaggagaaaatgcaagcagtccaggaggcaactaggctcaaagctgaggctgaactcctgcagcaacagaaggagctcgctcaggagcaagcacgccggttgcaggaggacaaggagcagatggcccaacaactcgccgaggagacgcaaggttttcagagaactcttgaggcagaaaggcagcggcagctggagatgagcgccgaggccgagcgcttaaagctccgcgtggccgagatgtccagggcccaagctcgggcggaagaggatgcacagcgtttccggaagcaggccgaggagataggggagaaactccataggaccgagttagccacacaggagaaggtcacccttgtccagacattagaaattcaaaggcaacagtccgaccatgacgccgaaaggctgcgcgaagcgatagctgagctggagagagagaaggagaagcttcagcaggaagccaagcttctgcagcttaagagtgaagagatgcagacggtgcagcaggaacagctcttgcaagagacacaggcgctgcagcaaagcttcctgagtgagaaggattcgctgctccagcgggagaggttcattgagcaggagaaggcaaagttggagcagctgtttcaggatgaggtagcaaaagcccaacagctgagagaggaacagcagcggcaacagcagcagatggagcaagaacggcagcgcctagttgcctcgatggaggaggcacggaggcggcagcatgaagccgaagagggcgttcgaaggaaacaggaagagctgcagcagctcgagcaacaacgcaggcagcaagaagaactcctggcagaggagaaccagcggctgagggagcagctgcagctgctggaagagcagcatagagccgcactggcccacagcgaagaggtaaccgctagtcaggttgccgcgacaaagaccttaccaaatggccgcgacgcactcgacgggcccgccgcagaagccgagccagagcacagtttcgatggactacggcgtaaggtgagtgcacagagactgcaagaagctgggattctgtcggccgaggagctacaaaggctcgcgcaaggccataccaccgtagatgaactcgcccggcgcgaagacgtccgacattatctgcaggggcgaagttcaatagccggtctgttactcaaagctaccaacgagaaactgtccgtttacgccgctctccaaaggcaactccttagcccaggaacagcactgatcctactggaggctcaggccgccagcggcttcctgctggatcctgtgcgcaacaggcgcttaactgtgaatgaagctgtgaaagaaggagtggtgggccctgaactgcaccataaactcttgtcggccgaaagggccgtgacggggtacaaggatccctacacaggacagcaaatttctctttttcaggccatgcagaaaggcctaatcgtgagggaacacggaatacgcctcttggaggcccagatagccaccggtggagtgatcgaccccgtgcactcacatagggttcctgtcgacgttgcgtaccgaagaggctacttcgacgaagagatgaacagggtgctggctgatccttctgacgatacaaaggggttcttcgatcctaatactcacgagaacctaacttacctgcagttgttggagcgttgtgtggaggaccctgaaaccggcctgtgcctgttacctctgaccgataaagccgccaaaggcggagaactcgtctacaccgattccgaagcaagagatgtctttgagaaggcaaccgtaagcgctccctttgggaaatttcagggcaaaacggtaacgatttgggagattattaattccgaatattttaccgccgagcaacgacgggatctcctccgtcagttcagaacaggacgaataacagtggagaagataattaagattatcataacggtcgtcgaggagcaggaacaaaaaggccgcctgtgctttgagggtcttagatccttagtgcctgccgccgaactgctagaaagtcgcgtgatcgatcgggaactttaccagcagttgcagagaggggagcggtctgttagagacgtggcagaggtggacacagtgagacgggccctaaggggagccaatgtgatcgcaggcgtgtggctggaggaggcaggtcaaaaattgtccatctataacgctctgaagaaggacttactgccctccgacatggccgtggctcttctggaagcacaagccggtactggtcacatcattgaccccgcaacttctgcccggctcactgtggatgaggcagtgagagccggcctggtgggaccagaattccatgaaaaacttctgagtgcggaaaaggccgtgactgggtaccgcgatccatacacaggacagtctgtttccctcttccaggcccttaagaaggggcttattccacgggagcaggggctgcggctcctcgatgcccaactttcgaccggcggtatcgtcgatcctagcaaatcacacagggtgccactggatgtggcctgcgctcggggctgtttagatgaggaaacgagtcgcgctttgtcggccccccgggcagacgccaaagcatacagtgatccgagcacgggggaaccagccacatacggcgagttgcagcaacggtgccggcctgatcagttgaccggcctatctctccttccactgtctgagaaggcggcaagagctcggcaggaagaactctacagcgaactgcaagccagagagacttttgagaaaactcccgtggaggttcccgtaggcggattcaagggacgcacagtaacagtctgggaactgatctcttccgaatattttaccgccgaacaaagacaggaattgcttcgacagtttcgcactgggaaagttacagtcgagaaagttataaaaatcctgattaccatagtcgaggaggtcgaaaccctgaggcaggaaaggttgagcttcagtgggcttcgtgctccagtcccagcctcggaactcctcgcttccggtgtcctcagccgagcccaatttgagcaactcaaagatggcaaaaccactgttaaggacctgtccgaactcggatctgtgcggactctgctccagggctctggttgcctcgccgggatctacctagaggatacaaaggaaaaggtttcaatctacgaagcaatgcggcggggcctgctccgcgcaacaacagcagcgttattgctggaagctcaggcagcgacgggatttctggttgacccggtccgaaaccaaagattgtatgtccatgaggctgtgaaagccggtgtggtgggcccggagctccatgagcagctgctgagtgctgaaaaagcagtcactggttatcgtgacccttatagcggcagcaccatcagcctgttccaagctatgcagaagggcctggtgctgaggcagcacggtatacgcctgctggaagcccagatcgcgactggcgggattatagaccctgtgcattcacatcgggtccctgttgatgtggcttatcagagaggctacttctctgaggagatgaatagggtgctggcagatccaagtgacgataccaaggggttcttcgacccaaatactcacgaaaacctgacctatagacagctgcttgagagatgtgtggaagaccctgaaaccggactgaggcttctcccattgaagggcgcggagaaggccgaggtggtggaaaccacccaggtgtacacagaagaggaaacacggcgtgctttcgaagaaactcagatcgacatcccaggcggtggctctcacggcgggtcaacaatgtcactgtgggaagtcatgcagagcgatctgatcccagaagaacaaagagcccaattgatggccgattttcaggccggccgtgtgaccaaagagaggatgattattattatcatcgagatcatcgagaagacggagataatcaggcagcagggcctggcatcctatgattatgtccggcgcagactcaccgcggaggacctcttcgaggcccgaatcataagcctggagacctacaatcttctgcgcgagggcaccaggtcgttaagggaagctcttgaagccgagtccgcttggtgctacctgtacggcactggcagcgttgccggagtgtatttgccggggtccaggcagaccctgtctatttaccaggcacttaagaaagggctactcagcgccgaagtggcccgccttctcctggaggcgcaggcggctacaggcttcctactggacccagtgaaaggcgaacgcctgaccgtggatgaggccgtgaggaagggcttggtgggacctgagctccatgacagacttctcagcgcagaaagagccgttacaggctacagagatccctacactgagcagactatttcgttgttccaggctatgaagaaggagcttatcccaacggaggaggcactgcggttgctggacgctcaactcgccactggaggaatcgtggaccctcgactgggtttccatctgccgctggaagtggcttatcagagaggctacttgaacaaagatacccatgatcagctgtcagaaccctctgaggtgaggtcctacgtggatcccagcaccgatgagcggctgtcgtatactcagttgttacgcagatgcagacgcgacgatggcacaggtcagctcctcctccctctatcggacgccaggaagctgaccttcaggggtctgcgaaagcaaatcacaatggaagaactagtgaggtcgcaagttatggacgaggcgactgcactccagctgcgcgagggactaaccagtattgaggaggtgactaaaaacttgcagaaattcttggagggaacatcttgtatagcaggagtgttcgtcgatgcaactaaggagcgcctgagcgtctatcaggccatgaaaaaaggtattattcggcccggcaccgcattcgagctcctggaggcgcaagctgccactgggtatgtgattgatccgatcaaaggtctgaagctcaccgtggaagaagcggtcaggatggggattgtaggtcccgagttcaaagacaagcttctcagcgccgagagagcggtcacaggttacaaggacccttactctgggaaactgatttcactgttccaggcgatgaagaaggggctgatcctcaaagatcatgggatccgcctcttggaggctcagattgcaaccggcggcatcattgatccagaggagagtcaccgactaccagtggaagtcgcttacaagagagggctgttcgatgaggaaatgaatgagatcttgactgacccctccgacgatactaagggcttcttcgacccaaacacagaggagaatctgacgtacctacagctgatggagcgctgcatcactgaccctcaaacgggactgtgcctgctgcccctaaaagaaaagaaaagagaaagaaagacatcctctaagtcctcggtgcgtaagaggcgtgtggtgatcgtcgaccccgagactggcaaagaaatgagtgtttacgaagcatacaggaagggcttaatcgatcaccagacctacctggaactatcagagcaggaatgcgaatgggaagagattaccatctcgtctagcgatggagttgtcaaaagtatgattattgaccggcgctcaggccggcagtacgacatcgacgatgccattgctaaaaatctgatcgaccggtccgccctggatcagtacagagcgggcacactttctatcacagagtttgcagatatgttatctgggaatgctggcggattccgatccagatcaagttcagtgggctcttcctcctcttatcccatctctcccgcagtttcgcgaacccagttggcaagttggagcgaccctaccgaggagaccggcccagtggctggcatacttgacaccgaaactctcgagaaagtatcaattactgaggctatgcaccgcaatttggtggacaatataaccggacaaaggctgttagaagcccaggcctgtacgggggggatcatcgacccctcgacaggcgaaaggttccctgtcacagacgccgtgaacaaggggctagtggacaagataatggtggatcgtatcaatttagctcagaaagcattttgcggttttgaggaccctcgcaccaaaacgaagatgagtgctgcacaggccttgaagaaaggctggctttactacgaggctggccaacgatttctggaggtacagtacctgactggtgggttaatagagcctgatactccagggagagttcctctcgacgaggctttgcaaagaggtacagtggacgccagaaccgcccagaagctccgcgacgtgggagcctactcaaagtatctgacgtgccctaagacaaaactcaagattagctacaaggacgcattagatcggagtatggtggaagagggcaccggcctgagactattagaagccgccgcgcagagcactaaaggctactacagtccctactctgtgtctggatccggctctaccgcaggaagcaggactggcagcagaaccgggtcccgggccggcagtagacgcgggagtttcgacgccactgggtctggtttttcaatgaccttttctagttccagttactcctcgagtggctatggtaggagatacgccagcggttccagtgcctctctggggggcccggaatctgctgttgcatag

SEQ ID NO: 129014 - DNA, 13644 bp, synthetic construct
  misc_feature 1..13644: note = Description of Artificial Sequence: Synthetic coding sequence
  source 1..13644: mol_type = other DNA
atggaaccttcaggtagtctctttccttctctcgtcgttgtgggccacgtcgttactctggccgccgtgtggcactggcgtagaggccgcaggtgggcgcaggacgaacaggatgaacgcgaccgggttcagaaaaagaccttcacaaaatgggtgaacaagcatcttatcaaagcccagaggcatatctccgatctctacgaggacctcagggacggtcacaacctaattagcctgctggaggttctcagcggcgactcactccctagagagaaagggaggatgcgctttcacaaattgcagaatgtgcaaatagccctcgactacctcaggcaccgccaggtgaaactcgtgaacatcagaaacgacgatatcgcagacggcaaccccaaactgaccctcggattgatctggacaattattctgcacttccaaatttctgacattcaggtgtctggacaatcagaggacatgactgctaaggagaaactcctgctctggagtcaaagaatggtggaaggataccaaggactgcggtgcgataatttcacctctagttggcgcgacggtagactgtttaacgctatcatccatagacataagcccctcctgatcgacatgaataaggtataccgccaaacaaacctcgagaatctggatcaggctttctcagtcgctgagcgggatcttggagtcacccggctgcttgacccagaagatgtggacgtgcctcagccagatgaaaagtccataattacctatgtatcaagtctatacgacgccatgcctcgagtgcctgacgtgcaggacggcgtgagggccaatgaactccagctccggtggcaggaatatagagagctggtgctcctgctgctgcagtggatgagacaccacacggcagccttcgaagaaaggagattccccagcagttttgaggaaatcgaaatcctgtggtcacaatttctcaaattcaaggaaatggagctacctgccaaggaagccgataagaataggtcaaagggaatctaccagagcctagaaggcgccgtccaggcagggcagctgaaagtccctcctggctaccatccattagacgttgagaaggaatgggggaaactgcacgtggccattttagaacgagaaaaacaacttcgaagtgagttcgagaggctagagtgccttcagcgtattgtcacaaaattacagatggaggctgggctgtgcgaggagcaactgaaccaagctgatgcattgctccagagtgatgtgcgcctgctggccgctggcaaagtgcctcagcgggccggggaagttgagcgagacttagataaagccgactctatgattaggctcttattcaacgacgtacagactctgaaggatggtcggcacccccaaggtgagcaaatgtacaggagggtgtaccgcctccacgagaggcttgtcgccatcagaaccgaatataatctgcgcctcaaggccggagtagccgcacctgccacccaagtagcccaggttacgctgcagagtgttcagcggcgaccagagctagaggactcaacactccggtatctgcaggacttactggcctgggttgaggagaaccagcaccgcgtggacggagcagagtggggcgtggatctcccttccgtcgaggctcagctgggttctcatcggggattgcatcagagtattgaggaatttcgtgctaagatcgaaagagctaggagtgatgagggacagttaagtccagctaccagaggcgcttatagagactgtctagggaggctggacttacagtacgccaagctcctgaacagctccaaggccagactccgaagcctggagtcactgcattcattcgtagctgcagcaaccaaggaactaatgtggctgaatgagaaggaggaagaagaggtggggttcgactggagcgacaggaatacgaatatgactgctaagaaagagagctactcagctctgatgagagagctggagctgaaagagaagaagatcaaagaactgcaaaacgcaggcgacagattactgcgtgaagaccatccagcccggcctaccgtggagtccttccaagctgctctccagacacagtggtcatggatgctccagttatgctgttgcatcgaagcacacctgaaagaaaacgcggcctatttccaattttttagcgatgttcgcgaggccgaagggcagctacagaagctgcaagaggccctgcgtcgaaaatacagttgcgatcgttctgccaccgtcacccgcctagaggacctgcttcaagacgcccaggatgagaaagaacagctgaatgagtataaagggcatttgagcggtcttgctaagcgcgcaaaggccgtggtccaactgaaaccgagacaccctgcccacccaatgcgcgggcggcttccattactagctgtttgcgactacaaacaggttgaggtgaccgtccacaagggtgatgagtgtcaacttgttggccctgcccagccatcccactggaaggtactgagcagctctggaagcgaggcggccgtcccttccgtgtgttttctggtcccccctcctaaccaggaagcgcaggaggccgtcaccagactcgaggcccagcaccaagcactcgtgacgctgtggcaccagctgcacgtcgatatgaaatccctgctagcctggcagagcttgaggagagacgtacagctgattaggtcctggagccttgctaccttccggacactgaagccagaagaacaacgacaggccctgcactctctagagctgcattaccaagctttcttgagggattctcaggatgcgggggggttcggccccgaggatcggcttatggcggagcgagaatacggaagttgctctcaccactatcagcagttactgcagagccttgagcagggtgctcaggaagaatctagatgccaaagatgcatctctgaacttaaagatattaggctacaacttgaagcgtgcgagacacgcactgtgcatcgtctgcgcctgcctctggacaaagaacctgccagagagtgcgcacaacgcatagcagagcaacagaaagcccaagctgaggtggaggggttaggaaaaggtgtggcccgactgtcagctgaagctgaaaaagttctggcactgcctgagccttccccagccgcaccaactcttcgttcggaactcgagctgacactaggaaaactggagcaggtgaggtccctgtctgccatttacctggaaaagttgaaaacaatcagcttggttataagaggcactcaaggcgccgaggaagtgttgagggcacatgaagagcaactgaaggaggcacaggcagtcccagcgacacttccggaactggaggcgacaaaggcctccctgaaaaagctgagggctcaggccgaggcccagcagccaaccttcgacgcgctgcgtgacgaactgagaggtgcccaggaggtgggggaacggctgcaacagaggcatggcgagcgggacgtggaagtcgagagatggagagaaagggtcgcacaattgctggaacgatggcaggctgtcctggcacagacggatgttagacaacgggagctcgaacagctgggtcgccagcttagatattatagggagtctgcagatcccctcggggcatggctgcaagacgcaaggaggcggcaagagcagattcaggctatgcccttggccgacagccaggccgtgagggagcagctgcgccaagaacaagcacttttggaggagattgagcgccatggggagaaggttgaagagtgccagcggtttgcaaaacagtatatcaatgcaattaaggattacgagctgcagctggtgacttacaaggcccagctggaacctgtagcctctcccgccaaaaagcccaaagtgcagtccggttctgaatctgttatacaggagtacgttgacttgcggacacattactctgaactgaccactctgacatcccagtacattaagtttatttccgaaactctgcgtcgaatggaggaggaagagcgtttagccgaacagcagagggccgaagagagagagagacttgcagaggtggaggccgccctagaaaagcagagacagttagccgaggcacacgcacaagctaaggcccaggcagagagggaggctaaagaactgcaacagagaatgcaagaggaggtggtgaggagagaggaggcggctgtcgacgcacagcagcagaaacgctctatccaggaggaactgcaacagcttagacagtcttctgaggccgaaatccaggcgaaggctcgtcaggccgaggcagccgaacgcagtagactccgtatcgaagaagagatccgagttgtcaggcttcagctggaagccactgaaaggcagaggggaggtgcagagggagaactacaggcactgcgcgcaagggccgaagaagcagaagcccagaagagacaggcccaagaagaggcagaaaggcttcgcaggcaagtgcaggatgagtcacagaggaaaaggcaggccgaggtcgagctggcctctagggtcaaagccgaagccgaagcagcgagggaaaagcaacgcgctctgcaagcactagaagagcttaggctccaagcagaggaggctgaacgccgactcaggcaggctgaagtggaacgtgctaggcaagtgcaggttgccctagaaaccgcccaacgttcagctgaggcagagctacaatccaagcgtgcttcattcgccgaaaagacggcccagttggagcgctccctgcaggaggaacacgtggccgtcgcccagctccgggaggaggctgagcgccgggctcaacaacaggccgaagccgagagggcacgcgaggaggcagaaagggagctggaaaggtggcagttgaaggcgaatgaagcgctgaggctgagactccaggcagaggaagtggctcagcaaaagagcctggctcaggccgaggctgagaagcaaaaagaagaggccgaaagagaagcccggcggcgagggaaagctgaggaacaggcagttcggcagcgggagctcgctgaacaggaactcgaaaagcagcgtcagctcgctgaaggcacagctcagcagcggctggccgccgagcaggagctcatccgcttgcgcgcggagacagaacaaggggaacagcagaggcagctccttgaggaggaattggccagactgcagagagaggccgcggcggcgacccagaaaagacaggagcttgaggccgaacttgcgaaagttagggcagaaatggaagttctgctggcgtccaaagcgagagccgaggaagagagtcggagtacctcagaaaaatctaaacagagactggaagccgaggctggccgtttcagggaactggccgaggaggctgctcggctgcgggccctggccgaggaggccaaacgccagaggcagctggctgaagaggacgctgcgcggcagagggcagaggctgaacgtgttctcgcggaaaagttggcagctatcggtgaggccacccgcctgaagacagaggcagagatcgcactgaaagagaaggaggctgaaaacgaaaggttacgccgcctggcagaggacgaagcattccagcggcggagactggaagagcaggcagcccagcacaaagccgacatagaggaacggctggcacagctgagaaaagcttcggatagtgagctagaaaggcagaaagggctcgtggaggatacacttaggcaaaggagacaagttgaagaggaaatccttgccctgaaagccagtttcgagaaggcggcggctgggaaggccgaactggaactggaactgggccggatccggagtaatgcagaagatacgctccgaagtaaagaacaagcagagctggaagcagcgcggcagagacagttagcagcagaagaggaacggaggcgtcgagaggcagaggaacgcgtacagaagtctctggcggctgaagaagaggccgctcgccaacgaaaagctgccctggaagaggtcgaacgtcttaaagctaaagtggaggaggcccggcgcctcagagagagggctgagcaggaatcagccagacagcttcaactggcacaggaggccgcacaaaaaaggctacaggccgaggagaaggctcatgctttcgctgtgcagcagaaggaacaagaactgcaacaaacgcttcaacaggaacagtccgtactggatcagctgagaggcgaagccgaggctgcccgacgcgctgccgaggaagcagaggaggcccgcgtgcaggccgagcgggaagcagcccagagtcggagacaggttgaggaagcagagaggctgaagcagagcgccgaagagcaggctcaggctagggcgcaggcccaagccgcagcggaaaaactgaggaaggaagccgagcaggaagctgccagaagagcccaggctgagcaagctgccctgcggcagaaacaggccgcggatgctgaaatggagaagcacaagaaatttgctgagcaaacccttaggcaaaaagcccaggtcgaacaggaactaaccaccctccgattgcaactagaggagactgatcatcagaaaaacctgctggatgaagagttgcaaagactcaaggccgaggccaccgaggccgccaggcagaggtctcaggtcgaggaggaattattcagcgtacgagttcagatggaagagttatccaagcttaaagctcggatcgaagccgagaaccgcgccctgattttgcgcgacaaggacaacactcagaggttcttgcaggaagaggcagagaagatgaaacaagtggctgaagaagcggctcgattgtcagttgccgcccaggaagccgcccggctacgccagttggccgaggaagacctcgcccaacagcgggcccttgccgagaaaatgctgaaggaaaaaatgcaggctgtccaggaggcaaccaggttaaaggctgaagctgaattgctgcagcaacagaaagaactggcccaggagcaagctagaagactgcaggaggataaggagcagatggcccagcagcttgccgaggaaacgcagggtttccaacggaccctggaagccgagcgccagcggcagctggagatgtctgctgaggccgagcgactgaagctcagggtggcggagatgtcacgtgctcaagcacgggcagaagaggacgcgcagcgcttccgcaagcaggcagaggagatcggggagaagctccaccggaccgagttggcaacccaggaaaaagtaacactcgtgcagacgctcgagatccaaagacaacaaagcgaccatgacgcagaacgactcagagaagcgattgcagagctcgagagggaaaaggagaaactgcaacaggaagcgaaactgctgcaacttaaaagcgaagaaatgcagactgtccaacaagaacaacttctgcaggagacacaggccctccagcaaagttttctgagcgaaaaggatagcctgttgcaacgcgagagatttattgaacaagaaaaggcaaagctcgaacagctcttccaggatgaggtggctaaggcgcagcagctacgagaggaacagcagcgccagcaacagcagatggagcaagagcggcaaagactggtagcctctatggaggaggccaggcggcgtcaacacgaggcagaagagggggtgcgcagaaaacaagaggaactccaacagctcgaacagcagcgacggcagcaggaggaactgctcgccgaggaaaatcaacgactgcgcgaacagttacaactgttggaagagcaacacagagctgctctggcgcatagtgaagaggtgactgccagtcaagtagctgccacaaagacactcccaaacggacgggacgctctggatggacctgccgccgaagcagagcctgagcattcctttgatgggttgagaaggaaggtctctgctcagcgcctgcaggaggcagggatcttgagtgccgaagagctgcagagactcgcacaaggccacacaaccgtcgacgaactagccaggagggaggacgtccgtcattacctccagggaagatcttccatagccggtttgctgctcaaagcgacaaacgagaagctgagtgtgtacgcagctttgcaacgacagctgctgtctccagggaccgctctgatactactggaggcacaggccgcctctggtttcctcttggatcctgttcgaaaccgacggctgacggtcaacgaggccgtcaaggagggggttgtcggaccggagctccaccacaagctcctgtccgcggaacgagctgtgactggctacaaggatccatacaccggccagcaaatttctctttttcaggcaatgcaaaagggacttatcgtaagggaacatggtatcaggttgcttgaagcacaaatcgccaccggtggggtgattgaccctgtgcatagccatcgggtgccggtggacgtcgcgtacagacggggctattttgacgaagagatgaatcgagtcctggctgatcctagcgatgataccaaggggttcttcgaccctaacacacatgagaatctaacatacctgcagctgctggagcgctgcgtagaggacccggagaccggcctgtgcctgctgccactgaccgacaaagccgcaaaaggcggagaactagtctatacagactcagaggcccgcgacgtgttcgaaaaggccactgtttccgcccctttcggcaagtttcaaggcaaaactgtcaccatctgggagatcataaactcggagtatttcaccgccgaacagcgccgcgacctgttgaggcaattccgcaccggtcgcatcacagtcgagaaaatcatcaaaattattatcactgttgtggaggagcaggagcagaagggccgactgtgctttgagggattgaggagtctggtgccagcagcagagttgctggagtctagggtgatcgacagagagctctaccagcagttgcagaggggtgagaggagcgtgagagatgtagccgaagtggacactgtgcgccgcgccctgagaggagccaacgttatagccggcgtttggctcgaggaggcaggccagaagctttccatctataatgccttaaagaaagatctgctcccctcagacatggccgtcgcactgcttgaggctcaggcaggaaccgggcacatcatcgaccccgctaccagtgccaggctcactgtggacgaggccgtcagggccggcctagtcggaccagagttccatgagaagctcctcagcgcagaaaaggccgtcacgggctatcgggatccgtatactggacaatcagtaagtcttttccaggctctcaagaaaggacttatacccagggaacagggactgcggctgttagatgctcagctttccacgggagggattgtggacccgtctaagagccaccgcgtcccgctggacgtggcttgcgccagaggctgcttggacgaggagactagccgcgccctgagcgcccccagagccgacgcgaaggcgtactccgaccctagcaccggcgagccagcaacttatggcgagctacagcaaaggtgtcggcctgatcagttaaccggcctcagccttctacctctcagtgagaaagcagctagggcgcgccaggaggagctgtacagcgagctgcaggctcgcgagacttttgagaagacccccgtggaagtgccggtaggtggctttaaaggacggactgtgaccgtatgggaactcatcagctcagaatattttactgccgagcagcggcaggaactcctaagacagttccggaccggcaaagtcaccgtggaaaaagtgatcaagatcctaatcaccatcgtcgaggaggtcgaaacactcagacaagagaggttgagcttctcgggcttacgcgcccctgtgcccgcctcagagctcctggcgtccggagtgctgagcagggcgcagttcgaacagctcaaagacggaaagaccaccgtaaaagacctcagcgagctggggtctgtccggactctgctccagggctctggatgcctggccggcatttatttagaagacaccaaggagaaagtttccatatacgaggcaatgagaaggggcctgctcagagctacaacggcagcccttctgctggaggctcaggcagctaccggctttctggtggaccctgtacgcaatcaacgtctgtatgttcatgaagcagtgaaggccggtgtggtgggtccagaactgcacgagcagctgctgtccgccgaaaaagccgtcacaggatacagagacccctacagcgggtccacaatttccctgttccaggcaatgcaaaagggattagtcctcaggcagcatggaatacgtctgctggaggctcaaatagctactggtggaatcattgatcccgtgcattcacaccgggtcccagtggatgttgcctatcagagaggttatttctccgaggagatgaacagggtgttggccgacccaagcgacgacactaagggcttctttgaccccaatacccatgaaaacctcacctatcgtcagcttctcgaacggtgtgtagaggaccccgagacggggttgagattgctgcctctgaagggcgccgaaaaagcggaggtggtggagacgactcaggtgtacaccgaagaagaaacacgtagggcgtttgaggagacccagatcgacattcctggaggaggcagtcacggcggttcaaccatgagcctctgggaggtgatgcaaagtgacctcatcccagaagagcagcgggcccagctaatggcggatttccaggctggtagagtcaccaaagaacggatgattatcattatcattgagatcatagagaagaccgagattattcgccagcaaggcttagcctcctacgattatgttaggcgcagactgactgcggaggacctgttcgaggcaagaattattagcctggaaacctacaatctccttcgggaggggacaagatccttgcgcgaggcccttgaggctgagtctgcctggtgctatctgtacggcaccggaagcgtggcaggagtgtacctgcccggatcaagacagacgctgtcgatctaccaagccctgaagaagggtttactgtcagccgaggtggcgcgactcctgttggaggctcaagccgctaccggatttctcctggatcccgtgaagggggagaggctcactgtcgatgaggcggtgcggaagggcctcgtggggccagagctccacgataggttgctgtctgcagagcgggccgtgaccggatatcgcgacccttacaccgaacaaacaatcagtctgttccaggctatgaagaaggagctgatacccacagaggaggctttaaggctcttagacgcacagttagccactggtggaattgtagatccaaggctaggtttccacttgccattagaggttgcctatcagagagggtatcttaataaagatacacacgatcaactgagcgagccaagcgaggtaaggtcttacgtggatccgtcaacggatgaacgactgtcctatacacagctgctgaggcgatgccgcagggacgacggcacaggccagctgctcttaccgttatcagacgctaggaagctgacatttaggggcttacgaaaacagattacgatggaggagctggtgagaagccaggtgatggatgaagctaccgcgctccagcttcgagaaggactcacatcaatagaggaagttaccaagaacctacaaaagttcctggaaggaacttcttgcatagctggtgtcttcgtagacgctaccaaagagcgactatcggtctaccaggcaatgaaaaaaggcatcatccgcccaggcacggcatttgagctgctggaggcccaggcggccacaggctacgtgattgatcctatcaaggggctgaagcttactgtggaggaggctgtgcggatgggcatcgtgggaccagaattcaaagacaaactgctgtcggccgagagggcagttacgggatacaaggatccatactctggcaagctcatcagtctgtttcaggccatgaaaaagggcctgatcttgaaggaccatgggatccgattactggaagcccagatagcgactggcggcatcatagatcccgaggagtcgcacaggctcccagtggaggtggcttacaagcgcggattgttcgacgaggagatgaacgagattctgacagacccttcggatgatacgaagggcttctttgaccctaacaccgaggaaaacttaacatatctgcagctcatggagcgctgtattacggacccacagacgggcctgtgtcttctgccgctcaaagaaaaaaagcgggagcggaaaacgtcttctaagtccagtgtacgcaaacggcgagttgtcatcgttgatcctgagaccggcaaggagatgtccgtgtacgaagcgtatagaaaaggtttaattgatcaccagacctacctagagctcagcgaacaggagtgcgagtgggaagaaattaccatttcctcatccgatggcgtcgtgaaatcgatgatcatcgaccggcgatccgggcgccagtacgatatcgatgatgccatcgcaaagaacttgatcgataggtcagcccttgaccagtaccgcgccggtacgctgagtattaccgaatttgctgacatgctgagtggaaatgcaggcggcttcaggagtcgttcctcgagcgttggatctagttcaagctaccctatctcgccagcagtgagcaggacacaactcgcctcatggtcagatcctaccgaggaaacgggaccagtggccggaatcctcgataccgagacgctggagaaagtgtccatcactgaggctatgcatcgaaatctagtggataacataaccggacagagactgcttgaggctcaggcctgcaccggcggaataatcgatccatctaccggcgagagatttcctgtgacggatgcagtgaataaaggcctcgttgataagataatggtagaccgcattaacctagcgcagaaggccttttgcggctttgaagatcccaggactaagactaagatgagcgccgctcaagcattgaaaaaaggatggctgtattacgaagccgggcagcgcttcctggaagtgcaatacttgaccggggggctgattgagcctgacacacccggacgggtgcccctcgacgaggcactgcagcggggtacagtggatgcccgtactgcccagaaactccgggacgtcggcgcctactccaaatatctgacttgccccaaaacaaagctcaagatcagttataaagatgcactggatcgttctatggtcgaagaggggaccggattacggttgctggaggcagcagcccaatccaccaaggggtattactccccttactcggtgtcaggcagtgggagcaccgctggcagcagaaccggctctaggacaggtagtagggccgggtccagacgaggctcttttgacgcaactggctccggattcagtatgacattttccagcagctcctattcaagttctggctatggccgcagatacgcttccgggtccagcgcgtccctgggaggccccgagtcagctgtggcatag

SEQ ID NO: 129015 - DNA, 13578 bp, synthetic construct
  misc_feature 1..13578: note = Description of Artificial Sequence: Synthetic coding sequence
  source 1..13578: mol_type = other DNA
atggacccctcacgggccatccagaacgagatctcttcgctaaaagacgaacgcgatcgggtgcagaaaaaaaccttcacaaaatgggtgaataaacaccttattaaagctcagcggcatatctctgacttgtacgaggatctgcgcgacggacataacctcatctccctgctggaggtcttgagtggtgactcattgcctcgagagaaagggagaatgcggtttcacaaactccagaatgtgcagatagccttggattatctgcgacaccgacaagtcaagctggtcaatattagaaacgatgacattgccgacggtaatcctaagctgacgctgggattgatctggacgatcattctgcactttcagatttccgacattcaagtgagtggtcagtcagaggatatgacggccaaggagaagttgctgttatggtcacagcgcatggtggagggttaccagggactgcgatgcgacaactttacctccagctggagagatggcagactgtttaatgccatcattcaccggcacaagcctttactcatcgacatgaacaaggtttaccgtcagacaaacctcgagaatctcgatcaggccttcagtgtggccgaaagggatctcggcgttacccgactgcttgacccagaggatgttgacgtcccccagccggacgaaaagtcaatcataacctacgtttctagtctatacgacgcgatgccaagagtgccagacgtacaggatggagttcgggctaatgaactccagctgcgatggcaggagtatagggagttggtcctgctgctgctacagtggatgaggcaccacaccgccgcctttgaggaacggcgatttccaagcagcttcgaagagatcgagatcctctggtcccagtttctaaagtttaaagagatggagttaccagctaaggaagccgataagaaccggtccaaagggatctaccaatcactcgagggggccgtacaggcaggtcagctgaaggttccccccgggtaccaccctcttgacgtggaaaaggaatggggaaaattacatgtggccatcttggaacgggaaaagcagctccggtccgagtttgaacgcttagagtgtcttcagaggatagtgacgaaactccagatggaggcagggctgtgtgaggagcagctaaatcaggccgacgctctgctccagagtgacgttaggctgcttgccgcggggaaggtgccccaacgggccggcgaggttgaacgcgatctggataaagcagatagtatgatcaggctgcttttcaatgacgtgcagactttgaaggatggacgacacccacagggcgaacagatgtaccgtagggtgtacagattacatgagaggctggtggcaattaggaccgagtacaatctgagattgaaggccggggtggccgcccctgcaactcaagtggcccaggtgaccttgcagtcagtccagagaaggcccgaactggaggatagcacgctgaggtatctgcaagatctcctcgcgtgggtggaggaaaaccagcaccgggtggatggagccgaatggggtgtggaccttcctagtgttgaggcccagctgggcagtcatagggggctccatcagtcgattgaggaattccgagcaaaaatcgaaagggcccgctcggacgagggtcagctaagtccagctaccaggggggcctacagagactgtttaggcaggttggatctacaatacgccaaactactgaacagttccaaagccaggttgcgatccctggagtcgctgcacagtttcgtggcagccgcaactaaagaactgatgtggctgaacgaaaaagaagaagaagaagtggggtttgattggtccgataggaacacaaacatgaccgcaaagaaagagagctacagcgcccttatgcgggaactcgagctcaaggaaaagaagattaaggagttgcagaacgctggcgacagattacttcgagaggatcatcccgcaaggccaaccgtggaatcctttcaagccgccctacagacacagtggagttggatgctgcagttgtgctgctgcatagaggcccacctgaaggaaaatgctgcctacttccagttcttctccgatgtgagggaggcagagggacagctgcagaaattgcaagaggccctgcggaggaaatacagctgcgaccgttctgccactgtaacccgcctcgaagacctgcttcaggacgctcaggacgaaaaggagcagcttaatgagtacaagggacacctgagcggcctggccaagagggctaaagccgtcgtacaactaaaaccccgacacccagcccaccccatgcgcggaaggctgcctctcctggctgtctgtgactataagcaggtggaggttaccgtccacaagggcgacgagtgccagctggtgggacctgctcaaccaagtcattggaaggtgctcagttcctcgggcagcgaggccgccgttccatcagtgtgctttctggttccacccccaaaccaagaagcacaggaggctgtgacccgcctggaagcacagcaccaagctctggtaacgctttggcaccagcttcatgtcgatatgaagtctctgctggcttggcaatcactgcgccgggacgtgcaactgattcggagttggagcctggcaacatttcggactctgaagcctgaggagcagcgtcaggccctgcattcactagaacttcactatcaggccttcctgcgcgatagccaggatgcaggagggtttggtcctgaagaccgactcatggccgaaagagaatatggatcatgcagccaccattatcagcagcttcttcagtccttggaacagggggcccaggaagaatctagatgtcagcggtgcatttctgagcttaaggacatacgcttacagctggaagcctgcgaaacacgtacggtgcacaggcttcggttgccactggacaaggaaccggctagggagtgcgcccagaggatcgcggaacagcaaaaggcgcaggccgaggttgagggccttggaaaaggagtggcaagactgagcgctgaggccgagaaggtcctggcactgccagaaccttcgccagccgcgcccaccctgcgcagcgaactggagctaactctgggcaaactggagcaggttcgatcactgagtgccatctaccttgagaaactgaaaaccatcagtctggtgatcagaggcacacagggggccgaagaggtcctgagagcccacgaagagcagctgaaggaggctcaggcagtccccgcaactttaccagagttagaggcaacgaaggccagtctgaagaaactcagagcacaggctgaagcccagcagcccacttttgacgctcttcgggatgagttacgaggcgcccaagaggttggtgagagactgcagcagcgacatggggaaagagatgttgaggtcgaaagatggagggaaagagtggcgcagctgctggaaagatggcaggcagtgctggcccaaactgatgtccgtcagagggagctcgagcagctgggtagacagctgcggtactatcgtgaatctgccgatccattgggcgcatggttgcaagacgcccggcgtagacaggaacagatccaggccatgccactcgccgactcccaggctgtgcgtgagcagctgcggcaggaacaggccctcctcgaggagatagagcggcatggtgagaaggtcgaggagtgccagagattcgccaagcagtatattaatgctattaaagattacgagctgcagttggttacgtataaagcgcagctcgagcccgtcgccagtcccgccaagaaacccaaggtccagtcaggatccgagtccgtgatccaggagtatgtggacctgcgcacacactatagcgaactgactacactgacttcccaatatattaagtttatttcagagactctgagacgcatggaggaagaggaacgcctggcagagcagcaacgggccgaggagcgggaaaggttggccgaggttgaggctgcacttgaaaagcaacggcagctagccgaagcgcacgctcaggccaaagcccaagccgagcgagaagccaaggaactgcagcaaaggatgcaggaagaggtggtgaggagggaggaggccgcagtggatgcacagcagcaaaaacggtctatccaggaagagctccaacagctgcgtcagtcgagcgaggccgaaatccaagccaaggcccgccaggccgaagctgccgagcggagcaggctccgcattgaagaggaaattagggtcgtgagactccagttagaggccacggagcgacaacgaggcggcgcagaaggggagctgcaagccctgagggcgagggccgaagaggccgaagcccagaagcgccaggcgcaggaagaggcagagaggctccggaggcaagtgcaagatgagtcgcagagaaaacggcaggccgaggtcgaacttgcaagccgcgtgaaggcagaggccgaggccgcacgggaaaagcaacgggccctccaggctctggaggagttaaggctgcaagccgaagaggccgagagacgcctcaggcaggcagaggtggaacgagccaggcaggtccaggtggcactggaaaccgcacagcggagtgctgaggctgagctgcaaagcaagcgcgcaagttttgccgaaaaaaccgcacagttagagcggtccctgcaggaggagcacgtcgccgtcgctcagttgcgggaagaagcagagcgccgggctcagcaacaggccgaagcagagagggcacgtgaagaggctgagagagaactggagagatggcagttgaaagccaatgaggctctgagacttcgcctccaagcggaagaggtggcacagcaaaaaagtcttgctcaggccgaggctgagaagcagaaggaggaggcagaaagggaggctcgcaggcgaggaaaggccgaggagcaggccgtgcgccagagagaactggccgaacaggagctggagaagcaaagacaactggcagaagggacggctcagcagcgtcttgccgcagaacaggagctaatcagactgagggccgaaactgaacagggagagcagcagcgacagctgctggaagaggagctggcccggttgcaacgcgaagccgccgccgccactcaaaagcgacaagagcttgaagccgagctggccaaggtcagggcagagatggaggtactgttagctagtaaagctcgggccgaggaggagtctaggtcaactagcgaaaagtctaagcaaaggcttgaggcagaggcagggcggtttcgggagctggctgaggaagccgcgaggctgagagccctggccgaggaagcaaaacggcaacgccaactagccgaagaggatgcggcacggcagcgagcggaggccgagcgggtgttggcggagaagctcgccgcaatcggcgaggctacacgactaaagaccgaagctgagatagcgctgaaggaaaaggaggccgagaacgagcgacttagaaggcttgcagaagacgaggccttccagcggcggcgcctggaagagcaagcagctcagcataaagcagatatagaggaaaggttggcccagcttcggaaggccagtgacagcgaactggagcgccagaaggggttagtggaagatacactgaggcagaggagacaggtggaggaagagatactcgctctcaaagcctcctttgagaaggctgcagcggggaaagcagagcttgaactagaactgggcaggattagatcaaacgctgaagacaccctgaggtcaaaggagcaggccgagctcgaagccgccagacaacgacagctggcagctgaggaggagcggagaaggcgcgaggccgaggagcgcgtgcagaaatcacttgccgccgaggaggaagcagcccgtcagagaaaagctgctctagaagaagtagagagactgaaagccaaggtcgaagaagcgcgccggctccgggaaagggcagagcaggaatcagcacgccagctgcagctggcgcaggaggccgcgcagaagcgccttcaggctgaggagaaagcccacgcatttgccgtccagcagaaagagcaggagctccagcaaacactccagcaggagcaaagcgtcctggaccaactgcgaggcgaagcagaggccgctagacgcgcggccgaggaggcagaggaggcaagagtgcaggcagagagggaggcagctcagtccagaaggcaggtagaggaagccgagaggctaaagcagtcggctgaggagcaagctcaggcacgtgctcaggctcaagctgcggctgagaagctgagaaaggaggcagaacaggaagctgcgcgtagagcccaagctgagcaagcggcgctacgtcagaagcaggctgccgatgccgaaatggaaaagcacaagaagtttgccgagcagactctgaggcagaaggcccaggtcgagcaggagctcacaacactgagactacagctggaggagacagatcatcaaaaaaacctccttgatgaagaacttcagcggctgaaggccgaggccaccgaggccgcacggcagcgcagccaggtggaagaggaactgtttagcgttcgagtgcagatggaggaactttcgaaactgaaagctcgaatcgaagcggaaaatcgcgctctgattctgagggacaaagataatacacaacggtttctccaggaagaggccgaaaagatgaagcaagtagcagaagaggccgccagactgtccgtcgcagcacaggaggcagcgagattgcgtcaacttgccgaggaagatctggctcagcagagagcactagcagagaagatgctgaaggagaagatgcaggcagtgcaggaagccaccagactaaaggctgaagccgagttactccaacaacagaaagagttagctcaggagcaagcaagaaggcttcaagaggataaagaacaaatggcccaacagttggcggaagagacacagggcttccagcggactctcgaggccgaaagacagagacaactcgagatgtctgccgaggctgagagattgaaactgcgtgtcgccgagatgagccgcgcacaggctcgggccgaagaggacgctcagagattccgtaaacaagccgaggaaattggtgaaaagctgcatcggaccgaattggctacacaggagaaggtcaccctggtccaaacattagagatccaaaggcagcaatctgatcatgacgcagaaaggctacgggaggccatcgctgaactagagcgggagaaggaaaaactgcagcaggaggcaaagctactccaactgaagtcggaggagatgcagacagtccagcaagagcagctccttcaggagactcaagccctccagcagtctttcctatccgaaaaagatagcctgttacagcgcgaaaggttcatcgagcaggagaaagcaaaactcgaacagttgttccaagacgaagttgcaaaggcccagcagctgagggaggaacagcaacgacaacaacagcagatggaacaggagagacagaggcttgtagcttccatggaggaagctcgcagaagacaacacgaggcagaagaaggggtccggcggaaacaggaagagttgcagcagttagaacagcaacgaagacaacaggaagagctcctcgccgaggaaaaccagcggcttagagagcagctgcagttactggaagagcagcatagggcagccctcgcgcattccgaggaggttacagcgtcccaggttgctgccacgaaaacactgcctaatggacgggacgccctcgacgggcccgcagcagaggccgagccagagcatagctttgatggcctccgacgcaaagtgagcgcacagcgactccaggaagccggtatcctctctgcggaggagcttcagagacttgcccaagggcacaccacagtggacgaacttgcaaggcgtgaggatgtccgacattatctgcaggggcgttcctccatcgccggtcttctactgaaggctactaatgaaaaactgtcagtttacgcggccttgcaaaggcaacttctttcaccagggactgcactgatcctgctcgaagctcaagccgctagcgggtttctgctggaccccgtcaggaataggagacttaccgttaacgaagcagtgaaggaaggtgtggtcggtccagagttacatcacaagctgttatccgccgaacgtgccgtgacagggtataaggatccttacactgggcagcaaattagtctttttcaggcaatgcaaaagggccttatcgtacgggagcacgggataagattgttagaagctcagattgccacaggaggcgtaattgacccagtccactctcatagggtccctgtcgatgtagcatatagacgggggtactttgacgaagagatgaaccgggtactggcggacccgtccgatgataccaagggcttttttgatcccaatacacacgagaacctgacatacctccaactcctggagcgatgtgtggaagatcctgagactggactgtgcctgttgccattgacagataaagctgccaagggcggagaactggtttataccgactcagaggcccgtgatgtttttgaaaaagccaccgtgtccgcgccattcgggaaattccaggggaaaacggtcaccatatgggagattatcaatagcgagtattttaccgcagaacagcgccgggacttgctgagacagttcagaacaggtaggattactgtggaaaagattattaagataataatcaccgtcgtggaagagcaggaacaaaagggacggctttgttttgaaggcctgcggtccctggtccctgccgccgagctacttgagtcccgggtcattgacagggaactctatcagcaactgcagcggggagagcggtccgtacgtgatgttgcggaggtagacactgtgaggcgagctctcaggggggctaatgttatcgcaggagtgtggctcgaggaagcgggccaaaagctgtcaatatataatgcactcaagaaagatctcttaccatccgatatggccgtggcccttctagaagcccaggctggaaccggccatattatcgatcctgcaacctcagccagactgacagtcgatgaggctgtgcgggccggtctcgtcggccccgagttccatgaaaaactactgtcggcggaaaaggccgtgactggctacagagacccctatactggccagagcgtatctctgtttcaagccttaaaaaaaggcctgatacctcgagaacagggactccgcctgctcgacgcccagctctccacggggggaattgtagacccttctaaatctcaccgcgtgcctctcgatgtcgcttgcgcaagagggtgcttagacgaggaaacctcaagggcattgagcgcgccccgggccgacgccaaggcttacagtgatccgagtaccggggagccagccacatatggggaactgcagcagagatgtagacctgaccaacttactggcctgagcttgctgcccttgtccgagaaggccgcccgcgctcggcaagaagagttgtattccgaactccaggcgcgggagacttttgaaaagactcctgttgaggttcccgtggggggatttaagggtcgcactgtaaccgtgtgggagctcatctcctctgagtacttcactgccgaacaacgacaggaactccttagacaatttaggactggaaaagtcaccgtagagaaggttatcaaaatcctaatcacgatcgttgaagaggttgagactctaagacaagaacgtctttcgtttagtggtctgcgcgcccctgttcctgcttcagagctgctggctagtggcgtcctgagccgtgcccaattcgagcagctgaaggatggcaaaactactgtgaaagatctctcagagctcggatcagtgcgaacactcctgcagggttccgggtgtctggccggtatctacctggaggacacgaaagagaaagtgtctatttatgaagcgatgcgtcgcgggcttttacgtgcgaccacagccgcccttctgcttgaagcccaagccgccacagggttcctcgtggaccccgtccggaatcaacggctctacgtccacgaggccgtgaaggccggggtggttggtcccgaactccatgaacaactgctgtcagctgagaaggccgtaacaggctacagggatccatatagcgggagcacaatttcactgtttcaagccatgcagaaggggctcgtgttgcggcaacacggtatcaggctgttagaggctcagatcgccaccggtgggattatcgaccccgtgcattcccatagagtgccggtggacgtggcttaccagcgtggttactttagcgaagagatgaatagagtgctagctgacccctccgacgacacgaaaggattttttgatccaaacacgcacgagaacttgacttatcggcagctgctggaacgatgtgtcgaggatcccgagactgggttgagacttcttccactcaagggggcggagaaggcagaggtcgtcgagacaactcaggtgtataccgaagaggagactcggcgggcattcgaagagacacagattgacatcccagggggcgggtctcacggcgggtcgacaatgagtctctgggaggtcatgcaatcagacctaattccagaggaacagagggcccagctgatggcagactttcaggccggccgagtgaccaaagaacggatgattatcatcatcatcgagatcattgagaaaacagagatcatccgacaacaggggttagctagttacgactacgtgagacggcgcctgacggccgaggacctgttcgaggcacgaataataagcctagaaacatacaatctcctaagggagggcacccggagccttcgggaagctctggaagcggagtcagcctggtgttacctgtatggtactggctcagttgcgggcgtgtacttgcccgggtcccggcagacgctttctatctatcaagccttgaaaaagggtctccttagtgccgaagttgcccgtctgctgctggaagcacaggccgcaacaggcttcttgctggatcctgtgaaaggagagcggctgacagtcgatgaggcagtcaggaagggcctggtcggccccgagctgcacgacaggttactgtctgcagaacgagctgtgacaggctacagggacccttataccgaacagactattagtttgttccaggcaatgaaaaaggagctcatccctacggaggaagcgctcagattgctggacgcccagctggctaccggcggcatcgtcgatcctaggttggggttccatctgccactggaggtggcatatcaaaggggctacctcaacaaggacacccacgaccagttatccgagccatctgaggtccgatcttacgttgatccgagcaccgatgagcgcctgtcatacacacagcttctgcgaaggtgtagacgggatgacggtaccgggcaattgttattgcctttgtccgatgcacggaaactgacatttcggggcctgcgcaagcaaatcaccatggaggagcttgtgagaagtcaggtcatggatgaagccactgctctccaattgcgggagggactgacatctattgaggaagtgactaaaaatcttcagaagttcttagagggtacatcatgtatcgccggagtttttgtcgacgccacaaaagagcgactatctgtgtaccaagctatgaagaaaggcatcatcagacctggtactgcatttgagcttcttgaggcccaggccgcaactggctacgtgatagacccaatcaagggtctcaaattaacagttgaggaggctgtgcggatgggcatcgtcgggcccgagttcaaagacaaactgctgtccgcagagcgcgctgtaacaggttacaaagatccgtacagtggcaaattgatttcgctctttcaggcaatgaaaaaggggctgattctgaaggaccatggaatacgcctcttggaggctcagattgctaccggaggaatcattgatccggaagagtctcacagactcccagtagaggtggcctacaagcgggggctgtttgatgaagagatgaatgagatcttaaccgaccctagcgatgacacgaaaggcttttttgatcccaatacagaagagaatcttacatatcttcagctgatggaacgctgtatcaccgacccacagactggcctatgccttcttcccttaaaagaaaaaaaaagggaacggaaaacttccagcaaatcatctgttaggaaaagacgcgtcgtgatagtggacccagagacaggaaaggaaatgtccgtgtatgaagcctacagaaagggtctcatcgaccaccagacctacctggaattaagtgaacaggagtgcgagtgggaagaaatcaccattagtagctctgatggagtcgtcaagtccatgatcatcgacagaagaagcgggcgccagtatgatatcgatgatgccatcgccaaaaaccttattgacaggtctgcattagatcagtatcgggccggtacacttagcatcaccgagttcgctgatatgctgagtggcaacgctggaggctttcgctctcgcagttccagcgtggggtcctcttcttcatatccaatctcccccgccgtcagccggacacagctggcatcatggagcgaccccaccgaggagaccggccccgtcgctggcattctcgacaccgaaactctggagaaagtgagcatcaccgaggcaatgcatcgaaacctcgtggataacatcacaggacaacgacttctggaggctcaagcttgtaccggtggcattattgatccctccacaggtgagcgcttccccgttacagacgccgtgaataaaggcttggtcgacaagataatggtggaccgtataaacctagctcagaaagctttctgtggctttgaagacccgcgaactaagaccaaaatgtctgcagctcaggcccttaaaaaaggctggttgtattatgaggctggccagaggttcctggaggtccagtatcttacaggaggtctgatcgagcctgacacgcctggtcgggtgcctctcgacgaagcccttcagcggggaaccgtggatgcccggaccgctcaaaagctgcgcgatgtcggagcatattctaagtacctgacctgcccaaagaccaagctgaagatatcctacaaagatgccctagatagaagcatggtggaggaaggcactggtctccgacttctcgaagccgccgcccagtctactaaagggtactacagtccttactcagtttcgggcagtgggtcaacagcgggatcaagaacagggtcgcgcactggttcccgggcagggtcaaggcgcggctctttcgatgccacaggctcggggtttagtatgaccttcagttccagttcctactcgtccagcggctacggcagacgctatgcctctggatcatcggcctccttgggtgggcctgaaagcgccgtggcatag

SEQ ID NO: 129016 - DNA, 13602 bp, synthetic construct
  misc_feature 1..13602: note = Description of Artificial Sequence: Synthetic coding sequence
  source 1..13602: mol_type = other DNA
atggccggccccctccctgacgagcaggacttcatccaggcctatgaggaagtgcgcgaaaagtataaggacgagagggaccgtgttcagaaaaagacgtttaccaagtgggtgaataaacacctcatcaaagcccagagacacatctccgatctgtacgaggaccttcgagacggccacaacttgatcagcctgctggaggttctgagtggggacagcctccccagagagaaaggaagaatgaggttccataaactccagaatgtccaaattgccctggactatctccgccaccgccaggtgaagttagtgaacatccggaacgatgatattgccgatgggaaccccaaactaacacttggcctcatttggaccattatcttgcatttccaaatatccgacatccaggtttccggtcagagtgaagacatgactgctaaggagaagctcctgttgtggtctcaacgaatggtggaagggtaccagggcctgcggtgcgataatttcacaagtagctggcgggatgggcggttgtttaacgcaataatccacaggcacaagccactgctgattgacatgaacaaagtctataggcagacaaatctagaaaaccttgatcaggcgttcagcgttgcagaacgtgaccttggagtcactcgactcctggatcccgaggacgtggatgtcccgcagccggacgagaagtccattatcacttacgtgtcctccttatatgacgcaatgccccgggtgccggatgtgcaagatggtgtgcgggctaacgagttgcagttacggtggcaagaataccgggaactggttcttctgctgctgcagtggatgcgccatcacaccgcggcctttgaggagaggcgtttcccatcctccttcgaggagatcgagattctttggtcccaatttcttaaattcaaggagatggagctgccagctaaagaggcagataaaaacaggtcaaagggaatctatcagtcactagaaggagctgtccaggccggccagttgaaagtgcctcctggttaccaccctctggacgtggagaaggaatggggcaaactgcacgtagcgatcttggaacgcgaaaagcagctaagatctgagttcgaacggttggaatgtttgcagcggatagtcaccaagctgcagatggaggccgggctctgcgaggagcagcttaatcaggcagacgcgctgttgcaaagcgacgtaaggttgcttgccgctgggaaggtgccccagcgcgcaggagaggtggagagggacttggataaggccgactctatgattcgcctgctgtttaacgacgtgcagactttgaaggacggccgccaccctcaaggggaacagatgtataggcgtgtttacagacttcacgagcgtctggtcgctatcaggaccgagtacaatttgcgacttaaagctggcgtggcagctcccgccacccaggtggcccaggtgactttgcagagcgttcagcgccggcctgaactggaagattctacgctccgctacctgcaagacctgcttgcttgggttgaggagaatcagcacagggtcgacggagccgaatggggggtggacctgccatccgtagaagcccagttggggtcgcatcgtggactccaccagtccatcgaagagtttcgcgcaaagatagaaagggctaggagtgatgaggggcagctgtccccagcaacccggggggcttatagagattgtctgggacgactcgatttgcaatacgcgaagttgctgaacagtagtaaggccagactcagaagtctggagtctctccacagctttgtagcagcagccacaaaggaattaatgtggctcaacgagaaggaggaggaggaggtcgggttcgattggtccgatcgcaatacgaacatgacggccaagaaggaaagctacagcgctctgatgagggagctagaactgaaggagaaaaagattaaagaacttcagaatgccggggaccgcctacttagagaggatcaccctgctaggcccacagtggagtcttttcaggcagcgctgcagactcaatggtcctggatgctgcagctttgctgctgtatagaagcccacctgaaggagaatgcggcctacttccagtttttcagcgatgtaagagaggcagaggggcagctgcagaagctgcaagaggcattgagacgcaagtattcttgtgaccggtcagctacagtcactaggctggaggatctgttgcaggacgcacaggatgagaaagagcaattgaacgaatacaagggacatctgagtggactcgctaagcgtgcgaaggcggttgtccagcttaagccacgacatcctgctcatcctatgcggggaaggctcccactcctggctgtttgtgactacaaacaggttgaggttaccgtgcataagggtgacgagtgtcaattggtgggcccggcacagccttctcattggaaggtgctcagcagttcaggtagcgaggcagctgttccatccgtgtgcttcctagtgccaccccccaaccaagaggcccaagaggccgtgaccaggctcgaggcacaacatcaagctttggtgactctgtggcatcagcttcacgtcgatatgaagtctcttcttgcctggcagtccctgcggcgagatgtgcagctgatcagatcctggtccctcgcaacttttcgcactctcaaacctgaagagcagaggcaggcccttcatagccttgaattgcactatcaggctttccttagggattctcaggatgccggtggatttgggcctgaagatcgtcttatggccgaacgggaatatggctcttgctcccaccattatcagcagctgctgcagagtctggagcagggtgcccaagaggaatcacgttgccagcgttgcatttcagaattaaaggacatccggctccagttggaagcatgcgagactcgcactgtgcatagactgcggctaccattggacaaagaacccgctcgcgagtgtgcacagaggatcgccgagcagcagaaagctcaggccgaggtggaggggttgggcaaaggagtagcccggctcagtgctgaggccgaaaaggtcctggctttgccagaaccttcaccagccgccccgacactgaggtcggaattagagcttaccctgggaaaactggaacaagtgcgctcccttagtgccatctatctagaaaagctaaagacaatatctctggtaattcgcggtacacagggcgcagaggaggtgctgagggcacatgaggagcagctcaaggaagcacaggccgtgcccgccacactgcctgaactggaagcaaccaaggcatcgcttaaaaagctgcgcgcccaagcggaggcgcagcagcctacttttgatgcccttagggacgaactgcgtggagcacaggaggtgggcgagaggctgcagcagagacacggggagcgggacgtggaggtggaaaggtggcgggaaagggttgcacaactgctcgaacggtggcaggcagttcttgctcaaaccgacgtgaggcagagggagctggaacaactgggccggcagttacggtactatcgggagagcgccgacccactgggtgcctggctccaagatgcaaggcgcagacaggagcagattcaggccatgccgcttgctgacagtcaggccgtacgggagcaattaagacaagaacaagcgttactggaagagattgaaaggcacggtgaaaaggttgaggagtgtcagagattcgctaagcaatacataaacgccatcaaagattatgaactgcagctggtcacctacaaggcacagcttgagcctgtggcttcccccgccaagaagcctaaagtgcaatcagggtctgagtcagtcatacaggaatacgttgacttgagaactcattactccgaactgacaacgctaaccagccagtatatcaaattcatttctgagaccctacgaagaatggaggaggaggagcgcctcgctgaacagcaacgcgcagaagaacgggagagactcgcagaagtcgaagctgccctagagaagcagcgacagctggctgaggcacatgctcaggctaaggcgcaggccgagagggaggctaaagaattgcaacagcgtatgcaggaggaggttgtgcggcgcgaggaggccgctgtggacgctcagcagcaaaaacgaagtatacaggaagagctgcagcagctgagacagtcgtccgaggctgagattcaggccaaagctcgccaggctgaggcagctgagcgctctcgtctgcgtatcgaagaagaaatcagggttgtgcggctgcaattggaggcaaccgagcgtcaacggggaggagccgaaggagaacttcaggccctccgggccagggctgaggaagcagaggcacagaagcgacaggcccaggaggaggcggaacgattacgccgtcaagtgcaggacgagtcacagcgaaagagacaggccgaagtggaacttgccagccgcgttaaggctgaggctgaggccgcccgggagaaacagcgggcactgcaggccttggaagaactgaggctccaggcagaggaagccgagagacggttgaggcaggctgaggtggagcgggctcggcaggtccaggtggccctggagacagcgcagcgcagcgccgaggccgaactccagtccaaacgcgcttctttcgctgagaaaactgctcagctggagagatctctgcaggaggagcacgtcgctgttgcacagctgagggaagaggccgagcggagggcgcagcaacaagcagaagcagaacgggccagggaggaggcggagcgagagctggagaggtggcaactcaaggccaacgaggctctcagattgcgccttcaggccgaggaggtcgctcagcagaagagcctcgcgcaggctgaagccgagaagcagaaggaagaagccgaacgtgaggcacgcaggaggggaaaggcggaggaacaggcagtgagacagcgcgaactggccgaacaagaactcgaaaagcagcggcaactggcagaagggaccgcccagcagcggcttgcggctgaacaagagcttattaggctgcgggcagagaccgagcagggggagcagcagaggcagcttctcgaggaggaactcgcccgcctgcaaagggaggctgctgccgcaactcagaagaggcaggaattggaagctgaactcgccaaagtccgtgccgagatggaagtcctgctagcctctaaggcccgcgccgaggaagaatcgcgaagtacatctgaaaaatccaaacagaggctcgaagcggaagccgggagatttagggaacttgctgaggaggctgcacggctacgcgcattggctgaagaggcaaaaagacagcgtcagcttgccgaagaagatgccgctagacagagagctgaggcggaacgagtactcgctgaaaaactggcggccatcggagaggccacacggcttaaaactgaagccgaaattgcactaaaggaaaaggaagcagagaatgaacgtctgcggcgcttggcggaagacgaagccttccaacggaggagactggaggagcaggcagcacagcacaaagcagacattgaagaaagactcgcccagctcaggaaggcctctgacagcgaactggagcgacagaaaggactggtggaagataccctaagacaacggcggcaggtcgaggaagagatcttggccctgaaggcatcattcgaaaaggctgccgctggaaaggccgaactggagctcgaactgggcagaatccggagtaatgcggaagatactctacggagtaaggagcaggccgaacttgaggccgcgcggcagaggcagctggccgcagaagaagaacgacgtcggagagaggcagaagagagggtccagaaatcactggcagcggaggaggaggcagccagacaaaggaaagccgcccttgaggaagttgagcgacttaaggcgaaagttgaagaggcccgaagactgcgcgaaagggctgagcaggaaagtgcccgacagttacagctggcccaggaagccgcccagaaacgcctgcaggccgaagagaaggcccatgctttcgcggttcaacagaaagagcaggagctccagcagaccctccagcaggagcagtccgtgctggatcaattgcggggcgaagccgaagccgcgcgaagggctgccgaggaggcggaagaggctagagtacaggccgagagagaagccgctcagtcccggaggcaggtagaggaggccgagcgtctgaagcagtcggctgaggagcaagcacaggcgcgggctcaggcccaagcagcggcagaaaaacttaggaaggaagctgaacaggaagcggcacgacgcgctcaagccgagcaggccgccctgcgccagaagcaggcggcagatgctgaaatggaaaaacacaagaaatttgcggagcaaacactgcgccagaaggcgcaggtggagcaggaattgactactctgcgtcttcagctcgaagaaaccgatcaccagaagaatctccttgatgaggaactgcaacgcctgaaggccgaagccacagaagctgctcggcagcgcagtcaggtcgaagaagagttgtttagcgtgagggtgcagatggaggagttgtctaaattgaaggcgagaatcgaggctgaaaaccgcgcattaattctgagagataaggataatactcagagattcttgcaggaggaggctgaaaagatgaagcaggttgccgaggaagctgcccgcctttccgtagcagcacaggaagccgcccgtctacgacaattggccgaggaagatctcgcccagcagcgcgccctggctgaaaagatgctgaaagagaagatgcaggccgtccaggaggccaccagactcaaagccgaggccgaattgctgcagcaacagaaggagctggcccaggaacaggctagaagactacaggaagataaagagcagatggcgcagcagttagctgaggagacccagggttttcagcggacacttgaggcagagcggcagaggcagctagaaatgtctgcagaggctgaaaggttgaagctgcgtgttgcagagatgtcccgggcacaggctagagccgaagaagacgctcagcgctttaggaaacaggccgaggaaatcggcgagaaactgcaccggacagagctcgcgacccaggaaaaggttacgctggttcaaactctcgaaatccagaggcaacaatcagatcatgatgctgagcgcctgcgagaagctattgcggaactcgaacgggagaaagaaaaactgcagcaggaggcaaagctgttgcagttaaagtccgaggagatgcagaccgtacagcaggaacagttgctccaggaaacgcaggccctgcaacaaagctttctgtccgaaaaggactccctcctgcagcgggaacgcttcattgagcaggagaaagcgaagctcgagcagctgttccaagatgaggtggctaaagctcagcaattacgtgaagaacagcagagacagcagcaacagatggagcaggagagacagcgcctagtggccagcatggaggaggcacgacgtcgccagcacgaagcggaagaaggtgttcgacgaaagcaggaggagcttcagcagcttgagcagcagcgtcggcagcaggaggagctcttggccgaggaaaaccagagactgcgtgagcagcttcaactgttagaagagcagcaccgagccgcacttgcccacagcgaagaagtgacagcaagccaagttgccgccacaaaaacactgcccaacggccgcgacgccctggacggaccagctgccgaggcggaaccagagcattcattcgatggcctccgtcggaaggtgtctgcccagaggctgcaggaagccggcattctgtccgcagaggaactgcaacgcctggctcaaggacacaccactgtggatgagctggctcgcagagaggatgtccggcactatcttcagggaagatcctctattgcaggcctcctgctcaaggcgactaacgagaagctcagtgtctacgcggccttgcaacgccagctgctttcacctggaacagcccttatcttgctagaggcacaggcggcgagcggctttcttctggaccctgttcggaataggcgtctgacagtaaatgaagccgtcaaagaaggcgttgtgggacccgagctccatcacaaactactgtcagccgagcgggcagtcacaggatataaagacccatatacagggcagcagatttccctgttccaggccatgcagaagggactgatcgtcagagagcatgggattcggttgttggaggctcagatagcgaccggaggcgtcatcgatcccgtgcattcccatcgggtgcccgtcgacgtggcctatagaagaggttactttgacgaggagatgaatagagtgctggctgacccgtcagatgatacaaagggattcttcgatcccaatacccatgagaacctgacatacttgcaattacttgagaggtgcgtggaggatcccgaaaccgggctctgtctgcttcccctgaccgacaaagccgcgaagggcggagagctggtatatacagactcagaggccagggacgtgtttgagaaagcaaccgtatcggctccattcggaaagtttcaggggaagactgtgaccatctgggagattataaacagcgagtatttcaccgcagagcagaggagggacctgctgcggcagttccgcacaggacgcattactgtcgagaaaattataaaaattatcatcaccgtggtggaagagcaggaacagaaaggtcgcctgtgctttgaggggctcaggagcctcgtacccgccgctgaactgctggagagccgggtcattgacagggaactgtaccaacaactccaacggggggagcgaagcgtgagggatgtggccgaggtggacacggtgagacgggccctgaggggcgcaaacgtaattgcgggtgtttggctggaggaagctggccagaaattgagtatttataatgccttaaagaaagatctgcttccctctgatatggctgtcgcactgctagaggcgcaggccggtaccggtcacatcatcgacccagccacctctgcgagactgaccgtagacgaggccgtcagagctgggctggtcggtcccgagtttcatgaaaaattgctgtccgctgaaaaagccgtgacaggatatcgtgacccgtatactgggcagtccgtgagtctttttcaggctctgaagaagggcctgatccctcgggagcaagggttgcggctgcttgacgcccagctcagcaccggaggtattgtggaccctagtaaaagtcatcgagtgcctctcgatgtggcgtgtgccaggggctgcctggatgaggagacttccagggcactaagcgccccgcgcgccgacgccaaggcttattctgaccccagtactggggaacctgccacctacggagagctccagcagaggtgccggcccgatcagctcaccggattgtcgctgctccctcttagcgaaaaagctgctcgagcccggcaggaagagctttacagcgaattgcaggctagggaaacctttgaaaagacacccgtagaggtccctgtgggagggtttaaaggacgaaccgttaccgtctgggaactgatatcaagcgaatactttaccgcagagcaacggcaggaacttcttagacagttccgtacaggaaaggtgacagtggaaaaggtcatcaagatcctgatcacaatcgttgaggaagtcgagacactgaggcaagagcgcctgagcttcagtggactgagagccccagtgcctgcttcggaactgctcgctagtggagtgttgtcccgtgcccaattcgagcaactgaaggatggcaagaccaccgtgaaggacctatccgagctcggatcagtccggaccctattacaaggatccggctgcttggctggaatctatctggaagatacgaaagagaaggtgtccatctacgaggctatgcgccgcggcctccttagggctaccacagcagctctgctcctggaagcccaggccgctactgggttcctggtcgatccagttcgaaaccaacgcctctatgtgcacgaggctgtgaaggcaggcgtcgtcgggcccgaactgcacgaacagctgcttagcgcagaaaaagccgttacgggctatagggacccctatagtggttccacaatcagtctcttccaggctatgcagaagggccttgtgcttcgacagcatgggatcagactgctggaagctcaaattgccactggggggatcattgatccagtgcacagtcatcgtgtccctgtggatgttgcgtatcagcgcgggtatttttccgaagagatgaacagagtcttagcagatccctccgatgacacaaagggcttctttgacccgaatacccatgagaatctcacctaccgtcaattattagagcgctgtgtcgaagacccagagaccggacttagactgctgcctttaaaaggggccgaaaaggcagaggtagtggaaaccacccaggtgtacacagaggaggaaacaagacgcgcattcgaagagactcaaattgatatcccaggaggaggatcccatggaggatccactatgtcgctgtgggaagtcatgcagagcgatctgatacctgaagagcagcgtgctcagttgatggctgactttcaggcgggaagagttaccaaagaacgtatgatcattattatcatcgaaattatagagaagactgagatcattcgtcagcaagggcttgccagttacgattacgttcggagacggttgaccgcagaagaccttttcgaggcaaggatcatatcgctggagacttacaacctcctgagagaggggacacggtcactcagggaggccctggaggcagagagcgcctggtgctacctctatggtactggctcggtggccggagtctacctccccgggagtaggcagacactgtcgatctaccaagcgctgaagaagggtctgctgtctgccgaggttgcgcgattgttgttggaggcccaggcagccacgggttttctcctcgatccagtgaagggcgaacggctgaccgtagatgaggcggttcgcaaagggctggtcggaccagaactccatgaccgcctgctttctgccgagagggcggtgacgggataccgcgatccatacaccgaacagaccataagtctcttccaggccatgaagaaggagctcatcccaacagaggaagcattacgcctccttgacgctcagctcgccacaggcgggatcgtggatccccggctgggttttcacctgcccctggaggtggcctatcagagaggttacctcaataaagacactcatgatcagctgtctgagcccagtgaagtaaggtcctacgtagaccctagcaccgacgagcgtctgagttacactcagcttcttcgccgctgcaggcgggacgatggaactggtcaactccttctgcccctatccgatgcccggaagctgacttttcgcgggttgagaaagcagatcacgatggaagaactggtgcgcagtcaggtcatggacgaagcaacggcgctgcaactgagagaagggttaaccagcattgaagaggtgacaaagaaccttcaaaaattcctcgaaggaacatcctgcatagccggggtgtttgtggacgcgaccaaagaacggctaagtgtctaccaggcaatgaagaagggaatcatcaggccaggaactgctttcgaacttcttgaagcccaggcagccacaggctacgttattgatcctatcaaggggctcaaacttacagtggaggaggccgtacgcatgggcatcgtcggacctgagtttaaggacaagctgctgtcagctgagcgagctgtgacaggctataaggatccgtacagcggaaagctgatctccctctttcaagccatgaagaagggtctgatcctgaaggaccatggcattcggcttctggaggctcaaatagcaaccgggggcattatcgaccccgaagagagtcacagactacctgtcgaagtggcatacaaaaggggccttttcgatgaagaaatgaatgaaatcctgacagacccatctgatgatactaagggcttctttgaccccaacacagaagaaaacttaacatacttacagttgatggaacgctgtatcactgaccctcagacgggactgtgtctactgcctctcaaagagaaaaagcgagaaagaaagacctcttctaagtcctcggttcgcaaaaggcgggtagtgatagtcgatcccgaaacaggtaaagaaatgagtgtgtatgaggcttataggaagggcttgatcgaccaccagacatacctggagctgtctgagcaagagtgcgagtgggaagagattactatcagctctagtgacggagtggtcaagtccatgattatcgatcgtcggagtggccgccaatatgatatcgacgacgccatagctaaaaacctcattgatcgatcagcactggatcagtacagagccggtacgctaagcatcacggaattcgccgacatgctcagcgggaacgcgggcggctttcgaagtcggtcttcctcagtgggctctagctcctcctaccctatatctcccgcagtctccaggactcagcttgcttcatggtctgaccctaccgaggagacaggccctgtggcagggattctcgacactgagactttggaaaaagtcagtattaccgaggcaatgcacagaaatctggtggacaatattaccggacagaggctgctcgaggctcaagcctgtacgggcgggatcatcgacccaagcactggtgagcggttccctgtcacagatgctgtaaacaaggggctggtggacaagatcatggtcgatcggatcaatttggcccaaaaagctttctgtggcttcgaagatcctcggaccaaaaccaagatgtcggcagctcaagccttgaagaagggctggctttattacgaggcggggcagaggtttctggaagtgcagtatttgactggcgggctgatcgagcccgacactccaggccgggtaccactcgatgaagcattgcagcgggggacggtcgacgcacgcaccgcccaaaaactccgtgatgtcggcgcatacagtaagtatctcacatgtcctaaaacgaagttgaaaatttcgtataaggacgctcttgaccggtctatggttgaggaaggcacaggtctgaggctcttagaagctgccgctcagtccaccaagggatattactctccctactccgtatccgggagtggctcgacggcaggttctagaaccggatcgaggaccggaagcagagctggttccaggcggggcagcttcgacgccactggatctggcttcagcatgacattctctagttcctcatactcctcgtcaggatacggtcgaagatatgcctctggcagctcagcttcactcgggggcccagagtccgcagtggcatag

SEQ ID NO: 129017 - DNA, 13656 bp, synthetic construct
  misc_feature 1..13656: note = Description of Artificial Sequence: Synthetic coding sequence
  source 1..13656: mol_type = other DNA
atgtcaggagccggcggagcattcgctagccctcgcgaagtgctgctggaaaggccctgctggttagacgggggttgtgaacctgcccgcagaggatatctataccagcagctgtgttgtgttgatgaacgagatcgcgttcaaaaaaaaacctttaccaagtgggttaataagcacctgattaaggcgcagcgccacatttccgatctctacgaagatctccgtgatggacacaatctcatttccctgctggaagttttgagtggagatagcctcccgcgcgagaaggggcgaatgcgctttcacaagctgcaaaacgttcaaatagctctcgattaccttcgtcatagacaggtgaagctggttaatatccgcaatgacgacattgcagacgggaatccgaaactaacacttgggttgatctggaccattattctgcacttccagatatccgacatccaggtgagtgggcagtccgaagacatgacagccaaggaaaaactcctcctctggtcgcagcgcatggttgaaggctatcaggggctgaggtgtgataactttacatcttcttggcgcgatggcagattattcaacgctattatccaccgccataagcccctcctaatcgatatgaataaagtttacaggcagaccaacctagagaatttggatcaggcttttagtgtcgcagagagggatttgggtgtcactcggctcctcgatccagaggacgtcgatgtccctcagcccgatgagaagtccatcattacgtacgtcagcagcctctatgacgcgatgccgcgcgtccccgatgtgcaggacggcgtcagagccaatgaacttcagctcagatggcaggagtatagagagctggttttgctgcttctgcagtggatgcggcaccacacggctgcttttgaagagaggagatttccgtcaagttttgaggagatagaaatcctgtggagtcagtttctcaagttcaaggagatggagttacctgctaaggaggctgacaagaaccggtccaaaggcatttaccagagtttagagggcgccgtccaggccgggcagttgaaggtgcctcccggataccaccccctcgatgttgagaaagagtgggggaaactgcacgttgccattttggaacgcgagaaacagctacgctccgagtttgagcgactggaatgcctgcagcggatagtcaccaaactgcaaatggaggccggcctgtgcgaggagcaacttaaccaggcagacgccctgctgcaaagcgatgtgagactcctcgccgcagggaaggtgccccagcgggcgggggaggtggaaagagatctggacaaggctgactccatgatcagattgctctttaatgatgttcagacgttgaaagacggccggcacccacagggggagcagatgtaccggcgagtgtatcgactacacgagaggttggttgccattcgaaccgaatacaatctccggctgaaggcaggagtggccgcaccagccacacaggtggcacaagtgaccctccagtccgtgcagagaagacctgagctggaagactccaccctcaggtacctgcaggacctgttggcttgggtggaagaaaaccagcatcgtgtggacggcgccgaatggggagtcgacctgccttccgtggaggctcaactgggatcccaccgaggcttgcatcagagcattgaagaattccgcgccaagattgagagggcccgcagcgatgaaggacagctgtcacctgctactagaggagcttatcgagattgcctgggcagactcgacctgcaatatgcgaaattgctaaattcatccaaggcccgtctgaggtctctagagtctttacactcgttcgttgcagccgccacaaaagagctcatgtggctcaatgagaaggaagaagaggaagtcggatttgattggtctgatcgaaacacgaacatgactgccaaaaaagagtcctactccgcactgatgagggagctggaacttaaggagaagaagattaaggaattgcagaatgccggggaccggctgctacgcgaagaccaccccgctaggcctaccgttgaaagcttccaggccgcattgcaaacgcaatggtcctggatgctgcagctgtgttgctgtatcgaggcccacctgaaggaaaacgcagcttacttccagttctttagcgacgtccgagaagcggaggggcagctccagaagcttcaggaggcactgaggcgcaagtattcatgcgatcgatccgccactgtcacacgattagaagatctactccaggacgcccaagacgaaaaggaacagctgaatgagtataagggacatttgtccgggctcgctaagcgtgcaaaggccgtcgtgcaattgaaaccccgacaccccgcacacccaatgcgtggacggttgcccctgcttgctgtgtgcgactataaacaggtcgaggttactgtccacaaaggagatgaatgtcagttggtggggcctgcgcaaccctcacactggaaagtgctatcttcctccggaagcgaagcagctgtaccatccgtgtgttttctcgtaccccccccaaatcaggaggcacaggaggccgtgacgcgtcttgaagctcagcaccaggcactggtcaccctctggcaccagttgcatgtggacatgaagagcttgcttgcgtggcaatcactgcggagagacgttcagctgattaggtcttggagtttagcgacttttagaaccctcaaaccggaggaacagaggcaggctctgcactcccttgagttgcactatcaggccttcctcagggactcccaagacgccggaggatttggtccggaagaccgcctgatggcagagcgggagtacggatcttgtagtcaccactatcagcagctcctacagtccctggaacagggtgcccaggaagagtcacggtgtcaacggtgtatctctgaactcaaggatatccgcctgcaactggaggcgtgcgagactcgcaccgtccacagacttagactgcccctcgataaagaaccagccagagaatgcgcacaacggattgcagagcagcagaaggcccaggccgaggtggagggactcgggaagggcgtggcaagactgtctgcggaggctgagaaggtgctagctttgcctgaaccgtccccagcggcgccaacccttagatctgagctcgagctgaccctaggcaaactggaacaggtgagatctttgagtgccatttacttggaaaagcttaagactataagccttgtaatccggggtacccagggagctgaggaggtccttagggctcatgaagaacagctcaaggaagcccaggccgtgccagcgacactcccagaactagaggcaactaaagcgagccttaagaagcttcgcgctcaggcagaggcgcaacagcccacatttgacgccctgcgcgacgagctccggggcgctcaggaagtgggggagcgattgcagcagcggcacggagaaagggatgtagaggttgagcggtggagggaacgcgtggcccagttgctggagcgctggcaggctgtcctcgctcagactgacgtgcgccagagggaactggagcagctcggccgccagttgaggtactacagagaaagcgcagatcctcttggagcctggctgcaggatgcacgccgccgccaggagcaaatacaggccatgcctctggccgattcacaagctgtccgcgaacaactcaggcaggagcaggcgctgctggaagagatagagaggcatggagaaaaggtggaagaatgccagaggttcgcaaagcagtatataaacgccatcaaagactacgaactgcagctggtaacctacaaggcccagctggagccagtggctagccccgccaagaagcctaaggtgcagagcggctcagagtctgtcatacaggagtatgtggaccttagaacacactattccgaactgacaactctgacgtcccaatatatcaagttcatttcagagacacttcgacggatggaagaagaagaacgcctcgccgagcagcagcgcgcagaagaaagagaaaggctggccgaagtcgaagccgcactcgaaaagcagcgccaactcgctgaggcacatgcacaagctaaggcacaggccgagagagaagccaaagaactgcagcagcggatgcaagaagaagttgtccggcgtgaggaagctgctgtcgacgctcaacagcagaaacggagcatccaggaggagttacagcaactgaggcagagcagcgaggccgagatccaagccaaagctagacaggctgaagccgccgaacgttcccgtctccggatcgaagaggaaatacgagtggtgaggctgcaattggaagccacggagaggcagagaggtggggccgaaggagaactgcaagcgcttagggctagagctgaggaggccgaggcacagaaacgacaagcccaggaggaggccgagcgtcttagacgacaagtccaggacgagtctcagaggaaaaggcaagcggaggtggagcttgcatctcgcgtcaaggcagaagccgaggccgcccgtgagaaacagcgagcactacaggccctcgaggaactcagactgcaggccgaggaagctgaacgcaggctacgacaggcggaagtagagcgagctagacaggttcaagtagcccttgaaacagcacagcgctccgcagaggcggagttgcagagcaagcgcgcctctttcgccgaaaaaaccgcccaactcgaacgctcactgcaggaagagcacgtggccgtggctcagttgcgtgaagaggcagagcgtcgcgcgcaacagcaggccgaggccgaaagggccagggaggaagccgagcgcgagctcgaacggtggcagctgaaagccaatgaggccctccgcctgcggctgcaagctgaggaggttgcccagcagaagtcactggcgcaggcagaggctgagaagcagaaggaggaagcagagcgggaagcaaggcggagggggaaagccgaggagcaggcagttcgtcaacgggagctcgccgagcaagagctcgaaaagcagaggcaactggccgagggcaccgcccagcagaggctcgccgccgaacaggagctgatccggctgagggccgagacggaacaaggcgagcagcagcgccagctgctcgaggaagaacttgccaggctccagagggaagcggctgcagcgacccaaaagcgtcaggagctcgaggccgaattagccaaggtccgagctgagatggaggtcctgttagcaagcaaggctcgcgcagaggaagagtccagaagcacctcagagaagagcaaacagagactggaggcagaggcaggtaggtttcgcgagctggccgaagaggctgctcgtttgcgcgctttggctgaggaagccaaaagacagcgccagcttgccgaggaggacgcagcacggcagcgcgctgaggctgagcgagtgctagccgagaaactcgcagcaatcggcgaagcaactaggctgaagaccgaagcagagattgccttaaaggaaaaagaggcggaaaacgagcgtctccgccggctggccgaggacgaggcgtttcaacggcggaggcttgaagagcaggccgcccagcataaagccgacatcgaagagaggctcgctcagctccgcaaggcctcagattccgagctggaaaggcaaaagggacttgtggaagatacacttaggcagcgcaggcaggtcgaagaagagattctggcattgaaagcgtccttcgagaaggccgctgcgggcaaagccgagctcgagttggagctcggccggattaggtccaacgctgaagatacactccggagcaaggaacaagctgaacttgaagcagcaagacagcgccagctcgccgctgaggaagagcggaggcggcgggaagcagaagagcgggtccaaaagtccttagctgcggaggaggaagctgccagacagaggaaggccgctctggaggaggtggagcggctgaaagccaaggtcgaggaggcacgcagactgagagagcgcgcagagcaggagagtgcccgccagttgcagcttgcccaggaggcagcacagaagcgtctgcaggctgaagaaaaggcccatgccttcgcagttcagcaaaaggagcaagaactccagcaaacgttgcagcaggagcagtctgtgctggatcagctcaggggtgaggccgaggccgccaggcgggccgctgaggaagctgaggaagccagggttcaggccgagagagaggcagctcaaagcagacgccaggtagaagaagcggaaaggctcaaacagagtgctgaagagcaggctcaggctcgggcccaggctcaggctgcagctgaaaagctgaggaaggaggccgaacaagaggctgcccgcagggcccaggccgagcaggctgcgctacgccagaaacaggctgctgacgcagagatggagaaacacaagaagttcgcagagcagaccctcaggcagaaggcccaggtcgagcaagagcttacaacgctgcgcctacagctggaggagactgatcatcaaaagaacttgttggacgaggagcttcagcgcttgaaggcagaggctactgaggccgctcggcagaggtcacaggtcgaagaggagctgttttccgtgcgggtgcagatggaggaactgtccaagttgaaagcccgcatcgaagccgagaaccgggctctgattctaagagataaggacaacacacagaggttcctccaggaggaagcggaaaagatgaagcaagtggcagaggaagcggctcgactgtccgtcgctgctcaggaggcggcacgactcaggcagctagccgaggaggacctggctcaacagcgtgctctagctgagaagatgctcaaggagaagatgcaagcggttcaggaggccacccggcttaaagctgaagcagagctgctccaacagcagaaggaactggcacaggaacaagcacgcaggctccaagaggacaaggagcagatggcccagcagctggccgaagagacccagggatttcaaaggactttggaggcagaaagacaaaggcaattagaaatgtcagccgaagcagaacggctgaagctccgcgttgctgagatgagccgggcgcaagcccgggccgaggaagacgcacagcgcttcagaaagcaggccgaggaaatcggggagaagctgcaccgcaccgaactggcaactcaagagaaagtcacattagtgcagaccttggagatacagcggcagcagagcgaccacgatgcagagcgcttgcgcgaggcaatcgcagagctggaaagggaaaaagagaagctgcagcaagaggccaagctgctgcaactgaagtcagaagagatgcagaccgtgcaacaggaacagctgttgcaagaaacacaggctctccagcagtccttcctttcagaaaaagacagtctcctgcagcgggagcgttttatcgaacaggaaaaggctaagctcgaacagctcttccaagacgaagtggcgaaagctcagcagctgagggaggagcagcagcggcagcagcagcagatggagcaggaacggcagcggctagtggcaagtatggaggaggctagaaggaggcagcatgaggccgaggagggcgtgcgaaggaaacaagaggaactgcaacagttggaacagcagcgacgacaacaggaggagttactggctgaagaaaatcaacgcctccgagaacagcttcaattgctggaggaacagcaccgagcagccctcgctcacagtgaagaggttaccgctagccaagtagccgcaaccaagaccctgcccaatggcagagacgctctcgatggacctgccgcagaagcagagccggaacattctttcgatggcctcaggcggaaagtcagtgctcagagattacaggaggcaggaattttgtccgccgaagagctccagcgtctggcccagggccacacaaccgtcgacgagctggctcgcagggaggatgtccgccattatttgcagggccgcagttcaatagccgggctcctgttgaaggccaccaatgagaaactgtctgtatacgccgccctgcagaggcagctccttagtcctggcactgcactgatactgctcgaagcacaagccgcctccgggtttctcctggacccagtgaggaatcgtaggctcaccgtgaacgaggcagtgaaagaaggcgtggtgggacccgaactgcaccataaacttcttagcgcggagcgcgcagtgaccggatacaaggatccttacaccggccagcagatctctctgtttcaggccatgcagaaaggcttgatcgtgcgcgagcacggcattagacttttggaagctcagattgccacagggggagtgatcgatccggtccattcccaccgggtccccgtagacgtcgcatataggaggggttattttgatgaggaaatgaaccgcgtgttggctgacccatcagatgacacaaaagggttctttgatcccaatacccacgaaaatctaacgtacctgcagctcttagaacggtgcgtcgaggacccagaaacaggcttgtgccttctgccactgacagacaaagcggctaaaggtggcgagttggtctacaccgactctgaggccagggacgtgtttgaaaaggctaccgtttctgcgccttttggaaagttccaaggaaaaactgtaaccatttgggagattattaactctgagtactttactgcagagcagcgtcgtgacttgcttcgccagtttcgcacaggccgaattacggtcgaaaagatcattaaaatcataattacagtagtggaggaacaggagcagaaagggcgcctctgttttgaaggactgaggtctcttgtcccggcagccgagctcctagagtctcgagttatcgatagggagctgtatcagcagctgcagcgcggggagcgttctgttcgtgatgttgcggaggtggacactgtgcgtagagctctgaggggcgcaaacgtcatcgctggagtatggcttgaggaggcaggtcagaaactgtccatctataacgccttaaaaaaggacctcttaccatctgatatggccgtggccctgcttgaggcacaggccgggaccgggcacattatcgatccggccacctccgctcgcttgactgtcgacgaagctgtgcgagcaggcctggttggacccgagtttcacgaaaagctgctctctgccgagaaggccgttacagggtacagagacccatacaccgggcagtctgtgtctttattccaggcactcaagaagggattaattccgagagagcagggactgcgactgctcgatgcacagctctccacaggcgggattgtagatccttctaagagccatcgtgtccccctcgatgtggcctgtgcgcgtgggtgcttggacgaagagaccagccgcgcactgtcagccccaagggccgacgctaaagcttactctgacccctcaaccggtgagccagcgacctatggcgagctacagcagcgatgcaggccagatcagctaaccggcctttctcttctgcccctgtcagaaaaggctgcaagagctagacaggaagagctttattccgagttgcaggcccgagaaacattcgagaagactcctgtagaggtgcccgtcggaggcttcaagggcagaactgttaccgtgtgggagctgattagttcagaatatttcaccgcagaacagaggcaggaactcctgcggcagtttagaaccgggaaggtgaccgtggagaaggtaattaaaattcttattaccattgtggaggaggttgagacccttagacaggaaaggctgtctttcagcggactacgggcccctgttccagccagcgagcttctggctagcggagtgcttagcagggcacagttcgagcagctgaaggatggaaagacaacagtcaaagacttgagtgagcttgggagcgtcaggacgctgctccaaggttcaggttgtctggctggaatttacttggaagacactaaggaaaaggtttccatttacgaagccatgcggcgtggactactacgcgctacgaccgctgctctgctgctcgaagcacaagctgcaaccggctttctggtcgacccagttcgtaatcagagactctacgtgcacgaggccgttaaagccggtgtcgtaggccccgagttgcatgaacagttactctccgccgaaaaggcagtaacaggataccgcgatccttattccgggtccacaattagtcttttccaggctatgcagaaaggcctggtcctacgtcagcatgggatccgtctcttggaggcccaaattgccactggaggaataatcgatcctgtgcattcacaccgcgtaccagtagacgttgcgtatcagagaggctacttcagcgaggagatgaaccgagtgctcgccgatcctagtgatgacaccaagggtttttttgatccaaacactcatgagaacctcacttatcgccaactgcttgaacgctgcgtggaggaccctgaaactggtctgagattgctccctctgaagggagccgaaaaggctgaggtcgtggaaactacgcaggtgtacacggaggaagaaacacgcagggcctttgaggaaacacagattgacatcccagggggaggaagtcatggagggtcaaccatgagcctatgggaagtcatgcagtccgacctgatcccggaggaacagcgagcacagctgatggctgattttcaggccggccgcgtcactaaggaaaggatgattattattatcatcgaaatcattgagaaaacagaaatcatccgtcaacagggcctggcttcctacgattacgtccgtcggcgcctgacagcagaggatctgtttgaagctaggattatttccctggagacatataatctgctgagggaaggtacacggagtttaagggaagccctcgaggcagagtcagcctggtgctatttgtacggcaccggatcagtggccggggtgtatctgcccgggtcacggcagacactatccatttatcaggcactaaagaaaggccttctgtctgcagaggttgctagactcctccttgaggcccaggctgccaccggattcctgttggaccccgtgaagggagaaagacttacagtggatgaagctgtacgtaaagggctggtaggacccgagctccatgaccgcttgcttagtgccgagcgcgcagtgacaggttacagggatccctatacggaacagaccatctcgcttttccaggccatgaaaaaagaactcataccaactgaagaagcattgcggctcctagacgcacaactggccaccgggggcatcgtggatccgcgcctgggctttcacctgcccttggaggttgcctatcagcgcggatatttgaacaaagacacacatgatcagttgagcgagccatcagaggtgagaagttacgtggacccgtctactgacgagcgacttagctatacacaacttctgcgtcgctgcaggagagatgatggtactggccagcttttgctccctctctcagacgctaggaaattaacattccgtggactgagaaaacagattactatggaggaactggtgcgtagccaagtcatggacgaggccacagccctgcaactgagagagggccttacgagcattgaggaagtgaccaagaatcttcagaagtttctcgaagggactagttgtattgccggggtgttcgtcgacgcgacaaaagagaggctgagcgtttaccaggccatgaagaagggaatcatccgtcctggcaccgccttcgagctgttggaggcacaggcagctacgggctacgtgatcgacccgattaaagggctgaaactcactgtggaagaagctgtgaggatgggcatagttggacctgagtttaaagacaagctgctgtccgcggaacgcgctgtcaccggatataaagatccatattccggcaagctgattagcctgttccaggcgatgaagaagggcttaatcctcaaggaccacggcattaggttgttggaagcccagattgcgacgggaggaattatcgacccggaagagagccatcgcctccctgttgaggtggcatacaagagggggctgtttgacgaggaaatgaacgagattttaacagacccaagtgacgacaccaaaggattctttgatccaaacaccgaagagaacctcacctacctgcagctgatggagagatgtattaccgaccctcagaccggcctgtgtttgcttcccctaaaggagaaaaaacgcgagcgcaagacttcctcgaaaagtagtgtgcggaaaagaagggtggtcatagtggatcctgagacagggaaggagatgtccgtatatgaggcctatcgaaaaggactaatagaccatcaaacgtacctcgagctgtctgagcaggagtgtgagtgggaagaaattactattagcagtagcgatggtgttgtgaagagtatgatcatcgaccgccgcagcggaagacagtacgatattgacgacgccatagccaagaaccttatcgatcgttcagcactggatcagtacagagccggcactttatccatcaccgagtttgcagatatgctcagtggaaacgccggcggcttcagatctcgtagctcttctgtcggttcatcttcttcttatcctattagcccagctgtgtctcgaactcagttggctagctggagtgaccctacagaggagaccgggcccgtcgcaggtatcttggacaccgagactctggaaaaggtctctatcacagaagctatgcaccggaatcttgtcgacaacatcacaggacagaggcttctggaagcgcaggcgtgcaccggcggcattatagacccctctaccggtgagcgtttccccgtgaccgacgctgtcaacaaggggctggtcgataagataatggtcgatcggatcaatctggcccagaaagcgttctgtgggttcgaagatccgaggacaaaaacaaagatgtcagccgcacaagctctcaaaaagggatggctctactatgaggctggccagagatttctggaagtgcagtacttgactggcggactcatcgagccggatactcctggccgcgtgccccttgatgaggcactccagcgtgggacagtcgacgcaagaacagcccagaagctgagagacgtgggtgcctactccaaatacttaacctgccccaagaccaagctgaaaatctcttataaagacgcacttgatagatctatggtggaggagggcaccggcctgcgtttgctggaggcggctgcgcagtcgactaaaggatattactcaccatattctgtgagtggcagcggctccacggccggctcgcgtaccggatcccgtacagggtctcgcgcaggcagtcgccggggttcatttgatgctacagggtccggatttagcatgacattctccagcagctcttattcatccagtggctatggccgccgctatgctagcggaagcagtgcatctctggggggtccagagagcgccgtggcctag

SEQ ID NO: 129018 - DNA, 13548 bp, synthetic construct
  misc_feature 1..13548: note = Description of Artificial Sequence: Synthetic coding sequence
  source 1..13548: mol_type = other DNA
atgaagattgtgcctgatgagagagatcgggtgcagaagaagacctttaccaagtgggtgaataagcatctgattaaagctcagcggcacatcagcgatctgtatgaagatttacgggatggacacaatctcatctctctgctggaggtgttgagcggggatagcctacctagggagaaggggcgcatgagatttcacaaactacagaacgtgcagatcgccctcgactatctcaggcatcggcaggttaagttggtgaatatccggaatgatgatatcgccgacggaaaccctaagttaacactggggctgatctggacaatcatccttcacttccagatcagtgacatccaggtctcgggccaatcagaggatatgactgctaaagagaagctgcttctctggagccagcgcatggtagaaggctaccagggtctgcggtgcgacaactttacctccagctggcgcgatggacgtctcttcaatgccataatccacaggcacaagccgttgctgattgatatgaacaaggtttatcgtcaaactaacttagagaacctggaccaggccttttctgtcgccgaacgcgatcttggggtgacccgtctgctcgaccccgaagacgtggacgttcctcagccggatgaaaagtccatcattacctatgtgagcagtctctatgacgccatgcccagagttcccgacgtgcaggacggcgtccgagcgaacgagctgcagctccggtggcaggaataccgcgaactcgtccttctgttattgcagtggatgaggcaccataccgctgccttcgaagagagacgctttcccagctcgttcgaggaaatcgaaatactctggagccagttcctcaagtttaaggaaatggagcttcccgcaaaggaagcagataagaaccgctccaaaggcatctatcagtccctcgagggagcagttcaggcaggtcaactgaaggtgcctcccggctatcatcccctggacgtggagaaggaatgggggaagcttcatgtggctatattggagcgagagaagcagttgcggagtgaattcgagagattagagtgtttgcagagaatcgtaaccaagcttcagatggaagctgggctgtgcgaggagcagctcaatcaggcagatgccctactccaaagcgacgtgcggctgctggctgccgggaaagtgccccagagagccggcgaagtagaaagggatcttgacaaggctgattccatgattcgactcctcttcaatgacgttcaaactctgaaggacggtcggcatccacagggggaacagatgtataggcgagtttacaggctacatgagcggttggtggccatccgaaccgagtataacctacgactgaaagccggagtggccgccccagccacccaggtggcccaggtgacgctgcagtctgtacaacggcgtcccgagctggaggactcgaccctccgatacctacaggacttgctggcctgggtcgaagagaatcagcaccgtgtggatggagctgaatggggggtagatcttcctagcgtggaagcgcagttgggaagtcatagaggtctgcatcagtcgatcgaggagttccgggccaagatcgagcgggcccgttccgatgaagggcagttgtcccccgcaacccgtggcgcctatcgcgactgcctcgggcgcctggacctgcaatacgccaaacttctaaacagctccaaagccaggctgaggtcactggaaagtttgcacagtttcgtggcggccgctactaaggagctaatgtggctgaacgagaaggaggaggaggaagtcgggttcgattggtccgaccgaaataccaacatgactgctaaaaaagaatcctactccgcactgatgagggagctcgagcttaaggaaaaaaagataaaggagcttcagaatgcaggcgaccgtttactccgcgaagaccaccctgctagaccaactgtggagagcttccaggcggccctgcagacccagtggtcctggatgctgcagctctgctgctgcatcgaggcgcatctgaaagagaatgcagcctacttccagtttttcagcgacgtacgggaggccgaagggcaacttcagaagttacaagaagccctgcgccggaagtatagctgcgatcggagcgctactgtgactagattggaggatctactacaggacgcacaggacgagaaggagcaactgaacgaatataaagggcatctcagcggtctggcgaagcgcgcgaaggcggtggtgcaactgaagcctcggcacccggcccacccaatgagggggaggctgcctcttctggctgtgtgcgactacaagcaggttgaagtcactgtgcacaagggtgacgagtgtcaacttgtgggaccggcccagcctagccattggaaagtcttatctagttccggatctgaagccgccgttccttctgtgtgttttctggtcccgccccccaatcaggaagcccaggaagcagtcaccagacttgaagctcaacaccaggcccttgtcaccctctggcatcaactccatgttgacatgaaatctctgctcgcctggcagtcccttaggagagacgtgcagctcataaggagttggagcctggctacatttaggaccctgaaacccgaagagcagcgccaagccctccattcgctggagctccattaccaagctttcctgcgtgattcacaggatgctggaggctttgggcctgaggaccgactgatggccgaaagagaatacggcagctgttctcatcattatcagcagctgctccaatctcttgagcagggcgcacaggaagaatcccggtgtcagcgctgcatatccgagttgaaggatatccgactgcagctggaggcctgcgaaaccagaaccgtgcaccgtcttagacttcccctcgataaggagcctgctagggagtgcgcacagaggatcgcagagcaacagaaggcacaggcagaagtggaaggcctcggaaagggggtcgcaagactgtcggctgaggccgagaaggtgctagcactcccagagccttcacccgctgcgcccaccctgcggtctgagctggagttgaccctgggcaaactcgaacaagtgcggtcactgtccgctatatacctggagaagctcaagacaatttctctcgtaattagaggcacacaaggcgctgaagaggttctcagagcacatgaagaacaactgaaagaagcacaagcagtgccggctacgctccctgaactggaggccacaaaggcttccctgaaaaaactcagagctcaggccgaggcccagcagccaactttcgacgcgctgcgggatgaattacgcggcgctcaggaagttggggagcggctgcagcagagacatggcgagcgggatgtggaagtagagcggtggcgggaaagagttgctcagttattagagaggtggcaggcagtgctggctcagaccgacgtgaggcaacgagagttggagcagcttggccgccaactacggtattatcgggaaagtgctgaccctcttggcgcctggctgcaggatgccagaaggcgtcaggaacagattcaggcaatgccacttgcagatagtcaagcggttcgagagcagctgcggcaggagcaggcactactggaagagatagaaagacacggggaaaaggtggaagagtgccagcgatttgccaagcagtacatcaatgctataaaagactacgagctgcagcttgttacttataaggcccagttggaacccgtggctagccccgcaaaaaaaccaaaggtgcagagcgggtcggagtcggtgatccaggagtacgtcgacctccgtacacactactccgagctcaccacgttaaccagccagtatattaagtttatttcagaaacactccgccggatggaagaagaggaacgcctcgccgagcagcagcgggccgaagaaagagagagacttgccgaggtagaggctgccctagagaaacaaagacagctggccgaggctcacgcccaggcaaaagcgcaagcggaacgggaggcaaaagaattgcagcagagaatgcaggaggaagtagtgagaagggaagaggctgccgtggatgctcagcaacaaaagagatcaatccaagaagagctccagcagctgcgtcaatctagcgaagcagagatccaggccaaggcacgccaggcagaggctgccgaacggagtcgcctgaggattgaagaagagattcgtgttgttaggctgcagctggaagctacggagagacagagaggaggtgcagagggagaactgcaggccctgcgcgcaagagctgaagaagctgaagctcaaaagagacaggcccaggaggaagcagaacggttaagaaggcaggttcaggatgaatcacaacgcaaaagacaggcggaagtggaactcgccagccgagttaaggccgaagcagaggcagcaagagaaaagcagcgagctctccaggcccttgaggagctgcgcctgcaggcagaagaggccgaacggcgcttgaggcaggctgaggtggagcgtgccaggcaagtgcaggtggcactggagactgcccagagatctgccgaggctgagttacaatctaaacgggcctcctttgccgagaagacagcacagcttgaacggtctctgcaggaggaacacgtggccgtggcgcagttgagggaggaggccgaaaggagggctcagcagcaagccgaagcggagcgcgcccgggaggaggctgagagagagctcgaaaggtggcagctgaaagcaaacgaggccctcagactgcgattacaggcagaagaggtggctcagcaaaagtctctggcccaggccgaggcagagaaacagaaagaggaggccgaaagagaagcacgcagacgagggaaggccgaggagcaggcagtcagacagcgggagcttgcagaacaggagctagagaagcagcgccagctggctgagggcactgcccagcaacgtctggcagcagagcaggagcttatccggctgcgggccgagacggagcaaggcgaacagcagcgacaacttctcgaggaagaactggcccgacttcagagggaggccgcggccgcaacccagaagcgccaagagctggaggccgagctggctaaggtcagggctgagatggaggtgctgctagcctctaaggcccgcgctgaagaggagagccgatctacatcagagaaatctaaacagcgactggaagcagaggccggaagatttagggagctcgccgaagaagctgcccggctgagagcattggcagaagaagccaagaggcagcggcagttagcggaggaggacgcggcaagacaaagagcagaagcggaaagggttctcgctgaaaagctggccgctattggagaggcaactaggttaaagactgaagcggaaatcgccctgaaggagaaggaggccgagaatgagcgcctccgcagattggccgaggatgaagcgttccagcgtcgaaggttggaggagcaagccgcccagcacaaggctgatatagaagagaggctagcgcagctcaggaaggcctctgattcagagcttgagcggcagaaggggctggttgaagataccttgcgccagcgccggcaggtcgaggaagagatcctggccctcaaggccagcttcgagaaggcagccgctgggaaggcggagttagagctggaactcggcaggattcgatccaacgcagaggacactcttcggagcaaagagcaggcagaactggaggctgcacgacaacggcagctcgctgctgaggaagagagacgaagacgcgaagccgaggagcgagtacagaagtcattggcggccgaggaagaggccgctaggcagcggaaggccgccttggaagaggttgagcggctaaaggctaaggtggaagaagctcggcgcctacgggagagagcagagcaggaaagtgctcgccagctgcagctcgcacaggaggctgctcagaaaaggctgcaggccgaggaaaaagcccacgccttcgccgtacaacagaaagaacaggagctgcagcagactcttcaacaggagcagtccgttctggaccagctccggggcgaggcagaggcagcgagacgggctgccgaggaggcagaagaagcccgcgtccaagcagagagagaggccgcccagagcagaagacaagttgaggaggcagaaaggcttaaacagagcgcagaagaacaggcacaagcgagggcacaggctcaggcggcggctgaaaagcttcgaaaagaagctgaacaggaagccgcacgaagagctcaggcggagcaagccgctcttaggcagaagcaggcagccgacgctgagatggaaaagcacaagaagtttgccgagcagaccctgaggcagaaggctcaggtggagcaggagttaactacactgagactgcaactggaggagacagatcaccagaaaaatttgctggatgaagagctgcagcggctgaaggcagaggccaccgaggccgctcggcaaaggagccaggtggaagaagagctgtttagcgttcgcgtgcagatggaagagctatcaaaacttaaagcacggatcgaggcagagaatcgggctctgattctgcgggataaagacaatacacaacgctttctgcaagaggaggccgaaaaaatgaagcaggtggctgaggaagctgcaaggctgtctgtcgcagcccaggaagctgcccggctgcgtcagctcgcagaggaggacctcgctcagcagcgtgccctggctgagaagatgctgaaggaaaagatgcaagcggtgcaggaggcaactcgactcaaggctgaggctgaactgttgcaacagcagaaggagttagcgcaggagcaggccagacggctccaggaggacaaggaacagatggcccagcagcttgccgaggagacacagggttttcagaggacactagaggccgagaggcagcggcagctggaaatgagtgccgaggcggaaaggcttaaactaagggtagccgagatgtcaagagcccaagcccgcgcggaagaggacgcacaacggttccgcaaacaggccgaggaaatcggagaaaaactgcaccgaacagaactggccacccaagagaaggtaacactcgtgcaaacgctggagatccagcgacagcaatctgatcacgacgcagagcgtctgagggaagcgatcgccgagctcgaacgtgagaaggagaagttgcaacaggaagcaaagctgcttcagctcaaatctgaagaaatgcaaacagtgcagcaggagcagctgttgcaagaaactcaagccttgcagcaatcgttcctctcagagaaagactcccttctgcaaagagaaagattcatcgagcaggaaaaggccaagctagagcagctctttcaagatgaggtagctaaagcccagcaactacgcgaggagcaacagagacaacagcaacagatggagcaagaaaggcagaggctcgtggcatccatggaggaagctagaagacggcagcatgaagccgaagagggcgtgcggcgcaagcaggaggagctgcagcaattggaacagcagagacgccaacaggaagagttgctggcagaggagaatcaacgcctgagggagcaactgcaactgttggaggagcagcaccgtgcagccctggcccattccgaggaggtcacagcctcccaggtggctgctactaagactctacctaacggaagagacgctttagacggccccgctgccgaggctgaacctgagcatagctttgatggtctgcgccggaaggtctctgcacagcgcctccaggaggcagggatccttagcgccgaagaactgcagcggttggctcagggtcacaccaccgtggacgagctggctcggcgggaggacgttaggcactatctccaaggtcgttctagcattgccgggttacttcttaaagcaaccaacgaaaagctaagtgtgtacgctgccctccagcggcagctgctttcccccggaactgcattaatcctgttagaagcccaggccgcatcgggtttccttttggatccggtacgcaaccggagactgacagtgaacgaggccgtgaaggaaggtgtggtgggcccagagctgcaccataagctgctgtcagccgagcgagcggtgactgggtataaggacccttatacaggtcaacaaatctccctctttcaagcaatgcagaagggtcttatagtccgtgagcacgggatacgtcttctcgaagcgcagatcgctaccggcggcgtgatagacccagtccacagccacagagtccccgtggacgtggcctatagacggggctacttcgatgaggaaatgaatagggttcttgctgatccctcggacgacactaaagggttcttcgatccaaacacccacgaaaacctcacatacctgcagctcctcgaacgttgcgtcgaagacccagaaacgggcttgtgcctgctgccgctgacagataaggcggcaaaagggggtgagctggtgtacacagactccgaggctagggatgtattcgagaaagcgaccgtcagcgccccgttcgggaagttccaggggaagaccgtcaccatttgggagatcatcaacagtgagtacttcacagctgagcagcgaagagaccttttaaggcagtttcgcactggccgtatcactgtggaaaaaatcataaagattatcatcaccgtggttgaggaacaagaacagaagggcagactctgctttgagggactgagatcattggttcctgctgcagagctgctggagagccgagtcattgacagggaattgtaccaacagctacagcgcggggagagaagcgtgcgagatgtcgccgaagttgataccgtacgaagagcacttaggggggccaacgttattgcaggtgtgtggctcgaggaagcaggacagaagctttctatctacaatgccctgaagaaagatctgttgccctctgatatggctgttgccctgctggaggctcaggccgggacgggtcacatcatcgatcccgccacaagtgccagattaacagtcgatgaagccgtacgtgctggactggtggggcctgaatttcacgagaagctgctgagcgccgagaaggctgtaaccgggtaccgtgatccatatactggccagtcggtatcgttgttccaggcactgaaaaagggactcatcccccgagaacagggattgcgcctgctggatgcccagctgtcaaccgggggtattgtggatccctcgaagtctcatcgagtgcctctggatgtggcttgtgcgcgcgggtgtcttgatgaagaaacttcaagagcactgagcgcccctcgggcagatgcaaaagcctattcggatccctctaccggggagcccgccacctatggagagcttcagcagaggtgtcgccctgaccagcttacaggcctgtccctcctgcccctttccgaaaaggcggcccgggcccggcaggaggagctgtactctgagctgcaggcgcgggaaacttttgaaaaaacccccgtagaggtcccagtcggtggcttcaaggggcggaccgtcaccgtctgggaacttatttccagtgagtactttaccgctgagcagcgccaggagttattaaggcagttcagaaccggtaaagtaaccgttgagaaggtcattaaaatccttatcacgattgtagaagaggtagagaccctaagacaggagcggctgtcattctccggcctgcgcgccccagtcccagccagtgagttgctcgcctccggcgttctatccagagcccagttcgaacagcttaaggatggtaagacgacagtgaaagacctgagtgagcttggttctgttcggaccctgctgcagggcagtggttgtctagcgggtatttacctagaggacaccaaggaaaaggtgtcaatctatgaggccatgcgtcgtggcctgctcagggctactactgctgcgctgctcttggaggcccaggctgccacagggttcttggtggatcccgtcagaaatcagaggctgtatgtgcacgaggctgtgaaggcaggcgtagtcgggcctgagctccacgagcagctactgtctgctgagaaggctgttacgggttacagagacccttacagcggtagtactattagcttgtttcaggctatgcagaaaggtttagttcttcggcagcacggcatcagactccttgaagcacagattgcgacaggcggcattatcgacccggttcattctcaccgagtgccggtcgacgttgcatatcagcgtggctattttagcgaggaaatgaaccgagttttggcagacccatccgatgacaccaaagggttcttcgaccctaacacccacgagaatttgacctataggcagcttctagagcggtgtgtggaagatccagaaacagggttgcgcttacttcccctgaagggtgcagagaaggccgaggtggttgagaccactcaggtttatactgaggaggaaactagaagggccttcgaagagacccagatcgatataccaggcggcggctcccacggagggagtactatgagcctgtgggaggtcatgcagagcgatctcatacctgaggaacaaagggcccaattgatggctgacttccaggctggccgggtaaccaaggagcgcatgataataataattatcgagattattgagaaaaccgagattatccggcaacagggcctcgccagttatgactacgttcgtcgcaggttgacagctgaggatcttttcgaggcgcgcattatctccttggagacttataacctgctacgcgagggcaccagatccttgcgagaggcactggaagccgagtcagcatggtgttatctgtacggcaccggcagtgtggccggcgtgtatctccccggctcacgccaaacactaagcatctatcaagctctgaagaaggggctgcttagcgcggaagtagcacgacttttgctcgaggcccaggccgctactggatttctcttggaccccgttaagggcgagagactcacagtcgatgaggcagtgagaaagggtcttgtgggacctgagctccacgataggctgttgagcgccgaaagagctgtgacgggctatcgggacccttacacagagcagactatttcactgttccaggccatgaaaaaagaattgatccctactgaggaagcactcaggcttctggacgcacaacttgcaactggtgggatcgtcgacccccgtttgggcttccatctccctctcgaggtcgcttaccagagagggtacctgaacaaggacactcacgaccagttatccgagcctagtgaagtgcggagttacgtggacccaagcaccgacgagagactatcttacacccagttgctaaggcgatgtcgaagagacgacggaaccggccaactgttgttaccactgagcgacgctcgcaagctcaccttcagagggcttagaaaacagattaccatggaggagctggtcaggagccaagttatggatgaagctacagctctgcagctgagggagggacttaccagtatcgaggaagtgacaaagaacctgcagaagttcctcgaaggaacttcatgcatagctggcgtgtttgtggatgccaccaaggagcggctctccgtgtaccaggccatgaagaaagggatcatacgacctggcaccgcttttgaattgcttgaagcccaagcagctaccgggtatgttattgacccaatcaagggtctgaaacttacggtcgaagaggccgtcagaatgggtatcgtgggaccagagttcaaggacaagctcctctctgccgagcgcgccgttaccggttataaagacccatatagcggcaaattaatctctttgtttcaagcaatgaagaaaggcctaattctgaaagatcacggcatcagactgctggaagcccagattgccaccggcgggattattgatcccgaagagtcccatagactgccagtcgaagtggcttacaaacggggtctcttcgacgaggaaatgaacgagatactcacagatccatcggatgatactaagggcttctttgatcccaataccgaagagaatctgacctacctgcagctaatggagcggtgcatcacggatccacagaccggactgtgccttcttcccctaaaagaaaagaagagggagagaaagacttcaagcaaatcgagcgtgcggaaacgacgtgtcgttatcgtcgatcctgagacaggcaaggagatgtccgtttacgaggcttaccggaaagggctaatcgatcatcagacttatctggagttatctgagcaagaatgcgagtgggaagagattacaattagtagctcagatggtgttgtcaaatccatgatcattgatcgaagaagtggaaggcagtatgacattgatgatgccattgccaaaaacctaatagatcgctccgcgctggatcagtatcgggcaggcactctttcgattacagaattcgccgacatgctctctggcaatgccggaggcttcagaagtaggtcatccagcgtgggttcatcctcctcatatccaatcagccccgccgtttcacgaacgcaactcgcttcttggtctgatccaacggaagagaccggtcccgtagccggaattttggatacagaaaccctggagaaggtgtccattacggaagccatgcaccgaaaccttgtcgacaacatcacaggccagagacttctcgaagcccaagcttgtaccggtgggataatcgacccatcaaccggcgagagatttcccgtgacagacgctgtgaacaagggactggtggataaaatcatggttgatcgaatcaacctggcccaaaaagcattttgtgggttcgaggacccgcggaccaagacaaagatgagcgcagcccaggctcttaaaaagggatggctgtattatgaggccggacagcgattcttggaggtgcagtacctgaccggcggtctgatcgagccagataccccagggagagtccctctggatgaggctctgcagcgggggacagttgacgcacgaaccgctcagaagctgagggatgtcggagcatactccaagtaccttacatgtcctaagactaagttaaaaatttcctacaaggatgccctggataggtctatggtcgaagaaggtaccggcttgcgcctgttagaagctgccgcccaatctaccaaaggctactattctccatatagtgtctccggttctgggagcactgcgggcagtagaaccggcagcagaaccggatcaagggctggttctcggagaggctccttcgacgccactggatctgggttttcgatgaccttctccagctcttcttacagctccagcgggtacggtcgaagatacgccagtgggtcatcagcctctctgggggggcccgagagcgctgttgcctag

SEQ ID NO: 129019 - DNA, 13725 bp, synthetic construct
  misc_feature 1..13725: note = Description of Artificial Sequence: Synthetic coding sequence
  source 1..13725: mol_type = other DNA
atgagtggagaagacgcagaagttagggcggtgtccgaagacgtgtcgaatggaagttccggatctcctagcccgggagataccttaccttggaatctgggcaaaacacagaggagcagacggagcggcggcggcgccggcagcaatggaagtgtgttggacccggctgagagggccgtcattcggattgccgacgaaagagaccgggtacagaaaaaaactttcactaagtgggttaataaacatttaattaaggcccagcgccatatcagtgatctgtatgaagacttgagagatggacacaatctgatttctcttctggaggtactcagtggagattccctcccaagggagaagggccgcatgcgtttccataagctccaaaatgtccaaatcgcgctcgactacttgaggcataggcaggttaagcttgtcaatatccgaaacgatgatattgctgatggtaatccgaaactaaccctcgggcttatctggactatcatcttacattttcagattagcgacattcaggtgagtgggcagtccgaagatatgacagcaaaggaaaaactgttgctgtggagccagcggatggtggagggataccaggggctccgctgcgacaatttcacctcttcatggcgagatggccggctctttaatgctatcattcaccggcataaacccctgctgatagacatgaataaggtgtaccgccagactaacctggagaatctggaccaggcgttcagcgtggccgaacgggacttgggggtcactaggctgctggatccagaagacgtggacgtgccccagcccgacgagaaatcaatcatcacctacgtctcctcactgtatgacgctatgccgcgggttcccgacgttcaagatggagtccgggccaacgaactgcagctgcgatggcaagaatacagagaattagtgttattgctgctgcaatggatgcggcaccatacagctgcgttcgaagaacgtcgattcccttctagcttcgaagagatcgagattctgtggtcccaatttctgaagttcaaagaaatggagcttcccgccaaggaagccgataaaaacaggtcgaaaggaatataccaaagtctggagggcgctgttcaggccggacaattgaaggttccaccagggtaccacccattggacgttgagaaggagtgggggaagctgcatgtggcaatcctggagagagagaaacagctccggagcgagtttgaaaggctagagtgcctgcaacgaatagttacaaaactgcagatggaggcggggttgtgcgaagaacagttgaaccaggcggacgccctgctacagtctgacgtgcggctgctggcagcaggaaaagttccacagcgggcaggcgaagtcgagagggatcttgacaaagctgactctatgatccgcctgctgtttaacgatgtccagacgctcaaagacggacgccatcctcaaggtgaacagatgtatcggcgcgtctacagactacatgaaaggctagttgccatccggaccgagtacaatctccgcctgaaggctggtgtggcagcgccagcgacacaagtggcacaggtaactcttcaaagcgtgcagcggcggcctgaactggaggactccaccctgcggtacttgcaggatctgctggcctgggtggaagaaaatcagcaccgagtcgacggggcggagtggggtgtggatcttccgagtgtcgaggcgcagcttggcagccacagaggcctgcaccagtcgattgaagagtttagggctaaaatagagagagcacgatctgacgaaggccagctatcaccagccacaaggggagcctacagagattgtctggggcggctggacctacagtacgcaaaactcttgaatagcagtaaggctcgcctgcgtagccttgaatccctccactcatttgtggcagctgctactaaggagttaatgtggctaaatgagaaggaagaagaagaagttgggtttgattggtcggaccggaatacgaacatgaccgccaaaaaggagtcgtactcagctctgatgagagagcttgaactcaaggaaaagaagatcaaggagttgcaaaacgcaggagaccgcctactacgtgaagatcatcccgcccggcctaccgtagaaagcttccaggccgccctccagactcaatggagctggatgctccagctgtgttgctgcatagaagcgcatctgaaagaaaacgccgcctactttcaatttttttcagacgtgagggaagccgagggtcagttacagaaacttcaggaggccctgcgacggaaatattcctgtgatcgcagcgccaccgtgaccagattggaggacctcctgcaggacgcacaggacgagaaagaacaactgaacgagtataaaggccatcttagcggtctcgccaagcgggcaaaggccgtggtacagctgaaaccgcgtcaccctgctcaccccatgcgtggcaggctccccctgctcgccgtgtgtgactacaagcaggtcgaagtgacggtccacaagggggacgagtgccagttggttggtccagcccagccatctcactggaaagtgttatcctcctctggatccgaggccgccgtacctagcgtgtgcttcctggtcccccccccaaaccaagaggctcaggaagccgtgacgcggttagaggcccaacatcaagctcttgttaccctgtggcatcagctgcatgtggatatgaagtctctcttggcctggcagtcactcagaagagacgtacagctcattaggtcttggagcctggccaccttcagaaccttaaaacccgaggagcagcgacaggccctgcattctctcgagcttcattaccaggctttcttacgcgattctcaagacgcagggggatttggcccagaggaccgactgatggctgagagggaatatggatcttgtagccatcactaccagcaattgctccaaagcctcgagcaaggtgcccaagaggagtccaggtgccagcggtgtatatcggaactgaaagatattcgcctgcagcttgaagcctgtgagacccgaacggtacatcggcttaggttgccattggataaagaacctgccagggagtgcgcgcagcgcatcgcagaacagcaaaaagcccaggctgaagtcgagggtctaggaaaaggggtggccagattgtcagcagaagccgaaaaagtgctagcactgcccgaaccatcaccagccgccccgaccttgcggagcgaacttgaactcaccttaggcaaactcgaacaggtgaggagtctaagtgcaatttatcttgagaagctgaagaccatctccttggtcatcagagggacacagggtgccgaggaagttctgagggctcacgaagaacaacttaaggaagcccaggccgttcctgccacccttcccgaactcgaggcgaccaaagcgtctctgaagaaacttcgagcccaggcagaggcccaacaaccaacctttgacgccctacgcgacgagctcaggggagcacaggaagtgggggagagactccagcagcggcacggtgagcgggatgttgaggtggagaggtggagagaaagagtggctcagttgttggagagatggcaggctgttctggctcagacggacgtcaggcagcgcgagcttgaacagttggggcgtcagctgcgttactaccgggaatccgccgatccccttggtgcctggcttcaagacgctcgtcgtcggcaagagcagatccaagcaatgccactggccgattcacaagcagttagggagcagctcaggcaggaacaggcactgctggaagagatcgagcgccacggcgagaaggtggaagagtgtcagagattcgctaaacagtacatcaacgcaattaaggactacgaattgcagctggtgacatacaaagctcagctcgagcccgtggcatcccccgcaaaaaaacctaaagtgcaaagtggatccgaatcagtcatacaagaatacgtggatttgcgcacacactattccgagcttacaacattgacctctcagtacatcaaatttatttcagagaccctgagacgcatggaggaagaggagaggttggccgaacagcagcgagccgaggaacgtgaacgcctggctgaagttgaggccgccttggagaagcaaaggcagttagcggaagcccatgcccaggccaaggctcaagccgagagagaagcaaaggagctccagcaaagaatgcaggaggaggtggtgcggagggaagaagcagcggtggacgcccagcagcagaaacgctcaattcaggaggagcttcaacagttgaggcagagttccgaggcagagattcaagctaaggcccgccaggctgaagccgctgagcgctcgaggcttcgtattgaggaggagattcgcgttgttagactgcagcttgaagcgacagaaagacaacggggcggagcagagggcgagctgcaggctttgcgcgcccgggcagaagaagcagaagcccagaagaggcaggcccaagaggaagctgaacgtttaaggcgtcaagtgcaggatgaaagccagcggaaacgtcaagcagaggtggaattggcctctcgagtcaaggccgaggcagaagctgcccgggagaagcagagagctctgcaggccctggaagagctgcgcctgcaagcagaggaggccgaaaggagactccgacaggcagaggtggaaagagcccggcaagtccaagtcgcccttgaaactgctcagcggtcggctgaagctgagctccagagcaagcgcgcttcctttgctgagaagaccgctcagctcgaacggtcacttcaagaggaacatgtcgccgtggcgcagttgagggaggaggccgagcgcagagcacagcagcaggcggaggcggaacgcgctagggaggaagccgaacgcgaactggaacggtggcagttgaaggctaatgaagcactgagactgcggctgcaagccgaggaggtggcccagcaaaagagcctagcacaagcagaggccgaaaagcagaaagaagaggcagagagggaggcgcgcagaagaggaaaagcagaggagcaggccgttagacagcgtgaactggccgaacaggagctcgagaaacaacgccaattagctgagggaacagcccaacagaggttggcggcggagcaggaactcattagacttagagcagagactgaacagggggagcaacagcgccagctgttagaggaagagctcgcacgcctgcagagagaagcggcggcggcgacacagaagcgccaagagctcgaggcagaactggcaaaggtcagagctgaaatggaggtcctgctcgccagtaaagctcgcgctgaggaagagtctcggagcactagcgaaaagtctaaacagagactcgaagctgaagcaggccggttcagagagctggccgaagaggccgcccggctcagagcccttgccgaagaggctaaacggcagaggcagctcgcagaagaggatgccgcccgccagcgcgctgaggctgagagagtgctggctgagaagctcgccgccattggagaggcaaccaggttgaaaacagaagcagagattgcccttaaggaaaaggaagcagaaaacgagcgcctgcgacggctcgctgaagacgaagccttccagagaagacggttggaagaacaagctgcccagcataaggcagatattgaggaacgtctggcccagctgcgaaaggccagcgattcagaactggagcggcagaaaggtctcgtggaggacactctcaggcaaagacggcaggtggaggaagaaatcctggcccttaaggcatcattcgagaaagccgcagccggaaaggctgagctggagttagaactgggaaggataagatccaatgccgaggacacattgagatcgaaggaacaagccgaactcgaggcagccagacagagacaactagctgccgaggaggagaggcgaaggcgtgaagccgaggagcgcgtccagaaaagcctggccgccgaagaagaggccgcgcgtcaacggaaggctgccctcgaggaggtcgagcggctgaaggctaaggtcgaggaggcccgcaggctgagggaaagagctgaacaggagtccgctcggcagttgcagctggcacaggaggctgcacagaagcgcctacaggccgaagaaaaagctcatgccttcgccgtccagcagaaggagcaggaacttcagcagacgctgcagcaggaacaatccgttctcgatcagctgaggggagaggctgaagctgctagacgggcagcggaagaagcggaggaggcacgggtgcaagccgagagggaagcagcacagtcgcgccggcaggtcgaggaggccgagcggctgaaacagtctgctgaggagcaggcccaggcaagggcccaggcgcaggcagccgcggaaaagcttcgtaaggaggccgagcaggaggcagctcggagggcgcaggccgaacaggctgccctccgccaaaagcaggccgccgacgccgaaatggaaaagcacaaaaagttcgccgagcaaacacttcggcagaaggcacaggtggaacaggagcttaccaccttaagactacagctggaggagaccgaccaccagaaaaatcttctcgatgaagagttacagcgcctgaaagcagaggcgaccgaagcggcgcgtcagcggtcccaggtagaagaggagctctttagcgttagggtccagatggaagagttgagcaaactgaaggcaagaattgaagcagagaatagggcactaatccttcgggataaggacaatactcagcggtttctccaggaggaggctgaaaagatgaaacaagtggccgaagaggctgcacggctcagcgtcgctgcacaggaggccgcccgcctgagacagctggcggaggaggatctggcccagcaacgagccttagctgagaagatgctgaaagagaagatgcaggcggttcaggaagctacccgactcaaggccgaggcagaactgttacagcagcagaaggagctcgcccaggagcaagctagaaggctgcaggaggacaaagagcagatggctcaacaactcgctgaagagacccagggatttcagaggacactagaggcggagagacagcggcagcttgaaatgagtgccgaggccgagcggctgaaacttcgagtcgctgagatgtctagagcgcaggctcgcgcagaggaggatgcacagcgtttccgcaaacaggccgaggaaataggggagaagctgcatcgaacagagctggctacgcaggagaaggtgacgcttgtgcaaaccttggagatccagagacagcagtctgaccacgacgccgaaaggcttagggaggccatcgccgagctcgaaagggagaaagaaaaattgcagcaggaggcaaagctgctccaactcaaaagtgaggagatgcagaccgtacagcaagagcagctgttgcaggagacccaagccttacagcagtcattcctgtccgagaaggactctctgctgcagagggaacgtttcattgagcaggaaaaggccaagctggaacagctgttccaggacgaagtggccaaggcacagcagttgcgggaggaacagcagcggcagcaacaacagatggagcaggagcggcagagattagtcgctagtatggaagaggcacgacggagacagcatgaagccgaagaaggagtccgcaggaaacaggaagagcttcaacagctcgaacagcagcgcaggcagcaggaagagcttctcgcggaggaaaatcagcgactgcgagagcaattgcagctgttagaagaacagcacagagccgctcttgcccacagtgaagaagtaactgcatcgcaggtggccgctactaagaccttgcccaatggtcgagatgccctcgatggccctgcggcagaagccgagccagagcacagcttcgatgggctgcggcgtaaggttagcgcccagaggctccaggaggccgggatcctgtctgcggaagagctccagcggttagctcaaggccacacaacagtggatgagttggcgcgccgtgaggatgtccgtcactacctgcagggcagaagctccattgccggcctattgcttaaggctacgaatgagaagctctccgtctatgcagcactgcagagacagctgctttctcctgggacggcacttatcctgctcgaagcacaggcagcatccggatttctgctcgatcccgttagaaaccgccggctcaccgtgaacgaggcggtcaaagaaggggtggttggccctgaacttcaccacaagctgctgtctgccgagcgcgctgtaacaggctataaggacccttatacaggtcagcagataagtctatttcaggctatgcagaaaggcctcattgtgagagagcatgggattcgcttgctggaggcgcagatcgctaccggaggagtaattgacccagtacactcccaccgtgtccctgtggatgtggcctaccgacgcggctatttcgacgaggaaatgaatagggtgcttgcagacccttctgatgatactaaagggttttttgaccctaacacacacgagaacttaacatacctacagctgctggagcggtgtgtggaggaccccgaaactggtctgtgcttgttaccccttacagataaagccgccaagggcggcgaattggtttacaccgacagcgaagctcgggatgtgttcgagaaggcaaccgtgtctgcccccttcggaaaatttcagggcaagaccgtgaccatctgggagattataaactccgagtacttcacggcagagcagcgtcgcgatctcttacgccagtttcggaccggtcggattacagttgagaagatcatcaagatcataattaccgtggtcgaggagcaggaacaaaagggtagactgtgcttcgagggactacgaagccttgtacctgccgctgagttactggagagcagggtaatagacagagagctctaccagcaactgcaaaggggtgagcgcagtgtgcgggacgtggccgaggtagacactgtgaggcgggccctccgtggcgccaacgttatcgctggtgtctggctggaggaggcgggacagaaattatcaatctataacgcgttaaagaaggacctgctgccaagcgacatggctgtagcactcctggaggcccaagccgggactggtcacatcattgaccccgctacatccgcaagactgacggttgatgaagccgtccgcgcgggtctagttgggcctgaatttcacgaaaagctcctctctgcagaaaaagccgtcacaggctaccgggatccttataccgggcaatccgtatctcttttccaggcactgaagaaagggcttattcctcgagaacagggtctacgactcctggacgcgcagctgagcactggaggaatcgttgatccaagcaagtcgcatagagttcctctggatgtcgcttgtgccagagggtgcctggacgaagaaactagccgggcactgagcgcccccagagccgatgctaaagcttattctgacccatccaccggcgaaccagctacttacggcgagctgcagcagcgatgccgccccgaccagctgacaggactgagcctcctcccacttagtgagaaggcggcaagagcacgacaagaagaactgtactcggaactgcaggctagagaaaccttcgagaagacacccgtcgaggttcccgtcggcggctttaaagggaggacagtaaccgtgtgggaactcatttcatccgaatactttaccgcagaacagcgtcaggagcttctccgccagttcaggactggaaaggtgacggtggaaaaggtgatcaagattctcatcaccattgtcgaggaggtcgagacattaagacaagaaaggcttagcttttctggtctccgggcccctgtcccggcctccgagctcttggcaagtggggtcctgtcccgggcgcaattcgagcagctgaaagatggaaagaccaccgtgaaagatcttagtgaattgggctccgttcgcaccctgctgcagggtagcggctgtttggccgggatttacctggaggatactaaagaaaaagtgtccatttacgaagcaatgagaaggggactgctgagagcgactacggctgcacttttattggaggcgcaggcggctaccggattcctcgtggacccggtgagaaatcagaggctgtatgtgcatgaggctgtgaaggccggtgtggttggtcccgaacttcacgagcagctgctcagcgcagaaaaggccgtaactggttaccgggacccctactcaggttcgacaatcagcctctttcaggccatgcagaagggcctggttctgcggcaacatggcattcggttgctggaggctcaaatagctacaggcgggattatagacccggttcattcacaccgtgtaccagtggatgtggcctaccaaagagggtatttttcagaggagatgaatagagttcttgccgacccttccgatgataccaaagggttcttcgacccgaacacccacgaaaacctcacatataggcagttactggaacgctgcgtggaggacccagagacaggactgcgacttctccccctgaagggtgccgagaaagcggaagtggtggagacgacacaggtatacaccgaggaggagactcgcagagcattcgaagaaacacagattgatatccctggcggaggctctcacggcggtagcacaatgtctctgtgggaggtgatgcagagtgatctgatcccagaggagcaacgtgcccaactcatggccgattttcaggcagggcgcgtcacgaaggagcggatgatcattatcatcatcgaaattatcgagaaaaccgagattatcaggcagcaggggctggcctcttacgactacgtgcggagacgcctgaccgctgaggatctctttgaggctcgcataatcagcctggaaacatacaacttattgagagaaggcacacgatcactgagggaagctctcgaggcggagtccgcctggtgttatctctatggtactggctcggtcgcaggggtatacctccctggatcccggcagaccctgtctatctatcaggctctcaagaagggcctgctgtctgccgaggtggctagactactactcgaagcacaagccgccaccgggttcttgcttgatccagtaaagggagaaagactcactgtggatgaagcggtacgcaagggtttagtgggcccagagctccacgacaggttgctgtctgctgagagagccgttacaggatatcgcgatccttataccgaacagactatctccctctttcaggcaatgaaaaaagaactgatccccacggaggaggcacttagactcttagacgcccagctagcgacgggcggcattgttgatcccagactgggttttcacctacccctggaggtcgcttatcagaggggctatctgaacaaagacacccatgaccagctcagtgaaccctccgaagtcaggtcttatgtcgaccccagtaccgacgagagactgtcatatactcaattacttaggagatgcagaagagacgatggaactggccagctcctgctgccattatcagacgcacggaagttgacattccgtggattaagaaagcagattactatggaggagctggttaggagtcaagtgatggacgaagccaccgccttgcagctgagggagggactgacttccatcgaagaggttacaaaaaatctgcagaagtttctcgagggcacctcttgcatcgctggagtattcgtagacgccaccaaggagaggctcagtgtatatcaggccatgaagaaggggattattagacccggcacagccttcgaactcttagaagctcaagccgcaactggctacgtgatcgacccgattaaaggacttaaactcaccgttgaggaagctgtgagaatggggattgttggccccgaattcaaagacaagctgctgagcgcagaaagggcagtcacgggatacaaagatccctactctgggaaactgattagtctttttcaggcgatgaagaagggcctaatcttaaaagaccatggcatcaggttactggaggcgcagattgctacaggcggaatcattgacccggaggagagccaccggcttcctgttgaagtcgcatataaaaggggcctgtttgatgaggagatgaatgaaatcctcactgacccgtctgacgataccaaaggcttcttcgacccaaatacagaagagaatctgacttacctgcaactcatggagaggtgtattactgatccccagactggattgtgcttactgccgttaaaggagaaaaaaagggaacgcaagaccagttcgaagtcatccgtgcggaaacggagggtggtgattgttgatccggagaccggcaaggagatgtcagtctatgaggcgtacaggaaaggattgatcgaccaccaaacttatctagagctgtcagaacaggagtgcgaatgggaggaaattacaatcagctcttcagacggagtggtcaagtcaatgatcattgaccgcagatcaggtaggcagtacgatatcgacgatgcaattgccaaaaacctcatcgacaggagcgctctggaccagtatcgtgccgggacgctctcaattacagaattcgcggacatgttgtccggaaatgctggcggcttccgaagccggagctctagcgtgggatcaagcagcagctatcctatctctcccgctgtttcccggacccaactagcgtcctggtcagatcctaccgaagagaccgggcccgttgcaggcatcttagacacagagaccctggaaaaggtttccataacagaagcaatgcatcgtaatctggtggacaatatcaccggacagcgtttgctggaggctcaagcctgcactgggggcatcatcgacccatctaccggtgaaaggtttccagtgaccgacgccgtaaacaaaggccttgtagataagattatggtggataggatcaatctggctcagaaggccttctgtggctttgaggacccccgcactaaaaccaagatgtctgccgcacaggcgctcaagaaggggtggttgtattatgaggctggacaaagatttttggaagttcagtacctcaccggtggcctgatagaacccgacacacccggcagagtccccctcgacgaagccctccaacggggtacagtagacgcacggactgcccagaaacttagggacgttggggcttacagtaaatatttgacctgcccaaagactaagttaaagatatcttataaggatgccttagaccggtcaatggttgaggaggggacgggattacgattgttagaggccgccgcgcagtccactaagggttactattcgccttattcggtcagtggcagcggaagcactgcgggcagccgaacagggtcacggaccggttccagggcgggaagcagaagaggcagcttcgacgccaccggctctggctttagcatgacattcagctcttctagctattcttcgtctgggtacgggcgccggtatgccagcggctcttcagcatcgctcgggggacccgaatccgctgttgcttag

SEQ ID NO: 129020 - DNA, 13713 bp, synthetic construct
  misc_feature 1..13713: note = Description of Artificial Sequence: Synthetic coding sequence
  source 1..13713: mol_type = other DNA
atgagtggagaggatgctgaggtgcgggctgtgtcagaagatgtgtccaacggaagctcgggctccccctcccctggggatacccttccctggaacctggggaagactcagaggtctcgacgatcagggggaggtgccggatccaacggctctgtcctcgatcccgcagagagagcagtaatcaggattgctgacgaaagggatagggttcaaaagaaaacattcacaaagtgggtcaataaacacctgattaaagcccagcggcatattagtgacctgtatgaagatctacgggatggacacaacctgatttcactcctggaggttctgagcggggatagtttgccccgggagaaaggcaggatgaggtttcacaagctccagaacgttcagattgctctggattatcttagacatcgacaagtcaagctggtgaacatacgtaacgacgacatcgccgatgggaacccgaaactgaccctcggattgatctggaccattatcctgcatttccagatctctgatattcaggtaagcgggcagtccgaggacatgaccgcaaaagagaaactcctgctgtggagccagcggatggtggagggttaccaagggctacgctgtgataacttcacaagctcctggcgggatggtcgcctgttcaacgctatcatccacaggcataagcctctgctgatcgatatgaacaaagtctacaggcagacaaacctagaaaacctcgaccaggctttctctgtagctgaacgggacttaggcgtgacgcggttgctcgatccggaagacgtggacgtcccccagcccgatgagaaaagcataattacatacgtgtcatcactctacgatgcaatgccacgggtgcccgacgtgcaggatggagagctgcaactgcgatggcaggagtaccgcgagctggtgctgctactgttgcagtggatgagacatcacaccgccgcttttgaagagcgccgcttcccctcgtcattcgaagaaatagagatactgtggtcgcaattcctaaagtttaaggagatggagctacccgcaaaggaggccgacaaaaaccgcagtaagggcatctaccagtccttagagggagccgtgcaggctggacagcttaaggtcccgccgggctatcatcctctggatgtggaaaaggaatggggaaaactgcatgttgcgatcctcgaacgcgagaaacagttgcgcagtgagtttgagagactggaatgtctacagcgtattgtgacaaagctgcagatggaagcgggtctttgtgaggagcagctgaatcaggccgatgccctgttgcagagtgacgtcaggctactcgctgcgggcaaggtgcctcaaagagcaggtgaagtggagcgcgatctcgacaaagccgatagcatgattagactgctctttaatgacgtgcaaacacttaaggacgggcggcatccccagggggagcaaatgtataggcgagtgtacagactccatgagcggcttgtcgcgatcaggactgaatataacctgcgcctcaaggccggcgtggcggcccctgcaacccaggtggcgcaggttaccttacaatctgtccaaaggcggccagaactggaggacagtactttgcgctacctgcaggatcttttggcatgggtcgaagaaaatcagcatcgcgtcgatggcgcagaatggggcgtcgacctgccatcagtggaggcccaactcgggtcccaccggggcctccatcagtctattgaggaatttcgcgcgaaaattgaacgcgcccgcagcgatgaaggtcagttatctccagctacccgtggtgcttacagagactgcttgggccggttggacctgcagtatgccaagctgctcaactccagcaaagctaggctgcgcagtctggagtcattacactcttttgttgccgccgcaacaaaggagttgatgtggctcaacgaaaaggaggaggaggaagttggattcgattggagcgaccgaaacacaaacatgaccgcgaaaaaggagtcttactcagctctgatgagagaactagagttgaaagaaaagaaaattaaagagttgcagaatgccggcgaccggctgctacgggaggatcacccagctaggccaacagtggagtcattccaggccgctctgcagactcaatggtcctggatgctgcagctgtgttgctgtattgaggctcatttaaaggagaacgcggcgtacttccagtttttttccgatgtgagagaagcagaggggcaattacagaagttgcaggaggctctgcgacgcaaatactcctgtgaccgctcggcgacagtcactcgacttgaggacctactgcaggacgcccaggatgaaaaagagcagttaaatgaatacaaaggccacttatcaggactggcgaaacgcgccaaggctgtggtgcaattaaagccgcgtcacccagcccaccctatgcgcggaagactgcccctcctcgccgtctgtgactataaacaggttgaagtcactgtccacaaaggcgatgaatgccagcttgttggcccagcccagccatctcactggaaggtgctgtcatcgtccggatccgaggccgccgtccccagtgtgtgcttcttggttcccccccccaaccaggaagctcaggaggccgtgacgagactggaggcgcagcaccaagcacttgttactctgtggcaccagctccacgtggacatgaagagcctgttggcctggcaaagccttcgcagagatgtacaactgatccgaagctggagcttggcgactttcaggaccctcaaaccagaggaacaacgtcaagcattgcacagcctcgaacttcactaccaagcattcctgagggactctcaggacgccggcgggttcgggcccgaggatagacttatggctgagcgagaatacgggtcttgctcacatcattatcagcagctgctacagagtttggaacagggcgcccaagaggaaagccgatgccagaggtgtataagcgagctgaaagatatccggctgcagctggaagcttgtgagacaaggacagtgcataggctgaggctgccactggacaaagagcccgctagggagtgtgcccagcggatagcagagcagcagaaggcccaggcagaagtggagggattgggtaagggagtggcaagattgtctgcggaagcagaaaaggttctcgccctcccggaaccttcgcctgccgcaccgactttgagatcagagttagaactgactttggggaagttggagcaggtccgaagcctgtccgccatctacctggagaagctgaagaccattagcctggtgattcgcgggacacaaggggcggaagaggttctgcgcgcgcatgaagaacagctgaaggaagcacaggcggtaccagcgaccctgcccgagctcgaggcaaccaaggcaagcctgaagaagcttagggctcaggccgaggcacagcagcctacgttcgacgcactgcgggacgagcttaggggggcccaggaggtgggggagcggttgcagcagcgtcacggcgaacgagacgtcgaagttgaacgctggcgcgaacgcgtcgcacagcttctggagagatggcaggccgtactggctcagactgatgtcagacagcgggagcttgagcagctggggaggcaactcaggtattacagagaaagtgccgacccactgggagcctggttgcaggatgcgagacgtcgacaggaacagattcaggcaatgcccctggctgacagtcaagctgttcgggaacagttacggcaggaacaggctcttctggaggagatagagcgccacggtgagaaagtggaggagtgtcaaaggtttgccaaacaatatatcaacgccatcaaggactacgagctgcaactggtgacctataaggcccaactggaacccgtggcctccccagccaagaaaccaaaagttcagtcagggagtgagagcgtcatacaagagtacgtggacttaagaacgcattacagcgagctgacaacacttaccagccaatatatcaagttcatcagtgaaacacttagaagaatggaagaagaggagagactggccgaacagcagcgtgccgaggagcgggaacgcctcgccgaagttgaggcagctctggagaaacaacgtcaactggccgaggcccatgcacaagccaaagcacaggccgaacgagaagccaaggagctgcagcagcgaatgcaagaagaggtggtcaggagagaggaggccgccgtagacgctcagcagcagaaaaggtccatccaagaggaactgcagcagttgcggcagagcagtgaggcagaaatccaagctaaagcacgacaggctgaggccgcagagcgcagtcgcctgagaattgaagaagagatccgagtagttcggttgcagcttgaggccacagagaggcagcgcggcggcgctgagggagagcttcaggctcttcgggcccgggcagaagaggccgaggcacaaaagcggcaagcgcaggaggaggctgaacgcctgcgccgtcaggtgcaggacgagagtcagcgcaaacgacaggctgaggtcgaactcgcctcacgagtcaaggctgaagctgaagctgctcgggaaaagcaacgtgcccttcaggccttagaggaactccgactccaggctgaagaagcagaaaggaggctacgccaggcagaagtggagcgtgcccggcaggtgcaagttgcattagagacagcccagagatcagccgaggcggagctgcaatctaagcgggcttcattcgcggagaagacggcgcagctggaacggtcgctccaggaagaacacgtcgccgtggcacaattgcgagaggaagccgagcggagggcacagcaacaagcagaggccgagagagcgcgggaggaggcggagagggaactggaacgctggcaactgaaggccaacgaggcattgcgcttacgcttgcaggctgaggaggtggcccagcagaaatccttggcccaggcggaagctgagaaacaaaaggaggaggccgaacgggaagcccggagaagaggcaaagccgaagagcaggccgttcgccaaagggagctggcggaacaggaacttgagaaacagcgtcaactggctgagggcaccgcgcagcagcggctggcagcggagcaggaactcatacgtctccgcgctgagacagagcagggtgaacagcagaggcaattgctcgaggaagagctggcgagactgcagagggaagccgcagcagccacccagaaaagacaggaactggaagcggaactggccaaggtgcgcgccgagatggaagtgctgctggcttctaaggctcgtgcggaggaggaatccagatcaaccagtgagaaaagcaagcagaggttagaagccgaggcaggacgctttcgagagctggctgaggaggccgccaggttaagagcactggctgaagaggccaaaaggcagaggcagttagctgaggaggacgccgccagacaaagagccgaggctgaaagggttttggcggagaaactcgccgcaattggagaggccactaggctgaaaacagaggcagagattgctctcaaggagaaagaggcagagaacgagaggctccgccgtttggcggaggatgaagctttccaaaggagacgactggaggaacaggccgcgcagcataaggcagacattgaggaacgactcgcccagctgagaaaggccagcgattctgaactggagagacagaaagggctggtggaagatacgctgcgacagcggaggcaggtcgaggaggaaatcctcgcacttaaagcaagttttgaaaaagcggccgcggggaaggctgagctggagcttgagctaggccgcattcgctcaaacgctgaggacacccttcggagcaaagagcaggctgaactcgaggcagcacgccagagacagcttgcagccgaagaggagaggaggcgcagagaggccgaggagcgcgttcagaagagtctggccgcagaggaagaggctgcacgccagagaaaagccgccctggaagaggttgagcgtctgaaggccaaagtcgaggaagctcggcggctgagagagagggccgagcaggagagtgcccgccaactgcaactggcccaggaggccgcccaaaaacggctccaagccgaagaaaaagcacatgcatttgcggtacagcagaaggagcaagagctgcagcagactctgcagcaggaacagtccgtattggaccagttaaggggggaggcagaggctgcaaggagggccgctgaagaggcggaagaagcgagggtgcaagctgagagggaggcggcacaatcccgtcgccaggttgaggaagcagagcggctgaagcaatcagccgaagagcaggcccaggcccgcgctcaggctcaggcggccgcagagaagctgcgcaaggaagcagagcaggaagcagccagaagagcccaggctgagcaggccgccctgcgccaaaaacaggctgccgacgccgagatggaaaaacataagaagttcgctgagcaaaccctgagacagaaggctcaggtcgagcaggagttgacaaccctgaggctccaactcgaagagacagaccaccagaaaaacttactggatgaggagttgcaacgattgaaggccgaagcaactgaagccgcacgtcagcggtcccaggttgaagaggagcttttttcggtcagggtgcagatggaggagctgagtaaactgaaggctcgaatcgaggctgaaaaccgggctctcattttgagagacaaggataatacacaacgattcctacaggaagaagcggagaagatgaaacaggtggccgaagaagccgctaggctatctgtggccgcacaagaggcagccagactacgtcagctcgccgaggaagatctggcccaacagagggctctcgctgagaagatgttgaaagagaagatgcaggccgtccaagaagccaccagactgaaggcagaggccgaactcctgcaacagcagaaggagttggcacaggagcaggctagaagattacaggaagacaaagagcagatggcccagcaactggccgaggaaactcaaggatttcagaggaccctcgaggccgagcgccagcgtcagttggaaatgtcggccgaggccgagaggctcaaactgagagtggcagagatgagcagagcacaggccagagctgaagaggacgcccaaagatttcgcaagcaggcggaggagatcggggagaagctccatcgcacagaactggctactcaggaaaaggtcaccctcgtgcagacactggagatccaacggcagcaatccgatcacgacgccgagaggttgagggaggcaattgcagagctggagcgggagaaggaaaagctgcagcaggaggcaaagttattacagcttaaaagcgaagaaatgcagacagtgcagcaagaacaactcttgcaagaaacacaggctcttcagcagagctttttgtcggagaaagattctctgcttcagagagagcgcttcatcgagcaagaaaaggctaagctggaacaacttttccaagatgaggtggctaaggcccagcagctgagggaggagcagcaacgccagcagcagcaaatggaacaagagcgccagagacttgtagcatctatggaggaggccagacgcaggcagcacgaagcagaggagggtgttaggcggaagcaggaggagctgcaacagctcgagcaacagcgccgacagcaggaggaattgctggcggaggagaatcagcgattgcgcgagcagttgcaattgttggaggagcaacacagggctgccctggcacattccgaggaggtgactgccagccaagttgcagctactaagaccctgcccaacgggagagatgcactggatggccctgctgctgaggctgagcccgagcattcattcgatgggcttcgacggaaagtgagtgcacagagacttcaggaggcaggaatcctgagcgctgaggagctgcagcggctggcccaggggcatacgaccgtcgatgagcttgccagacgcgaggacgtacggcactatctgcaggggaggtcttctattgcagggctgctgctaaaagccaccaatgagaaactctctgtgtatgccgccctgcagcgccaattgcttagtcccggtacggctctcatcctgctggaggcccaagccgctagtgggttcctgctggatcccgtgaggaacagacggctgactgtgaacgaggccgtgaaggagggagtggtgggtcctgagctccaccataagctgctgagtgcagagagagccgtgaccgggtataaagacccctacactggacaacagatctcgctgtttcaggctatgcagaagggcctgatcgtgcgcgagcatggcattcgcctacttgaggcccaaatagctacagggggggtgatagacccggtgcatagccaccgcgtgccggtggatgtggcatacagaaggggttacttcgatgaagagatgaatagggttcttgctgacccttccgacgacacaaagggcttcttcgatcccaatacacacgagaatctaacctacctgcagcttcttgagcgttgtgtcgaggatcctgagacgggcttatgcctcctcccattaaccgacaaggcagctaagggcggagagctggtctacacagattcagaagctcgggatgtctttgaaaaggctactgtatcagccccgtttggaaagtttcagggaaaaactgtcacaatatgggagattataaatagtgagtattttactgcggagcagaggcgggatcttctgagacaattccggaccggtcggattacggtggaaaaaatcataaagatcattattactgtggtggaagagcaggagcagaagggacgactgtgttttgagggtctccgtagcctagtgcccgcggctgaactgctggaaagccgcgtgatagaccgcgaactctatcagcagttgcagagaggggaacggagtgtaagagacgttgccgaagtagatacggtgagaagagcgttgcgcggggccaacgttatcgctggagtgtggctggaggaagccgggcagaagctgagcatctacaatgcattaaagaaagacctcctcccatccgatatggccgtggctcttttagaggctcaggctgggaccggacacataatcgatcccgctacttccgccagactgactgttgacgaagctgttcgcgccgggctggtagggccagagtttcatgagaaattgttgagcgctgaaaaagcagtgactggatatcgcgacccatacacagggcagagcgtgagcctcttccaggctctaaagaaaggactcatcccgagagaacaggggttgcgcttgctggatgctcagctcagcactggtggaatcgtcgatcctagtaagtcccatagagttcccctggatgtagcttgcgcacggggatgtctagatgaggaaacaagcagggccctgtccgctccacgagccgacgccaaggcatactccgaccctagtactggggagccagccacgtatggagagttgcagcaacgatgccggcccgaccagctgaccgggctgtccctcttgcctcttagtgagaaggcagctcgggctaggcaggaagagctgtattctgaattgcaagccagggagacgtttgagaagacacctgtagaagtgcctgtgggcggcttcaaaggcagaacagtgacagtgtgggagctgatcagctctgaatacttcacagcagagcaaaggcaggagctgctgagacagttccggaccggaaaggtaacagtggagaaggtcattaagatcctgatcaccattgtggaggaagtcgaaactctgcggcaagaaagactttccttctctggactccgagcaccggttccagccagcgagctgctcgcctccggtgtcctttccagggcccagtttgagcagctgaaggacggaaagaccacagtcaaggatcttagtgaattgggtagcgtacgcaccctccttcagggcagcggatgtctcgctggaatttatctggaagacaccaaggagaaagtgtccatttacgaagccatgcggcgcgggctccttcgggccaccactgcagccctgctgcttgaggcccaggctgccaccggctttttggtagaccctgtgcgcaatcagcggctttatgtacacgaagcagtgaaagctggcgtggtgggacccgaactacacgagcagctcctctcagctgaaaaggctgtgaccggttacagggatccatattcagggagcacaatctcactattccaggctatgcagaaagggctcgtgctgcgccaacatggaatcaggttgctcgaggctcagatcgcaactgggggcatcatcgacccggtgcactcccaccgcgtccctgtggacgtggcgtaccagcggggctatttcagtgaggaaatgaaccgagtgctggccgacccctcagatgacaccaaaggatttttcgacccaaacacccacgaaaacctgacttatcgtcaactgctagaaaggtgcgtcgaagaccctgagacaggtcttcgtcttcttccattgaagggggcagagaaagctgaggtagtggagacgacacaggtctatacagaggaggaaacccggagggctttcgaagaaacgcagattgacatccctggcggggggtcgcacggtggctccactatgtccctctgggaagttatgcagtctgatcttattcctgaggaacagcgagctcagctgatggcagattttcaggctgggcgagtgaccaaggagcgcatgatcatcatcattatcgaaataatcgagaagacagaaattataaggcagcagggtctcgcctcatacgattatgttcggcgtcggctaactgctgaggacctcttcgaagcccgtatcattagcctggaaacgtacaatttgcttagggagggaactcgctcactgcgagaagccctggaggccgagtctgcatggtgttatctttacggaactggctcagtggccggtgtgtacctgcctggctctcggcagaccctcagtatttatcaagcgctgaagaagggccttttgagcgcagaagttgcccgcctgctgctggaggctcaagccgccacgggattcctgttggatcctgtgaagggcgagaggctgaccgtcgacgaggcggtgagaaaaggattagtcggcccagaactccatgacaggctgttgtccgctgagagagcagtgactggctacagggatccgtacactgagcagacgatctccctattccaggctatgaagaaggagctgatcccgacggaggaggctcttcgattgctcgacgcacagttggctacagggggaatcgtggaccctcgcctgggattccatctccccctggaggtggcctatcagcgcgggtatcttaacaaagacactcacgatcagttgtcagagcctagtgaagttcgatcctatgttgatccatccaccgatgaacgcctctcctatacacaacttctgcgcaggtgcagaagggacgacggaaccgggcagctgctactgccgctgagcgacgctcggaagctgacctttcgtggattgcgaaagcaaattacaatggaggaacttgtccgatctcaagtgatggatgaagcaactgcgttgcaactcagagagggccttacatcaattgaggaggtgactaaaaatctgcaaaagtttctcgaggggacctcctgcattgccggcgtgtttgtcgacgccacaaaagagagactctccgtctaccaagcaatgaagaagggaatcatccgccctgggacagcttttgagttactggaagcccaggccgccacaggctatgtgatcgaccctatcaaggggttaaaactcacagtggaggaagccgtgcggatgggcatcgtgggccctgagttcaaagacaagttactcagcgcggagagggctgtcacagggtacaaagacccatactctggcaaactcatttcccttttccaggcaatgaaaaaggggttgatcctgaaggaccacggcatcaggctgctagaggctcagattgctaccgggggaatcatagatcccgaggaatctcaccgtctgcctgtggaagtggcctataagcgaggtctgttcgacgaggagatgaacgaaatactcactgacccatcagacgatactaaaggttttttcgaccccaatactgaggagaacttaacctaccttcagttaatggagcgctgcattacagacccccagaccggactttgtctgctccctctgaaagagaagaaaagggaacggaagactagctctaagagctccgtgcgcaagcggcgcgtggtgatcgtcgatccagaaacgggaaaggaaatgtcggtatatgaggcttaccggaaaggtttgattgatcatcaaacctatctcgaactatccgagcaggagtgcgaatgggaggaaattacaatcagttcttctgatggcgtggttaaaagcatgattatcgataggcgctctgggaggcagtacgatattgacgacgctatcgccaagaacttgatagaccggtcagcccttgatcagtaccgggcgggaacactcagcataacggagttcgctgatatgctgtccggcaatgccggtggatttagatcccggtcttcaagtgtgggctcatcttcctcataccctatttcacccgccgtgtcccggacccagctggcaagctggtccgacccaacggaggaaacagggccggttgcaggcatcctggacactgaaaccctggagaaagtgagcatcaccgaggctatgcatcgaaatcttgtggataacataaccggtcagaggcttttggaagcccaggcatgtacggggggaattatcgatccctctacaggagaacgatttcctgtgacggacgctgtgaacaaaggcctggtggataaaatcatggtggacagaatcaacctggcccaaaaggctttctgtggattcgaagacccccgcactaaaacaaagatgtcagccgcacaagctctgaagaaaggatggctttactacgaagccggtcagcggttcctggaggtacagtacctgacaggcggcctcatcgaaccggataccccaggacgggtcccgcttgacgaggccttgcagcggggaacggtggatgcacgtaccgcgcagaagcttcgagatgtcggagcctatagtaaatatctgacgtgccctaagaccaagctgaagattagttataaggacgcccttgaccgaagtatggtcgaagaggggacaggtctgaggttgctagaagctgccgcccagtcgactaaaggatattacagcccatatagcgtgagcgggtcagggagtactgccgggagccgcactgggtcacgcactggctccagggctggttcgcgcagggggagcttcgacgctaccggcagtggattctcaatgactttcagctcctcctcctattccagttccggttacggacgacggtacgctagcggatcttccgcatccctggggggccccgaatctgcagtcgcttag

SEQ ID NO: 129021 - DNA, 1503 bp, synthetic construct
  misc_feature 1..1503: note = Description of Artificial Sequence: Synthetic coding sequence
  source 1..1503: mol_type = other DNA
atggccacggttattcccggggatctctccgaggtccgcgatacccagaaagtgcctagcgggaaaaggaaaagaggtgagactaaaccgagaaagaatttcccgtgccagctgtgtgacaaggcttttaatagcgttgagaagctgaaggtgcacagctattcccacaccggcgaacggccttataaatgcatccagcaagactgtacaaaggcttttgtgtcaaagtataaactgcagagacatatggcgacccactcccccgagaaaactcacaagtgtaactactgtgagaagatgtttcaccgtaaagatcacctaaaaaaccatctgcacacacatgatccgaataaagagacatttaaatgtgaagagtgcggaaaaaattataacacgaagctgggctttaagcggcaccttgcgctgcacgccgccacctctggcgacttgacatgtaaggtctgtctccagacctttgagtccaccggcgttcttctcgagcacttgaaatcacacgccggtaagagtagtggcggagtcaaagagaaaaagcaccagtgtgaacactgtgatcggcgcttttacacgaggaaggatgtcaggaggcacatggtcgttcacaccggtcggaaggattttctgtgccagtactgtgcccaaaggtttggccggaaagatcacctgacacggcacatgaagaagtcccataatcaggagctgctgaaggtgaagaccgagccggtcgattttctcgatccattcacctgcaatgtgtcagtgccaattaaggacgagttgctgccagtaatgagcttgccatcctctgaattattatccaaaccattcaccaatacattgcagcttaatctgtacaatacaccgtttcagtctatgcagagcagcggctcagctcaccaaatgatcacaacccttcctctcggtatgacctgtcctattgacatggacacggtgcacccctctcaccacctctctttcaaatatcccttctcctctacttcctacgctatcagcattcctgagaaggagcagccactgaagggcgagatcgagtcctacctaatggaactccaggggggcgttccctcaagctctcaggacagccaggctagcagtagcagcaaactggggctggatccacagataggatctctggacgacggagccggcgatctgtccctcagcaaaagctccatttcgatatccgatccactgaacactccagccctggatttctctcagctctttaatttcattcccctgaacggccctccctacaacccactcagcgtaggaagtctgggcatgtcatacagccaggaggaggcacactcatcagtgtcccagctgccgccccagacacaggaccttcaggacccagccaacaccattgggctcggaagcctgcattcattatccgctgccttcacctccagtctatccacatctacaaccttgccaagattccatcaagcgttccagtag

SEQ ID NO: 129022 - DNA, 1257 bp, synthetic construct
  misc_feature 1..1257: note = Description of Artificial Sequence: Synthetic coding sequence
  source 1..1257: mol_type = other DNA
atggctactcattctcctgagaagacccataagtgtaactattgcgagaaaatgttccaccgaaaagatcacctcaaaaaccacctgcatactcacgacccgaacaaggagactttcaaatgcgaagaatgtggaaagaattacaacacgaagctgggttttaaacggcacttggctctccacgctgccaccagtggggacctcacctgtaaagtgtgcctgcagacctttgagtcaacaggcgtcctactcgaacatctcaagagccacgcaggtaagagctctggcggagtgaaggagaaaaagcatcagtgcgaacattgcgaccggcgcttctatactagaaaagacgttaggcgtcacatggtcgtccatactgggcgaaaggacttcctctgccagtactgcgcccagagatttgggaggaaagatcatctgactcgacacatgaagaagagccacaatcaggagctgcttaaggtaaagaccgagccagtggatttcctagacccattcacctgcaatgtctccgtcccgattaaggatgaactgctacctgtcatgagcctaccttcttccgaacttctttcaaagcccttcacaaacacactccagcttaatttgtacaacacgcccttccaaagcatgcaaagttcagggtctgcccaccagatgattaccacactgccgttagggatgacctgtcctattgacatggacacagttcacccatcccatcatcttagcttcaagtacccgttctcaagcacatcgtacgcaatctccattcccgaaaaagagcaacccctgaagggcgagatcgaatcatacttgatggagctgcaggggggggtgccctcaagctcccaagactcgcaggcctctagctcaagcaaactaggcctagatcctcagatagggtctttggacgacggggcgggggacctttcactgtccaagagtagtataagtatttccgatccgctgaacacgccagcgctggatttcagccagcttttcaatttcatccctctcaacgggcccccttataacccactcagcgtggggagcctcggaatgtcctatagccaggaggaggcacacagctctgtatcccagctccccccccagacgcaggacctccaagaccccgcaaatacaattgggctgggctctctgcactcactctctgctgcctttacttcgtccctgtccacatccacaacacttccaagattccatcaagcatttcagtag

SEQ ID NO: 129023 - DNA, 1503 bp, synthetic construct
  misc_feature 1..1503: note = Description of Artificial Sequence: Synthetic coding sequence
  source 1..1503: mol_type = other DNA
atggctacagtgatacccggggatctgagtgaagtgcgggatacacaaaaggttcccagcgggaagcggaaaaggggggaaacaaaacctcgaaaaaatttcccatgccagctgtgcgataaggcgttcaatagcgtcgagaaactcaaagttcatagttattcacacacgggcgaacggccatataaatgcattcaacaagattgtaccaaagcttttgtgtcaaagtacaagctccagagacatatggcaacccattccccagaaaaaacccacaagtgtaactactgcgaaaagatgttccatagaaaagaccatctaaaaaaccacctgcatactcacgaccctaacaaagagacattcaaatgcgaggagtgcggcaagaactacaatacaaagctgggattcaaacggcaccttgctctgcacgccgcgacctcaggcgatctcacttgcaaggtgtgtctacaaactttcgagagcaccggggttctcctggaacacctaaagtctcacgcgggcaaatcctccggcggcgttaaggagaagaagcaccaatgtgagcattgcgaccgtaggttctacaccaggaaggatgtgagacggcacatggtagtacatactgggcgcaaggactttctgtgtcagtactgtgcccagcgttttgggagaaaggaccatctgaccagacacatgaagaagtcacacaatcaggagttacttaaggtgaagacagaacccgtagatttcttggatccctttacatgcaatgtcagcgtgccaattaaggatgaacttttgccagtgatgagtctgccttcgtccgagctgttgtctaagcctttcacgaatacccttcagcttaacctctacaacacaccatttcagtctatgcagagctccggaagtgctcaccagatgatcactaccttgccactagggatgacatgccccatagacatggataccgttcatccttcccatcacctgtctttcaaatacccctttagcagcacttcttacgccatcagtattccggaaaaggaacagccactaaagggagagattgagtcatacctgatggaactgcaggggggcgtcccctccagctcccaggactctcaggcttcctccagtagcaagctaggtctggacccacagattgggagccttgatgacggcgccggggacctgtctctgtctaagagcagcatctccattagtgatccgcttaatactcctgccttagacttttcccaactttttaatttcatacctctgaatgggcccccttacaatcccctaagcgtcggctcactcggtatgtcgtatagtcaagaagaagcccattcctccgtatcccaactaccgcctcagacccaggatctacaggatcccgcaaatactatcggcctcggttctcttcactccttatcggcggcgtttaccagttctctgtccacaagtaccacccttcctcgatttcaccaggccttccaatag

SEQ ID NO: 129024 - DNA, 1392 bp, synthetic construct
  misc_feature 1..1392: note = Description of Artificial Sequence: Synthetic coding sequence
  source 1..1392: mol_type = other DNA
atggccacatttccttgtcagttgtgcggcaaaaccttcttaaccttggagaagttcacgatacacaattactcccactcgcgggagcggccttacaaatgcgttcaaccggattgcggcaaggccttcgtgtcacgctataaattgatgagacacatggcgacccactctccacagaaaagtcatcagtgcgcccactgtgaaaagacattcaatagaaaagaccatctgaaaaatcacctgcagacgcacgaccctaacaagatggcctttggctgtgaggaatgtgggaagaagtacaataccatgctcggatacaaaagacatttggcgctgcacgccgcctcaagcggggacctgacgtgcggcgtgtgcgctcttgagcttgggagtacagaggtgctgctggatcacctgaaggcccacgcggaggaaaaacctccttccggaaccaaggagaagaagcaccaatgtgatcattgtgaacgctgtttctatactcgcaaagatgtgagaaggcatttggttgtgcacaccggttgtaaagactttctatgtcagttctgcgcgcagcgattcgggcgaaaggatcatctaaccagacacacaaagaaaacacactctcaggagttgatgaaggagtcacttcagacaggtgatctgctgtccacattccacacaatatcaccttcgttccagcttaaggctgccgcattgcccccttttccgctaggcgcctccgcccagaacggactggctagcagtctgcctgccgaggtccatagcctgactttatctccgcccgaacaggctgcccagcccatgcaaccattaccagagtccctagcatcattgcacccaagcgtttcacccggctctccacctccacccctgccaaaccataaatacaacaccaccagcacctcctattctcccctagcaagtctgcctctgaaagctgatactaaaggcttttgtaacattagcctgttcgaggacttacctctgcaggagcctcagagccctcagaagttgaaccccggtttcgatctcgctaaaggtaatgctggaaaagttaacctaccaaaggaactgccggccgacgccgtaaatctcacaattcccgctagcctggacctgagtcccctcctgggattttggcagctgcccccccctgccacccagaacacctttgggaacagcaccctggctcttggtcccggcgaatccctgccccacaggctgagttgtttaggccagcagcaacaagagccccccctggctatgggcacagtctctctgggacagctgccactgcctcccatcccacacgtgttcagcgccggcacaggtagcgcaattctgccccatttccaccacgcgttcagatag

SEQ ID NO: 129025 - DNA, 1392 bp, synthetic construct
  misc_feature 1..1392: note = Description of Artificial Sequence: Synthetic coding sequence
  source 1..1392: mol_type = other DNA
atggcaacgtttccgtgtcagctgtgcggaaagacttttctaaccctagaaaagtttaccatccacaattatagccactcccgcgaaaggccatataaatgcgtgcagcccgactgcggtaaggcgtttgtgagtaggtacaaacttatgcgccatatggctacacattcaccacagaaatctcaccagtgcgcacactgtgagaaaacgttcaaccgcaaagatcatctcaagaatcacctgcagactcatgacccaaacaagatggcctttggttgcgaagaatgcggaaagaagtataacacgatgttggggtataagcgtcatcttgccttacatgcagctagctcaggagacctgacctgtggggtgtgcgccctggagctgggctcgacagaggtacttctggatcacctcaaggcccatgctgaggaaaagcctcccagcggaactaaggaaaaaaagcaccaatgcgaccattgcgaaagatgcttctacacaaggaaagatgtccggaggcacttagttgtgcacaccggatgcaaggatttcctatgccagttttgcgctcagcgttttggacggaaggaccatctaacacgccacaccaagaaaacccattctcaagagttgatgaaagaatcacttcagacaggcgacctcctctctacatttcacactatttcaccctcgttccagctcaaggcagctgctttgccaccctttcctctcggcgcctctgctcagaacggcctggcaagctccttgcccgcagaggttcattctctgaccctgtcccctccggaacaggccgcccagcccatgcagccactgccagagtctctagcgtcactccaccctagcgttagccccggtagccctcctccacccctcccaaaccataagtataatactacatctaccagttacagcccactcgcaagcttgcctctgaaggccgatacgaagggattctgtaacatttccctatttgaggacctgcctcttcaggaacctcaatctccccagaagctgaaccccgggtttgacctggcgaaaggaaatgccggaaaggtaaacctccctaaagaactgcctgctgatgccgtgaatctcaccattcccgcatcactggacctatcaccactcctgggcttctggcagctgcccccccctgccacgcagaacacgttcggcaacagtacactggccctgggtcccggggagtccttaccccacaggttgagctgtctgggccagcagcagcaggagcccccgctagccatgggcacagtatcgctggggcaactccccctaccgccaatcccccatgtattttctgccgggacagggtctgccatcctgccacatttccatcacgccttcaggtag

SEQ ID NO: 129026 - DNA, 1392 bp, synthetic construct
  misc_feature 1..1392: note = Description of Artificial Sequence: Synthetic coding sequence
  source 1..1392: mol_type = other DNA
atggccacattcccgtgtcaactctgtggaaaaacatttcttactctggaaaagtttaccatccacaactattcgcatagtcgggaaagaccatacaagtgcgttcagccggattgtgggaaggcgtttgtttccagatataagctgatgcgccatatggcgacccacagcccgcagaagagccaccaatgcgctcactgtgagaaaaccttcaataggaaagaccacctgaagaaccaccttcagacacatgatcccaataaaatggccttcggatgtgaggaatgtggcaagaagtacaacactatgcttggctacaagcgacacctggccctgcatgccgcctctagtggagacctcacatgcggtgtgtgcgccttggagttggggagcaccgaggtcctgttggaccacctgaaagcgcatgcggaagaaaagcctcccagcggcactaaggagaagaagcaccaatgcgatcattgcgaacggtgcttctacacccgaaaggacgttagaagacacctcgtcgtccatacaggatgcaaggattttttatgccagttttgcgctcagcgattcggtagaaaagatcatttaactagacatacaaaaaaaacacattcgcaggaactgatgaaagaatccctgcagaccggcgacctgctcagcacgtttcatacaatctcacccagctttcagcttaaggccgccgccctcccaccattccccttgggagctagtgcccagaacggcttagcctccagtttgcccgctgaagtccactctttgactctgtcaccgccagagcaggccgctcaacctatgcaacctctgcccgagagcctcgccagtctacatcccagtgtgtcgccgggatccccaccgcctccactgcctaatcacaaatacaacaccacctcaaccagctattcacccctagcctcacttcctctcaaggctgacaccaagggtttttgcaacataagtctcttcgaggatttgccactgcaagagcctcagtccccacagaagctcaacccaggatttgaccttgcaaagggcaatgctggcaaggtaaacctgcctaaagaattaccagccgacgctgtcaatcttaccatcccagcaagtttggatttgtcacccctccttggattctggcagctgcctccacccgccacccagaacacatttggaaattcaacactagcgctcgggccaggggagtccctccctcaccgtttatcgtgcctggggcaacagcagcaggagccgcccctggccatggggacagtctctctcggacagctgccactccctcccatccctcacgtgttctcggcgggcacgggctcagccatcctcccccactttcatcacgcgttcagatag

SEQ ID NO: 129027 - DNA, 1236 bp, synthetic construct
  misc_feature 1..1236: note = Description of Artificial Sequence: Synthetic coding sequence
  source 1..1236: mol_type = other DNA
atggccacacactccccccaaaaatcccatcaatgcgctcattgcgagaagacatttaaccgcaaggaccatttgaaaaaccatctccaaacacacgatcctaataaaatggccttcgggtgcgaggaatgcggcaagaagtacaacacaatgctcggctacaaacggcatctagcactccatgccgcttcctcaggggatctaacatgcggtgtatgcgcattagaactaggctctacggaggtgttactggaccacctcaaggcccacgctgaagagaagccacccagtggtacgaaggagaaaaaacatcagtgcgatcattgcgagcggtgtttctacacacgcaaggacgtcagacggcacctggtagtccataccggatgcaaggattttctgtgtcagttttgcgctcagcgattcggtcgcaaggaccacctaacacgtcacacgaaaaaaacacatagtcaggagctgatgaaagaaagtctccagaccggcgatctcctgagtaccttccatactatctcccccagttttcagctgaaggctgccgcgctgccccctttcccgctgggcgcctctgcgcagaatggattggcctcgtcactccccgccgaggtccacagtttgacactctcacctcccgagcaagccgcccaacccatgcagcctctgcctgaaagcctcgcatcactgcatccatctgtgtcacctggatccccgccaccacccttaccaaatcacaagtacaataccacatctacaagctacagcccacttgccagcctccctcttaaggctgacacgaagggcttctgcaacatcagtctctttgaagacctgccgctccaggaaccacaaagccctcaaaagctcaatcccgggtttgatttagcaaaaggaaatgccggcaaggttaacctgccaaaagaacttcctgctgatgccgttaatctgactattcctgcatccctggatctgtcacccctccttggattctggcagctgccaccaccagcaacccagaatacattcggaaacagcaccctggccctgggaccgggcgagtccctcccccatcgcctgtcatgtctgggccagcagcagcaggagccacccctggccatggggaccgtaagtcttggccagttaccactgcctcccatcccccatgtctttagcgccggaacaggctctgccatccttccgcacttccaccacgcgtttcgctag

SEQ ID NO: 129028 - DNA, 1236 bp, synthetic construct
  misc_feature 1..1236: note = Description of Artificial Sequence: Synthetic coding sequence
  source 1..1236: mol_type = other DNA
atggccacccatagcccgcagaaatcacaccaatgtgcccactgcgagaagacattcaataggaaggaccacctcaaaaatcacctgcagacacatgacccaaataaaatggcttttgggtgtgaagaatgcgggaagaagtacaatactatgttgggctataaaagacatctggccctccatgcagctagctccggcgatctgacgtgcggcgtgtgcgccttggagctgggttccacagaggtcctcttggaccacctgaaggctcatgcagaggaaaaacctccatctggcaccaaagaaaagaaacaccagtgcgaccactgtgagcgctgtttttacactaggaaagacgttagaagacacttggttgtacataccggctgtaaggacttcctgtgccagttttgcgcccagagattcgggaggaaagaccacttaactcggcacacgaaaaaaacgcattctcaggagttaatgaaggagtccctccagaccggagatttgctgtcgaccttccacaccatcagcccaagctttcagcttaaggcagcagccttgccaccattccctttgggcgcctccgcccagaacggtctggcaagctcactccccgctgaagtgcatagcctgacactaagccctcctgagcaagcagctcaacccatgcagcctctcccggagagcctcgcatctctccacccttccgttagcccagggagtccgccaccgcctcttcccaaccacaagtacaacaccacaagcacctcttattcccctctggcgtccttgcccctgaaggccgataccaaaggcttttgcaacatctcactatttgaggatttgcctctccaggagccccaatctccgcagaaactgaaccctggctttgatttggccaagggtaacgccggaaaagtgaatctcccaaaagaactgcccgccgatgccgtaaacctcactatccctgcctcattagacctctctccacttcttgggttctggcagttgcccccacctgcaacccagaacacctttgggaactccacactggctctggggccaggtgagtcgctgccgcatcggctatcctgcctcggccagcagcaacaggaaccccctctggctatgggcactgtgtcattgggccagcttccactgcctcctatcccacacgtctttagcgctggaacgggttccgcaatactgccccattttcaccacgcctttagatag

SEQ ID NO: 129029 - DNA, 1392 bp, synthetic construct
  misc_feature 1..1392: note = Description of Artificial Sequence: Synthetic coding sequence
  source 1..1392: mol_type = other DNA
atggccacattcccatgtcagctttgtggcaagacatttttgacgctcgagaagtttactattcacaattatagccactcccgcgagaggccctacaagtgcgtccagccggactgtggaaaggccttcgtgagcaggtacaaacttatgcgacatatggccacccactctccacagaagtcccaccagtgcgcacattgtgaaaagacgttcaatcgaaaagatcacctgaagaatcaccttcagacacacgacccaaacaaaatggcttttggatgtgaagaatgcggtaagaaatacaatacaatgttagggtacaaacgacacctggcactgcacgcagcgtccagcggagacctgacctgcggagtgtgtgcgctggaactgggatctacagaggtgctgctcgatcacctgaaggcacatgcagaagagaaaccaccttcagggaccaaggagaagaaacaccagtgtgaccactgcgagcgctgtttttacactagaaaggacgtgcggcggcacctcgtggttcacaccggctgcaaagactttctgtgtcagttttgcgcacagcgatttggacggaaggatcacttgactcggcatactaaaaaaacccactcacaggagttgatgaaggaatccctacagaccggtgatttactgagcacatttcacacaatcagcccttctttccagctcaaggcagccgctctgcctcctttcccactgggcgcaagcgcacaaaatggcctggcttctagcctccctgctgaggtacacagtctgacgctgtccccaccagaacaggccgctcaaccaatgcaacctctacccgagagtcttgcgtcacttcatccttccgtgagccccgggtcacccccacctcctctcccaaatcacaagtacaacactacttccacctcttatagtccactagcgtctttgcccctcaaagcagacaccaaaggattttgcaatatttccctttttgaagacttgcctctccaggaaccacaatccccgcaaaagcttaacccaggctttgacctcgcgaaggggaatgctgggaaagttaatcttcccaaggagctgcctgcagacgcggtgaacctgacaatacccgcttcactcgacctgtcaccactgttaggattttggcaactgcctccaccagcaactcagaacacttttggaaacagcactctcgccctcggcccaggcgagagcctccctcatagactgtcctgtttggggcagcagcagcaagagcccccactggccatgggaacggttagtttaggacagctgccacttccccctatccctcatgtgttttctgcgggaaccggatctgccattctccctcattttcaccatgcctttcgctag

SEQ ID NO: 129030 - DNA, 1392 bp, synthetic construct
  misc_feature 1..1392: note = Description of Artificial Sequence: Synthetic coding sequence
  source 1..1392: mol_type = other DNA
atggcaacgtttccttgccagctgtgcggtaagaccttcctgaccctggaaaagtttacgatccataactattcccactcacgcgagcgcccatataagtgtgtccagcccgattgtgggaaggcatttgtgagccgctacaagctgatgcgccatatggccacacacagcccgcagaagagccaccaatgcgctcactgcgaaaaaacgttcaatcgcaaggatcacctgaagaaccacttgcaaacacacgaccccaataagatggccttcggatgcgaggaatgcggaaaaaagtataacacaatgttgggatacaagagacatctggcgctccatgcagcatcctccggggacctcacatgtggagtttgtgccctggaattggggtcaacggaagtgctactggatcatcttaaggctcacgctgaagagaaacccccttcaggaactaaagagaagaagcatcagtgcgatcactgcgaacgttgtttctacacaagaaaggatgtgcgacgccatttggtggtgcacacaggctgcaaggatttcctgtgccagttttgcgctcagagattcggccgaaaggatcaccttactaggcacacaaagaaaacccattcccaagaactcatgaaggaatcactgcagacaggagacctgctttctactttccacacgatatcaccctcgttccagctgaaggcggcagctctgcctcccttcccactgggtgccagtgcccagaatggcctagcttccagcctacccgccgaagtccacagcctcaccttatcgccgccggagcaagctgcacagcccatgcagcccctgcccgagtctttggcctctctacatccttcagtctctcccggctccccccccccaccccttccaaaccataaatataacactacatccacatcttactccccactggcttctcttcccctcaaagccgacactaaagggttctgtaacatttccctgtttgaagacctgcctctgcaggaacctcagagtccccagaagttaaatcctgggttcgatctggctaagggtaatgcaggtaaggtaaacctgccaaaggaattgccagctgatgctgtgaatcttaccatcccagccagcttagacctaagccccctcctgggcttctggcaactgcctcctcctgctacgcagaatactttcggaaattctacgcttgccctggggccgggtgagtctctgccccaccggctttcatgcctgggacaacagcagcaagagccgcctttggcaatgggaacagtaagtctcggccagctgccgcttccacccatcccacacgtgttctctgctgggaccgggtcagccattctcccccacttccaccacgcctttagatag

SEQ ID NO: 129031 - DNA, 531 bp, synthetic construct
  misc_feature 1..531: note = Description of Artificial Sequence: Synthetic coding sequence
  source 1..531: mol_type = other DNA
atggctactcacagtccacagaagagtcatcagtgcgctcattgcgaaaaaactttcaaccgcaaggatcaccttaaaaatcacctccagacacacgatcctaacaaaatggcattcggctgcgaggagtgcggcaagaagtacaacactatgctggggtacaagcgtcacctcgccttgcatgcagcgagctcaggagatcttacgtgcggagtgtgtgccctcgaactagggagcacagaggtgctgctggaccacttaaaagcacacgctgaggagaagcccccgagcggcaccaaggagaagaaacatcagtgcgaccattgcgagcgttgtttttacactcgaaaagacgtacggcgtcatctggtcgttcatactggctgtaaagatttcctttgccagttttgcgcccagcgattcggcaggaaggaccatctcacacgccacaccaaaaaaactcactcgcaggaattgatgaaggaatccctccagaccggcgatctcctgagcaccttccataccatctag

SEQ ID NO: 129032 - DNA, 1392 bp, synthetic construct
  misc_feature 1..1392: note = Description of Artificial Sequence: Synthetic coding sequence
  source 1..1392: mol_type = other DNA
atggctacctttccttgccagctctgcggcaagacgtttctaactctcgaaaagtttaccatccacaactacagccactcaagagaacgaccttataaatgcgtacagccagattgtggcaaagcttttgtctcaaggtataaactcatgcggcatatggccactcacagtccacagaaaagccaccaatgtgctcattgcgaaaagactttcaatagaaaggaccacctcaaaaatcacttacagactcacgatcccaataagatggcttttggctgcgaagaatgtgggaaaaagtacaataccatgctgggatataaacggcaccttgccttacacgcggccagctccggtgacctcacatgtggcgtttgtgccctggagctgggcagcacagaggttctgcttgaccaccttaaagcccacgctgaggagaagcctccaagtggaactaaagagaagaaacatcagtgtgaccactgtgaaagatgtttttatactagaaaggacgtgcgtcggcatttggtcgtgcatacaggctgcaaggattttctatgccagttttgtgcacagcgcttcggacgcaaggaccatctcacgaggcacactaagaagacccattcccaagagctgatgaaggagtccctgcagacaggcgacctgctctctactttccataccatctctccctcctttcagctgaaagcggccgcactaccacctttcccactcggtgcctccgcacagaatgggctcgcgtcttcactccccgctgaggtgcacagtctgaccttatcgccacccgagcaagcggcacaacccatgcagcctctccctgagagccttgccagtcttcatccatcagtctctccaggatcaccgcctcctcctttgccaaaccacaagtacaacactacttcgacgagctatagccctctggcctccctgccactgaaggccgatacgaaaggcttctgcaacatttcactctttgaagaccttcccctccaggagccgcaatcgcctcagaagctgaaccccggattcgaccttgcgaaaggaaatgcaggtaaggtcaacctgccaaaggaactgcccgctgacgctgtgaacttgacaatacccgccagtctggatctctcaccattgctggggttttggcagctcccgcctcccgccacccaaaacacttttggcaactccacgttagcactggggccaggtgaatcattaccgcaccggttgagctgcctcgggcagcagcagcaggaaccgcctctcgctatgggaaccgtctccttgggacagctccctctgcctccgatcccccacgtgttcagcgcagggactgggtccgcgattttgccacattttcatcatgccttccggtag

SEQ ID NO: 129033 - DNA, 1236 bp, synthetic construct
  misc_feature 1..1236: note = Description of Artificial Sequence: Synthetic coding sequence
  source 1..1236: mol_type = other DNA
atggccacacattcccctcagaaaagtcaccagtgtgcccactgtgagaagacattcaaccgaaaagatcatttaaaaaaccacctgcagacacacgaccccaataaaatggccttcggttgcgaggagtgtgggaaaaagtataataccatgctaggctataagcggcaccttgcccttcacgccgcaagcagtggcgacctgacttgtggcgtgtgtgccctggaactcggcagcactgaggtactgttagatcacttgaaggcccatgccgaggagaaaccaccaagcggaacgaaagagaagaaacatcaatgcgatcactgcgagcgctgcttctatacaagaaaagacgtgcgccggcacctcgtggttcacactgggtgtaaggacttcctgtgccagttctgtgcacagaggttcggccgaaaagaccaccttacaagacacacaaaaaagacacacagtcaggaactcatgaaggaatccttacagaccggagatctcttgtctactttccatacgatttccccttctttccagctcaaggccgctgctctgccaccgtttcccctaggagcttccgcccaaaacggcctcgcctctagcctgcccgctgaggtgcatagcttgaccctgagcccgcctgagcaggcggcccagccgatgcagcccctcccagagagccttgcaagtctgcacccgtctgtatcacccggtagccctccacctccactgccgaatcacaagtataatacaaccagcaccagctattcccctctggcaagtttgcccctgaaggcggatacaaaaggcttctgtaacatttccttgtttgaggatctgccgttgcaggaaccccagagcccacagaaactcaatcctggctttgacttggctaaaggcaacgccggtaaggtcaatctcccgaaagaactgcccgccgacgccgtgaatttgacgatccccgcgagtctggatttatcacccctgctggggttttggcagctaccgccaccagctactcagaatacattcggcaatagtaccctggctttgggtcccggggagtctctgcctcacagattgagttgcctgggccagcagcagcaggagcctcccctagccatgggaacggtgtcattaggccagttgcctctcccccctatcccccatgtcttctcagcggggacgggcagcgctatacttcctcatttccatcacgcattcaggtag

SEQ ID NO: 129034 - DNA, 1392 bp, synthetic construct
  misc_feature 1..1392: note = Description of Artificial Sequence: Synthetic coding sequence
  source 1..1392: mol_type = other DNA
atggcgacatttccgtgtcagctatgcggcaagacattcctgactctggagaagtttaccatccacaactatagtcatagcagggaacgcccttacaagtgtgtgcagcccgactgtgggaaagcgttcgtgagtagatacaaactcatgaggcacatggccacacacagccctcagaaatcccaccagtgcgctcattgcgagaaaactttcaacaggaaggatcacttgaaaaatcacctgcagacccatgatccaaataagatggccttcggatgtgaggagtgtggcaaaaaatataacaccatgctgggctacaagagacacctggccttgcatgctgcgtcatccggagatctgacctgtggtgtttgcgcgctcgagctcggatcaacagaggtgctgttggaccacctcaaggcccatgcagaggagaaacccccaagcggcactaaagaaaagaagcaccaatgcgaccactgcgaacgatgcttttatacaagaaaggatgtccgtcgacacctggtggttcatacgggctgtaaagacttcttgtgccaattctgcgcacagagatttgggcgtaaggaccatttgaccagacatacgaagaagacacattcccaggaactcatgaaagagtcgctgcagacaggagacctattgagtactttccacaccatctctccttctttccagctgaaggcggccgccctgcctccatttccattgggggccagcgcccaaaacggcctggcctccagtctgcccgcagaagtgcacagtctgacgctcagtccccccgaacaggctgctcagcccatgcagccactgcctgagtcgcttgcttctctgcacccctctgtaagccctggctccccacccccaccgcttcctaaccacaaatacaataccacaagcacctcttactcgcccctggcatccctaccgttgaaggccgacacgaagggcttctgcaatatcagtctctttgaggacttgcctcttcaggagccccagagtccacagaagctgaatccaggctttgatctggcgaaaggaaacgcagggaaagtaaatctccccaaggaactgccggctgacgctgtgaacttgaccattcctgccagcttggacctgtcacctctacttgggttttggcagcttccacccccagctactcagaacacattcggaaactcgacccttgccctgggaccaggcgagtctctgccacaccgtctctcctgtctgggacaacagcagcaagaacctccactggccatggggacggtttcactgggccagctgccactcccccctatcccccacgtgttttcggccgggacaggcagtgctatcctgccgcattttcaccacgccttccggtag

SEQ ID NO: 129035 - DNA, 759 bp, synthetic construct
  misc_feature 1..759: note = Description of Artificial Sequence: Synthetic coding sequence
  source 1..759: mol_type = other DNA
atgaaggaaagcctccagacgggagatcttctgagcaccttccacacaattagcccttcattccagctgaaggcggccgctctgccaccgtttccattgggagcctctgcccagaacgggcttgcctcctcactgcccgcagaggtacactccctgactctatcccctcctgagcaagccgctcaaccaatgcagcctctgccagaatctttggcatctcttcatccctctgtgtcccctgggtctcccccccccccactccccaaccataagtacaacacaacatcaacgtcctacagtccgctggcaagcttgcctctgaaggccgatacaaagggattttgtaatatctctctgttcgaggatcttccacttcaggaaccccagtcgcctcaaaagcttaaccctggattcgatctggccaaaggaaacgctggcaaggtgaacctgcctaaagaactccctgctgacgcggtgaatctcacaatccccgcctccctagatctctctcccctgctagggttctggcagcttccaccccccgcgacacaaaatacgttcggcaactccaccctggctttgggtcccggggaatccctgccccatagattgagctgtttgggacaacaacagcaggagcctcccctagcaatggggaccgtgagcttgggtcagctgcccctgcctcccattcctcacgtttttagtgccggaaccggttccgcaattctaccccatttccatcatgcattccggtag

SEQ ID NO: 129036 - DNA, 1491 bp, synthetic construct
  misc_feature 1..1491: note = Description of Artificial Sequence: Synthetic coding sequence
  source 1..1491: mol_type = other DNA
atgacaaccttcttcacctctgtgccaccatggattcaagatgccaagcaggaagaagaggtgggatggaagctggttccgagacctcggggccgcgaggcagagagccaagtcaagtgccaatgcgagatctccggaacaccattttcgaatggggagaagctgcggccgcacagcctgccccagccagaacagcggccctattcatgtcctcaactgcactgtgggaaagcctttgccagtaagtataagctctatcgacatatggccacccactcagcacagaagcctcaccaatgcatgtattgcgacaaaatgtttcaccggaaagaccacctcaggaaccacctccaaacgcatgatccgaacaaagaggcattgcattgcagtgagtgtggaaaaaactacaacaccaagctggggtataggagacatctggccatgcacgctgcttcatccggcgaccttagttgcaaggtttgcctgcagaccttcgagtcgacacaggctcttttggagcatctgaaagcccattccaggcgagtggctggcggggccaaggaaaagaagcacccctgcgaccattgcgacagacgattctatacacggaaggacgtgcgccgacaccttgtggtccatactggcaggaaggatttcctctgtcaatactgcgcccagaggtttgggcggaaagaccacctgaccaggcacgtcaaaaagtctcacagccaggagctgctcaagattaaaactgagcccgtcgatatgctgggcctcctaagctgctcctccacagtgtccgtaaaagaggaactttcgcctgtgctctgcatggcttcccgggacgtgatgggcaccaaggccttcccagggatgctgcctatgggtatgtatggagctcatattccaaccatgccaagcactggtgttccacactcattggtccacaacaccttgccaatgggaatgtcatacccccttgaatccagtccaatctcgtcgcccgcacagttgcctcctaagtatcagctagggagtacttcgtatctgcccgacaaactcccaaaggtggaggtggacagctttctggctgaacttcccggctctctttctctgtcatcggccgagcctcagcctgccagcccacagcctgccgctgccgcagcgctgttagatgaggccctgttggctaaatcccctgccaacctctccgaggcactgtgcgccgcgaacgtggacttctcacacctgttggggtttttaccgctgaacttgcccccatgtaacccacctggcgccacaggtggccttgttatgggatacagccaggcggaggcccagcctctacttactaccttgcaggcccagccacaagactcaccaggagccgggggccccttgaattttggcccccttcattctctgccgcctgttttcacctcggggctgtcaagcaccaccctgcccagatttcaccaggctttccaatag

SEQ ID NO: 129037 - DNA, 507 bp, synthetic construct
  misc_feature 1..507: note = Description of Artificial Sequence: Synthetic coding sequence
  source 1..507: mol_type = other DNA
atgcaggcacagcaataccagcaacaaaggaggaaattcgctgcagcttttctggccttcatcttcatattagccgctgtggatactgccgaggccggaaaaaaagaaaaacccgagaaaaaggtcaaaaaaagcgactgtggagaatggcagtggagcgtgtgcgtccctaccagcggggactgtggcctggggacccgagaaggcactcgaaccggggccgagtgtaagcaaactatgaagactcagcggtgcaaaattccctgtaattggaagaagcagtttggggcagaatgtaaataccagtttcaggcctggggtgagtgcgatttaaatacagcactcaagacccggacagggtcccttaagcgggccctacacaacgccgagtgtcagaagactgtcaccatttccaagccctgcggcaaattgacaaagccaaagcctcaggccgaatccaagaaaaagaagaaagaggggaaaaagcaggagaaaatgttagactag

SEQ ID NO: 129038 - DNA, 1518 bp, synthetic construct
  misc_feature 1..1518: note = Description of Artificial Sequence: Synthetic coding sequence
  source 1..1518: mol_type = other DNA
atggtagaggaagttcaaaagcattctgttcacacactggtcttccgtagtctcaaacgcacgcacgatatgttcgtcgcagacaacggaaaacctgtgcccttggacgaagaaagtcataagaggaagatggcaattaagctccgcaacgagtatggtcccgtccttcacatgcccaccagtaaagagaacctaaaggagaaaggccctcaaaatgctacagatagctatgttcacaagcaatatcccgctaaccagggccaagaagtggagtactttgtcgctggcgtggctctgaccgctgacaccaaaatccagcggatgcccagtgaaagtgctgcacagtcgctcgctgtggctttgcccctccaaaccaaggccgacgcaaaccgaaccgctccttctggatccgagtataggcacccaggggcgagcgatagaccacagcccaccgccatgaattcaatagtgatggagactgggaacactaaaaattccgctttgatggcaaaaaaggccccaaccatgcccaaaccgcaatggcatcccccttggaagctctacagggtgatctccgggcatctgggctgggttcgttgtatcgcagttgaacctgggaaccagtggttcgttactggctctgctgacagaacaatcaagatatgggacctcgccagcggaaagttgaaattgtccttgacaggtcatatctcaaccgtccgtggagtgattgtgtctacacgctccccctatctgttctcgtgcggagaggacaagcaagtcaagtgctgggacctcgaatataataaggttatcaggcattaccatggacaccttagcgcagtttatggtctggacctgcaccccactatcgacgtcctggtcacctgctcacgggatagcacagcccgcatctgggatgtgagaaccaaagcctccgtgcacactctgtccggccatacgaacgccgtagcaaccgtacggtgccaggccgccgagccacaaatcattactggctctcatgataccacgatcagactgtgggacctggtcgccggcaaaacccgcgttacactgaccaatcataaaaaatcagtcagggccgtggtcttacacccccgacactacacgttcgcatcgggcagtcctgacaatattaagcaatggaagtttccagatggcagctttatccagaatctatcgggtcacaatgccataattaatactctgacagtgaattcggatggcgtcctcgtctctggggccgataacggcactatgcatctgtgggattggaggactggatacaactttcagagggtccatgctgcagtgcagccagggagcctggattctgagagcgggatttttgcttgtgcgttcgatcagtcagaatctcggctgttaacagctgaggccgacaaaaccatcaaggtctatagggaagatgacactgccaccgaggagactcatcctgttagttggaaacccgaaattatcaagcgcaaacgtttctag

SEQ ID NO: 129039 - DNA, 1545 bp, synthetic construct
  misc_feature 1..1545: note = Description of Artificial Sequence: Synthetic coding sequence
  source 1..1545: mol_type = other DNA
atgatttgtgaagtgcaaaagcacagcgtacatacattagtctttcgctctctaaagcgtacacacgacatgtttgtagcagacaacggaaagcccgtgccactggacgaggagtctcataaacgcaagatggccattaaactgagaaacgagtatggccctgtgctgcatatgccaactagtaaagagaatctcaaagagaaaggtccacaaaacgcaacagatagctatgtacataaacaatatcctgcaaatcagggccaggaggttgaatattttgtggcgggtacccatccctaccctccaggccccggggtcgctctaactgccgataccaagattcaaaggatgccgtctgagtccgctgctcagagtctcgcggtggccctgccactgcagaccaaggctgacgctaatcggacagctccctctggctccgagtaccgacaccctggcgccagcgaccggccacagcccactgccatgaatagcattgttatggagacaggcaacaccaaaaattctgcgcttatggccaagaaggcacccaccatgccaaagccacaatggcacccaccctggaagctatatcgagtgatctccggccaccttgggtgggtgcgatgtattgctgtggaaccaggtaaccagtggttcgtaaccggctcagcggacaggaccatcaaaatatgggatcttgccagtgggaaactgaagttgagcttgacgggccacatctctaccgtgcgcggggtgattgttagcacgcgttccccatacctcttctcatgtggagaggacaaacaggtgaaatgttgggacctcgaatataacaaagtaatacggcattaccacggccacctgtccgccgtgtacgggctggacctgcaccccaccatcgatgtgctggtaacttgtagtcgagacagtacagcaaggatctgggatgtgcgtaccaaagcgagcgtgcacaccctgtccgggcacacaaacgctgtggctactgtcagatgccaggccgctgagccccagatcattactggatcacacgacaccaccatcagactctgggacttggtcgccgggaaaacccgcgtcacactaaccaatcacaagaagagcgttcgggccgtagtgttgcatccacgacattatacatttgcgtctggttccccagataacataaaacagtggaaatttcccgatgggagtttcattcaaaacctgagtggtcacaacgctataatcaatactctgaccgtaaatagcgatggggtgctggtgtccggggctgataacggtacaatgcatttatgggattggcggacagggtacaacttccaacgtgtgcatgctgccgtacagcctggtagtttggactccgagagcggcatctttgcttgcgcatttgatcagtcagagagtcgtctactcactgcagaggccgacaagactatcaaagtgtaccgggaggacgacaccgccaccgaggagacacatcccgtgtcatggaagccagagattataaaacgaaaaaggttctag

SEQ ID NO: 129040 - DNA, 1545 bp, synthetic construct
  misc_feature 1..1545: note = Description of Artificial Sequence: Synthetic coding sequence
  source 1..1545: mol_type = other DNA
atggttgaagaagtccagaaacactccgtacataccctcgtgtttcggtccctaaaacgcacacatgacatgtttgttgctgataatgggaagcctgtcccactcgatgaggaatcccacaagcggaagatggcgattaaattgagaaatgagtatgggccagtgttacacatgcccacctccaaagagaatttgaaagagaaagggccacagaatgctaccgattcttacgttcataaacagtaccccgccaaccaaggtcaagaggtggagtattttgtggccggaacccatccataccctccaggtcctggagtagcactgacagccgatactaaaattcagagaatgcccagcgagtccgcagcacagagcttggccgtggctttgccactgcaaaccaaagccgatgctaatagaacggcccccagcggcagcgagtatcgacaccccggcgcgagtgaccgtccccagcccaccgctatgaactcaatcgttatggagactggcaacacaaagaattctgccctcatggccaagaaagcccccacaatgccaaaaccacaatggcatcccccttggaagttgtatagggtaataagtggacacctggggtgggttcgctgtatcgcagtggaaccagggaaccaatggttcgtgacaggcagcgccgaccgcaccatcaaaatctgggacctggcctcggggaagctcaagctgtctcttacaggccatatttctaccgtgcgaggagttatcgtaagcacacggtctccatacctcttttcgtgcggcgaggataaacaggtcaaatgttgggacctcgagtacaataaggtcatacggcactatcacggccatctgagcgccgtttacggactcgatctccacccaactattgatgttctcgtcacctgctcccgagactctaccgcccgtatatgggacgtacgtaccaaagctagcgtgcatactctgtctggccatacaaacgcagtggcaaccgtccgctgccaggctgctgagcctcagatcatcacaggttcccacgacacaactataagactctgggaccttgtcgccggcaaaacacgcgtgacattaactaaccataagaagtctgtgagggccgtcgtgctgcatccccgccactacaccttcgccagcggttctcctgacaatattaagcaatggaagttcccggatgggagctttattcagaacctgtccggccacaatgccattattaatacattgactgtgaattctgacggggtcttggtaagcggcgcggacaatgggaccatgcatttgtgggactggagaaccggatacaacttccagcgtgtgcacgctgcagttcaacccgggtcactcgatagcgagagtggcatatttgcctgtgctttcgaccagagtgagagcagattgctgacagctgaagccgacaagacaataaaggtttaccgggaggacgatactgctaccgaagagacccacccagtctcttggaagcctgagatcataaagagaaaacgcttttag

SEQ ID NO: 129041 - DNA, 5622 bp, synthetic construct
  misc_feature 1..5622: note = Description of Artificial Sequence: Synthetic coding sequence
  source 1..5622: mol_type = other DNA
atgtgggccgaagcaggattaccccgagccggcggaggctctcaacctccattcaggactttctcggcctctgactggggcctgacccatctggtggtgcatgaacaaaccggagaagtgtacgtgggtgcagtgaacaggatctacaaattgtcgggtaatttgactctccttcgagcccacgtgaccggcccagtcgaagataacgagaagtgctatccccctccctcagtgcagagctgcccccatggcctcggcagcacagacaacgtgaacaagctgctcctcctcgactatgcagccaaccggctcctggcttgcggctccgcgagtcagggtatttgccagttcttgcggctcgacgacctcttcaagctcggagaaccccaccacagaaaagaacattacctgagcagtgtgcaagaggctgggtcaatggccggagtcctgattgctgggccccctgggcagggccaggccaaactgtttgtcggaacgcccatagatggaaaaagcgagtacttcccaacattgagttcccgaaggctgatggctaacgaagaagacgccgacatgttcggttttgtctatcaagatgagtttgtgtcctcccaactcaagattccctccgacacactgtctaaattccccgcgttcgacatctattacgtgtacagtttccgctcagaacagttcgtgtactatctgacgttgcagttagacactcaacttacaagtccggatgcggcaggcgaacacttcttcacctccaagattgttagactctgtgtggacgatcccaagttttactcttatgtggagtttcccatcggatgcgagcaggccggtgtggaataccggctcgtacaagatgcctatttgagtagacctggaagggctctcgcacatcaattgggcttggcggaggatgaggatgtgttgttcacagttttcgcacagggtcagaagaaccgagtgaagcctcccaaggagtccgccctatgtctgtttacactcagagcgattaaggaaaagattaaggagcggatccagtcatgctacagaggtgagggcaagctgtctctgccatggctactgaataaggagctcgggtgcatcaactcccctctacaaatcgacgacgatttctgcggtcaagacttcaatcagccacttggaggcacagtcacaatcgaaggtacccccctttttgtcgacaaggacgacggactgaccgcggtcgcagcttatgactatcgcgggcggacggtagtgtttgctggaacacgctcaggccgcattaggaaaatattagttgacctctcaaatcctggcggaagaccagctctggcttatgagagtgtggtggcacaagaagggtcccctatactgagggacctggtactgagcccgaatcatcagtatttatatgctatgactgaaaagcaagtgactcgggtgccagtcgagagttgcgttcagtacacaagctgcgaactatgtttggggtcaagagatccccattgcggctggtgcgtgctgcactctatttgcagtcggcgagacgcttgcgagcgggccgacgagcctcagcggttcgctgcagacctactccagtgtgtccagctcacagtgcaacccaggaatgttagcgtaacaatgagccaggtgccactcgttctacaggcttggaatgttcccgatttgtcagcaggcgtgaattgttctttcgaggattttactgaatcagaaagcgtactggaagacgggcggatccattgtcgcagcccatctgctcgggaggtagccccgatcaccaggggacaaggagatcagcgcgtggtgaagctatatctgaaatcaaaggagacaggcaagaaattcgccagcgtggacttcgtgttctataattgtagtgtccatcagagttgcctgtcgtgtgtgaacggaagcttcccatgccattggtgcaagtacaggcatgtgtgcacacacaatgtggcagattgtgctttccttgaaggacgggtaaacgtttctgaggattgtccgcaaatcctgcctagcacccaaatctatgtgcctgtgggtgtggtgaagccaataaccctcgccgctcgcaacctccctcagccgcagagcgggcagagaggatatgagtgtttgttccacatacccggatcaccagcgcgcgttacagcgcttcgtttcaacagctcaagcctgcagtgtcaaaatagctcctatagctacgagggcaacgatgtgagtgatttgccggtcaatctgagcgtggtttggaatggaaattttgtgattgataatcctcaaaacattcaggctcacttgtataagtgtcctgccctgagggaatcctgtgggctgtgcctcaaggcagatccaaggtttgaatgcgggtggtgcgtggcagagcgacgttgctctctgcggcatcactgcgccgccgataccccagcttcctggatgcatgccagacacgggtctagccgctgtaccgatcctaagattctgaagttatctccagagacaggccctcgtcagggagggacgagactgacaattactggagagaatctcgggctccgattcgaggacgtgcgtctgggcgtgagggtagggaaggttttatgctctccagtcgaatccgagtacatctcagcagagcaaatagtctgtgaaattggggatgctagttcagtgcgcgcacacgacgcccttgttgaggtgtgtgtcagagattgctcaccccattacagggccttatctcccaaacggtttacttttgtgacacctacattttacagggtcagtccatcccgtgggccactcagcggcggcacatggatcggcattgagggctcccatttaaatgccggatctgacgtggctgtgtccgttggtgggaggccttgctctttcagctggcgcaatagtagagaaatcagatgtttgaccccacctggtcagtctccggggagcgctcctatcattatcaacatcaaccgcgcacaattaacaaaccccgaagtcaagtataactacacagaggaccccacaattctgaggattgaccccgagtggtctattaactccggcggtacactgctgacggtgacggggaccaatctcgccactgtgagagagccacggattagagccaaatatgggggaatcgagcgcgagaacggatgcctggtttataatgacactactatggtctgccgcgccccatccgtggctaaccctgtccggtccccacccgagctgggggagcggccagatgagctcgggttcgtaatggataatgtgcggagtttactggtcctaaacagtacatcgttcctgtattatccagacccagtattggagcctttgtccccaacaggcctgttagaactcaagccctccagcccactgattctgaaaggccgtaacctgctgcctccggccccaggtaactctcggctgaactacactgttctcattggatccacaccatgtactctcactgtctccgaaacccagttattatgcgaggctcctaacctcacaggccagcataaggtcactgtgcgcgccggtggctttgaattcagccccggtactctccaggtgtactcagattcactccttaccctgcccgcaatcgtcggtattggtggaggaggaggcctgcttctgctggtgatcgtcgccgttctcattgcatacaagagaaagagtagggacgcggatcgcaccctgaaacgtctgcagcttcagatggacaatttggaatcaagggttgcccttgaatgcaaggaggcttttgctgagttacagaccgatattcatgagctgaccaatgatctggatggagccggaattccattcttggactataggacatatgccatgcgcgtgctgttcccgggtattgaagaccatcccgtgctgaaagagatggaggttcaagcaaatgtagaaaaatctcttacactgttcggccagcttctgaccaagaagcatttcctccttacattcatccggactcttgaggcccagcgttctttttccatgagggataggggtaatgtggcgtctctgatcatgactgccctgcaaggtgagatggagtatgcaaccggcgtcctcaagcagctcttgtccgacctgatagagaaaaacctagaaagtaagaatcacccaaaacttttgctgaggcgcaccgagtccgttgctgagaaaatgctgaccaattggttcacgttcctcctgtataagtttctgaaggaatgtgccggagagcctctctttatgctatactgtgctatcaagcaacagatggaaaagggaccaatagatgccatcacaggggaggctcgctacagccttagtgaggacaagctcatccggcagcagattgattataaaaccttgaccttaaattgcgtgaaccccgaaaacgagaacgcaccggaggtgcccgtcaaggggctggactgtgacaccgtgactcaagccaaggaaaagctcctggacgccgcctacaaaggcgtgccctactcgcagcgccctaaagccgctgacatggatctggaatggaggcagggccgaatggcacggatcatcctgcaggatgaggatgtaaccaccaaaatagataacgattggaaaaggcttaacaccctcgcacattatcaagtgactgatgggagctctgtagcactcgtacccaaacaaacgtctgcctataacatctctaatagttctacgtttacaaagtccctctcaaggtatgaaagtatgctgaggaccgcctccagtccggactccctgcggtctagaacgcccatgatcaccccagacctcgagtccgggaccaagctgtggcacctggttaaaaatcacgatcatcttgatcagagagagggcgatcggggctcaaagatggtgtctgagatttatcttaccagattactggccacaaagggaactctgcagaaatttgtggacgacttgtttgagactatcttttctaccgcccaccgaggctctgctctgcccttggccataaagtacatgtttgattttctggacgaacaggcagacaagcaccagatccacgatgccgatgtgcgacatacctggaagagcaactgcctccctttaaggttctgggtcaatgtgatcaagaaccctcagttcgttttcgacatccataagaacagtatcaccgacgcctgcctttccgtcgtggcccagacgtttatggatagctgtagcacatcggaacataagctcgggaaagactcaccctctaataagctgctgtatgccaaagatattccgaactataagtcgtgggttgagcggtactacgccgacattgctaagatgccagccatttctgaccaggatatgtctgcatacttggccgagcagtcccggctgcacctctcgcagtttaattctatgagcgctctgcacgagatctacagctatataacaaagtataaagacgagatcttggcggccctggagaaggacgagcaagcacgcagacaacgcctgagatccaagctagagcaggtcgtcgatactatggcattgtcatcttag

SEQ ID NO: 129042 - DNA, 5691 bp, synthetic construct
  misc_feature 1..5691: note = Description of Artificial Sequence: Synthetic coding sequence
  source 1..5691: mol_type = other DNA
atgccactaccacctaggagccttcaggtgcttctgctgctgttactgctgctgctccttctacccggtatgtgggcagaggctggtctgccaagagccggaggcggatcacagccaccatttagaacgttcagtgcctctgattggggcctcacccacttggtcgtacacgagcagacaggtgaagtctatgtgggggctgtcaaccgaatctataaactgagcgggaatcttacgctactacgagcacatgtcacaggacccgtggaagacaatgagaaatgttatcccccgcccagtgttcagtcctgtccccacggtttgggatcaacagataacgtgaacaaactacttctgttagattatgccgctaataggctcctggcttgcggaagtgccagccaggggatatgtcaattcctgaggttggacgatctcttcaagctcggggaaccccatcatagaaaagagcattatttgtcaagcgtccaagaggcgggtagtatggccggggtgttgatagctggccccccgggacagggccaggccaagctgtttgtcggcacacctattgatgggaagagcgagtattttccaacattatcttcaaggcggcttatggcaaatgaggaagacgctgatatgttcggctttgtataccaggatgaattcgtcagtagtcagctcaagataccatcggacacccttagtaaatttccagcctttgacatctactacgtctactcctttagaagcgagcaatttgtgtactatctgacccttcagctggacacccagttaacgagccccgacgccgctggcgagcatttctttacttctaaaatcgttagactctgtgtggatgatcctaagttctattcctatgtggaatttccgatcgggtgtgaacaggctggagtcgaataccggctggtccaggacgcttatttgagccgcccggggcgtgcacttgcccatcagctggggctggccgaggacgaggacgtgctgttcaccgtgttcgctcagggacagaagaatcgggtgaagccacccaaggagtccgctttgtgtttgtttacgctgagggcaatcaaagaaaagataaaggagaggattcagtcgtgctacagaggagaggggaagctcagtttgccgtggttgctgaacaaagagctcggatgcatcaactccccattgcagatcgatgacgatttctgtgggcaggactttaaccaaccgctaggcggcaccgtgaccattgagggtacgccccttttcgttgataaagatgatggcctgactgctgtggccgcctatgattaccgaggccggaccgttgtcttcgccggcacgcggtctgggaggattcggaagattctggttgacctctccaatcccggtggccggccggccttggcttacgaaagtgtggttgcccaagagggttcaccaatcctgcgggatctcgtgttgtctccaaatcaccagtatctgtacgccatgacagaaaaacaagttactcgggtgcccgtggaatcatgcgtccagtacacgtcctgtgagttatgccttggaagccgtgatccacattgtggttggtgcgtactacacagcatctgttcccgcagagacgcctgtgagcgcgccgatgaaccccagcggttcgctgccgacctgttgcagtgtgtccaactgaccgtgcagccacgcaacgtgtccgtgacaatgagccaggtgcccttggtcctccaggcttggaacgtacccgacctgagcgcgggcgtgaactgtagcttcgaggacttcactgagtccgaatccgttctggaggatggaaggatccactgccggagtccatcagctcgcgaggtggcacccataactcgggggcagggagaccagagggtggtgaagctctacctcaagagtaaagaaacagggaagaagtttgcgtctgttgactttgttttctacaactgctccgtccaccagtcttgcctgagctgcgtcaatgggtccttcccatgccattggtgcaagtacaggcacgtatgcacacacaatgttgccgactgtgcttttttagaaggcagggtcaacgtttcggaggattgcccacagatcctcccctctacacaaatctacgtacccgtcggcgtggtgaaaccaataacgttagccgcacgtaatctgccccagccacaaagcggccaacgcggctacgaatgcctttttcatattcccggttcccccgcgcgtgtgacggcccttcggttcaatagctcctcattgcagtgccagaattccagctactcctatgagggaaacgatgtgtcagacttacctgtcaatcttagcgttgtctggaacgggaactttgtaatagacaacccccagaatattcaggcgcatctgtataagtgtcctgctctgcgggaaagctgtggattgtgccttaaggctgacccccgctttgaatgcggttggtgtgtagccgaaaggcggtgtagcctgaggcatcactgcgcagctgatacccctgcgtcgtggatgcacgcccgccatgggagcagcagatgtacagaccccaagatccttaagctctctccggagaccggtccgcgacagggaggcacaagactcaccataactggggaaaacctgggactgaggtttgaagatgtgcgactcggggtcagggtgggaaaggttctttgcagccctgttgagagtgagtatatctcggcagagcaaatcgtatgcgagattggtgacgcaagcagcgtcagagctcatgacgcactcgtcgaagtgtgtgtgcgggattgcagcccacattaccgggccttgagccctaaacgctttaccttcgttactcccaccttctatcgggtttctccaagcagaggcccccttagtggcgggacttggatcgggattgaagggagccacttgaatgccggaagcgacgtggccgtttcggtcgggggaaggccctgttccttttcatggaggaatagccgggaaatcaggtgcctgactcccccaggacaatcacctggttcagcccctattatcatcaacattaaccgtgcccaactgacaaacccagaagtgaaatataactacacagaggacccgacaatcctcagaatcgatcccgagtggagcatcaattccggtggcacccttctgacagtaacaggtacaaatttggctaccgtacgtgagccacggatcagggcgaagtatgggggaatcgaacgggagaacgggtgtttggtgtacaatgatactaccatggtgtgtagagctccttccgtggcaaaccccgtgaggagtccacctgaactcggcgaaagacccgatgagctgggattcgtgatggataatgtgagatccctgctcgttctgaattcaactagcttcctgtattacccagatcctgtgttagaacccctgtctccgacggggctactggaactcaagccaagcagccccctgattctcaaaggccggaatcttctgcctccagcccctggcaatagcaggctcaactacacagtgctgatcggttccacaccttgcactttgaccgtgtctgagacccagctcctgtgtgaggctcccaatctgaccggacagcacaaggtcaccgtgcgggctgggggcttcgagttctcacccggtacgctgcaggtctacagtgattccctcctgaccctgccagctatcgttggtataggaggcggcggggggttgctgctgctggtgatagttgccgtgcttatcgcttataaaaggaagagtagagatgctgataggacactgaagcgcttgcaattgcaaatggacaatctggagagtcgcgtggcactagaatgcaaggaggcattcgccgagctgcagacggatattcacgaactgacaaatgacctggatggtgcaggaatcccttttctggactaccgcacttatgctatgagggtcctgttcccagggatagaagaccacccggtgctcaaggagatggaggtgcaagctaacgttgagaagagtcttacgctattcggccagctattgaccaaaaaacacttcttactgacttttatacgcacattagaggcgcaacgatcctttagtatgcgtgacagggggaacgtcgcatccctgatcatgacagccctgcaaggtgaaatggagtacgctacaggcgtgttgaaacagctgttatctgacctgatagagaaaaacttagaatcgaagaaccacccaaaactgctcctcagaagaaccgagtcagttgctgagaaaatgctaaccaactggtttacctttctgctttataagtttctaaaggaatgcgccggggaacctctctttatgctatactgcgccattaaacagcaaatggagaagggccccatagacgccatcacaggcgaggcccgctactccctttctgaggataaactcattcggcaacagattgactacaagactttgacgctcaactgtgttaatccggagaacgagaacgcacctgaggtgccagttaagggactggactgcgataccgtcacgcaggcaaaggagaagttgttggacgctgcgtacaaaggtgtcccttactctcagcgtcctaaggccgccgacatggatctcgagtggcgacagggcagaatggcccgtatcattctgcaggacgaggatgtcaccacaaaaatcgataacgattggaaacggctgaacactctggcccattatcaggtcaccgacgggagctcagtagctctcgtgcctaagcagacctcagcctataacatctctaatagctctacttttactaaaagcctgagcaggtacgaatctatgctacgcacagccagctctcctgactcactccgatctcggacccccatgattaccccagacctcgaatccggcacgaagttgtggcacctggtgaagaatcacgaccatttggatcaaagagaaggcgatagggggagcaaaatggtgagcgagatttacttgacccgattgcttgcaaccaaaggtactctgcaaaaattcgttgatgatctgtttgagacaatcttcagcactgcccacaggggctccgccctgcctctggcaataaagtatatgtttgacttcctcgacgaacaggcagacaaacaccaaattcacgacgcggatgtcagacacacctggaagtcaaattgccttcccctgaggttttgggtcaatgtgattaaaaatccccaattcgtcttcgatatccataaaaacagcataacggacgcctgtctgtctgtggttgcccagacatttatggacagctgttcaacctcagagcacaaattagggaaagattccccaagtaataaactgttgtacgcaaaagacatcccaaactacaagagctgggtggaaagatactacgcggacatcgcaaaaatgcccgccataagtgatcaggacatgtcagcttatctcgctgagcagtcccggctgcacttgagccagtttaattccatgtctgcattgcacgaaatctactcctatataacaaagtacaaagacgagattttggctgccctggagaaggatgagcaggccagaagacaacggttgcggagcaagctcgagcaggttgtcgatactatggccctgagcagctag

SEQ ID NO: 129043 - DNA, 5685 bp, synthetic construct
  misc_feature 1..5685: note = Description of Artificial Sequence: Synthetic coding sequence
  source 1..5685: mol_type = other DNA
atggagcagagacgcccatggcctcgggccctggaagtggactctcgcagcgtcgtcctcctatccgtagtttgggtgctgttggcacctccagctgccggtatgccgcagttttccacatttcactccgaaaatcgtgactggacattcaaccacctaacagtgcatcagggaaccggggctgtgtacgtgggcgccattaatcgagtatacaagctgacggggaacctgaccattcaggtggcacacaagaccggacccgaagaagataataaatcgtgctatccacccctcattgtccagccctgttcagaggttctgaccctcactaataatgtaaataagctcttgatcatcgattactccgaaaacaggttattggcttgtggttcgctgtatcaaggggtgtgcaagctgcttaggctagatgacctgttcattctcgtggagccatcacacaagaaggaacattatctcagctccgtaaataaaaccggcaccatgtacggggtgattgtacggtccgaaggcgaagacgggaagctgttcatcgggacagccgtcgacgggaagcaggactatttcccgactctctcttcaagaaagctgcctcgggaccccgagtcatctgccatgctcgattacgaactgcactctgacttcgtctcctctctaataaagatcccgtcagatactctggctttggtgtcacacttcgacatattctacatctacggctttgcctcgggtggtttcgtctatttcctcacagttcagcccgaaacgccagaaggggtggccatcaacagcgccggcgatctgttttacacatcacggatcgtgagactctgcaaggatgacccgaaattccacagctacgtgagcctgcctttcggctgtactcgagcaggggttgagtatcggctgcttcaggccgcttatctggccaagccgggcgatagcttggctcaggcttttaacatcacgtcacaggacgatgtgttgttcgctattttcagcaaggggcagaaacagtatcaccatccccctgatgattctgctttatgtgctttcccaattagagcgattaatcttcaaatcaaggagaggctgcaatcctgttatcaaggagaaggaaatcttgagctgaattggctgttagggaaggacgtacagtgcactaaagctcccgttcccatcgatgacaatttttgtggtttggacataaaccagccactgggagggagtacccctgtggagggattaaccctctataccacctctcgggaccgcatgacgtctgtggcttcatacgtctataacggctacagcgtggtgtttgtcggcactaaaagtggaaagttgaaaaagattagggccgatgggccaccacacggcggggtccagtacgaaatggtatctgttttaaaggatggatctccaatcttacgagacatggctttcagtatcgaccagagatacctgtatgtgatgtcagagagacaggtgacgcgcgttcccgttgaatcctgcgaacagtacactacatgcggagaatgcttatccagcggggacccacattgtggatggtgcgctttacataacatgtgctcccgcagggataagtgtcagcaggcgtgggaaccaaatcgcttcgcagcttccatatcccagtgtgtcagtctagccgtgcaccccagttccatcagcgtgagcgaacacagccgtttgctcagccttgtcgttagtgacgcccctgacctgtcagccgggatcgcctgcgccttcggaaaccttactgaggtcgaaggccaggtaagtggctcccaggtaatatgcatatccccaggtcctaaggacgtgcctgtgattccgctggaccaagattggttcggcctcgagcttcagctgagatccaaggagaccggaaaaattttcgtcagcaccgagttcaagttttataattgctctgcccaccagctgtgtctgagttgtgtgaattccgcattcaggtgtcattggtgcaagtacaggaatctgtgcacgcacgatccaactacctgcagctttcaggagggccgaatcaatatttccgaggattgcccacagctcgtaccaactgaggaaatcttaattcccgtgggagaggtcaaaccaatcaccttaaaggctaggaaccttcctcaacctcagagcgggcagcgaggttatgagtgtgtgctgaatatccagggcgccattcaccgggtaccggcccttcgttttaattctagtagtgtgcagtgccagaattccagttaccagtatgatggtatggacattagcaatcttgctgttgacttcgccgtggtgtggaacgggaatttcataattgataacccccaagacctcaaagtgcacttgtacaagtgcgcggcacaacgggagagctgtgggctgtgcctgaaagccgaccggaagttcgaatgtggatggtgctctggggaacgcaggtgtactctccaccaacattgcacctccccttcatcaccatggttagactggtccagccacaacgtgaaatgcagcaacccacagatcaccgagatcctcacggtgtcgggtccaccagagggcgggacccgcgtgacgattcatggcgttaatcttggactcgacttttctgagatcgcacatcacgtccaagtggccggtgtgccatgcacgcccctgccaggggagtacatcatcgccgagcaaatcgtttgtgagatgggacatgccttagtgggtactaccagtggacctgtgagactctgcataggcgagtgtaaacccgaattcatgaccaagtctcaccagcagtacaccttcgtcaatcccagtgtgctctccttgaatcccatccgggggccggagtctggcgggaccatggtaaccatcaccggtcattatctgggcgctggctccagtgtcgcggtctatctgggcaatcagacctgtgagttctacgggagatctatgagtgagatcgtgtgtgtgtccccaccctcctccaacggtcttggccctgtgccggtatccgtgtctgtggatagagcacacgtagattcaaatctacagttcgaatatattgatgatccgagggtgcagaggattgagcccgagtggtctatcgcgtctggccacactcccctgaccatcaccggctttaatctggacgtaattcaggagcctaggatccgggtcaaatttaatggtaaagagtctgtcaacgtctgtaaagttgtcaacaccacaactttgacctgtctggcaccatcgttaaccacggactatagaccaggattggatacggtcgaacgcccagatgagttcggattcgttttcaataatgtccagagtcttctgatctacaacgacacgaagttcatttactatcccaaccccacattcgagctgctgtccccaaccggcgttctcgaccagaagcctgggagccctatcatcctcaaagggaaaaacctgtgcccccctgccagtgggggggccaagctcaattacactgtccttattggggagaccccttgtgcagtgactgtatctgagacacagcttttatgcgagccacctaacctaactggtcaacacaaagttatggtacatgtggggggaatggtgttcagtcccggttcagtgtcagtgatcagcgatagtctgttaaccctgcccgcaatcgtgtctatagccgctggaggttccttgctgttgattattgtcattatcgtgttgatcgcatataaacgcaaatcccgcgagaatgacctcactcttaaaagattacagatgcagatggataacttagagtctcgcgtagcgcttgaatgcaaagaggcctttgctgagttacaaacagatatcaatgaactaacctccgatctagaccgatccgggatcccatacctggattacagaacttacgctatgagagtgctgtttccggggatagaggaccaccccgtgttacgcgagctcgaagtacaaggtaacggacaacaacacgtggaaaaagcccttaaactttttgcccagctgatcaataacaaagtgtttcttctgaccttcattcgaaccttggagctccagcggtctttttctatgagagacagagggaatgtggcctctctcattatgaccggcttgcaaggcaggctggaatatgctaccgacgtcctgaagcagctcttgagcgacctgatcgacaagaacctggaaaacaagaaccaccccaaactgttacttcgcaggacagaatcagtcgctgagaagatgcttacaaactggtttgccttccttctgcataaattccttaaggagtgcgccggagagccactgtttatgttgtattgtgctatcaaacagcaaatggaaaaggggcccattgacgcaatcaccggggaagctaggtacagcttgagtgaagacaaactgattcgccagcagatcgagtacaaaactctgattttgaactgtgtgaaccccgacaatgagaactctcccgagatccctgtaaaagtcttgaactgcgacaccatcacccaggttaaggagaagattctcgatgccgtctataagaatgtgccgtatagtcagagaccacgggccgtagatatggatttggagtggaggcaaggcaggatcgctcgcgtggtgctgcaggatgaagatatcactactaaaattgaaggggattggaaaagactcaataccctaatgcattaccaagtgtcagaccgaagtgtggtggcgctggtgccaaaacagacgtcttcatataatatccccgcatcggccagcattagcagaacaagcatctcgcgctacgactccagctttcgctacacaggctcacctgacagcttgaggtcccgcgccccaatgataaccccagacttagagagcggagtgaaggtttggcatttagtgaaaaatcacgatcatggggaccagaaagaaggcgataggggctccaagatggtgagcgagatctacctgacacggcttctggcaacaaagggtaccctacagaaattcgtcgatgacttattcgaaaccctgtttagcaccgtgcaccgcggctccgccctgccccttgccatcaaatacatgtttgattttctggacgaacaagcggatagacactccattcacgataccgatgtaaggcacacctggaaatccaactgcctgcctttaaggttctgggttaacgtgattaaaaatccacagtttgtcttcgacatacacaagggatcaatcacagatgcctgtctatccgttgtggcccagacatttatggacagttgtagcacgtccgaacatcggctcggcaaggacagccccagtaataaactgctgtatgccaaggacatccccagttataaatcctgggtagagaggtattacgctgatatcgccaaactgccagccattagtgaccaggacatgaatgcttatcttgctgagcagagtcgactacacgccgttgagttcaacatgttgagtgcccttaatgaaatttacagctatgtgtcgaagtattccgaggagttgatcggggctctagagcaggacgaacaagcccgccggcagagacttgcctacaaggtggagcagctcatcaatgccatgagcattgagagttag

SEQ ID NO: 129044 - DNA, 5685 bp, synthetic construct
  misc_feature 1..5685: note = Description of Artificial Sequence: Synthetic coding sequence
  source 1..5685: mol_type = other DNA
atgaaggctatgccctggaactggacttgcctgctcagtcacctcctgatggtcggcatgggtagtagcaccctgctaacacggcagcctgccccactgagccagaagcagcgctctttcgtgacctttcgcggggagcccgctgaggggtttaaccacctggtagtcgacgaacggactggccatatctacctcggagcggtgaaccgtatttataaactgagctctgatctgaaagttttagtgacccacgaaaccggaccagacgaagataacccaaaatgttacccacccaggatcgtgcaaacatgcaacgagccactgaccaccaccaataacgttaataagatgctcctgatcgactataaggaaaacaggctgattgcgtgtggttcactttatcaagggatctgcaagctgctgaggctagaggatctgttcaaactcggagagccatatcataagaaagaacattatctctccggagtcaatgagagtggaagtgtgttcggcgtgatcgtatcgtatagcaatttagacgataagcttttcatcgcaaccgccgtggacggcaagcccgagtatttccccactattagcagtaggaagttgaccaaaaattctgaagctgatgggatgtttgcgtacgtctttcacgacgagtttgttgcatctatgattaaaattccctctgacacctttaccataattccagacttcgatatatactatgtctacggatttagctccggaaatttcgtgtatttcttgacactgcagcctgaaatggtgtcaccccccggatccaccaccaaagaacaggtatacacttccaaattagtgcgtctctgcaaagaagatacagcttttaacagctatgtggaggtgccaattggctgcgagcgctctggagtggagtatcgcctgctccaagccgcatacttgtcaaaagctggagccgtgctagggcggacccttggcgtccacccggatgacgacctgctctttacagtgtttagcaaggggcaaaagcggaaaatgaaaagtctggacgaatccgctttgtgcattttcatcctaaagcagattaacgatagaattaaggagcgccttcagtcatgttatagaggcgaaggtacactcgatctcgcatggcttaaggtgaaagacatcccatgctcctccgctcttctcactattgacgacaacttctgcggactggatatgaacgcccccctcggagtaagcgatatggtacggggcatcccggtgttcaccgaagaccgggatcgtatgaccagtgttatcgcctatgtgtataaaaaccattccctggcatttgtcggtactaagtccggaaaactaaagaagattcgggtcgatggtccccgcgggaatgctctgcaatatgagactgtgcaggttgttgatccaggtcctgtgttgagagatatggcctttagtaaagatcatgagcagctctacatcatgtcggagcggcagctgaccagagtgcctgtcgaatcttgtggacagtaccagtcgtgcggcgaatgcctcgggtcaggcgatccccattgcggctggtgcgtgctgcacaatacctgtacgcgaaaggagcgatgtgagcgctctaaggagcctagacggtttgctagcgagatgaagcagtgtgtgagactcaccgtccaccccaacaatatctcggtaagccagtacaatgtgttgcttgtgctggagacatacaacgttccagaactctcagcaggtgttaactgtaccttcgaggacctcagcgagatggacggcttggtcgttggcaaccagatccagtgttactcacccgctgccaaggaggttccacgaatcataactgagaatggtgatcaccatgtggtgcagctccagctgaaaagcaaagaaaccggcatgaccttcgcgtctactagctttgtgttctacaactgttccgttcataattcctgcctgtcatgtgtggaatctccctatcgatgtcactggtgcaaatatagacacgtgtgcacacacgaccccaagacttgcagcttccaggagggacgtgtgaaactcccagaggactgcccccagctgctgagggtggataagatacttgtgcctgtggaggtgattaaacccattacgctcaaggcaaaaaatttgccccagccccaatctggtcagcgaggctatgagtgtatcctgaacatccagggaagcgagcagagagtcccggcattgaggttcaactcttcctccgtgcaatgccagaatacctcctattcatatgaaggaatggaaatcaataatctgccggttgagttaacggtggtgtggaacgggcatttcaatatcgataaccctgcacagaataaggttcatctctataagtgtggggccatgcgagagagttgcggactttgcctgaaagcggaccccgatttcgcatgtggatggtgtcaaggacctggccagtgcaccttgcgacagcattgtccagcgcaagagtcgcagtggctagaattgtccggcgctaaaagcaagtgtactaaccccagaatcaccgaaattattcctgtcacgggccctagagagggtggtactaaggtcaccataagaggggaaaatctggggctggaatttagggatattgcaagtcatgtcaaagtagccggtgtggaatgttctccgctggtcgatgggtacattccggctgagcaaatagtctgtgagatgggcgaggccaagcctagtcagcacgcaggatttgtggaaatctgtgtggctgtatgcaggccggagtttatggctagatcttcacagctatactacttcatgactctgactctgtctgatcttaaaccctctaggggacccatgtccgggggaacacaagtgaccataaccgggactaacttgaatgctgggagcaatgtggtggtcatgttcggcaagcagccttgtctattccacaggagaagcccatcttacattgtgtgtaacacaacctcatctgatgaggtacttgaaatgaaagttagcgtgcaggtagatagggccaagatccaccaggatctcgttttccaatatgtcgaagatcccacaatcgttcggatcgaacccgagtggagcattgtttctggaaatacacccatcgcagtttggggaactcacctcgaccttatccagaatcctcaaatcagggctaaacatggtggtaaggagcacatcaatatctgcgaggtgcttaacgccactgaaatgacttgtcaggctcccgcactagctttgggacctgaccatcagagtgacctgaccgaacggcctgaggaattcggcttcattctcgacaacgtgcagagcctccttatcctcaataagacaaattttacttactacccaaacccggtttttgaagccttcggcccgtcgggcattcttgagctgaaaccaggcactcctattattttgaaaggcaagaacctgataccacccgtggctggaggcaatgtgaagttaaactacacagtgctcgtgggggaaaagccctgtacagtcacggtgagcgatgtacaattgctgtgtgaaagccctaacttaatcgggcgtcataaggttatggcacgggttggcgggatggagtactcacccggaatggtttacatagcccccgactcacctctctccttgccagccatagtctcaatcgcggtcgccggcggtcttttgatcatcttcatagtggcagtgctgatcgcctacaagaggaaatccagggaatccgacctgacactaaagcgcctccagatgcaaatggataatctggaatcaagggtggcgctagagtgtaaagaggctttcgccgaattacaaacagacattcacgagctcaccagcgatctcgacggtgcagggattccgttcttggactacaggacatacaccatgagggtgctttttcctgggatcgaagatcaccccgtcttgagagacctcgaagtgcccggctatcgacaagagagggtagaaaagggattaaaattgttcgcccaactcattaacaataaggttttcctgcttagctttatccggactctcgagtcacagcgctccttttctatgcgagaccgtggcaatgtggcctcactgatcatgaccgttctgcagtccaaactggagtacgcaactgatgtactgaagcagctgttagccgatctcatcgataagaacctggagtccaagaaccacccgaagctcctgctgcgacggaccgagagtgtggccgagaagatgctcaccaactggtttacatttttactatataagtttttgaaggaatgtgctggggagccgctgttctcacttttctgcgccattaaacaacagatggagaagggacccattgacgccatcacaggggaagcaagatactctctctccgaggataagctgataaggcagcaaattgattacaagaccttggtgctctcttgcgtcagtccggacaacgccaacagcccagaggttcccgttaaaatcctgaattgtgatacaatcacacaggttaaggagaaaatcttggacgccatcttcaaaaacgtcccttgttcacaccgccccaaagccgctgacatggatttggaatggagacagggctcaggagcacggatgattttgcaagatgaggatataaccaccaagatcgagaacgattggaaacggctcaatactcttgctcattaccaagtgcccgacgggagtgtggtcgcactcgtcagcaagcaggtgaccgcttacaatgccgtgaacaacagcacggtctctagaacaagtgccagcaagtatgagaatatgatccgctatacaggatctccagattctttaagaagcaggacccctatgataactcccgacctcgagagcggagttaagatgtggcatctggtaaagaaccatgagcacggagaccagaaggagggcgaccgggggagcaagatggtctccgagatctacttgacgaggctgttagcaactaaaggcacccttcagaaattcgtcgacgatcttttcgaaactattttcagtaccgctcaccgcggctccgcattgcctctggctatcaaatacatgtttgactttctcgacgaacaggccgacaaacatggtatccatgacccacacgtgagacacacgtggaagtctaattgtttgcccctccgattctgggtgaatatgattaagaatccgcagttcgttttcgatatccacaaaaacagcatcacggatgcttgcctctctgtagtggcacagacctttatggattcatgtagcactagcgagcaccgattaggaaaagatagcccctccaataaactgctttacgctaaggacatccctagctacaaaaactgggtggagcggtactacagtgacatcgggaaaatgcctgccattagcgatcaggatatgaacgcttacttagccgagcagtctcggatgcacatgaatgagttcaacaccatgtctgctctaagtgagatcttctcatatgtggggaagtattcagaagagattttggggccccttgaccacgatgatcagtgcggtaagcaaaaactggcgtataagctggaacaagtgattaccttgatgagccttgacagttag

SEQ ID NO: 129045 - DNA, 5685 bp, synthetic construct
  misc_feature 1..5685: note = Description of Artificial Sequence: Synthetic coding sequence
  source 1..5685: mol_type = other DNA
atgaaggcgatgccttggaattggacttgcctcctgtctcatctactgatggttgggatggggagcagtacgctgctcacgagacaacctgctcccttatcccaaaagcagcgtagcttcgtaacattcagaggagagcccgccgagggctttaatcacttagtggtagacgagcggaccggccacatctatcttggggccgtcaataggatctacaaactcagttctgatctgaaggtcttggttacccacgagacaggcccagacgaagacaatcccaagtgctacccaccaagaatcgtccagacctgtaacgagccgttgactactacaaacaatgtcaacaagatgctgttaatcgattacaaggaaaacaggctcatcgcatgcggctcgctctaccagggtatctgcaaactattacgcctggaggacctgtttaaactgggtgaaccctatcataagaaagagcattacttgagtggcgttaatgagtctgggtctgtttttggggtgatcgtgagttattcaaatctagacgacaaactctttatagcaaccgctgtggacgggaaaccagagtattttcccacaataagcagtagaaagcttaccaagaacagtgaggctgatggcatgtttgcctacgtgttccatgacgagtttgtggcctctatgataaagatcccttctgacacttttactataattccagactttgacatttactatgtttacggcttctcctccgggaattttgtgtattttctgactctgcagccggaaatggtgtccccccccggaagcactaccaaggagcaagtttacaccagcaaactcgtccggctctgtaaagaggatactgctttcaactcctatgtggaggtacctataggttgtgaacgcagtggcgtcgaataccggctcctacaggcagcctatctgtccaaggcaggcgccgtgttgggacgcacgttaggcgtacatcccgacgatgatctactcttcaccgtcttcagtaagggacagaagagaaagatgaaaagcctggacgaatcagcattgtgtatattcattctgaaacagattaatgacaggattaaggaaagacttcaatcctgctaccgcggcgaagggacgctcgacctggcttggctcaaggtgaaagacatcccatgctcttctgcccttttaacaattgatgataacttttgcggcctggatatgaacgccccactcggtgtctctgacatggtacgcgggatccccgtcttcacagaagatcgggataggatgacatcagtgatagcgtatgtgtacaaaaatcactccttagcctttgtgggcactaagagtggtaagctcaaaaagattagggtggatgggccccggggcaacgccctgcagtatgagactgtccaggttgtagaccccgggcctgtgctgcgggacatggctttctccaaagatcacgagcagttatacatcatgtctgagcgccaattgacgcgggtcccagttgagagctgtggacagtatcagtcttgcggagaatgcctcggatctggtgaccctcactgtggctggtgtgttctccacaacacctgtacacgtaaggagcggtgcgagcgcagcaaggagccacggagattcgcatcagagatgaaacagtgtgttcggctgaccgttcatcccaacaacattagcgtaagccagtacaatgtgcttctggtgttagaaacctataacgtgccagagttgtccgccggcgtgaattgtacttttgaggatctcagtgaaatggacggacttgtcgtcggcaatcagatacagtgctattcccctgccgctaaggaggtccctagaatcattaccgagaatggtgaccaccacgtggttcagctccagctaaagtccaaggaaactggaatgacatttgccagtaccagcttcgtgttctacaattgtagtgtgcataatagttgtctgagttgcgtcgaatccccttaccggtgccactggtgcaaataccgccacgtctgtactcacgaccctaaaacctgcagcttccaggaaggccgggttaagctccccgaggattgtcctcaactcttgcgtgttgacaagatactggtccctgttgaagtgatcaagccaatcaccctcaaggcaaagaatctgccacagccgcagtccgggcagagaggctatgaatgcatcctcaatatccaaggctccgaacagcgcgtgccagccttacggttcaacagctccagcgttcagtgtcagaatacctcgtactcctacgagggcatggagatcaataatctgcctgtcgaactcacagtggtctggaacggacattttaatatcgacaaccctgcccagaataaggtccatctttataaatgcggcgcgatgcgggagtcctgcggtttgtgtcttaaggccgatcccgacttcgcttgcggctggtgtcagggtccagggcaatgcacactacgacagcattgccccgcacaggaaagtcagtggctagagctctctggtgccaagagcaagtgcaccaaccctagaatcaccgaaatcattccggtaactggacccagggaaggcggaacgaaagtgaccattagaggagagaatctggggttggagttccgcgacattgcatctcacgttaaagtggcaggcgttgaatgttctccgctggtcgatggctacattcctgccgagcagatagtgtgcgaaatgggggaggcgaagccctcccagcacgctggatttgttgagatatgcgttgctgtttgcagacctgagtttatggctagatcgagccagttgtactacttcatgacacttaccttgtcagatctcaagcccagcagggggcccatgagcgggggcacgcaggtgacaattactgggacaaacttgaacgcggggagcaatgtggtggtgatgtttggaaagcaaccttgcctcttccaccggcgctcacctagctacatagtgtgcaatactacgagcagtgatgaagtcttggaaatgaaggtcagcgtgcaggtggacagggcgaaaattcaccaggatctcgtcttccagtacgtcgaggacccaaccatagtccgcatcgagcccgagtggtccatagtaagcggcaacacccctatcgccgtctgggggactcacttagacttgatccaaaacccccagattcgggccaaacatggaggcaaggaacatatcaatatctgcgaggttctgaatgctaccgaaatgacctgtcaagcccccgcactcgccctgggaccagaccatcagtctgatcttaccgagagacctgaagagtttgggttcattctcgacaatgtacagtcgctgctgattctgaataagaccaattttacatattatcccaatcccgtgttcgaggccttcggcccttcgggcattctcgaactgaaacctggtaccccaattattttaaagggtaaaaatttgattccccccgtagcaggcggtaacgtaaaactgaactacaccgtgctggtgggggaaaagccctgtaccgtgaccgtgtccgatgtacagctcttatgcgagagtcccaatctgatcggacgccataaggtgatggcccgagtcggagggatggagtactcccctgggatggtgtacattgctcctgatagtccccttagtctgccagcaatagtctccatcgcagtcgccggaggactgctaatcatctttatcgtggctgtgttgattgcttataaacggaaatcaagggagagcgaccttactctgaaaaggctgcaaatgcaaatggacaaccttgagagcagagtggccttagagtgtaaagaggcctttgctgagcttcagactgacatccacgagcttacatctgatctagatggcgctggtatacctttcctggactaccggacttatacaatgcgggtgctgtttccgggcatcgaggatcatcctgtgttgcgggacctggaggtgcccggctacaggcaagagcgtgtggaaaagggtctgaagctgttcgcccaattgatcaacaacaaggtcttcctgctgtcctttattcggacgctggaatctcaacgttcctttagtatgagggaccgcggtaacgtggcttcgctgattatgaccgtgttgcagagtaagctggaatatgccaccgacgtgttgaaacagctcttagccgatctcatcgataagaacttagaatctaaaaatcatccaaagctcctcctgagacgtacagagagtgtggccgaaaaaatgctgaccaactggttcacattcttgctgtataagtttctcaaggagtgcgctggagagccactgttcagtctgttttgtgctataaaacagcaaatggagaaagggccgatcgatgctattaccggagaggcccgatattcactcagtgaagataaacttattcgccaacagattgattacaaaacgttggtgctcagctgtgtttctcctgacaacgccaatagccctgaggtgcctgtgaagatactgaattgcgacacaatcacccaagtgaaagagaaaatcctggatgccatctttaagaacgttccatgcagccatagacccaaggctgctgacatggatctcgagtggaggcagggatctggggcccggatgatcttgcaggatgaggacatcaccacgaaaatcgagaacgactggaaaaggctgaacactctcgcccattatcaagtaccggatggatcagtcgtggccctcgtgtctaagcaggtgacagcttacaacgctgtaaataattcgaccgtgtcccgaacaagcgcctctaaatacgagaatatgattcggtatactggcagccccgacagtctccgctcacgcactccgatgattacgcctgacctggagagcggagtcaaaatgtggcatctggtcaaaaatcacgagcacggagaccagaaggagggcgacagagggtctaagatggtttcggaaatttacctcacacggctgctcgcaacgaagggcacattgcagaaattcgtagatgacctcttcgagacaatattctccaccgcccaccgcggcagcgctctgcccctcgcaataaaatacatgttcgatttcctcgacgagcaagctgataagcacggcattcatgaccctcacgtgcggcacacttggaagtctaattgtctaccactcaggttttgggtgaatatgataaagaatcctcaattcgtgtttgatatccataagaattctatcacagacgcgtgcctgtccgtggttgcacagacttttatggactcttgctccacaagtgagcacaggctaggcaaagactccccctccaacaagttgctctatgctaaggacatcccgagttacaagaactgggttgagcgatactacagtgacattgggaaaatgcctgccatatctgaccaggacatgaacgcctacttggccgagcagtctcggatgcacatgaacgagtttaatactatgagcgctctgtccgagatcttcagttacgtgggaaagtattcagaagaaatccttgggccactggaccatgacgaccagtgcggtaagcaaaaactcgcatacaagttagaacaagtaatcaccctgatgtctttagatagctag

SEQ ID NO: 129046 - DNA, 1569 bp, synthetic construct
  misc_feature 1..1569: note = Description of Artificial Sequence: Synthetic coding sequence
  source 1..1569: mol_type = other DNA
atgaaagcgatgccatggaactggacgtgtttactttcccatctgctcatggttggtatgggctctagtacattgttgactcgccagcctgctcccctgtcccagaagcagcgcagcttcgtgaccttccggggcgaaccagccgaaggttttaaccatctggttgtagacgaaagaactggacacatttacctgggggcggtgaatagaatttataaattatcctccgacttgaaagtccttgtcacccacgaaaccggcccagacgaagacaacccaaagtgctacccccctcggatagtgcagacgtgtaacgagcctcttacgaccacgaacaacgtgaataagatgctcctcatcgactataaagaaaatcgcctgatcgcttgcggctctctgtatcaggggatttgcaagctgctccggctggaagatctctttaagctgggagagccttaccataaaaaggaacactacctgtcaggggtcaatgaaagtggttctgtgttcggcgtcatagtgagctactcaaacctggacgataagctcttcatagcgaccgccgttgacggcaagccagaatacttcccaacaatatcatcccgaaagcttacgaagaatagcgaagcagacgggatgttcgcctatgttttccacgatgaatttgtcgcatccatgatcaaaataccgtctgatacttttaccattattcctgattttgatatttactacgtgtacgggttttcatcaggaaatttcgtttactttttgacattgcagccggaaatggtgtcccctccagggagcaccaccaaggagcaggtgtacaccagcaaactggtgcgtctgtgcaaggaagacaccgcatttaacagctatgtggaggtcccgataggttgtgagagatctggagtggaatataggctgctgcaggctgcctaccttagtaaagcgggggctgtcctgggtcggacgctcggagtgcacccggacgatgacctattattcaccgttttcagcaaaggccagaaacggaagatgaaaagtttggatgagtccgccctgtgcatttttatcctgaagcagataaacgatagaattaaagagcgcctccaatcctgttataggggtgaagggactcttgatctcgcatggctaaaagtgaaggatatcccttgcagctctgccctgcttacaatcgacgacaatttctgcggactggatatgaatgccccactaggcgtaagcgatatggttcgagggattcctgttttcaccgaggaccgcgaccgaatgactagcgtgatcgcgtacgtctataaaaatcacagccttgctttcgtaggaactaaatctggaaaactcaagaagtcctttggcacagggccacagggaggcatcactcaggagtggatcggagttgagggggatcccccaggcgcaaatatcgccagccaggagcagatgctgtgcgtgtacctgcagtgttcaagtcacaaggccatttctgatcagcgggtccaaccactgttgtgttgctttttaaacgtgccaggaaattcctcctag

SEQ ID NO: 129047 - DNA, 1479 bp, synthetic construct
  misc_feature 1..1479: note = Description of Artificial Sequence: Synthetic coding sequence
  source 1..1479: mol_type = other DNA
atgaaagcgatgccatggaactggacctgccttctgagtcatctcttgatggtcggcatgggctcttctacgctcttgaccagacagcctgcaccgctcagccagaagcagagaagctttgtgacgttcagaggcgaaccagccgaggggtttaaccacctcgtggtcgatgagagaacagggcacatttatctgggagcggtgaataggatttacaagctcagctccgacctgaaggtccttgttacacacgagactggccccgacgaagacaacccaaagtgctacccccctaggatagtccaaacctgtaatgagccacttaccacgaccaataatgtaaacaagatgttactgatcgattataaggaaaataggcttatcgcttgcggctctctgtaccagggcatctgcaaacttctccgactggaggatcttttcaagctaggagagccatatcacaaaaaggaacattaccttagcggcgttaatgaatccggcagtgtgttcggcgtgatcgttagctactctaatctggacgataaattattcattgctacagctgtggacggcaagcccgaatatttccccacaatatctagccgaaaattgacaaagaattctgaggcggacggtatgttcgcatatgtatttcatgatgagttcgttgcaagtatgattaagatcccctcggatacgtttaccataatccccgatttcgacatatactacgtctacggattttcaagtggaaacttcgtgtatttcctgacccttcagcccgaaatggtctctccccccggcagcactactaaagagcaggtatacacatccaagctcgtgcgtctctgcaaggaagacaccgccttcaattcttatgtggaagtcccaataggatgtgagcgcagcggcgtggaatatcggctgctccaagccgcttaccttagcaaggctggggccgtgcttggtcgaaccctcggcgtgcatcccgatgatgacctcctgtttacagtctttagcaagggacagaagcgtaagatgaagagcctggatgaatcagcactctgtatcttcatcctgaagcagattaacgacagaataaaagagcgactccaaagctgttatcgaggagagggcacgctggacctggcttggctcaaggttaaggatattccgtgctcgtccgccttgctaactatcgacgataacttttgcggcttagatatgaatgcccccctgggtgtctcagatatggttagaggcatcccagttttcactgaggaccgggaccggatgaccagcgtgatcgcttatgtctacaagaatcattccctcgcattcgtgggcaccaaaagtggcaagctcaagaaaatgcctggcaccagcctgtgtccaacccttgaacttcagaccggcccccgcagccatagggccactgtgaccctcgaacttctgttcagcagctgttcttctaactag

SEQ ID NO: 129048 - DNA, 5517 bp, synthetic construct
  misc_feature 1..5517: note = Description of Artificial Sequence: Synthetic coding sequence
  source 1..5517: mol_type = other DNA
atggccttgcagctgtgggccttaacattgttgggactcctgggggcgggggccagccttcggccgaggaagctggacttctttaggagcgagaaagaacttaatcatcttgcggtcgacgaggcctctggtgtcgtctacctgggcgccgtgaacgccctctaccagctcgatgcaaaactgcagctcgagcagcaggtcgcaaccgggcctgccttggataacaaaaagtgcacacctcccatcgaggcctcccagtgccatgaagcagaaatgacggacaatgtcaaccagctcctcctgctcgacccccctaggaaaagactggtcgaatgtggcagtctgtttaagggcatttgcgctctccgtgctctgagtaatatttcccttaggctgttctatgaggatgggagcggcgaaaagagctttgtggcgagcaacgacgagggcgtagccaccgtgggacttgtgtcttctactggccccggcggggatagagtcttgttcgttggcaagggcaatggaccccatgacaatggtatcatcgtaagcactagactgctagaccgcaccgactcaagagaagccttcgaagcatacactgaccacgccacatacaaggccggttatttgagtacgaacacccagcagttcgtagccgcctttgaagacgggccatatgtcttctttgtcttcaaccagcaggataaacaccccgcgcggaaccggaccctcctcgccaggatgtgtagagaagaccccaactattattcctaccttgagatggacctacagtgtagggaccccgatatccacgccgctgccttcgggacatgcttagccgcctctgtcgcagcacctggctccggacgcgtgttatatgcagttttttctagagacagtagaagctcgggcggacccggagccggattatgcttatttcctcttgacaaggtacacgccaaaatggaagccaataggaatgcatgttataccggcactcgcgaggcacgggatatcttctacaaaccttttcacggcgacatccaatgtggcggccacgctccgggctctagcaagagtttcccatgtggcagcgagcatctcccatatccactcgggagcagggacggattgcgtggcacagctgtgctccagagaggcggtttgaacctgactgccgtcaccgtagcagccgagaacaatcatacggtggcatttctgggaacctccgacggtcggatcctaaaggtttatctaacaccagatggcaccagcagcgagtatgatagtatcttagtggaaatcaacaagcgggtcaaaagggatctggttctcagtggagacctggggagcctgtacgctatgacccaggacaaggtgttcaggcttcccgtgcaggaatgcttatcttaccccacttgcactcaatgcagggattctcaggacccatactgcggctggtgtgtggtggagggacggtgcacgcgtaaagcagaatgccccagagctgaggaggcctctcactggttatggagccgcagcaagagttgcgtagcagtcacttcagcccagccccagaacatgtcccggcgtgcccagggcgaagtgcagctcaccgttagccccctacctgccttatccgaggaagatgagctcctgtgtctgttcggggagagcccccctcatcccgcgcgggtagagggtgaagccgttatttgtaatagcccaagtagcattcccgtcacgcctccgggacaggatcatgtggcagtgacgattcagttactgctcaggcggggaaatatattcttaacttcttaccagtatcctttctatgactgccgacaggctatgtctctagaagagaacctgccttgtatctcctgcgtcagtaacagatggacctgtcagtgggacctcagatatcatgaatgtcgagaggccagccctaatcctgaggatggaatagtgagagctcatatggaggatagttgccctcagtttttgggaccttcaccattggtgatcccgatgaatcacgagaccgacgtcaacttccagggcaagaaccttgacactgtgaaaggtagctcccttcacgtggggtccgacctgctcaaattcatggagcccgttaccatgcaggaaagtggcacattcgcgtttcgcacgcctaaactgtcacacgatgctaatgaaaccctcccactacatctctatgtcaagtcatacggaaaaaacattgattcaaagctacatgtgaccctctataattgctccttcggacggtctgactgttcgctgtgcagagccgcaaacccagactaccggtgcgcgtggtgtggaggccagagccggtgcgtatacgaggctctttgtaatacaacatctgagtgtccgccacccgtcatcacaagaatccaaccagagactggcccactaggtgggggcattcgcatcaccatactagggagcaacctcggcgtccaagctggagatattcagcgtataagtgtggccgggaggaattgcagcttccagcccgaaaggtactccgtgtccaccagaatcgtttgcgtgatagaagctgccgagacccccttcaccggtggagtggaagtggatgtgtttggcaagctggggagaagccctccaaatgtgcagttcaccttccagcagccaaaacctctgtctgtggagccccaacaggggcctcaggccggtggcaccactctgacgatccacggtactcacctagacactggttctcaggaggacgtccgcgtcactcttaatggagtaccatgcaaggttacgaagtttggagcccagctgcagtgtgttactggcccccaggccactcgtggacagatgctcctagaggtgagctacggcggtagccctgtgccaaatccagggatctttttcacctatagagaaaacccggtcctgcgcgcctttgaacctttaaggagttttgctagcggaggtagaagcatcaatgtaactggccagggtttctctctaatccaaagatttgcaatggtcgttattgctgaacctttacagtcttggcagcctcctcgagaagctgaatcacttcagcctatgaccgttgttggaaccgactacgtcttccacaacgataccaaagtcgtcttcctcagccccgctgtgcctgaagaacccgaagcttacaacttaactgtgctaattgaaatggatggacacagggcattgcttcgaaccgaagccggcgctttcgagtacgtccctgacccaacttttgaaaatttcaccggaggcgtgaaaaaacaggtcaacaaactcattcatgctaggggaacaaacttaaacaaagctatgaccctgcaggaagctgaagccttcgtcggggccgagagatgcaccatgaaaaccctgacggagactgatctttactgcgagcccccagaggtgcaacctcctcctaaacggaggcaaaagcgggacacaacccacaatctgccagaattcatcgtgaaatttggcagtcgggagtgggttcttggtagagttgaatacgacactcgggtgtccgatgtgcccctgtctcttatccttcccctcgttatagtgccaatggtcgtggtaattgcagtaagcgtatactgctattggcgtaaaagtcaacaagccgagcgggagtacgagaagattaagagccagttggagggtctggaagagagcgtgcgggatcggtgcaagaaggaatttactgacctcatgatcgaaatggaagaccagacaaatgatgtgcacgaggcaggcatacctgtcctggactataagacctacacagacagggtgttttttctaccatccaaggacggagataaggacgttatgatcacagggaagctggatattcccgaacctcgtcgaccagtggtggaacaagcactctatcaattcagtaatttgcttaacagcaaaagttttcttattaattttattcacacgctagagaaccaacgggagttctctgctcgcgctaaagtttattttgcctcccttctaaccgtagccctgcacggtaagcttgagtactataccgatatcatgcacaccctgttcctcgaactgctggagcagtatgtggtggccaagaaccctaagctgatgcttcgacgctctgagaccgtcgtcgagcggatgctatctaattggatgtccatctgtctctatcaatatctgaaggacagtgccggagaacccctatacaagctcttcaaagcgattaagcaccaggtggagaaagggcctgtcgacgcggtccaaaagaaggccaaatacacactgaacgatacaggactgctgggagacgatgtggagtacgctccactgaccgtaagcgtcatagttcaagatgagggggtcgacgcaatcccagtcaaggtcctaaactgtgataccataagccaggtgaaagaaaagattatcgaccaggtgtaccgaggacagccatgttcctgttggcctcgccctgacagcgtagtcctcgaatggcgaccaggcagcactgcccagatactgtcagacctggaccttacatcccaaagggagggcagatggaaacgcgtgaacaccctgatgcactacaatgtgcgagatggagctaccctgatactgagcaaagtgggcgtttcgcagcagccggaagatagccaacaggacctacccggagagcgtcatgctttgcttgaggaagagaaccgcgtgtggcacctggttcgacctactgatgaagtcgacgaaggcaagagcaagcgcgggtcagtcaaggagaaggaacgaacaaaggcaatcacagagatctatctgacgcgactgctgtccgtgaaaggcactttacaacaattcgtggacaactttttccagtccgtgttagcccccggacatgctgtgccacctgcggtcaaatactttttcgacttcctggacgaacaggcagagaagcataacatccaagacgaggacactattcacatctggaaaaccaactccttacccctgagattctgggtcaatatcctcaagaatcctcatttcatttttgacgtgcatgtacacgaagtagtcgatgcctccctcagcgtcatcgcccagaccttcatggatgcgtgtacaaggactgagcataaattgagccgtgatagccccagcaataagctgctgtatgcaaaggaaatatcgacttataaaaagatggtggaggactactacaaagggatcagacaaatggtccaagtgagtgaccaggacatgaacacgcacctggctgagatcagtagagcacacacggacagtttgaatacccttgtagccctgcaccaattgtaccagtacactcagaagtattatgacgaaattatcaatgccttggaggaagaccctgccgctcagaagatgcaactagcctttcgactccagcagatagccgccgctcttgagaataaggttactgacctttag

SEQ ID NO: 129049 - DNA, 1044 bp, synthetic construct
  misc_feature 1..1044: note = Description of Artificial Sequence: Synthetic coding sequence
  source 1..1044: mol_type = other DNA
atgcatactctcttccttgagctgttggaacaatacgtagtggccaagaacccgaaactgatgctccgtaggagcgagaccgttgtggaacggatgttaagcaactggatgtctatttgtctttatcagtacctcaaagattctgccggcgagccactctataaactgtttaaggctattaaacaccaggttgagaaaggtcctgtggacgcggtgcagaagaaggcaaaatatacactgaacgacaccggcttgctgggcgatgatgtggaatacgctcctctgacggtgtccgtgatcgtgcaggacgaaggggtggacgccattccggtgaaggtcttgaactgcgacaccatctcacaggtcaaggaaaaaattatagatcaggtttaccgaggacaaccatgtagctgtggtcccgggcaaaccgcatggagctggtccggcgtacgggcacctcaacggcgctctgtggggcctggacccgacgtaaccgcgggcggccctgtggaggctcggcaacatccctatgctctacaatgccctggatggtcacacccacacccagtgcagggggggggcctacctgccgccggggggcaacccgcaggacccgcttggagcgcaatgccccctggaggaggggaaccaggcgtagctccaggcgctgccgacagacgaggcggaagaggtcaggtgcaggaacgtcagagggagagagagggagccgatgaaggccaccatcgagacctgccggatgccgccgcactcagccagggccacacggccgccgtgtgcggacagttgcttcccgaaagggcaggagcctggcacgcagtccctccagcagttaaatactttttcgactttctggacgaacaggctgagaagcacaatatccaggacgaggataccattcatatttggaaaacaaatagtctgccgctgcgattttgggtgaacatcctcaaaaacccccactttatctttgacgttcacgtgacccgctggtggacccctaggtgccagagctctcggcgctag

SEQ ID NO: 129050 - DNA, 483 bp, synthetic construct
  misc_feature 1..483: note = Description of Artificial Sequence: Synthetic coding sequence
  source 1..483: mol_type = other DNA
ggacccgacgtgactgcgggtggtcctgtggaggcaaggcagcacccatatgcattgcagtgcccgggctggtcgcacccccacccagttcagggcggaggactcccagccgcggggggacagccagcagggccagcgtggggggcgccttgccctccgggtgggggtgaaccaggtgtggctccaggagcggcagacagacggggcgggcggggccaggtgcaggaaagacaaagggaaagagaaggtgcggacgaagggcatcacagagacctcccagatgctgctgctctttctcaaggtcacaccgccgcagtttgtgggcagctgttgcccgagagagcagggctgggcacacggtgtcacttgcagtcaagcacatcatccaccagctggacatcccggcagagatccacaacatcaagaatgaaaaccccctcgacatcagggcggaggactgcctatagatccgggagtggatag

SEQ ID NO: 129051 - DNA, 1569 bp, synthetic construct
  misc_feature 1..1569: note = Description of Artificial Sequence: Synthetic coding sequence
  source 1..1569: mol_type = other DNA
atggcactgcaactctgggccctcactctgctcgggctgctaggcgctggcgcctcattgaggcctcggaaactggatttcttccgatctgaaaaagagctcaaccatctcgccgtcgacgaagcttcaggcgtggtgtacctcggagctgtgaacgccttgtaccaactagatgccaagctgcagctggagcagcaggtggccacaggaccagccttagacaacaagaaatgcactccaccgattgaggcctcacagtgccacgaagccgagatgacagacaacgtgaatcagttgctgttgctggatccccctaggaaaaggctggtagaatgtggaagtctgtttaaaggcatctgcgctctaagagctctgagcaatatcagtcttaggctgttctacgaggatggatctggagagaagagcttcgtggccagcaacgacgaaggtgttgcaacagttggcttggtgagcagcacagggccaggaggggatcgcgtgctgtttgtgggcaaggggaacgggccccacgataatggcataatagtgagtaccaggctgttagatcgcacagactccagggaggcattcgaagcgtacacagaccatgccacgtacaaggccggatacctgtctacaaacacacagcagttcgttgcagcctttgaagacgggccatacgttttctttgtctttaaccaacaagacaagcaccccgcaaggaacaggacactcctggcccggatgtgccgtgaggaccccaactactacagttacctcgagatggatctgcagtgtcgggacccagacattcacgccgccgccttcggaacctgtttagccgcatccgtagccgctcccggatctggcagggtgttgtacgctgttttttctagagacagtcgctcgtccggtgggcctggtgccggactttgcctgttcccactcgacaaggtgcacgccaagatggaggccaatcgcaacgcatgctataccggcacaagagaagcacgcgatatcttttataaacccttccatggtgacatacagtgtggagggcacgcccccggttcctcgaaaagttttccttgcgggtctgagcatttaccataccctctgggcagtagggatggtctgcggggcacagccgttttgcaacggggaggcctcaaccttactgcagtgacggtcgcagctgaaaacaatcataccgtggcatttcttggcactagcgatggaagaatcctgaaggtgtatcttacccctgacggcacttccagtgagtacgatagcatcttggttgagatcaacaagcgcgtaaagagggatctggtcctttccggtgacctcgggtccctgtatgcaatgactcaggacaaggtgttccgcctgccagttcaagagtgtcttagttatccaacctgcacgcagctcccacccgccgccgagccggcttcaggggttcactgtagggttagctctgacctgaagatgtgtctcactcttccccgttggggtcagctggccagcgcttcagctcacgcgcctgccgccgcgtctatgccttag

SEQ ID NO: 129052 - DNA, 489 bp, synthetic construct
  misc_feature 1..489: note = Description of Artificial Sequence: Synthetic coding sequence
  source 1..489: mol_type = other DNA
atggccctgcagctatgggccttaaccctcttgggcctcctgggtgccggcgctagtctgaggccaaggaaactcgatttctttagatctgaaaaggaattaaatcacttggctgtcgatgaggccagtggagttgtgtatctgggagctgtcaacgccctttaccaattagacgcaaagcttcaactggagcagcaggtagcaaccggtcccgccctggataataagaagtgcacaccaccgatcgaggcctctcagtgccacgaggcagagatgacagataacgttaaccagctcctcctgctagatccgccccgcaaaagactggtagaatgcgggtctctgttcaaagggatttgcgccctgcgcgcactgagcaacatatcgctccgtcttttctatgaagacggatctggggagaaatcttttgtcgccagcaacgacgaaggtgtcgccaccgtgggtctggtatcttcaacaggaccttag

SEQ ID NO: 129053 - DNA, 1434 bp, synthetic construct
  misc_feature 1..1434: note = Description of Artificial Sequence: Synthetic coding sequence
  source 1..1434: mol_type = other DNA
atggccttacagttatgggctctgactctgttaggcctgctgggtgctggtgcaagcctgcgtccccgaaagctggattttttccgtagcgagaaagagttgaatcatctggcagtggacgaagccagtggcgtcgtctatctcggtgccgtgaacgctctgtatcaattggacgcaaagctgcagttggagcagcaggtagctactgggcccgcgttagacaataaaaaatgcactccgccaatcgaagccagccagtgtcatgaggctgagatgaccgacaacgtgaatcaactcttactactggaccctcccagaaagcgccttgtggaatgcggatcccttttcaagggcatttgtgcccttagagcgctgtcgaatatatccctgcgtctgttttacgaggacgggagcggggaaaaaagcttcgttgcttccaacgacgagggggtagccaccgttgggttagtgtctagcacgggccctgggggggacagggtgctctttgtaggcaaaggcaacggccctcatgataacggtatcatcgtcagcacgcgattgctcgaccgtacggatagtcgcgaggctttcgaggcttataccgatcacgcaacctataaggccggctatctgtccacaaacacccagcaattcgtggccgcattcgaggacggtccctatgtgtttttcgtgtttaaccagcaagacaaacacccagcaagaaacaggaccctgctcgccagaatgtgccgtgaggacccaaattactatagctacttggagatggacctccagtgccgggatccagacattcacgctgccgcctttggcacatgcctcgccgccagtgtggccgccccagggtctggaagggttttatacgcagtgttttcgagggacagccggtcgagtggcggtcccggcgcaggtctgtgcttattcccgctcgacaaagttcatgcgaaaatggaagctaatagaaacgcatgttatactgggacacgcgaggcaagggatatcttttacaaaccctttcatggagatatccaatgtgggggtcatgcgcccggatccagtaaatcatttccttgtggatctgaacacctgccgtaccccctgggttccagggacgggctccggggcacagccgtgctgcagcgcggaggactcaatctcactgctgtgaccgtggctgctgagaataatcatactgttgcattcttaggaacatcagatggacggatccttaaagtgtacctgactccagatgggacttcgtcagaatatgatagcattctggtggagattaataagcgcgtcaagcgcgatctcgtcctcagcggcgatctcgggtccctgtatgcaatgacgcaggacaaggtgtttcgcctcccggtccaggaatgtctgagctaccccacatgtactcagtag

SEQ ID NO: 129054 - DNA, 5517 bp, synthetic construct
  misc_feature 1..5517: note = Description of Artificial Sequence: Synthetic coding sequence
  source 1..5517: mol_type = other DNA
atggcactccagctgtgggcgctcacgcttctgggcctgcttggcgcaggggcaagtctcaggcctcgaaagttagattttttccggtctgaaaaggagctcaatcacctcgctgtggacgaggccagtggggtggtctacttgggcgctgtgaacgcgctatatcagctcgacgccaagctacagttagagcagcaggtcgctacaggcccagccttagacaacaaaaaatgcactcctcctatcgaagcctcccagtgtcacgaagctgaaatgactgataacgtgaaccagctcctgcttctagatcctccacgtaagcgactggtggagtgcggctccctgttcaagggtatctgcgcattacgcgcactgtccaacattagcctccgactcttctacgaggacggctctggagaaaagtcctttgttgcctcgaacgatgagggcgtcgcaaccgtcggcctggtgagttctaccggcccgggaggcgacagggttctctttgtgggtaaaggaaacggtcctcacgacaacggcatcattgttagcacgagactgcttgaccgcaccgatagccgggaagcctttgaagcctacactgaccacgcgacttacaaagcgggatatctgtctacaaacacccagcagttcgtggccgcattcgaggacgggccatatgtgttttttgtgtttaatcagcaagacaagcacccagctcggaacagaactctgctggcaagaatgtgccgggaggaccctaattattattcttaccttgagatggacctacagtgccgagacccagacatacatgccgctgcatttggcacctgtctcgcagcctccgtagcggctcccgggtcaggaagggttctgtatgccgtgttctctagagactcacgaagctcaggggggcccggagccggcctttgtctctttcccctggataaggtgcacgccaagatggaagcaaacaggaacgcctgctacaccgggacgagagaggcgagggatatattttataagcccttccacggagatattcagtgcggtggtcacgcacctggttcatcgaagagtttcccatgcggctccgaacacttaccttacccacttggatctcgagacggcctgcgaggtacggccgttctgcaaagaggcggcctcaacctgacagcggtcactgtggctgccgagaacaatcacacggtagcgtttcttgggactagtgatggcaggattctgaaggtttatctgactcccgatgggacctctagtgaatatgacagcattttagtggaaatcaacaaaagagtgaagcgtgacctggtactttctggagatcttggaagcctttacgccatgacccaggacaaagtcttcaggctgcctgttcaagagtgtctatcataccccacttgcactcagtgcagagatagccaggacccctactgcggatggtgcgttgtggagggaagatgcacacggaaagccgagtgtcccagagccgaggaggctagccactggctgtggtctagatccaagtcctgtgtggccgtgacaagcgcccagccacagaacatgtcacgcagagcacagggagaagtccagttgaccgttagtccgcttcctgccttgagcgaggaggacgaactgctgtgcttatttggtgaatcccctcctcaccctgcccgagtggagggagaagccgtgatctgtaattccccaagctcaatcccagtgacaccaccaggccaagatcacgtagcagtaactatccagctcctgttgcgcaggggcaacatttttctcacgtcctatcagtatcccttctacgactgtcgtcaggctatgtcattggaagaaaacctgccttgtatctcttgtgtctccaatcgctggacttgccagtgggatctccgatatcacgagtgccgagaagctagccctaaccccgaagatggcatagttcgggcacatatggaagactcatgtccccagtttttaggaccttcaccgctggtgatccctatgaatcacgagacggacgttaacttccagggcaaaaatttagatactgtgaagggcagttccctccacgtgggcagtgatctgctgaaatttatggagcccgtgaccatgcaagagtcaggtacttttgccttccgaacccccaaactcagccacgacgccaatgaaacgctccccttgcatctgtatgtgaaaagttacggcaaaaatatagactctaaactgcatgtgacactatataattgttccttcggtaggagcgattgctccctgtgccgggccgccaaccccgactataggtgcgcatggtgtggaggtcaaagccggtgtgtgtatgaagctttgtgcaatacgaccagcgagtgcccccctcccgtcatcactaggatccagcctgaaaccggccctctgggtggcggcattcggataactattcttggaagcaatctgggcgtgcaggccggagacatccagagaattagcgtcgccggccggaactgctccttccagcccgaacgttattccgtgagcaccaggatagtgtgtgtgattgaggccgcagagacaccctttactggtggagtggaggtcgacgtgtttggaaaactaggccggtcaccccccaacgtgcagtttacattccagcagccgaagcctcttagcgtcgagcctcagcagggaccccaggcggggggaaccacactcacgatccacgggactcacttggatacaggatcccaggaagatgtgcgcgtcacactgaatggcgtgccctgtaaggtgacaaaatttggcgcccaactgcagtgcgtaaccggtccacaggcaactaggggccagatgcttctggaagttagctatggggggtcacccgtgcccaatccaggtatattctttacctacagagaaaatccggtactgagagcatttgagccccttagaagtttcgctagcggaggcagatcgattaacgtgaccggtcagggtttcagcctcattcagaggtttgctatggttgttattgctgagcctttacagagttggcagcctcccagggaagctgaatcactgcagccgatgactgtcgtgggcaccgactacgtgtttcacaacgatacaaaggtggtctttctgtcaccggcggtgcccgaagaacccgaagcatataatctgaccgtgttgattgaaatggatggtcaccgtgctctcctcagaactgaagcaggagcctttgagtatgttcccgatccaaccttcgaaaactttactgggggagtcaagaagcaggtgaataagctcatccacgcgcggggaaccaacttgaataaggcgatgaccttgcaggaggcagaggccttcgtgggagccgagcggtgtactatgaaaacgctgaccgagactgatctctactgcgagcccccagaggtgcagccaccccccaaacggcgccagaaacgcgatacaactcataaccttcccgaattcatcgttaagtttggcagtcgcgagtgggtattgggacgggttgaatatgacactagggttagtgatgtgccgctctcactgatactgcccctggttatagttccgatggtcgttgttattgctgtgtcagtttactgttattggcgcaagtcccagcaggcagaacgcgagtacgagaagataaagtcccagttggaggggctggaggagtcagtgcgagatagatgtaagaaagaatttactgatctgatgattgaaatggaggatcagactaatgatgttcacgaagcgggcattccagttctcgactataaaacatataccgaccgggttttctttctcccatcaaaggatggcgacaaggatgttatgattacaggaaaattagatattccagaacctcggagaccagtcgtcgagcaggctctctaccaattttcaaatttgctcaactctaagagttttctcatcaactttatccataccctggaaaatcagcgcgagttctcagcaagggccaaagtgtactttgcaagcctgctaaccgtggcccttcatggtaagctggagtactacactgacatcatgcacactctgttcctggaactgctggaacagtatgtggtggccaagaaccctaaattaatgctgcggcgaagtgaaaccgttgtagaaagaatgctgagtaattggatgtctatctgtttataccaatacctgaaggatagtgcaggggaacccctatacaaactgttcaaagccattaaacaccaggtggaaaagggacccgtggacgcagtgcaaaagaaagccaagtacacactgaacgacaccggacttttgggggacgatgtcgaatatgctccgctgacagtttctgtcatcgtgcaggacgagggtgtagatgccataccagtgaaggtccttaactgcgatacaataagtcaggtaaaagagaagatcatcgatcaagtgtatcgcggccaaccctgctcttgctggcctcggcctgacagtgtcgtgcttgaatggagacccgggtcgactgcacagatcttgagcgatctggatttgacaagccagcgagaagggagatggaagagagttaacaccttgatgcattacaatgttagggatggtgcaaccctgatcctgtctaaagtgggagtgtctcagcaacctgaagactctcagcaagacttgcctggtgaacggcatgcgcttttagaagaggagaatcgcgtgtggcacctagtacgtccaaccgatgaggtggatgaaggaaaaagcaagaggggaagcgtgaaggaaaaagaacgtaccaaagccatcacagagatctatcttaccaggctcctgtcagtgaaaggtaccctacagcagttcgtagacaactttttccagtcagtgctcgctcccgggcacgccgtaccacctgctgtgaaatacttctttgacttccttgatgagcaggccgaaaaacataatatccaggatgaagacactattcacatctggaagaccaattctctcccactccgtttttgggtaaacatcttaaagaatcctcattttatattcgacgtgcacgtgcacgaagttgtcgatgcctctctttccgttattgcacagaccttcatggacgcctgcacccgcacggagcacaaattatcaagagattcgccttcaaacaagctgttgtacgccaaagagatctcaacgtacaaaaagatggtcgaggattactacaagggaatcagacagatggtgcaggtgagtgatcaggacatgaacacacacctcgctgaaattagccgcgcccataccgacagtcttaacaccctggtggctctccatcagttgtatcagtatacccagaaatactacgatgagatcattaacgccctggaagaagaccccgccgctcagaaaatgcaattggcattccggctacaacaaattgctgccgccttggaaaataaagttacagacctgtag

SEQ ID NO: 129055 - DNA, 5730 bp, synthetic construct
  misc_feature 1..5730: note = Description of Artificial Sequence: Synthetic coding sequence
  source 1..5730: mol_type = other DNA
atgtgtcacgcagcacaagaaactcctctcctccatcacttcatggcccccgttatggcaagatggcctccctttggtctgtgtctgctactgctgctcctttcgccgccccccctgcccctgaccggcgcacataggttttcagctccgaacacgactctcaatcacctggccctcgcccccggtcgaggaaccctgtatgtcggggccgtgaaccggttgtttcagttatcacctgagctccagctagaggcagttgctgtgactggtcctgtgattgattctcccgattgcgtcccatttagagacccagccgagtgtccacaggctcagctgactgataacgctaatcaattgctcctggtatctagccgagcccaagagttagtagcatgcggacaggttcggcagggtgtttgtgaaacaaggaggcttggagatgtcgcagaggtgctgtaccaggctgaggaccccggcgatggccagtttgtggcagcgaatactcctggggtggcaactgttggcttagtggtcccgctgcctggccgagacctattactcgttgcccgcgggcttgcgggcaaattgtctgcaggggtccccccgcttgcaataaggcaattggccggcagccagccattttcatccgagggactggggcggttggtagtgggcgatttcagcgattataataatagctatgtaggagcatttgccgatgccaggtccgcatatttcgtgttcagaaggagaggggcccgtgcacaggccgagtaccggagttacgtggcccgtgtgtgtctgggtgacaccaacctttattcttatgtcgaggtgccactggcctgtcaggggcaggggctgatccaggcggcttttctcgctcccgggaccctccttggcgtattcgctgcaggcccacgcggtacccaggctgcactgtgcgccttccccatggttgagctcggggcctctatggagcaagccagaaggctttgctacaccgccggcggtcgcggtcctagcggtgccgaggaagcaactgtcgaatatggtgtcacttctagatgcgtgaccctccctttggattcacccgagtcctacccgtgcggcgatgagcatacaccttcccctattgcaggaaggcagccactggaagtgcagcccctgctgaagctgggccagcccgtgagtgccgtggccgctctgcaggccgacggacacatgattgctttccttggtgacacacagggacaactatataaggtgttcctccacgggagccagggtcaagtctaccacagccagcaggtaggaccccccgggtctgccatctcccccgatctgctgctggactcttccgggagtcacctgtacgtgctcacagctcatcaggtcgacagaatccctgtagccgcttgtccccaatttcccgactgcgctagttgtctgcaggcacaggaccccctgtgtgggtggtgcgtactgcagggcaggtgtaccaggaagggtcagtgcggacgcgcgggacagttgaaccagtggctgtggtcctacgaggaagattctcattgtctgcatattcaaagtctgctccccggccaccacccccgccaggaacaagggcaagttaccctcagtgtgcccagattgcccatcctcgatgccgatgagtacttccactgcgcattcggggactatgattccctggcacacgttgaaggaccgcatgtcgcatgtgtgaccccgccccaagaccaggtgcccctcaatcctcccggaaccgatcatgtgacagtgcctctggccctcatgtttgaggatgtgaccgtggccgcaacaaacttcagtttctacgactgtagtgctgtgcaggccctagaggccgcggcaccctgtagagcctgcgtaggatccatctggcgctgtcattggtgcccccagagcagccactgcgtgtacggcgaacactgcccagaaggtgagagaaccatctactctgcacaggaagtggacatccaggttaggggtcctggtgcctgcccccaagtcgagggattggccggaccacatctggtgcctgtcggatgggagagccaccttgccctacgagtgaggaatctgcagcacttcagaggcctgccagccagcttccactgctggctggaactgcctggcgagctacgcggtcttcccgccactctcgaagaaaccgctggagactctgggctgatccattgtcaggcccaccagttttatccgtccatgtctcaacgcgagttaccagtgcccatctatgtaacacagggtgaagcacagcgtttggataatacccatgccctatacgttattctgtacgactgcgcgatgggacatcctgattgttcccattgccaggctgccaaccgctcactcggctgcttgtggtgtgcagacggccagcccgcatgtagatacggacctctgtgtccacccggcgccgtggagcttctttgtccagctccaagtatcgatgccgtcgaacccctgacagggcctcctgagggcggtttggctctcaccattttgggtagcaatctgggacgagcatttgcagacgtgcagtacgcggtctctgtggcatcaagaccatgtaatccggaaccaagtctctacaggaccagtgccaggatcgtgtgcgtgaccagtcctgccccaaacggcactacagggccagtacgtgttgcaatcaagtcccaaccgccagggattagctcacagcacttcacctaccaggaccccgttttgctttcgctgagtcctagatggggacctcaggccggaggcacccagttaacaatccgaggccagcacctccagactggtgggaatacaagcgcattcgtgggcgggcagccgtgtcccatcctcgagcctgtctgtccggaagccatcgtctgcagaaccaggcctcaggcagccccaggggaagccgccgttttggtggtattcgggcacgcgcaacgtactctgctcgcaagcccattcaggtatacagccaacccacagttggtggccgctgagccatctgcatcttttcgcgggggggggcgattgattcgcgttaggggcaccggtctggacgtggtccagcgtccattgctgagtgtctggttggaggccgacgcagaggtacaggcttctagggcccagcctcaggatccacagccaaggcggtcttgcggtgcaccagccgcagatcctcaggcctgcatccagctgggcggcgggttgcttcagtgttccacagtgtgctccgttaactcatcctccctgctgctgtgtcgttcccctgctgtccctgatcgagcacacccacagagagtgttctttacactcgataacgtgcaggtggacttcgcctctgctagtggaggccaaggcttcctgtaccagcctaatccccgcctggcgcccctgtcccgggaggggcctgcgcgaccctaccgcctgaagccggggcatgtgctagatgtggagggcgaagggctgaatctgggaatcagtaaagaagaggtgagagttcacattggaagaggagaatgcttagtgaagactctgacgcgaacccatctgtattgcgagccccctgctcatgcgccacagcctgccaatggatccggtctccctcaattcgtcgttcagatgggaaacgtgcagctggctttgggccccgtgcagtatgaagctgagcccccactgagcgcctttccggtggaggctcaggctggagtgggaatgggcgctgccgttcttatagccgcggtgttacttttgacgcttatgtatcggcacaagtccaagcaggccctgagggattaccagaaagtcttggtgcagctcgaaagcttggagaccggagttggagatcagtgtcgtaaagagtttacagatttaatgaccgagatgactgacttgagtagtgaccttgaaggctctggcataccttttctagattatcggacatacgcggagcgtgcctttttcccaggacacggtgggtgcccactgcagccaaagcctgaagggcctggggaagacggacattgtgctacggtgagacagggtctgacccaattatctaacctgctaaattctaagctgttcttactaacgcttattcatacgttagaggaacagccatctttctcacagcgagacagatgccatgtcgcctccttgctgtccctcgccctgcacggcaagctggagtatctgacagacatcatgcgcacactgctgggagacttagccgcgcactatgtccatcgtaatcccaagctgatgctgaggcgtaccgagacaatggttgagaagctcctgactaactggctgtctatttgcttgtacgctttcttgagggaggttgcgggcgaacccctgtatatgttgttcagagccatccagtatcaagtcgataaaggacctgtggatgccgtcacaggcaaggccaaaagaactctgaatgactcgaggctcctccgggaggatgtggaattccagcctctgactttgatggtgttggtgggtcccggcgctggaggagcagccggctcgagtgaaatgcagcgcgttcccgctcgggtgcttgacaccgataccattacccaggttaaagaaaaagttctcgaccaggtgtacaaggggactcctttttcccaacgacccagtgtgcatgcattggacctggaatggaggtcagggctggcagggcacctaacactgtccgacgaggacctaaccagcgttacacagaaccactggaagaggttgaacactctccaacattataaggtccctgacggggcaactgtggggctcgtgccgcaattgcaccgcgggtccactatctctcagtccctggcccagcggtgccccttgggggagaacattcccacactggaggatggagaggagggaggagtgtgcctctggcatttggtgaaggcaaccgaggaacccgagggcgccaaggttagatgttcttctttgagggagcgcgagcccgctcgggctaaagcaattccagaaatctacctaactcgactgctctcaatgaagggcaccctgcagaaatttgtggatgacacctttcaagctatcttgtcggttaataggccaattccgatcgcagtcaagtacctgttcgacctattggacgagctggcagagaaacacggcatagaagatcctggcactctccatatctggaaaaccaactctctgctgctgcggttctgggtgaacgccctcaaaaacccccaactcatatttgatgtgcgggtttcggataacgtggacgcaattctagccgtgatcgctcagacgtttatcgacagctgcaccacctctgagcataaagtcggaagagactcacccgtcaataaacttctgtacgcacgggagatcccacgttacaaacagatggttgagcggtattatgcagacatccgacagtccagcccggcgagctatcaggaaatgaacagtgccttagccgagctgagcggcaactatacctccgcaccgcattgccttgaagcgttacaggagctctataaccatatccataggtactatgatcagataattagcgcgctggaggaagatcccgtgggacaaaagcttcaactcgcatgcagactgcagcaggtagccgcactggttgagaacaaagtgaccgatctttag

SEQ ID NO: 129056 - DNA, 777 bp, synthetic construct
  misc_feature 1..777: note = Description of Artificial Sequence: Synthetic coding sequence
  source 1..777: mol_type = other DNA
taaagtttagagacgggggtaggagaccagtgtaggaaggagtttaccgatctgatgacggagatgactgacctgtccagcgatctggaaggaagcggcatacccttcctcgattacagaacatacgcagagcgagccttctttccagggcacggcggttgtcccctccagccaaaacccgaaggccccggtgaggatggacattgtgctacggtccgccagggcttaacacagctgtcaaatctgcttaattctaagttgttcctgctgactctcatacatactttggaagagcaaccatccttctcccagcgtgatagatgccacgtggcctcactgttgtctctggctcttcacggaaagcttgagtatcttactgacatcatgcgcaccctgttgggtgatctagctgctcattacgtacatcggaatcctaaacttatgttacggagaacagagacaatggttgaaaagctgttgacgaactggcttagtatctgcttatacgctttcctcagggaggtcgcaggagagccactttacatgctctttagggcgatccagtaccaggtagataagggtccagtggacgccgtcaccgaatggcgctccggcctcgcgggacacctgacactgagcgatgaagacttaaccagtgtgactcaaaatcactggaagcgattgaatacattacaacactacaaggtccccgatggcgcgactgttggccttgtgccccagttgcatagaggttctactatttcccagtcgctatag

SEQ ID NO: 129057 - DNA, 531 bp, synthetic construct
  misc_feature 1..531: note = Description of Artificial Sequence: Synthetic coding sequence
  source 1..531: mol_type = other DNA
taggcctcacaggggaccctgcagaagtttgtggatgacacatttcaggcgattctgtctgtgaatcgacctattcccatcgccgttaagtatctctttgacttgctcgatgagctggccgaaaagcacgggatagaggatcctggtactttgcacatctggaagaccaactctctgctcctgagattctgggtgaacgccctgaaaaatcctcaattaatctttgacgtgcgcgtttcagacaatgttgacgcaatactggcagttatcgcccaaacgttcatcgattcctgcaccactagcgagcacaaggtagggcgggtcagagccgtccccgcagcagcagccgggcgggggctaagacgaaagggcctatggggaaagccccgcggtctgtgcacagaactctgggtggggtcaggctccattatgggtgcacctagtcctccctccagttgtctggcgccccccctgccgcccgagcaggactccccggttaataaactgctgtacgcacgcgagatcccatag

SEQ ID NO: 129058 - DNA, 492 bp, synthetic construct
  misc_feature 1..492: note = Description of Artificial Sequence: Synthetic coding sequence
  source 1..492: mol_type = other DNA
tagaaaagaactctgaacgacagcaggctcctgcgggaagacgtcgaattccaacctctgaccctgatggtccttgtggggccaggagccggcggggcagcaggttcaagtgagatgcaaagagtccctgcgagagtgctggacacagacaccataacacaggtgaaggagaaggtgctcgatcaagtgtacaaaggcacacctttctcacagcgcccatctgtacatgctctggacctggagtggaggtctggcctggcgggacacttaaccttatcagacgaagacctgacgtcagtaacacagaatcattggaaacgactaaatactctgcaacactacaaagtgccagatggtgctactgttggattggttccacagttgcaccgcggcagtacgatctcccaaagccttgctcagcggtgcccgctgggagagtcggaatccctaggacctgacctggggcccctggaaagtagactcgggcgatag

SEQ ID NO: 129059 - DNA, 2967 bp, synthetic construct
  misc_feature 1..2967: note = Description of Artificial Sequence: Synthetic coding sequence
  source 1..2967: mol_type = other DNA
atgtgccatgccgctcaagagacgccactgctgcaccatttcatggactctcctgaaagctacccttgcggagacgaacataccccctctcctattgccggaaggcaaccactggaggtgcagcctttactgaaacttggccagcctgtttctgcagttgccgccctgcaggctgacgggcatatgattgccttcctgggggatacccagggccagttatacaaggtggaccgtatccctgtcgcggcatgcccccaatttccagactgcgccagctgtctgcaggcacaggaccccctgtgtggatggtgtgtgttgcagggacgatgtactaggaaaggacagtgtggcagggccggtcagcttaatcagtggctgtggagttatgaagaagactcacactgcctgcatatccagtcactcctgcccggccatcacccacggcaggaacaaggtcaggtgacgttaagcgtgccacggttaccgattttggacgccgatgagtatttccattgtgctttcggtgattacgactccctggcgcacgttgagggcccccatgttgcttgcgtgacacccccccaagaccaggtgccgttaaacccacccggcacagatcatgtaacagtgcctttggctctgatgttcgaagacgtcactgttgctgctactaacttttccttttatgactgtagcgccgtgcaggccctcgaagccgcggctccatgtagagcttgtgtgggctcgatctggaggtgccattggtgtccgcagagcagccactgtgtttacggggaacattgtccagagggcgaacggaccatttattctgctcaggaggtggacattcaagtgcgtggacccggggcgtgccctcaagtagaagggctggctggtcctcatttagtccctgtgggctgggagtctcacctggcactgcgagtgcggaacctgcaacatttccgaggactaccagcatccttccattgttggctggaactgccaggtgagctgagaggcctgcccgccacgctggaggagactgccggggactctggcctgattcactgccaggcacaccagttttaccctagtatgtcccagagggaacttcctgtgcccatctatgtaacacagggtgaagcccaacggctcgacaacacgcatgccctttacgtcatactctacgactgtgctatggggcaccccgattgtagccactgtcaggccgcgaatagaagcctcggatgcctgtggtgcgcggacggccaaccagcgtgtcggtacggacccctctgtccaccgggtgccgtcgagctgctctgcccggcccctagcatcgatgccgtcgagccactaacaggccctcccgaagggggactggctcttaccatccttgggtccaacctcggtcgggcttttgccgacgtgcaatacgccgtttccgttgcaagcagaccatgtaaccccgagccctccttataccgtaccagcgcacgtattgtgtgtgtcacgagccctgcaccaaatgggaccaccggccccgtgcgcgtcgctattaaaagccaacctcccggcatctcttcccagcacttcacctatcaggaccccgtcctccttagtctgagccctcgctgggggcctcaggccggaggcacgcagctaactataagagggcagcacttacagaccggcggcaatacatccgccttcgttggcggacagccttgccccattctggaacctgtgtgtccggaggctattgtgtgcagaaccagaccgcaggcggcaccaggcgaggctgccgtgctcgttgtctttggccacgctcagcgcacactgcttgcatcgccatttagatatactgccaacccccagctcgtagctgcagagccttcagcgtcgttcaggggcggcggcagattgatcagagtcaggggtaccggccttgacgtagttcagcgtccattgcttagcgtctggcttgaggcagacgccgaggtccaggcatcaagagcccaaccacaggacccccagcctcgacggtcctgcggcgccccagctgcagaccctcaggcctgtatccaactcgggggagggctgctgcagtgttccactgtttgttccgtgaatagtagctctctgctgctatgcaggagcccagccgtgcctgacagggctcacccacagagagttttttttactttggataacgttcaggtggacttcgcgtccgcatctggcggacagggcttcctctatcaaccaaacccgaggttagctcctctatcacgggaaggccccgctagaccgtacagactgaaacctggccacgtgctggatgtcgagggggaagggctgaacctggggatctctaaagaggaggtgagagtgcacatcggaagaggagagtgtctggttaagaccctgacaagaactcacttgtactgtgagccccctgcacatgcccctcaaccagcgaatgggagcgggctgccccagttcgtggtccaaatgggtaatgttcagctggccctcggacccgtccagtacgaggctgagccacccttgagcgctttccctgtcgaagcccaggccggtgtgggcatgggtgctgcagttttgatagccgctgtgctgctcctgaccctgatgtacaggcataagtccaaacaagctctgagagactatcaaaaggtgctggtccaactggaaagcctggaaacgggagtcggagatcaatgtcgcaaagaattcaccggcggatgtggaggtggaggcacaggctacccccggggactgaacagtcacttgggggcatcttggccaagacggccacacgatggggacgataggccgcaacagagacctggtggccagcgcgatccactcccaggactgccccatttaagaagggcacggcttctgccctggccctggaggctaccagccgccgctcaggcctag

SEQ ID NO: 129060 - DNA, 675 bp, synthetic construct
  misc_feature 1..675: note = Description of Artificial Sequence: Synthetic coding sequence
  source 1..675: mol_type = other DNA
atgtgccacgctgcccaggagacccctcttctgcaccatttcatggtggacaggattcccgttgccgcgtgtccacagtttcccgattgcgcaagttgccttcaggcacaggatcctctctgtggctggtgtgtcctgcagggccgctgtacaaggaagggccaatgtgggagagctgggcaactcaatcagtggctttggtcctacgaggaagactcacattgtttacacatccagagtctcttacctgggcatcacccccgccaagagcagggacaggttacactgtccgtcccaaggttacccatactggatgccgatgaatacttccactgcgctttcggggactacgattcattagcacatgtggaaggcccgcacgtggcatgcgtgactcctccacaggatcaggtgcctctgaatccaccagggacggaccacgttaccgtccctctcgccctcatgttcgaggacgttactgtcgctgccactaatttttccttttatgactgctcggccgttcaggctctcgaagccgcagcccctgcttgtctgccgccaagcactgccggatggtcctgcctggagaatttcggtgactgcaggccaccgtggaggcgtcagcagggcatccaagctagcagcacggctcgcccgacaaggtcatccccatag

SEQ ID NO: 129061 - DNA, 4689 bp, synthetic construct
  misc_feature 1..4689: note = Description of Artificial Sequence: Synthetic coding sequence
  source 1..4689: mol_type = other DNA
atgtgccatgctgctcaggaaacgcccctgttgcatcactttatggactctcccgagtcgtacccttgcggcgacgaacatacccctagccccatcgccgggcgacagcccctcgaggtgcagcccttactgaagttgggacagcctgtcagcgcagtcgccgccctgcaggccgacggtcacatgatcgctttcctcggcgatacgcaaggtcagctgtataaggttttcctacacggttcccaaggccaggtctaccacagccagcaggtcggaccgccagggtccgcaatcagccccgatctgttgttagactcttcaggtagccatctgtacgtacttacagcgcaccaggtggaccgtatccccgttgctgcttgccctcagtttccggattgtgccagttgcctgcaggcccaggaccctctctgtggttggtgtgtgctgcaaggacgctgtacacggaagggacagtgtggacgggcagggcaattgaatcagtggctgtggagctatgaggaggattctcactgtctgcacatacagagcctcctgcctggccatcaccctagacaagagcaggggcaggtgactctatccgtgccacggttgcccattctggacgctgatgaatactttcattgcgctttcggtgattatgactcgctggctcatgtggagggtccccatgtggcctgcgtcacccccccacaggaccaagtgccactgaaccctcctgggacggaccatgttacagtgcccctggccctgatgttcgaggacgtaacggtggctgccactaatttttcgttttatgactgtagcgctgtgcaggccctggaagccgcagctccctgtcgcgcttgtgtgggaagtatatggcgttgtcattggtgccctcagtcaagccattgcgtctatggcgaacactgtccagagggggagcgcaccatttactccgcacaggaggtggatatccaggtcagggggcccggagcctgccctcaggtggaaggtcttgcagggccccatctagtgcccgtgggctgggagagccaccttgcactgcgagtccgaaatctccagcatttcagaggcctgcctgcgagctttcattgttggctggaattgcccggagagttgaggggtctccctgccacgttggaagaaactgcaggagacagcggtctgattcactgccaagcgcaccagttttacccttctatgtctcagcgcgagctgcccgttccgatttatgtaacccagggggaagctcagcgcctggataatacacacgcattgtacgtgatactgtatgattgcgctatgggccaccccgattgcagccactgccaagccgccaaccggtctttggggtgcctctggtgcgcggatgggcagccagcttgccggtatggccccctatgcccccctggtgccgtggagctcctgtgcccggctcccagcatagacgccgttgaaccactcacgggaccccccgagggcggcctggcactgactattctcggttctaacctaggtcgcgctttcgctgacgtgcagtatgccgtgtcagttgcctccaggccatgcaacccagaaccatcactctaccgaacgtctgccaggatcgtgtgtgtcacatcccccgcacccaacggtaccacagggcctgttagggtagctattaagtcccagcctcctggcatcagttcccagcacttcacctaccaagaccccgtgctactctcgctgtccccaaggtggggcccccaggctggaggaacccaacttaccattaggggccagcacctccagactggcggaaatacctccgcctttgttggaggacagccatgcccaatactggaacccgtctgccctgaggccatcgtctgtcggacgcggcctcaggccgcaccgggagaggcggctgtcttggtagtgtttggacatgcacagcgcacattgctggcctccccctttaggtacactgcgaatcctcagctagtggcggccgaaccatcagcttcattcagagggggcggcagactgatcagagttcggggaacaggacttgatgttgtccagcgcccacttctgagtgtgtggctcgaggccgatgccgaagtacaggcctctagggctcagcctcaggaccctcaacctaggcggtcttgtggagctccagcagcagacccccaggcctgcatacagctgggcggaggcctgttgcagtgctcaaccgtctgttccgtgaactctagctctctgctgctgtgcaggtctcccgcagtccccgaccgtgctcacccccagagggtgttctttactcttgacaacgtgcaagtggactttgcaagtgcctcaggtggtcagggcttcctgtaccagccgaacccaagattggctcccttatcaagggaggggcctgcccgaccttatcgtcttaaaccaggacatgtgttggatgtggagggagagggcctgaatctgggtataagtaaggaagaggtgcgtgtgcatatcggacgaggagagtgcctcgtaaagactctgacccggacgcatctctattgcgagccaccggcacatgctccgcagccagctaatgggagtggcctaccccaattcgtcgtgcagatgggcaatgtgcagctggcgttggggccggtacaatacgaagccgaaccccctttgagcgcattccctgtggaagcccaggcaggcgtggggatgggggcagccgtgctgatcgctgctgtcctgctactcactctgatgtatagacataaatcaaaacaggcactgcgcgattatcaaaaagtcctggtgcagttggagtctcttgagaccggagtgggcgaccaatgccgcaaggagttcacggacctgatgacagagatgactgacctgtccagcgacctggagggctcaggaattccttttctcgattacagaacttacgccgagagagcctttttccccggtcacggggggtgcccattgcaaccaaaaccagaggggccaggagaggatggccattgcgccacagtcagacagggtctaacacagctgagcaacctgcttaattctaagctgttccttctcactctgattcatactttggaggagcaaccgtcatttagtcagcgagacagatgtcatgtagcctcactgctgtctctcgctctgcacggcaagttggaatacctgacagacatcatgaggactttactcggagatctggccgcacactatgtgcacaggaaccccaagctaatgctgcgccggacagaaacaatggttgaaaaactgctgactaactggctgtctatctgcctgtatgcctttctgagggaggtggcaggggagcctctctatatgctctttagagcgatccagtaccaggtagacaaaggtccagtggatgcagtgactggaaaagctaaacggacacttaatgattcccgcttgctcagggaggacgtcgagttccaacccctgactctaatggttctcgtaggacctggggccgggggcgccgctggatcctccgaaatgcagagggtcccagcccgggtgcttgacaccgatacgatcactcaagtaaaagaaaaagtcctggaccaggtgtacaaaggtacaccgttctcccagcgcccctctgtgcatgcgcttgatctcgagtggagatctggattagccgggcatctgacgctatctgacgaggatttaacttcagtcacccagaaccactggaaacggttgaatacactgcagcactacaaagttccggatggggccaccgtcggacttgtaccgcagctccatcgagggagtacgatcagccagtcccttgctcagcggtgcccgttaggagaaaacatcccaaccttggaagacggcgaggaaggaggggtgtgtctgtggcacctggtgaaagctacagaagaacctgaaggcgcaaaggtgagatgcagttccctccgagaacgtgagcccgcccgggccaaggcaatcccagaaatatacttaacaagactgctctcaatgaaaggcacccttcagaagtttgtagacgacacatttcaggctattctgtcggtcaaccgccccattccaatcgccgttaagtatctcttcgacctcctcgatgaactggcagagaagcatggaatcgaggacccaggcacactgcacatttggaagactaattcgttactactccgcttctgggttaacgccttgaagaacccacagcttatcttcgatgtgagagtgtcagacaatgtggacgcaattcttgctgttattgcgcagaccttcatagattcctgtactacctctgaacacaaggtagggcgcgactcacctgttaataagcttttgtacgcccgggagattccccgctacaagcagatggtagaacgatactacgcagatatacgacagagcagtccagcaagctaccaagaaatgaactccgccttggcagagctgagcggaaactatacaagcgctcctcactgcttagaagcattacaagagctctacaaccatattcacaggtattacgaccagattatttccgccctggaagaagatcccgtgggccagaaacttcaacttgcctgcagacttcagcaggtggccgctcttgtagagaacaaggtaacggacctctag

SEQ ID NO: 129062 - DNA, 5799 bp, synthetic construct
  misc_feature 1..5799: note = Description of Artificial Sequence: Synthetic coding sequence
  source 1..5799: mol_type = other DNA
atggaactgactccagctagtagtctgacatgcagtctgctttctccgcgactgcccgggtcctttccccagctcaggcgggtgccaccttgctcaaggccctggcttcccaaggctcccgtgatggcccgctggcccccattcggcctgtgcctgttgcttttgctgctttcgcccccccccctgccactgaccggggcccacagattcagcgcccctaacacgactctgaaccacctggcactcgctccaggtagggggactttgtacgtgggcgccgtcaatcgactgttccaactctccccagagctacagctcgaagccgtggcggtaacggggccagtgatcgactctcccgactgcgtcccgtttcgggacccagcggagtgcccgcaggctcagctgaccgataacgccaatcaattgctcctcgtctctagcagagcccaggagctagtcgcttgtggccaggtcaggcaaggagtctgcgagactagacgcctgggggacgtagctgaagttctataccaggccgaagacccaggcgacggccagttcgtggccgctaacacacccggtgtggccacagtcggcctcgtggtccccctgccaggccgcgatctgctcctcgtggctcgggggctggcaggaaagctctctgctggtgttccacccctcgcaatccgtcagctcgctggaagtcagcctttctcaagcgagggcttaggtaggctcgtcgtgggcgactttagcgattataataacagctatgtgggcgctttcgctgatgcccggtccgcttatttcgtcttccgtcgaaggggcgccagggcccaggccgaatatcgctcttatgtagctagggtgtgccttggggacactaacctgtacagctacgtcgaagtccccctggcctgtcagggccagggattgattcaagccgcatttctcgctccgggcactctgctcggcgtctttgctgcgggcccccgtgggactcaggccgccttatgtgcctttcctatggttgaactgggcgcctccatggaacaggctaggcgcttatgttacactgcagggggacgtgggccttctggcgccgaagaggcaacagtggagtatggggtgactagtcgatgcgtgacgctgccgctcgatagtccagagtcttacccttgcggtgatgagcacacgccaagtcctatcgctgggagacagcctcttgaggtgcagcccttgctcaagctcgggcagccggttagtgccgtggcggcactgcaagccgacggacacatgatcgccttcctcggcgatacccagggccaactgtataaagtattcctgcatggcagccaaggtcaagtctatcatagtcagcaagtgggcccgccgggtagcgctatttcgcctgatcttttactggactcttccggaagccatctctacgtgctgactgcacaccaagtggataggatccccgtggctgcctgcccgcaattccctgactgtgcctcatgtctacaggcccaggatcctctatgtggctggtgtgtgctgcaagggagatgcacccgaaagggtcaatgcgggagagccggccagcttaaccagtggttatggtcctacgaagaggacagtcactgcctgcatattcagtcactactacccggacatcacccccgccaggaacagggacaggtcaccttaagcgtgccaaggctgcctattcttgatgcggatgagtacttccattgcgccttcggcgactatgacagtttagcccacgttgagggcccgcatgttgcttgtgtgactcctccacaggatcaggtgccattgaatccgccagggacggatcacgtcaccgtgcccctggcactgatgttcgaagatgtaacagtggccgctacaaacttctcattctacgactgttccgctgtccaagcgctggaggctgctgccccttgccgagcctgcgtgggaagcatctggcgctgccactggtgtccacagtcctcccactgcgtttatggcgagcactgccctgagggcgagcgcactatctattccgcgcaagaagtggatattcaggttcggggcccaggagcctgtccccaggtcgaaggtcttgcaggcccccacctggtgcccgtggggtgggagtctcatctggccttacgggtcagaaacttgcagcatttccggggcctccctgcgtccttccattgctggctcgaactgcccggggagctgagaggcctgcccgccacgctggaagagactgccggagatagcggcctgatccattgtcaagcccatcagttctacccctcaatgagccagcgcgagctgcctgtccccatatacgtcacccagggggaggcccaaaggctcgataacacccacgctctgtacgtcatcctgtacgactgtgccatgggccacccagactgctcccattgccaagctgcaaatcggtcacttggatgcctgtggtgcgccgacggccagccagcttgtagatacggcccactctgcccacctggagctgtcgaactcctctgtccggctccaagcatagacgccgtcgagcccttaactgggcctcccgagggtggcctggcactgactatcctagggtcaaatctcggacgggcattcgcagatgtgcagtacgcagtgtcagtcgcgagtcgcccttgtaacccagaaccatctctttatcgaaccagcgcaagaattgtgtgcgtgacctctcccgccccaaacggtacaacaggtcctgtgagggtggccatcaagtcacagcctccaggaatcagcagtcaacacttcacctatcaggatcccgtccttctgtccctgtctccccgctggggtccccaagcaggtggcacacaacttaccatccggggccagcatctgcaaacaggcgggaataccagcgcgtttgttggagggcaaccttgtcctatcctggagcccgtctgtcccgaagcaatcgtctgccgaacacgaccccaagcagcgcccggagaggctgccgtactggtagtgttcgggcatgcccaacgcacattgctggccagccctttcagatatacagctaacccccagctcgtggcagccgagcctagcgcctcctttcggggcggtgggcggttgataagagtcagagggactggactggatgtggtacaaaggccgctgctgagcgtctggcttgaggccgacgctgaggtgcaagctagtcgagcccaaccccaggatccccagccgcgccggtcttgtggggcccctgctgcagaccctcaggcatgtatccaactggggggcggactattacagtgctcgaccgtttgctctgtgaacagttcgtccctgcttttatgtaggagtcctgccgtccctgaccgcgcacatccacaacgagtcttttttacattggacaatgtgcaggtcgacttcgctagcgcttccggcgggcaggggttcctctatcagcccaaccctagactcgccccacttagtcgcgagggacctgctcggccgtatagactgaagcccggccacgtccttgacgtggagggcgagggccttaacctgggcatatcaaaggaggaggtgagagtgcatattggtcgaggcgagtgcttggtgaagaccctcaccaggacgcacctctattgtgaacccccagcccacgctccccagcccgcaaacggcagcggactgcctcagttcgtggtgcagatgggcaatgtgcagctggcccttggtcctgttcaatatgaagccgaacctcccttatcggcgtttccagtggaggctcaggccggcgtagggatgggagccgccgtactgatcgcagcagttttattgttgaccttaatgtacaggcataaatctaagcaagcattaagagattaccaaaaagttcttgtgcagctcgaatctttggaaaccggcgtgggagaccagtgcaggaaagagttcacagatttaatgaccgaaatgacagatctttcgagcgatttagaaggatccggtatcccctttctggactatcgtacatacgcagaacgtgcatttttcccaggccacggaggatgcccccttcaaccgaaacctgagggtcctggagaggacggtcactgcgccacggtgaggcaggggttgacacaactgtcaaacctgctgaacagtaagctgtttctgttaactctgatccacactctagaggagcagccctctttttcccagagggatcgttgtcatgtcgcctcactgttgtcccttgccctccacggcaaactggagtacctgaccgatatcatgagaactctgctgggcgacctggccgcccattatgtgcacagaaatcctaaactcatgctcagaaggaccgaaacaatggtggagaagctcctcaccaactggctttcaatttgtttatacgcattcctccgtgaagtggcgggcgagccattatatatgttattccgggctatccagtaccaggtcgacaagggccctgtcgacgctgtcacgggcaaggccaaacgtacactcaatgattcccggctactgcgggaggatgttgaattccagccactaactttaatggtgctggtgggcccaggagcaggcggggccgcgggatccagcgagatgcagagggtgcccgcaagggtactagacacagataccattacacaagttaaagagaaggtgctcgaccaggtatacaaagggacaccattctctcagcggcctagtgtgcacgcacttgatttagaatggagatccgggttagccggccacctcaccttgagtgacgaagacttgacctctgtcacacaaaatcattggaaaaggctgaataccctgcagcattataaggtcccagatggagcgaccgtcggcctggtgccccagcttcaccgcggcagtaccatctctcagagcctcgcccaaaggtgcccgcttggagagaacattcccacacttgaggacggagaagagggaggagtctgtctgtggcacttggttaaggcgacggaggaacctgaaggagcgaaagtccggtgttcttccttaagagagagggagcctgcaagagcaaaagcaatccctgaaatttatctgacccggttgctgagcatgaaaggcacactgcagaagtttgtggatgacactttccaggccatactatcagtgaatagacccataccaatcgccgtcaagtatttatttgatttactggacgaattagcggaaaaacacggcatagaggaccccggaactcttcacatttggaagacaaatagtctgttactgcggttctgggtcaacgcattaaaaaatccacagctgatctttgacgtgagggtctctgacaatgtcgatgctattctagccgtgatcgcccagacattcattgactcctgtacaacaagcgaacacaaagtggggcgagacagtcccgtcaacaagctgctctacgcaagggaaattccgcgatataaacagatggtcgagcgctattacgctgatattcgacagagctcgccagcatcctatcaggaaatgaattctgcgctggctgagctatccggaaattacaccagcgcaccccattgcctggaagctttacaggagttgtataatcatatccataggtattatgaccaaattatttctgccctcgaagaggatcccgtgggccagaagcttcagcttgcgtgccggcttcaacaggtggcggccctcgtagagaataaagtcactgacctgtag

SEQ ID NO: 129063 - DNA, 5778 bp, synthetic construct
  misc_feature 1..5778: note = Description of Artificial Sequence: Synthetic coding sequence
  source 1..5778: mol_type = other DNA
atggctcctcgagcagccgggggtgcgccactgagcgcaagggctgcagccgcctcgccccctccgtttcagacacctcctcgttgcccagtgccattgctgctccttttgctgctgggcgccgcaagggctggcgctctcgagatccagagacgctttccttctccaactcccacaaacaactttgccctggatggagctgccggaacagtctacctcgcagctgtcaacagactgtatcagctgagcggggccaatctaagcctcgaggcagaggctgccgtcggacccgtccccgactccccactctgccacgcaccccagttacctcaggcctcgtgtgagcaccctcggagactaactgacaactacaataagatactgcagttggaccccggccagggcctggtggtcgtttgcggctccatctaccagggtttttgccagctgagacgccgagggaatatcagtgcagtggccgtcagatttccgccggcggccccacccgcagaaccagtgacggtgttccccagtatgcttaacgtggccgcgaatcaccccaacgccagtaccgtgggattggtgctcccccccgccgccggagcgggtggttccaggctattggtaggggcgacatacacaggctacgggagctctttctttccccgcaaccggtcgctcgaagaccaccgattcgaaaatacacccgagattgctatacgttctctggacaccaggggcgatcttgcgaaactgtttacattcgacctgaacccatcagatgataatatattgaagattaaacaaggtgccaaagagcaacacaagctgggatttgtgtcggccttcctccaccccagtgacccaccccccggagcacaaagctacgcatatctagccctgaactccgaggctagggctggagacaaggagtcccaagctcggagcctgctagcccgcatatgcctgcctcatggggccggcggcgacgccaagaaattgactgagtcgtacatccaactaggacttcagtgtgcaggtggggctggtagaggcgatctgtacagtcgcttggtatccgtatttcctgcccgggaaagactgttcgccgtgttcgagagacctcagggctcccccgctgccagagcagctcctgccgctctctgtgccttcaggttcgccgacgtgcgagccgccatcagggccgcccggactgcgtgttttgtggaacctgctcccgatgtggtcgcagtcctcgatagcgtggtgcagggaacaggaccggcttgcgagaggaaactcaatattcagctgcagcccgagcagctggactgtggtgcagctcatctgcagcacccactctcgatcctccagccactcaaagcaacgcccgtgttccgggcacccgggttaacttccgtggccgtggccagtgtgaacaattatacagcggtgtttcttgggactgtaaacggcaggcttctcaaaattaaccttaatgaatctatgcaggtggtctcaagacgtgtggtgacagtagcttacggtgaacctgtacaccacgtgatgcagttcgatcctgcagattcaggttacctctatctcatgaccagccaccaaatggcacgggtgaaggtcgccgcttgtaacgtccactccacctgcggcgattgtgtgggggctgcagatgcttattgtggatggtgcgccctcgagacccgatgcacactccagcaggattgtactaactcctctcagcagcatttctggacctcagcgtctgagggcccctcacggtgccccgcaatgactgttctcccctctgagattgatgtccgacaggaatacccgggcatgattctgcagatcagcggatccctcccctctttgagtggcatggagatggcctgcgattacggtaataacatcagaacagttgcgagagtacctggccccgctttcgggcaccagatcgcttactgcaatctgctcccacgggatcaattccctcctttcccccccaaccaggatcatgttacagttgaaatgtctgttcgagtgaatggacgcaatattgtgaaggccaatttcacaatatatgactgctcacggacagctcaagtgtatccacacacagcctgcaccagctgcctgtctgctcagtggccctgtttctggtgtagccagcaacattcatgtgtgtctaatcagtccaggtgcgaggcatcccccaatcccacctcgccacaggactgccctcggactctactctccccactcgctccagtgcctacgggagggtcacagaacattctcgtgcccctggcaaacacagccttctttcagggggccgctctggagtgcagcttcggactagaagaaatctttgaagcagtatgggtgaacgaaagcgttgtgcgctgtgatcaggtggtgctgcatacgactaggaaaagccaagtctttcccttgtcattgcaactgaagggtagaccagccaggttcctcgactcaccagaacccatgaccgtaatggtgtacaattgcgcaatgggcagtcctgactgctcccagtgtctgggcagggaggacctgggccatctttgcatgtggagcgacggatgccgtctccgtggaccattgcaacctatggccggaacctgcccagcgccagaaattcatgccattgaaccacttagcggccccctagacggaggaaccctgctgacgatccgtgggcgtaacctcggaaggcggctctctgacgttgctcatggcgtgtggattggcggcgttgcctgtgaacctctacccgacaggtatacagtgtctgaggagattgtgtgtgtgaccggcccggctcccggtccgttgtcaggagtggtgaccgtcaatgccagtaaggaaggaaaatcaagggacagattctcctacgtccttcctttggttcacagcttagagcctacaatgggcccgaaggccggtggcacccggatcacaatacacggaaacgatttgcatgtcggaagtgaacttcaagtgctggtgaacgatactgacccctgtacagaattgatgagaactgataccagtatcgcttgcacaatgccagaaggggccctgccagcaccagtgcccgtgtgcgtgcggttcgagaggcgggggtgtgtgcacgggaaccttaccttttggtacatgcaaaaccccgttatcaccgctatctctccccggcggtccccggtctccggcggacggacaatcaccgtggctggcgaacgcttccatatggtccaaaacgtgtccatggccgtgcaccacatcggtagggaaccgacattatgtaaagttttaaacagtacactgattacctgcccaagccctggtgctctttccaatgccagcgcacccgtggacttttttattaacgggagagcttacgcagacgaggtggccgttgccgaggaactccttgatccagaagaagctcagagaggctctagattccgcctcgactatttgcccaacccccagttcagcactgctaagagagagaaatggatcaaacatcacccgggcgaaccattgacactggtgatccataaagaacaggactccctgggactgcaatctcatgaataccgagtgaagatcggtcaggtttcctgcgacatccagatagtcagcgatcggataattcactgtagtgttaatgagtcactcggggccgccgtggggcagttgcctataactatccaggttgggaacttcaatcaaaccattgctaccttacagcttggcggatctgagactgctatcattgtgtccattgttatttgctccgtcctgctgctgctgagcgtcgtggccctattcgtcttctgcacaaaaagccgccgtgcggagcgatactggcaaaaaaccttgttacaaatggaggagatggaatcgcagataagagaggagattcgcaagggatttgctgagttacagaccgatatgaccgatctgactaaagaactgaaccgaagtcagggcattccttttctggagtataaacacttcgtgactcgaacattcttccctaaatgttcctcactgtatgaagaaagatacgttttaccctctcagacgctgaatagccaggggtcctctcaggcccaggagacccatccgctgctgggcgagtggaaaattccagagtcctgtcgtccaaacatggaagaaggaatctcactgttctccagcttgctcaataacaaacatttcctgattgtgtttgtccacgctcttgagcagcagaaggacttcgcagtgcgggacagatgtagcttggcatcccttctcaccatcgccctccatgggaaactcgaatattatacgtccatcatgaaggaactccttgtggatctgatcgatgcttcagccgcgaagaatccaaaacttatgttgaggcgaaccgaatcagtggtggagaagatgctaaccaactggatgtccatttgcatgtacagctgcttgagggaaacagtcggggagcccttttttctactgctgtgtgctataaagcaacaaatcaacaagggttccatagacgctattacagggaaagctaggtacacactgtcagaagaatggttgttgcgcgaaaatatcgaagcgaagccacgaaatcttaacgtctcgttccaaggttgcggcatggattcactttccgtgcgcgcaatggatacggataccctgacccaagtgaaagaaaagatactcgaggcgttttgtaaaaacgtcccctactcccagtggccaagagctgaggatgtggacttagagtggtttgcatccagtacacaatcgtatatcctgagggatctggacgatacgagcgtagtggaggatgggagaaaaaagttgaacaccctcgcacactacaaaattcctgagggcgcttcactagctatgtctctaatcgacaagaaggataataccttgggcagggtgaaagatctggatacagaaaagtatttccacttggtcctgcctaccgacgagttggcagaacccaagaaatcccaccgtcaatcccaccgtaaaaaggtgttaccagagatctacctcacccgcttgctgtcaacaaaaggcacgctccagaaattcctagatgatttatttaaggcaattctctccatcagagaggacaagccaccccttgccgttaagtactttttcgactttctagaggagcaggccgagaagaggggcattagcgatccagataccctacacatttggaaaaccaactctctacctctccgattttgggtgaatattctaaaaaatccccaattcgtgtttgacatcgataaaactgaccacatcgacgcttgcttatctgtaatagcccaggccttcatcgacgcatgttcgattagcgacctgcagctaggcaaggactccccaactaataagctgctctatgcaaaagagatccctgaataccgaaagattgtgcaaaggtattataaacaaatccaggatatgacacccttgagcgagcaggagatgaacgcacacctggcagaagaatccaggaaataccagaacgaatttaacacaaacgtcgcaatggcagaaatttataaatatgcaaagcggtataggccccagataatggccgctttagaggccaaccctaccgctcgccgaacacaattacagcacaagttcgagcaggtcgttgccctgatggaagacaacatctacgagtgctactccgaggcctag

SEQ ID NO: 129064 - DNA, 5358 bp, synthetic construct
  misc_feature 1..5358: note = Description of Artificial Sequence: Synthetic coding sequence
  source 1..5358: mol_type = other DNA
atggcacctagggccgccggcggtgcaccactttccgctcgcgcggccgcagcttctccaccccccttccagacaccgccaagatgtccggtcccactccttctcttgcttctcctcggagcggctagagccggcgctctggaaattcagcggagattcccctcaccaacgcctactaacaacttcgccttggatggggccgctgggacagtttatcttgcggccgtaaatcggctgtatcaacttagtggcgcaaatctatccctggaagctgaagcggccgttggcccggttcctgactccccgctgtgccatgccccacaacttccacaggcctcttgcgaacacccaaggaggctgacagacaactataacaagatcctgcagctggaccctggtcagggactcgtcgtggtttgtgggtctatatatcagggcttttgtcagctgaggagaagggggaacattagcgcagtggccgtccgttttcccccggcggcgccacctgctgagcccgtaacggtgtttccttcaatgttgaacgtcgccgcaaatcaccccaatgctagcacagttggattggttttaccgcctgcagcaggcgccggagggtcaaggctgctggtgggggccacttatacaggctacggcagtagctttttcccacgcaaccggtctctcgaggaccaccggttcgagaataccccagaaattgccattcgtagcctggatacgcgcggggacctggctaagctatttacgttcgacctgaatccatcagacgacaacattttaaagatcaagcagggcgccaaggagcagcataaactaggattcgtaagcgcatttctgcatccatctgacccaccaccgggagcccaaagctatgcttatctcgctctgaattccgaagctcgcgccggagacaaagaaagtcaggcccgcagcctgctggctagaatctgtctacctcacggagctggaggggatgccaaaaagcttaccgagtcttacatacaactgggattacagtgcgccggtggggctggcaggggagacctgtacagtcgactagtaagtgtgtttccggcacgtgagcggctcttcgctgtgttcgaaaggccccaggggtctcccgccgctagagccgcccctgccgccctatgcgctttccggttcgcagatgtgcgcgccgcgatccgggccgcccggactgcttgctttgttgagcccgcccccgacgttgtagctgttctggattccgtggtccaagggacaggccctgcgtgtgaacggaagttgaacatccaactgcagcccgagcaactcgactgtggcgcagcacacctgcagcaccctctgtcaattttgcagccccttaaggccacacctgttttccgggccccaggattaacgtcggtggcagtggcctctgtcaacaattacacagcagtcttcctgggcaccgtcaatgggcgactgcttaaaatcaacttaaatgagtctatgcaggtggtgtccaggcgggtggtcacagtggcctacggcgagcccgtccaccatgtgatgcagtttgatcctgcagactccggatacttgtacctgatgactagccaccagatggcgagggtgaaggttgccgcttgtaatgtccatagtacctgtggtgattgcgtaggtgccgctgatgcctactgcgggtggtgcgctctcgaaacccggtgtactttacagcaggactgcactaattcttcacagcagcatttttggacgtccgcatctgaaggcccctctcggtgtccagccatgactgtgttgcctagcgagatcgacgtgaggcaggaatacccggggatgattttgcaaatttctgggtctttgccatctctgtcaggtatggaaatggcttgtgactacggaaacaatatccgcactgtggcccgcgtgccgggtccggccttcggacaccagattgcttattgtaacttgttgccgcgtgaccagttccctccttttccccccaatcaagaccatgtaacggtagaaatgagcgtcagagttaacggccgcaatatcgttaaggccaattttacaatatacgactgtagtcgaacagctcaggtgtatccccacacggcctgcacatcttgcctgtccgctcagtggccttgcttctggtgcagccagcagcattcatgcgtgtccaaccagtcaagatgtgaagcctcccctaatcctaccagtccacaagattgcccaagaaccctgctgtcccctctggcccccgtgccgaccggcggatcccagaatatcctggtcccactggcaaacacggctttttttcaaggtgccgccctggagtgcagtttcgggcttgaggagattttcgaggcggtctgggtgaacgagtctgttgtcaggtgtgatcaggtggtgctgcacacaacacgcaagagtcaggtgtttccgctctcgctgcaattgaaaggacggcccgctcggtttctggacagcccagagccaatgaccgtgatggtctataattgtgcaatgggatctccagattgcagccagtgtttgggccgcgaagacctgggccacttgtgcatgtggtcagatggatgcaggctcaggggtcccttacagcccatggctggcacctgccccgcacctgaaatccatgctattgaacccctgagtggacccctggacggagggacactactgactattaggggccgtaacctaggccgcaggctgtccgatgtcgcacacggcgtgtggatagggggcgttgcctgcgagcctttgcctgacagatacaccgtgagtgaggaaatcgtctgtgtcaccggaccagctcccggcccactatcgggggtggttacggtaaacgcctccaaagagggcaaatcaagggatagattttcgtatgtactaccattggtacattctttggagcccacgatgggcccaaaggccggaggcactagaattaccatccatgggaacgaccttcatgtggggagtgaactgcaagtgctggttaatgacacagatccctgcacagagctcatgcgaaccgacacatccatcgcatgcactatgccggagggagcattgccagcacccgtgcctgtctgcgtgcggttcgaaaggaggggatgcgtccacggtaacttgacattttggtatatgcagaatccggtaatcacagcgatcagccctaggagatctcctgtctcagggggcaggaccataacagtcgcaggcgagcggtttcatatggtacagaacgtctctatggcagtgcaccacattggccgcgagcccacgttatgcaaggtcctgaattccaccctgatcacctgtccgtcccccggcgccctcagcaatgcttcagcaccagtggatttcttcataaacgggagagcttacgcggatgaggttgctgttgccgaagagctgctggatccagaggaagctcaacggggctcaaggttccgcctggattatctccccaacccacaatttagcacagctaaaagggaaaagtggatcaagcaccatcccggcgaaccactcacgttggttatccacaaagagcaggacagcctggggctccagtcccatgagtacagagttaaaatcggtcaggtttcttgtgacattcagatcgtcagcgatcgaatcattcactgctctgtgaatgagtcattgggcgccgcggtgggccagctcccaattaccatccaggttggcaactttaatcagacaatagctacgctgcagctgggcggctcagagacagcgatcatcgtgagcattgttatatgctccgtgctgcttctgttatccgtggtggcccttttcgtattttgcactaaatcccggagggcagagagatactggcagaaaactctgctgcagatggaggagatggaatcccagatccgggaggagatccggaaaggattcgccgaactccagaccgacatgacggatctgaccaaagagttaaatcgctcacagggcataccctttctggaatataagcatttcgtaactcgcacgttcttccccaaatgcagctccctgtacgaagagaggtacgttctgcctagccaaacgctgaattcacaaggatcaagtcaggctcaggagacgcaccctcttctgggggaatggaaaattccagagtcctgcagacccaacatggaggaagggattagcctattctctagcctgctcaataacaaacattttctgatcgtgtttgttcatgccctggaacagcagaaggattttgctgtccgcgatcgctgctccttggccagcctgctaaccattgctctccacggaaagctggagtattatacttccatcatgaaagagttattagtggatctaatagatgctagcgctgccaaaaatcccaaactcatgttgcggaggacagagagcgtggtggaaaagatgctgacaaattggatgagcatatgtatgtattcctgtttgcgagagaccgtaggtgaacctttcttcctcctgctgtgcgcgatcaaacagcaaatcaataagggatccattgacgccatcactggaaaagcccggtacacccttagcgaggaatggcttctacgagaaaacattgaggccaagccgagaaacttgaacgtctcgtttcagggatgtggcatggactctttgtccgtgagagctatggatacagacacattgactcaggttaaagagaagattttagaggccttttgtaaaaacgtgccgtactcacagtggcctagagcagaagacgtggacctggagtggttcgcctcttctacccagtcctatatcctgcgcgacttagatgacaccagcgttgtggaagacggacggaaaaaactgaacaccctggctcattacaaaatccctgagggggcctccctggcaatgagtttaatagataagaaggataatacacttggaagagtcaaagacctagacaccgagaagtatttccacctcgtgcttcctacagatgaacttgctgagccaaagaaatctcatcgtcaatcccacagaaagaaggtgttgcctgagatctatcttaccaggctcctcagtacaaaaggtacactgcagaagtttctcgatgacctgtttaaggctatactgtccattcgtgaggacaagcctcccctcgccgtgaagtattttttcgattttctggaagagcaggctgagaagagaggaataagcgacccagacacactgcacatctggaagactaatcgctggaggccatcatcacccgtcctgggtgagcaccccgaggagccacccgtttgcctgtag

SEQ ID NO: 129065 - DNA, 1503 bp, synthetic construct
  misc_feature 1..1503: note = Description of Artificial Sequence: Synthetic coding sequence
  source 1..1503: mol_type = other DNA
atgcgcggcgagttgtggctgttagttctggttcttagggaagctgcgcgtgccctgtcacctcagcccggcgcgggacatgatgagggaccagggtctgggtgggccgccaaaggcactgtacggggctggaatcgccgcgcacgggaatcccccggacatgtgagcgagccagataggacgcagttgtcgcaggatctgggcggcggaacactggcaatggacaccctgcccgataataggacaagggtggtggaggataaccactcctactacgtaagcaggctctatgggccctcagaacctcatagtcgcgaactgtgggttgatgtggccgaagctaatcgcagccaggtgaaaattcacaccatcctgtcgaacacccatcggcaggcctcacgcgtagtgctaagtttcgacttccccttctacggtcacccactgcgacagatcactattgctacaggaggcttcattttcatgggagatgtgattcacaggatgctgaccgccacgcagtacgtagcaccgctgatggcgaacttcaatcctggctattcagataactctaccgtggtgtacttcgataacggtactgtgtttgtggtacagtgggatcacgtttatctgcagggctgggaagacaaggggagtttcacattccaggccgccctccaccacgatggcaggattgtttttgcctataaagaaattccaatgagcgttcccgaaatctctagcagccagcaccctgtgaagaccggactctctgacgctttcatgatccttaaccctagcccggatgtgcccgagtcccggagaagatcaattttcgagtatcatcggatcgagcttgacccgagtaaagtcacttcaatgagtgctgtcgagtttaccccactgccaacgtgccttcagcacagaagctgtgacgcctgtatgtcttctgaccttactttcaattgttcctggtgtcacgtactgcagaggtgtagcagtgggtttgaccgatatcgccaggagtggatggactacggttgtgcccaggaggcggaaggccgtatgtgcgaagactttcaagatgaagatcatgactcagcctctcctgacacctctttttctccttacgatggagaccttaccacaacatcatctagtctgtttatagactccctcactactgaggatgacaccaagctcaatccttatgcaggcggagacggcctgcaaaataacctcagccccaagacgaaggggacaccggtacatcttgggaccattgtcgggattgtactggccgtgctgcttgttgctgcgatcatcctcgccgggatctacatcaacgggcatccgaccagcaatgccgcactgttctttattgagagacgcccccaccattggcccgctatgaaatttcgctcacatccagatcattccacgtatgccgaggtggaaccaagcgggcacgaaaaagagggctttatggaggctgaacaatgctag

SEQ ID NO: 129066 - DNA, 1014 bp, synthetic construct
  misc_feature 1..1014: note = Description of Artificial Sequence: Synthetic coding sequence
  source 1..1014: mol_type = other DNA
atgcggggggagctgtggttactggtgctggttttgagggaagctgccagagcattgtcaccacagcctggcgccgggcacgatgaaggccctgggtcaggatgggcagccaaaggtactgtgcgagggtggaaccgacgagcccgcgaaagtccaggacacgtgagcgaaccggatcgaacacagctctcccaggatcttggaggcggaacactcgcgatggacacactcccagataataggacccgggtggtggaggataatcattcctactacgtttcaaggctgtacgggccaagcgagccccatagtagagagctatgggtggatgtcgctgaggccaatagatcacaggtcaaaatccataccattttgtccaacacacatcggcaagccagcagggtagtactgagtttcgactttcccttctacggacatcctctgaggcagatcacaatagccaccggcggctttatattcatgggggatgtcatccatcgcatgttgaccgccactcagtacgtggctcctctgatggccaattttaatccaggctacagcgataattcgacagttgtgtacttcgataacgggaccgtattcgtcgtccagtgggaccatgtgtatcttcaggggtgggaggacaaaggatcttttactttccaggctgccttacatcacgatggcaggatcgtcttcgcgtataaggaaattccgatgagtgtgcccgaaatatctagctcccagcatccggtcaaaaccggactgtctgacgcatttatgatcttgaatccatccccggacgtcccggaatcgcgtcggcgctcaatctttgagtatcacaggatcgagctggacccttctaaggtaacctctatgtcagctgtggagtttacacccctgcccacatgcctgcagcaccggtcctgtgacgcctgcatgagctcagacctcacctttaactgttcctggtgtcacgtgctgcagagcagggacgaagtgagcccctgctag

SEQ ID NO: 129067 - DNA, 1284 bp, synthetic construct
  misc_feature 1..1284: note = Description of Artificial Sequence: Synthetic coding sequence
  source 1..1284: mol_type = other DNA
atggatacattgcccgataataggaccagggttgtggaggataatcactcatattatgtaagtaggctctacggaccaagcgagcctcatagtagggaactgtgggtggatgttgcagaagccaacagatcccaggtaaaaatacataccatcttaagtaatactcacaggcaggcaagtcgtgtcgtcttatccttcgatttcccgttttacggccacccactgcggcagattaccattgccaccggagggttcatctttatgggtgatgtgatccaccgcatgctgaccgccacccaatatgtggcccccctcatggccaacttcaatcctggttactctgacaacagtactgtggtttatttcgacaacggaaccgtattcgtcgtgcagtgggatcatgtgtacctgcaagggtgggaagataaagggagttttaccttccaagcggcactccatcatgatggaaggatcgtgtttgcctataaggagatacccatgtctgttcctgagatctcctccagtcaacatcctgtaaagacaggcttgagcgatgcatttatgatcttgaatccatcaccagacgtgcctgagagtagaagacgctctatcttcgagtaccatagaatcgaactggatccttctaaagtgacttccatgtctgccgtcgagttcacgcctttgcccacctgtctccagcatcggtcatgtgacgcttgcatgagctcagaccttactttcaattgttcttggtgtcatgtactgcagcggtctctcaataaccaggatgaaaatacctatgttaactgtttggactcacagcagtgccacggctccagtgagtccagaagacctttccaagacgaagatcatgacagcgcaagcccagatacctccttcagcccttacgacggggatctgacgactacctcgagcagtctgttcattgattctttgacgacggaggacgacaccaagctgaatccctatgcgggaggagatggtttacaaaacaacctcagccccaagaccaaaggcaccccagtccacctcggaactatagtcggaatcgtgctggctgttctgctggtcgccgcaatcattttggcagggatatacatcaacggtcacccaacttcaaacgctgcactgttcttcattgaaaggagaccgcatcactggcccgccatgaaatttaggtcccatcccgaccattcaacatatgctgaagtggaaccatctgggcatgagaaagaaggatttatggaggccgagcagtgctag

SEQ ID NO: 129068 - DNA, 375 bp, synthetic construct
  misc_feature 1..375: note = Description of Artificial Sequence: Synthetic coding sequence
  source 1..375: mol_type = other DNA
atggatactctcccagacaatcgaacccgggtggtggaggacaaccactcttactacgtttcccgcttatatggaccctcagaaccacactctcgggagctttgggtcgacgtcgccgaagccaatagatctcaagttaagattcataccattcttagtaatacccaccggcaggcctcgcgggtcgtgctgagcttcgactttccgttctacgggcacccattgcggcagattaccattgccacaggaggcttcatcttcatgggtgatgtgattcataggatgctcaccgctacccagtacgtggctccactgatggcaaattttaatcccggctattccgataactctaccgtcgtgtacttcgataattag

SEQ ID NO: 129069 - DNA, 669 bp, synthetic construct
  misc_feature 1..669: note = Description of Artificial Sequence: Synthetic coding sequence
  source 1..669: mol_type = other DNA
atggacactctgccagataataggacacgagtagtcgaggacaatcattcatattatgtgtcgaggctgtacggcccctcagaaccccactctagggaattatgggtggatgttgcagaagctaatcggtcccaggtgaagattcacacgatattgagcaatactcacagacaggcctctcgcgttgtgctgtcttttgatttcccattttatggccatccactgcggcagatcactattgccacaggtggttttatttttatgggcgatgtcatccaccggatgctgaccgcaacacagtatgtggcccctctgatggctaatttcaaccctgggtactcggataactctacagtggtctacttcgacaatggaacggtttttgtcgtccagtgggaccatgtctacttgcaaggatgggaagacaaggggagcttcaccttccaagccgcactgcaccatgacggccgcattgtctttgcctataaggagatccccatgtcagtgccagaaatcagctcaagccaacaccctgtaaagacgggactctctgacgcattcatgatattgaacccaagccctgacgtcccagagtctaggcgacggtcaatctttgagtaccatagaatagagcttgatcccagcaaggtgacatccatgtccgcctag

SEQ ID NO: 129070 - DNA, 198 bp, synthetic construct
  misc_feature 1..198: note = Description of Artificial Sequence: Synthetic coding sequence
  source 1..198: mol_type = other DNA
taatctttcacctttcaggcagccctccaccatgatggccgcatcgtattcgcatacaaggaaatcccaatgtccgttccggagatctcctcaagccagcatcctgtgaagacaggtctatctgatgcgttcatgatacttaacccgagtcctgatgtgcctgggtttagtgcagagagcgctaaacacttgtggtag

SEQ ID NO: 129071 - DNA, 1383 bp, synthetic construct
  misc_feature 1..1383: note = Description of Artificial Sequence: Synthetic coding sequence
  source 1..1383: mol_type = other DNA
atggccctgtcagtgcgtacccttccactgagaggcttcctggttcctcgaccacaaccaaccagatctcaggatgcgcctagtccgcgtctgccgctgagcagtgcaccagctccctgcagacacaaaaatgaggaagacaatcactcctactatgtgtcccggctctatggtccttcggaaccccactctcgcgagctctgggtggatgtggccgaagccaaccgttcccaggttaagatacatactattttgagcaacacccaccgtcaggcctccagagtggtgctgtctttcgatttcccattttacggccacccactgcgacagattacaatcgcaacgggcgggtttatctttatgggagatgtcattcacagaatgctcaccgcaacgcaatatgtcgcgcctctaatggccaacttcaaccctggctactccgacaactccaccgtggtgtacttcgacaacgggacagtgtttgtggttcagtgggaccatgtttacctgcaaggctgggaggataaagggagctttactttccaggccgcactgcaccacgatggtcgaatagtctttgcgtacaaagagatccccatgtctgttcctgagatttcttcctcacagcatcccgttaagacgggtctgtctgacgcctttatgattctcaacccctcgccagatgtccctgagtctagacgccgctcaatcttcgagtaccacaggatcgaactcgatccttcaaaggtgacctctatgagtgctgtagagttcacgcctctcccaacatgcttacagcatcggtcttgtgacgcatgcatgtcatctgacttaacatttaactgtagctggtgccatgtcctccagagatgttcttctggctttgatagatacagacaggaatggatggattatggatgcgcccaagaggctgaaggacgcatgtgcgaagactttcaggatgaggaccatgattccgccagcccagatacatcttttagcccatatgatggcgacctgactacaacgtcatcttccctcttcattgactcgcttacaactgaggacgataccaagttgaatccttacgcaggcggcgatggtctccagaataaccttagccctaagacaaagggcactcctgtccatcttggcactatcgtaggaattgtcctggccgtgctgcttgtggccgctattattctggcgggaatttacattaatgggcaccccacctccaatgctgcgcttttcttcattgaaagaagaccacatcactggccagctatgaagttccgtagccaccccgaccattcaacttacgctgaggtggaaccctctggccacgagaaagaggggttcatggaagcggagcaatgttag

SEQ ID NO: 129072 - DNA, 723 bp, synthetic construct
  misc_feature 1..723: note = Description of Artificial Sequence: Synthetic coding sequence
  source 1..723: mol_type = other DNA
atggacacactgcccgataatcgcaccagggtggtcgaggataatcactcatactacgtatccaggttgtacggcccttccgagccacattcccgggagctctgggttgatgttgctgaggctaataggtcacaggtgaaaatacacactattcttagcaatacacatcgacaggccagcagagtggtgctgagcttcgacttccctttctacgggcatccactcagacagatcactatcgccaccggtggcttcattttcatgggcgacgttatccaccggatgctcactgcaacccagtatgttgccccactgatggcaaacttcaatccaggctatagcgacaacagtaccgtggtctatttcgataacggcacagtgttcgtggtgcagtgggaccacgtgtatctgcaggggtgggaggataagggctcatttaccttccaggcagcacttcaccacgatgggagaattgtcttcgcttataaggaaatccctatgtcagtccctgaaatctcgtcctcacagcaccccgtgaaaaccgggttgagcgacgcctttatgattctcaatcctagccccgatgtgccagagagtcgtagacgctcaattttcgaatatcaccggatagagctggacccttctaaggtcacgtccatgagtgcagtggagttcaccccccttccttctccttccactaccaggatgaagacaagaatgtag

SEQ ID NO: 129073 - DNA, 1179 bp, synthetic construct
  misc_feature 1..1179: note = Description of Artificial Sequence: Synthetic coding sequence
  source 1..1179: mol_type = other DNA
atggaaaaagacaaagttaagatccacggcatcctttccaatacccaccggcaagccgcgcgcgtcaacctctcttttgatttccctttctatgggcacttcctgagggagatcacagtggccactggggggttcatctatactggtgaggtggtccaccggatgctgacggccacccaatatattgcacccctgatggctaactttgatccctcggtgtcccggaattcaacggtcaggtactttgataacggaactgccctggtggttcaatgggatcacgtgcacctccaagataattacaatctcggatcattcaccttccaagctaccctcctgatggacggaagaatcatttttgggtataaggaaattcctgtgctcgtcactcagatctcttctaccaatcaccccgtcaaggtcggcttgtccgacgcttttgtggtcgtgcaccgaatccagcagatacccaacgtgcggcgacgaaccatctacgaatatcatcgggtcgagcttcagatgtcaaagatcacaaacatctccgctgtggaaatgacgccactccctacctgtctccagttcaaccggtgtggcccgtgtgtcagttcccagatcggattcaactgttcctggtgttcaaagttgcagagatgtagttctggatttgaccggcaccgccaggattgggttgacagcggctgtcctgaagagagtaaggaaaaaatgtgtgaaaacacggagcctgtggaaacatccagcaggactacaaccaccgtaggggccacaacaacacagttcagggtgttgactaccactcgacgggcggtgacctcccagtttcctacctctctccctactgaagatgacactaagatcgccctacatttaaaggacaatggcgcaagcacagacgactctgccgccgagaagaaaggcggtactctacatgccggactgatcattgggatcctgatcctcgtgttgatcgtagcgaccgcaattctcgttacagtctatatgtatcaccaccccaccagcgccgctagtattttcttcattgagagacggccaagccggtggcccgcgatgaagttcagacgcgggagtgggcatcccgcctatgccgaggtcgaaccagtgggtgagaaggaaggattcattgtatcagagcagtgctag

SEQ ID NO: 129074 - DNA, 1443 bp, synthetic construct
  misc_feature 1..1443: note = Description of Artificial Sequence: Synthetic coding sequence
  source 1..1443: mol_type = other DNA
atggctcgctttccaaaggcagatctggccgcagcaggcgtgatgcttctctgtcacttcttcaccgatcagttccagtttgccgatggaaaacccggcgaccagatcctcgattggcagtacggggttacccaggccttcccacatactgaggaagaagtggaggtagactcccacgcctacagtcacaggtggaagcgtaacctggacttcttgaaagctgttgatacaaacagggcaagcgtaggacaagatagccctgagccccgcagctttactgatctgttgctcgacgatggtcaagataataatacgcagatcgagagggtgaacctttcgtttgactttcccttttatggacattttcttagagagattactgtggccacgggaggcttcatctacaccggcgaagtggtacacagaatgctcaccgctacacagtatatcgcaccactaatggcaaatttcgatccttcagtaagccgaaactccaccgtccgttacttcgataacggcaccgccctcgtggttcagtgggaccacgtgcatctgcaggacaattacaatctcggcagttttacattccaggcaaccttgctgatggacgggcgcattatctttgggtacaaggagatccccgtcctcgtgacgcagatttctagcaccaaccatcccgtaaaggtgggattgtccgatgcattcgtagtagtgcaccgcatacagcagatccccaatgttcgtagacgcactatctatgagtatcaccgggtggaactgcagatgagcaaaattaccaacatttctgctgtagagatgacccccttaccaacatgcttacagttcaaccgatgtgggccttgcgtgagcagccagataggcttcaattgctcgtggtgttcaaagttgcaaaggtgtagcagcggcttcgatcgccaccgccaggattgggttgatagcggttgcccagaggagagcaaggaaaaaatgtgcgaaaataccgagccggtggagaccagtagcagaactactaccaccgtcggggctacaaccactcagttcagggtcctgactacaacacgtcgagctgttacaagccagttccccacttcgctgcctaccgaggacgataccaagatcgccttgcacctcaaggacaacggcgcttctaccgacgattccgccgctgaaaagaagggtggtacattgcacgccggcctgatcataggtatcctcattcttgtactgattgtcgccacggccatcctggtgaccgtctacatgtaccaccaccccacaagcgctgcctccatattctttatcgaacggcgcccatccagatggcccgccatgaaatttcgaagaggatctggtcaccccgcttacgccgaagtcgagcccgttggggagaaggaaggcttcattgtgtctgagcaatgctag

SEQ ID NO: 129075 - DNA, 1590 bp, synthetic construct
  misc_feature 1..1590: note = Description of Artificial Sequence: Synthetic coding sequence
  source 1..1590: mol_type = other DNA
atggcacgtttccccaaggcagacctcgctgcagccggtgtgatgttactgtgccactttttcaccgaccagtttcaattcgcggatggaaagcccggcgaccagatattggactggcaatatggcgtaacccaggccttcccacacaccgaggaagaggtggaagtggattcccacgcctattcccaccgttggaaaagaaatttagatttccttaaagctgtagacacaaacagggcaagcgtgggacaagattctccagaacctcgttccttcactgatctactcctcgatgatggacaagacaacaatacacagattgaggaggacaccgatcataactactacatatcccggatctatggaccaagcgattcagcaagcagagacctctgggtgaatattgatcagatggagaaagataaggtgaagatccacggcatcctttcaaacacacacaggcaggcagctagggtgaatctgtcttttgatttcccattctacggacactttttgagggagatcaccgttgctactgggggattcatttatacgggtgaagtggttcaccggatgttaacagccacacagtatattgcgcctcttatggcaaacttcgacccttctgttagtagaaatagtactgtgcggtacttcgacaatggaacagcgctcgttgttcagtgggatcacgtgcacctccaggataactataatctggggtcgttcacgttccaggcgactctgctgatggacggacgcatcatctttggatataaggagattcccgtgctggtcacccagatctcctccaccaatcacccagttaaagtgggactgtcagacgctttcgtggtggtgcatcggattcagcagatcccgaacgttagacgacgtacaatctatgaatatcacagagtcgagctccagatgtcaaagattacgaatataagcgccgtggagatgacgcctctccccacatgtctacagtttaatagatgcggcccttgtgtctcctcccagataggcttcaactgctcctggtgttccaaactgcaacgctgcagcagtggattcgacaggcatcgacaggactgggtcgactcggggtgtccggaggagtccaaagagaagatgtgcgagaatactgagccagttgagacttctagcaggaccacaaccacagtgggtgccaccaccactcagtttcgcgtgctgaccactacacgacgggcagtcacctctcagttccctacctcactccctaccgaagacgacacaaagatcgcgttgcatctaaaggataacggagcctcgactgacgactcggcggccgaaaagaagggcggtactttgcatgccggccttattattggaatactcatcctggtactgattgttgcgacagccattctggtcaccgtgtacatgtatcaccatcctacgtcggcggccagcatttttttcattgagaggcgcccatctaggtggcctgccatgaagttcaggcgcggatcaggtcatcccgcgtatgccgaggttgaaccagtcggggaaaaggaaggctttatcgtgtcagagcagtgttag

SEQ ID NO: 129076 - DNA, 1548 bp, synthetic construct
  misc_feature 1..1548: note = Description of Artificial Sequence: Synthetic coding sequence
  source 1..1548: mol_type = other DNA
atgttgctctgccatttttttacggatcagttccagttcgccgatggcaaaccgggtgatcagatactcgactggcaatacggggtgacccaagcttttcctcataccgaagaagaggtagaagttgactcccacgcctattcacacagatggaagcggaatcttgatttcctgaaggcagttgatactaaccgcgcctcagtggggcaggattcccctgagccacgcagtttcacggacttgttactggacgacgggcaagataataacacccagatcgaagaggatacagaccacaactattatatctcccggatctacggtccgagtgactcagccagcagggacctgtgggtaaatatcgatcagatggagaaagacaaagtgaagatacacggcattctctccaacactcaccggcaggccgccagagttaatttgtctttcgacttcccattctatgggcactttctgcgcgagattaccgtcgcaacgggcggattcatatataccggagaagtagtacaccgaatgctgacagccacacagtacatcgctccactcatggccaacttcgatccctccgtgtcgcgcaactcaactgtgagatacttcgataacgggaccgctctcgtggtccagtgggatcacgtgcatctgcaggataactataatctgggatctttcaccttccaggcaaccctcctcatggatggaagaatcatattcggatataaggaaatcccagtcctggttacccaaatttcaagtacaaaccatccagtgaaggtggggctgagcgatgctttcgtggtggttcaccgtattcaacagattcctaacgtgcggcgcaggacaatctacgagtaccacagggtagaactgcagatgtccaaaattacgaacatctcagccgtggagatgactccgctcccaacctgtctgcagttcaatcgctgtggaccctgcgtgtcttcccagattggcttcaactgcagctggtgttctaagcttcaacgatgttcatcgggtttcgaccgccaccgccaggactgggtggattcagggtgcccagaggaaagtaaggagaagatgtgtgaaaatacggaaccagtggagacgagttctaggaccaccacaacggtgggggctacaacaacgcagtttagagttctgactaccacaagacgggcagtgacaagccagtttcctacctctcttcctacagaggatgatacgaaaatagcacttcacctcaaagacaacggggcttccaccgatgactctgccgctgagaaaaaaggaggcactctgcacgctggcctgattatcggaatcctcattctggtgctcattgtggcgactgcgatcctcgtcacagtctatatgtatcatcatccaacaagcgcggcttccatcttttttattgagcgcagacctagcagatggcccgccatgaaatttcgtcggggcagcggccaccccgcatacgccgaagtcgagcctgtgggtgagaaggagggatttatcgtcagcgagcagtgttag

SEQ ID NO: 129077 - DNA, 1581 bp, synthetic construct
  misc_feature 1..1581: note = Description of Artificial Sequence: Synthetic coding sequence
  source 1..1581: mol_type = other DNA
atgcgctgtgcactggcactcagcgccctcctgctgctgcttagcacgccccctctgctaccttctagcccgtccccttcaccatctcctagtcaaaacgccacccagactacaactgattcgagcaataagacagcccctacacccgcctcaagcgtcactataatggctacagataccgctcagcagtcaacggtgccgacatctaaagccaatgaaattttagcgtcagtaaaggctacaaccttaggggtgagctccgatagccccggaactacgacgcttgcccagcaggtgtctggtcccgtgaacaccaccgtagcaagaggtggggggtcaggaaacccaaccacaactattgaatctccaaaatcaaccaagagtgctgacacaaccaccgttgccacttccaccgctaccgcaaagcctaacacgacatccagccagaatggagctgaagacacaaccaactctggtgggaaatccagtcactctgttacaacagatttaaccagtacgaaagctgagcatttgactacacctcacccaacgtctcccctttcacccaggcagccaacatctacccatcccgtggccacacctacgtcatccggtcacgaccacctgatgaagataagttcgtcttccagcaccgtggctatcccaggctacaccttcacaagtcccggcatgacaactacactgccgtcaagtgtcatttctcaacgtactcaacagactagttcccagatgccggcgtcaagcacggctccgagttcccaggaaaccgtgcagcctaccagccctgccacagcgctccgaacgccaacattgcccgaaactatgtcctcaagcccgactgcagccagcacaacacaccgctatcctaagactccatcaccaacagtggctcatgagtctaattgggcaaagtgcgaggatctagaaacacagacccagagcgagaaacagctcgtactaaacctgactggcaacaccttgtgcgccgggggggcctctgatgaaaaacttatctctctgatctgccgagcagtaaaggccacatttaatcccgcgcaggataagtgcggcatccgcctcgccagtgtgcctggctcccaaactgtagtggtaaaggaaattacaatccacaccaagctccccgccaaagatgtgtacgaaagattaaaggacaagtgggacgagctcaaagaggctggcgtgtctgacatgaaactgggcgatcagggcccccctgaggaggccgaagatcggttctcaatgccgctcataatcacgatcgtttgtatggcgtcgttcttgctgctggttgcggcattgtatggttgctgtcatcaaagactaagtcagagaaaggaccagcagaggctgaccgaggagctccaaaccgtggagaacgggtaccatgacaaccctactctcgaggtcatggaaacatcctccgaaatgcaggagaagaaagtcgtatcactgaatggagagttgggtgattcctggattgtccctcttgacaacttgacaaaggacgatctggacgaggaggaggacacacacctttag

SEQ ID NO: 129078 - DNA, 1677 bp, synthetic construct
  misc_feature 1..1677: note = Description of Artificial Sequence: Synthetic coding sequence
  source 1..1677: mol_type = other DNA
atgaggtgcgctttagccttgtcggccctccttctgctgctaagtacacctcctttgctcccatcttcaccttcgccatcaccgagcccaagccaaaacgctacacagactactacggattcttctaacaagaccgcccccacaccagcaagctccgtgactattatggccacagacacagcccagcagtctacggtgcctacgtccaaagcaaatgagatcttagctagtgtcaaggccactactctcggagtttcctcagattctcccggtaccacaacccttgcgcagcaggtttctggacccgttaatacaaccgtcgctcgtggcggggggagtggtaatcccacaaccacaatcgagtcccctaaaagcacgaaatcggcggacactactaccgtggcgacctcaactgccactgctaagcccaatacaacgtcttcccagaacggggccgaagacaccaccaactcaggcggcaagtccagtcacagcgtcactaccgacttaacttccacaaaagccgagcacttaaccacaccgcatccgacttcccccctctctcccagacagcccaccagtacacacccagttgctacccctacttcatctgggcatgatcatttgatgaagatctctagctcctcctccacagtggctattcctgggtacacttttacttcccctgggatgaccaccacactactggagacagtgtttcaccatgtaagtcaggccggactggaactgctgacctctggtgacctgccaactctggcctcccaaagtgctggcatcaccgctagctccgtgataagtcagagaacccagcagacttcatctcagatgccagcctcttccactgctccctcatcacaggagactgtccagccaacaagccccgctaccgcattgaggactcccacattgcctgaaaccatgtcttcatcccccaccgccgcctctacaacccataggtaccccaaaaccccctcccctaccgtagctcacgagtctaactgggctaagtgtgaagatcttgagacccagactcagagtgaaaagcagctggtcctaaatctgactggtaacactctctgtgccggcggagcgtcagatgaaaaattgattagtctgatctgccgtgctgtaaaagccacttttaatccagcccaggacaagtgcggcatccgcctggcctccgtgcccggtagccagaccgtggtcgtgaaggagatcacaatccacacaaagttgccagccaaagacgtttacgaaagattaaaagacaagtgggacgagcttaaagaggccggagtttctgacatgaaacttggtgaccaggggccacctgaggaagctgaggatcggttttccatgccgttaataatcacgatcgtgtgtatggcatcctttctgctgttggtagccgcattgtatggatgttgtcaccagcggttatctcagcggaaagatcagcagcgactgacagaggagctgcagacggtcgaaaacggctaccatgacaatcccaccctcgaagttatggaaaccagctccgaaatgcaggaaaaaaaagtagtttccctgaacggggagctcggcgattcttggattgtccctctggataacctgacaaaggacgatctcgacgaggaggaagacacacacctctag

SEQ ID NO: 129079 - DNA, 1581 bp, synthetic construct
  misc_feature 1..1581: note = Description of Artificial Sequence: Synthetic coding sequence
  source 1..1581: mol_type = other DNA
atgcgatgtgccctcgccttgtctgccttgctcttactgttgtcaacaccaccgctactcccgtcctcacccagccctagtcctagcccaagccagaatgcaactcagacaactacggacagctccaacaagaccgcccccaccccggcttcgtcagtcaccattatggccactgacaccgctcaacagtccactgttcctacttcaaaagctaacgagatccttgccagcgtgaaagccacgacattaggggtttcaagtgatagtccaggaactactaccctggcacagcaggtgtccggacctgtaaacacaacagtcgccaggggcggtggctcgggcaatcctactacaacaatcgaaagcccaaagagcacaaaaagcgctgataccacaaccgtggccacctctaccgccaccgctaaacccaacaccacgtccagccagaacggggctgaagacactacaaatagtgggggcaagtcctctcatagcgtcaccacagacttgacgagcacaaaagctgagcatctgaccacaccgcaccccactagcccactgtcccccagacagccaacgtctacacatcccgttgccaccccaacatcttcaggacacgaccatctcatgaaaattagctctagtagtagcaccgtggcaatcccaggatacacctttacgtctcctggaatgacaactacactgccctcttcagtgatcagtcagaggacccagcagacaagctcccagatgcccgcaagttcaaccgctcctagcagccaagagaccgttcagcctacctcacccgccacagctctgcgtacgcccactttacctgagacaatgtcgagtagtcccactgctgcctccaccacccaccggtatccaaagaccccttcaccaacagtagcacacgagtccaactgggtcaccccggccggggtgggcactcagactcgggttgaggaagccctccgacaggccctgacacactccttattaccagctggaggcgcctctgatgagaaattaatctcgctgatttgccgcgccgttaaagccacattcaatcctgcacaggacaaatgcggcattcggctagccagcgtccctggctcccagactgttgtggtgaaggagattactatacataccaagttgcctgccaaggatgtgtatgagcggctgaaggacaaatgggatgagctgaaagaggccggagtgtcagatatgaaactcggggaccagggacctccggaggaagcggaggatagattcagcatgcctctgatcatcactatcgtgtgtatggcctcctttctcctgctcgtcgccgccttatacgggtgttgccaccagcggcttagtcagaggaaagaccagcagcgcctgacagaggaactgcagaccgtggagaacggctatcacgacaaccccacacttgaagtaatggagacttctagtgaaatgcaggagaagaaggtggtcagtttaaacggggaactcggggattcctggatagttccactggataatctgactaaggatgaccttgatgaggaagaggacactcatctttag

SEQ ID NO: 129080 - DNA, 1683 bp, synthetic construct
  misc_feature 1..1683: note = Description of Artificial Sequence: Synthetic coding sequence
  source 1..1683: mol_type = other DNA
atgcggtgcgccctggctctctctgccctgctgctcctgctgagcaccccccctttgctcccatcatccccatctccatcaccgtcaccaagtcaaaatgagacagcgacgcagacaactactgatagctcaaacaaaacggcccctacgccagcctcttccgtgactataatggccactgacaccgcacaacaaagcactgtcccaacctctaaggcaaacgaaatcctagcgtctgtcaaagcaaccactttgggagtctcgagcgactcccctgggacaaccacactggcccagcaggtcagtgggcctgtgaataccacagttgcgcgcggaggaggaagtgggaatccaacaactacaatcgaatcacctaagtcaacaaagagcgcagacacaaccaccgtggctacctcgaccgcaactgctaaaccaaacactacatcctcacagaacggcgccgaggacacaacaaactccggcggaaaatcaagccattccgtgactacggacttaaccagtactaaggcggaacacctgacaaccccccatcctacttcacctctgtcgccaagacagccaacgagcacccacccagttgctacacccacgagctctggacacgaccatctaatgaagatcagctctagtagctccacagtcgctattcctggctacacattcacttccccaggcatgactactacgcttctcgaaacggtgtttcaccacgtctcccaagcaggactagaactgctcacgagcggagatctacccaccctggcttcgcagtcagctgggatcaccgcctctagtgtgatttcccagcgcactcagcaaactagtagccagatgcccgcaagctcaacagcacccagctcgcaagaaacggttcagccaacatcccctgctaccgccttacgcaccccaactctgccagagactatgtcttctagcccaacagctgcgagtactacacaccgctatccaaaaacaccatccccaaccgttgcccatgaaagtaattgggcaaaatgcgaggatttggaaacccagactcagagtgaaaagcagttggttctgaatctgacagggaatactctctgtgccggcggtgcttctgacgagaagctgatttccctgatctgcagagccgtcaaagctacattcaaccctgcccaggacaaatgcggcatcagactggcgtctgtgcccggaagccagactgtcgttgtcaaggagataaccatccataccaaactcccggccaaagatgtgtacgaacggcttaaggacaaatgggacgaactcaaggaggctggggtgtccgatatgaagctgggagaccagggaccgccagaggaggctgaagaccgttttagcatgcctctgattattacaattgtctgcatggcatcctttctgctgctggtggcggccttgtacgggtgctgccatcagaggctaagtcaacgaaaagatcagcaacgccttaccgaggagctgcagacagtcgagaatggctaccatgacaaccccaccctcgaggtgatggagacgagttccgaaatgcaagagaagaaagtcgtatctctgaatggggagctcggagatagctggatcgttccccttgataatctcactaaagatgatttagacgaggaagaagacacgcacctctag

SEQ ID NO: 129081 - DNA, 1551 bp, synthetic construct
  misc_feature 1..1551: note = Description of Artificial Sequence: Synthetic coding sequence
  source 1..1551: mol_type = other DNA
atgcgatgtgccctggctctttcggccctcctgctactgctgtccacctcgcccagtccatcgcagaacgccacacagaccactacagattcgagcaataaaactgcccctacccctgcttcatccgttaccattatggccacagatactgcacaacagagtaccgtgcccaccagtaaagccaacgagatcctggcctccgtcaaagccaccaccctgggagtgtccagcgattctcccggaacaactacattggcacagcaggtctctggcccagtaaacacgacagtagcacgaggcggaggatccggcaaccctacaaccacaatagaatctcctaagagcacaaaaagtgccgacactactacagtcgccactagcaccgcaaccgcaaagcctaacactaccagcagccaaaatggagccgaggacaccacgaacagcggtggcaaatctagccattcggtcacgactgaccttacctcaaccaaagccgaacatcttacgaccccccaccccacttctccactctccccacgccagcccacaagtacacatccagtggcaacccccaccagctccggccatgaccacctcatgaaaatttcctcctcaagttcaaccgtcgcaatccccggctacaccttcacttccccgggtatgaccacaacgcttccgtccagtgttataagtcaacgaacacaacaaacgagctctcagatgccggcctcctctaccgcgccgtcctcacaagagacggtgcaacccacctctccagcaacagctttgagaacaccaactcttcctgaaaccatgtctagtagcccaaccgccgcaagcaccactcatagatatccaaaaacacccagcccaacagtcgctcatgagagcaactgggccaaatgcgaggacttggaaacccagacacagtccgaaaaacagctggtattaaacctcacgggaaatacactgtgcgccggaggagccagtgatgagaagctcatttcgttaatctgtcgcgcagttaaggccacgtttaaccccgctcaggacaagtgcgggatccgacttgcctccgttcctggctcacaaactgtggtagtgaaggagataactatacatactaagctgccagctaaagacgtatacgagcggctaaaggataagtgggatgagttaaaggaggccggcgtaagtgacatgaaactgggggatcaaggacctcccgaggaggcggaggatagattcagcatgccactcataataaccatagtgtgcatggcatccttccttttgctggtggccgccctctatgggtgctgtcaccaaaggctcagccagaggaaagatcagcagagattgactgaagagctccagaccgtggagaacggttatcacgacaatcccacacttgaggttatggagacgagttctgagatgcaagaaaagaaagtcgttagcctgaatggagaactcggggattcatggattgtacccctggacaacctcacgaaggatgatttggacgaggaagaggacactcacctctag

SEQ ID NO: 129082 - DNA, 1986 bp, synthetic construct
  misc_feature 1..1986: note = Description of Artificial Sequence: Synthetic coding sequence
  source 1..1986: mol_type = other DNA
atggagggagcaagggcacgcggtgcccaactgagactgggagaacgcgtaaggcctgtcgggagaagaagcgctccaggtcggtctaggttccggcagccatggcggcccggggcctctgatagcgccccgcctgctggcactatggctcagtctagggttctgctgcttcttctccttttacccccacaattgcacctcggcccagtgctcgcagtcagggcgccaggattcgggcgctccggtggccactccctgagccctgaagaaaatgaattcgcagaggaggagcctgtgttggtgttgtctcccgaagaaccgggccctgggcctgcggccgtgagctgtcccagggattgcgcttgtagccaggagggagtcgtggactgtggtggtattgatctgcgtgaattccccggtgatctgcctgagcacaccaaccatctgtcccttcagaataaccagctagagaaaatttatcccgaggagctgtcacgtctgcatcgactggagactctgaatttgcaaaacaaccgtctcactagccgagggctgcccgagaaggcatttgagcacctcactaacctgaactatctgtatttggcgaataacaagctgactctggctcctcgcttcctccctaatgctcttatttccgtggactttgctgccaactatctgactaagatctacgggctgacttttgggcagaagcccaatctgcgctccgtttatctgcataataacaagctcgcagatgccgggctgccagacaatatgtttaacggcagttccaatgttgaagtcctcattcttagtagcaattttttgcggcacgtgccgaaacacctgccacccgccctgtataagttacacctgaagaataataagctcgaaaaaattcccccaggtgcattcagcgagctctctagcctacgcgagctctacctgcagaataactacctgaccgacgagggtctggacaacgaaacattttggaagctgagttccttggaatatctcgacttgagctccaataatctgagccgtgtacctgcggggctgcccaggtccctggtactgctgcaccttgaaaaaaacgcgatacgctctgtcgacgcgaacgtcttgaccccaatccgatccctcgaatatctgctcctccactctaatcagctccgtgagcaggggatccatcccctggcttttcaaggcttaaagcggctacatacagtgcatctttataataacgccctggagcgcgtgccatctggcctgcctaggcgagtacgaactttgatgatcctgcacaatcagataaccggaattgggcgggaagacttcgctactacctattttctggaggaactgaaccttagctataacaggattacgtcaccacaggttcatcgagatgctttccggaaactccgattactccgcagccttgacctgtccggaaatcgtcttcataccttgccaccggggttgcctcgtaacgtgcacgtcctaaaagtgaagagaaacgagcttgcggcactggccagaggcgcgttggttgggatggcccagctgagagagctgtatctgacctccaacaggctccggagtcgcgctctcggccccagagcgtgggtggacctggctcacttacaactcctcgacatagctggaaatcagctgaccgagatccccgaaggactccctgagtcgctcgagtacctgtacctgcagaacaataaaatcagcgctgttcctgctaatgcctttgactcgacacccaaccttaagggcatttttctccgttttaataagttagcggtgggcagtgtcgtcgacagcgcatttagacgattgaaacatctgcaagttctggacatcgaggggaatctggagtttggagatatctctaaagaccggggacggctgggcaaagaaaaggaggaggaagaggaggaagaggaggaggaagaagaaaccagatag

SEQ ID NO: 129083 - DNA, 1929 bp, synthetic construct
  misc_feature 1..1929: note = Description of Artificial Sequence: Synthetic coding sequence
  source 1..1929: mol_type = other DNA
atggaaggcgaggaggccgagcagccggcctggttcaggcagccctggaggcctggtgctagcgacagcgccccacctgccgggactatggcccagagccgcgtcctgctactcctcttattgctgcctccccagctgcaccttgggcctgttctggcagtgcgcgctcccggattcgggcggtcaggaggacactcccttagcccagaggagaatgaatttgcggaagaggagcctgtgttggttctgtcacctgaggagcctgggcccggcccagcagctgtgtcgtgtcccagagactgcgcctgcagtcaggagggcgtggtggattgcgggggcattgatctgagagaattccccggcgacctgcccgaacacacaaaccacctttcgctgcaaaataatcagctggagaagatttacccagaggagctcagtcgcttgcatagactggagactctgaacctgcagaacaacagactgacctctaggggcctgcccgaaaaggcttttgagcacttaacaaaccttaactacctgtatctggccaataataagctgacactcgctccaaggttcttgccaaatgctctaatttccgtcgacttcgccgctaactatttgaccaagatttacggtctaacattcggccagaaaccaaacctgagatctgtctatctgcacaataataagcttgcggatgctggccttccagataatatgttcaatggtagtagcaacgtggaggtccttattctaagtagcaactttctgagacatgtccctaagcacctgccaccagcactttacaagttgcacctgaagaataataaactggaaaaaatcccacctggtgccttttccgaactgagtagccttagggaactctatttgcaaaacaattatctcacagacgaagggttggacaacgagaccttttggaaactctcttctttggagtacctggacctcagctcgaacaacctctctagggttcccgccggtctccctcggtctctggtcttgctccatctagaaaagaatgcgattagatctgtggatgccaacgtgttgacacccattcgcagcctggagtatttgctactgcacagcaaccagctgagagaacagggaattcacccccttgccttccagggactaaagaggctgcatactgtgcacctttacaacaacgccctggagcgcgtgccctcagggctgccacggcgcgttagaactctgatgatactccacaaccagatcaccggaatcgggagagaagacttcgccaccacatactttttggaagagctaaacttaagttacaacagaataacatccccacaggtgcacagagatgctttcagaaagttgaggctgctcaggtcattggatctgagcggtaacaggttgcacacacttcccccagggctcccacgtaacgtccacgttttaaaagtgaagagaaacgagctggccgccctggcccgcggcgccctcgtaggtatggcccaattgcgggagctgtatctgacctccaacaggttacgctctagagcgttaggaccacgggcatgggtggacctggcacacctacagctgctggacattgccgggaaccagctgacagagattcctgaggggttaccagagtctcttgaatatttgtacctccagaataacaagatctccgcagtgcctgctaatgcattcgactcaacacctaacttgaaaggcatttttctccggttcaacaagctggcagtgggcagcgtggtggactccgcttttcgccgactcaagcaccttcaagtgctggatatcgaagggaatctggaattcggggatatctcaaaagaccggggccgactgggtaaggaaaaggaagaagaggaggaggaggaggaggaagaagaagagactcggtag

SEQ ID NO: 129084 - DNA, 1560 bp, synthetic construct
  misc_feature 1..1560: note = Description of Artificial Sequence: Synthetic coding sequence
  source 1..1560: mol_type = other DNA
atggaaggggccagagcccgcggagcgcaactccggctcggggagagagttcgaccggtgggaagacggtccgcacccggcaggagcagatttcgacagccgtggcgccccggagcctccgatagtgcgccaccagcaggtacaatggcacagagccgtgtccttctccttcttctgctgctgcctccccagttgcatttgggacccgtgctggccgtaagggctcctggctttggccgctccggcgggcacagcctgagccctgaggaaaacgagtttgccgaggaggagccagtcctcgtcctctctcccgaagagcctgggccaggacccgccgccgtgagttgcccgcgcgactgtgcttgttctcaggaaggagtcgtggactgtggaggcatagacctgagggaatttcccggcgatctaccggagcacactaaccacctgagcctgcaaaataacaaactagaaaagattccgccaggcgcattctctgagctctcttcgctgagagagctctatctgcaaaacaactacctgacggatgaaggtctggacaatgagactttttggaaattgtcttctctagagtacctggatctgagtagcaataatctgtccagagtcccagccggtctgccaagaagtctcgtgctcctccatctggagaagaacgcaattcgaagcgttgacgccaacgtgttaacacctatccgtagcttggagtacttgcttctgcattcaaaccaattaagagagcagggtatacatcctctggccttccagggacttaagaggctgcacacagtccacctgtataataacgcccttgagagggtcccaagcggtctccctcgccgagtgcgcaccttaatgattctgcacaatcagattaccggaattggacgcgaggactttgccaccacttacttcctcgaggaacttaacttgagctacaataggatcacttcgccgcaggttcaccgcgacgcatttcgtaaactgaggctgttgcggtctctggacctatccggcaatcgtttgcatactctcccgccggggcttcctaggaacgttcacgtactgaaagttaagcgcaacgaactggcagcccttgcacgaggagctttggtgggtatggcacaactcagggaactttatctcacatctaaccgactccggtcgagagctttggggcctagggcctgggtggacctagctcacctacaactgctagacatagctggcaatcagcttacagaaatcccagaaggcttgccagagagtttggagtatctatatctgcagaacaacaaaatttccgcagtacccgcgaacgccttcgacagcacccctaaccttaaaggaatctttctgcggttcaataagctcgccgtcggttcggtcgtggacagcgcatttcgtcgtcttaaacacttgcaggtgctggacatcgaggggaatctcgaattcggagacatttccaaagaccgggggcgactgggcaaagagaaagaagaggaagaagaagaagaagaggaggaggaggagacccgctag

SEQ ID NO: 129085 - DNA, 1095 bp, synthetic construct
  misc_feature 1..1095: note = Description of Artificial Sequence: Synthetic coding sequence
  source 1..1095: mol_type = other DNA
atggctagggccatggctgccgcttggccccttctgctcgttgcgcttctggtgcttagttggcctcccccggggacgggcgatgtagtggttcaggcaccgactcaggttcccggctttttgggagatagcgtcaccctcccatgctacctgcaggtaccgaatatggaggtaacacacgtgagccagcttacttgggcgcgacatggagagtctggctcgatggccgtgtttcaccagacacaagggcccagttacagcgagagtaagaggcttgagtttgtcgcagctcgattaggagccgagcttaggaatgcaagtctccggatgttcggccttagggtggaggacgagggcaattacacctgtcttttcgttacctttcctcagggtagccgctcagttgacatctggctccgagtgctggccaaacctcagaacacagccgaagtgcagaaggttcaactaacaggggaaccggtacccatggcacgatgtgtgagcactggcggccgacctcctgcacagataacgtggcactccgacctgggggggatgcccaacacatcccaggtgcccggatttctctccggaaccgtcaccgtcactagtctatggatcctcgtgccttccagtcaagtggacggtaaaaatgtcacgtgtaaagtggagcacgaatcgttcgagaagccgcagcttctgacagttaatctgacagtctactacccccccgaggtgagtatttctggttacgataataattggtacctgggccagaacgaagcgacccttacgtgtgacgctcggtctaatccagaacctaccggatataattggagcactaccatgggaccactgcctccatttgctgtggcccagggtgctcagcttcttattcgccctgtggacaaacctattaacacaacactgatttgtaacgtgactaacgccctgggcgccaggcaggcagagttgacagtgcaggtgaaaggtaccgagcacgccagtgcctcagcgaacggccacgtgagttacagcgccgtgtctcgcgagaattccagctcccaggacccccaaacagagggcacgcgatag

SEQ ID NO: 129086 - DNA, 1119 bp, synthetic construct
  misc_feature 1..1119: note = Description of Artificial Sequence: Synthetic coding sequence
  source 1..1119: mol_type = other DNA
atggcccgggccatggcagctgcttggccactcctgttagtggcattactcgtcctgtcttggcctccccctggcactggggatgtcgtagtgcaggctcccactcaggtcccaggctttctgggagactcagtgaccctgccatgttacctgcaggtaccgaatatggaggtgacccatgtgagtcagcttacgtgggctcgacatggagaaagcggcagtatggctgtgttccatcagacacaaggacccagctactctgaaagcaagagattggagtttgtggccgcccggctaggggcagaactcaggaatgcgtcgctccgcatgttcggtctgcgcgtggaagatgaaggcaattatacatgcctcttcgttactttcccacagggatccaggtctgtggatatctggcttagagtgttagctaaaccacaaaacacagcggaggttcaaaaggtgcagctgactggggaaccagtgcccatggccaggtgcgtctcaaccggtggtcggccacctgcccagatcacttggcactccgacttgggcgggatgcctaatactagccaagtcccaggatttttaagcggcaccgtaacggtcacctcactgtggatcctggtcccttcatcccaggttgacggcaagaatgtaacatgcaaagtggaacacgaatcattcgaaaagcctcagctattgaccgtgaacctgacagtgtactaccctcccgaagtgtcaatctcaggctatgacaataattggtatctgggtcagaatgaggccaccctaacatgtgatgcaagatctaatcctgaaccaacaggctataattggtctaccaccatgggacccctgccgccatttgctgtagcccaaggggcacagctgctaatccggccggtggataagcctattaacacaaccctgatctgtaatgttactaacgcgttgggagcacgccaggctgagttaaccgtccaggtgaaggagggccctcctagtgagcatagcgggaccgaacacgcctccgccagcgccaatggtcatgtgtcatactccgctgtttctcgcgaaaattcttcttcccaggatccacagaccgaagggacccgttag

SEQ ID NO: 129087 - DNA, 1179 bp, synthetic construct
  misc_feature 1..1179: note = Description of Artificial Sequence: Synthetic coding sequence
  source 1..1179: mol_type = other DNA
atggctcgggctatggctgccgcctggccactgctgctcgtagccctactggtgctgtcatggcctcctcccgggactggtgacgtggtggtccaggctccgacacaggtgcctggattcctgggagatagcgttacacttccctgttatcttcaggtgcctaatatggaggttacacacgtctcacagttgacctgggccagacatggggaaagtggctcaatggccgtgttccaccagacccagggacctagctactctgaatctaagcgcctagaattcgtggccgcccgcctgggggctgagctacgaaatgcaagcctacggatgttcggcctcagggtggaagatgaaggcaactatacctgtctcttcgtgacttttccacagggtagtagaagtgttgatatctggctgagggtcctcgcgaagccgcagaatacagccgaagtgcagaaagtgcagttgaccggagaaccagtgccaatggcgaggtgcgtgagcactggtgggagaccccccgcacagatcacttggcatagcgacttagggggcatgcctaatacctcccaggtacccggttttttatccgggactgtcactgtaacttctttgtggattcttgttcccagttctcaggtggatggaaagaatgtgacttgtaaggtcgaacacgaatctttcgaaaaacctcagctgctaactgtcaatctaaccgtgtactatcctcccgaggttagcataagtgggtatgacaataactggtatctcggacagaacgaagcgactctgacatgtgatgcccgctctaatccagaacccaccggctacaactggagcacgactatggggccccttcccccgttcgcagtagcgcagggtgctcaactgttgatccggcctgtcgacaaacctatcaacacaactctgatctgtaatgtgaccaatgcactgggcgcccgccaggcagaacttactgtccaggttaaggaaggacctccctccgagcattccgggatctcccggaacgcaattatttttctggtgttgggcatcctagtcttcctcatcctgctaggcattgggatctacttttactggtcaaaatgctcccgggaggttctctggcactgtcacctgtgcccatccagtgaacatcatcaatcatgtcgtaactag

SEQ ID NO: 129088 - DNA, 1254 bp, synthetic construct
  misc_feature 1..1254: note = Description of Artificial Sequence: Synthetic coding sequence
  source 1..1254: mol_type = other DNA
atggcgcgagcgatggcagcagcctggcccctcttgttggttgccctgcttgtgctttcctggcctccacctggaaccggagatgtcgtcgtgcaggcacccactcaagtgccgggctttctcggagactcagtgaccctcccatgttacctgcaggtcccaaatatggaggtgacccatgtgtcacagcttacttgggcacgacacggcgagtccggcagcatggctgtctttcaccagactcagggaccctcctattctgaatcaaagcggttagaatttgtggctgctcggttaggggctgagttgcggaatgcctctctgagaatgtttggcctgcgagtggaggatgaagggaactacacgtgcctgttcgttacgtttccccagggatcaagatcagtggatatctggctgcgggttctggctaagccccaaaatacagctgaagttcaaaaagtgcaactaacaggagagccagtgcctatggcaaggtgtgtgtctactgggggcagaccaccagcgcaaattacctggcattccgatttggggggtatgccaaatacttcccaagtgcccggctttttgtcaggcacagttaccgtgacttctctgtggatcctggtacccagtagtcaggttgacggcaagaacgtgacttgcaaggtagaacatgaaagtttcgaaaaaccccagctgctaactgttaacctgaccgtgtattaccctcccgaggtatctatctcaggctatgataataattggtacttgggccagaacgaggccaccctcacttgcgacgcacgttctaacccagaaccgactggctacaactggtctacaacgatgggaccacttcctcctttcgcagtggcccagggagctcagctcctgatcaggccagtggacaagcccatcaacaccacactcatctgtaacgtcacaaacgctcttggcgcacgccaggccgagctaaccgtacaggtcaaagaaggacccccatcggagcattctggcatatcaagaaatgcaatcatattcctggtattgggcatcttagtctttttaatactgctggggattggcatctatttctactggtctaaatgcagccgcgaggtcctgtggcattgccatctgtgcccaagctccacggagcacgcgtccgcatccgccaatggccacgtaagctactctgcagtctcccgggaaaactcctcatctcaagacccccaaaccgaggggacacgatag

SEQ ID NO: 129089 - DNA, 1554 bp, synthetic construct
  misc_feature 1..1554: note = Description of Artificial Sequence: Synthetic coding sequence
  source 1..1554: mol_type = other DNA
atggcaagaatgggattagctggggcagccggccggtggtggggattggctctaggtctgactgctttttttctcccaggggtgcattcccaggtcgtacaagtgaatgattccatgtatggattcatcggcaccgacgtggtactgcattgttcctttgccaatcccctaccctcagtaaagataacacaggtgacctggcagaagagcacgaacggaagcaagcagaatgtagctatttataatcccagcatgggtgtgtcagtcctcgctccatacagagagcgggtcgagttcttacggcctagtttcacggacggaacgattcgcctgtccagattggaactcgaggatgagggcgtgtacatctgcgagttcgcgacctttccaaccggcaaccgtgaaagccagcttaatttaaccgtgatggcgaagccgacaaattggattgaggggacccaggccgtattacgggctaaaaaagggcaggatgacaaagtactggtggctacctgtaccagcgctaacgggaaacctcctagtgttgtttcctgggagacacgattaaagggcgaagcagagtaccaagagattagaaacccaaatggaactgtcaccgtcatctctagataccgcctagtgccaagccgcgaagcgcaccaacagtccctggcctgcattgtcaactatcacatggatcggtttaaggagtctctgaccttgaatgtgcagtacgagccagaagtgaccattgagggctttgacggaaactggtacctgcagaggatggatgttaaactgacttgcaaagctgacgcaaatcctccagccacggaataccactggaccacgttaaacggctcactgcctaagggggtggaagctcaaaaccggaccctgtttttcaaggggcctatcaattattctctggctggcacttacatctgtgaagccactaaccccattggtacaagaagcggccaagtagaggtgaatatcaccgagtttccctacacgccaagccctcccgaacatggcagaagggctggcccggtccccacggccatcataggtggcgtagctggttctatactgcttgtcctcattgtcgttggcggcattgtggtggcattgcgccgcaggaggcacaccttcaagggggactattcaaccaagaagcacgtctacggaaatggttactcaaaggcagggatccctcaacatcatccccccatggcgcagaacctccagtaccccgacgatagcgatgatgagaaaaaggccggcccattaggcgggtcctcttatgaagaagaagaggaggaggaggaaggaggtgggggaggcgagcggaaagttgggggaccacaccctaagtatgacgaggacgctaagagaccctactttacggtggatgaggctgaagcccggcaagatggatatggcgatcgcaccctcggttatcagtatgatccagaacaactggaccttgctgaaaacatggtgagccaaaatgatgggtcctttattagtaaaaaggagtggtatgtgtag

SEQ ID NO: 129090 - DNA, 1059 bp, synthetic construct
  misc_feature 1..1059: note = Description of Artificial Sequence: Synthetic coding sequence
  source 1..1059: mol_type = other DNA
atggcccgaatgggcttggccggggcagctggccggtggtggggtctggctctggggcttacagccttttttcttcctggagttcactctcaggtggtccaagtaaacgactctatgtacgggtttataggcaccgatgtggtgctccattgctcctttgcaaaccctctgccctcagtgaaaatcacccaggtgacctggcagaagtcgactaatggatcaaagcagaatgttgcaatctacaatccttcgatgggagtaagcgtgctcgctccataccgcgagcgcgtggagttcctacggcccagctttaccgacggtaccattaggctgtcccggctggagttggaggatgagggcgtatatatttgcgagtttgcaacttttccaactggcaatcgggaatcacagctcaacttgaccgtgatggccaaacccacgaattggatcgagggaacgcaggccgtcctaagggctaaaaagggccaggacgacaaggtcctcgtggccacgtgtacaagcgctaatggcaagccgccaagcgtggttagttgggaaactaggcttaagggcgaggccgaatatcaagagatcagaaacccaaacgggacggtgactgtaatctctaggtacagactcgtaccgagccgcgaggctcaccagcagtccctcgcttgtatagtcaactaccacatggacagatttaaggagtctctgactttaaatgtgcaatacgaaccagaagtgacgatagagggcttcgacggaaattggtatctacagcggatggatgtaaaattgacatgtaaggcagatgccaacccgccagccaccgagtatcattggacaaccctgaatgggtcactaccaaaaggggtggaggctcagaacagaaccttattcttcaagggacctattaattacagcctggccggcacttatatctgcgaggcgacaaatccgataggaaccagatctggccaggttgaagtcaacatcactgcattttgtcagttaatctaccctggaaagggcagaacccgggctaggatgttctag

SEQ ID NO: 129091 - DNA, 1377 bp, synthetic construct
  misc_feature 1..1377: note = Description of Artificial Sequence: Synthetic coding sequence
  source 1..1377: mol_type = other DNA
atggcgagaatgggattggcaggtgccgcgggacgatggtgggggctcgctcttggcctgactgcattttttctgccaggagtgcattcccaggtggttcaagtgaatgactcaatgtatggttttataggtactgacgtggtgctacactgtagcttcgctaatccactgccttccgtgaagatcactcaggtgacgtggcagaagagtactaatggcagcaaacagaatgtagcaatctacaacccctcaatgggcgtgtcggtcctggctccctacagggagagagtagagttcctgaggccttcctttacagacggtaccatccggttgtctaggctcgaactggaagacgaaggtgtctacatctgcgaattcgcaacttttcctacaggcaaccgggagagtcagctgaacctaacagtgatggccaagcccactaactggatagagggtacccaggctgttctcagagctaaaaaagggcaagacgataaggtcctcgtcgccacttgtacatccgcaaatggcaagccaccctctgtggtcagttgggaaactcgcctgaaaggagaggccgagtatcaggagatccgaaatccgaacggtacggtaaccgtgattagccgctacaggcttgtccccagccgagaggctcatcagcaatcccttgcttgcattgtaaattaccacatggatcgattcaaggagagtctaaccctgaacgtccagtatgaaccagaggtgaccatagagggttttgatggcaattggtaccttcagaggatggacgtcaagttaacttgcaaggccgatgccaacccgcccgccaccgagtaccattggactactttgaatggcagcctgcctaaaggggtagaagctcaaaatcgcactcttttttttaaaggacccatcaactattctttagccggcacctacatatgtgaggccaccaacccaatcggaacccgcagtgggcaggtggaggtgaacataactgaaaagccgaggccccagcggggactgggatccgccgccagattgctggccggaaccgtggccgtgtttctgattctggtggctgtgcttaccgtcttcttcctgtacaacagacagcaaaaatctcccccagaaaccgatggtgcaggtacggaccagcccctaagccagaagcccgagccttctccttccaggcagtcctcccttgtgcctgaagacatccaggtcgtgcatctcgaccccggaaggcaacagcaacaggaagaagaagacctgcagaaactgagcctgcagcctccctactacgatttaggtgtaagcccctcatatcatcccagcgtgcgcacaacggaaccaagaggagaatgcccgtag

SEQ ID NO: 129092 - DNA, 1617 bp, synthetic construct
  misc_feature 1..1617: note = Description of Artificial Sequence: Synthetic coding sequence
  source 1..1617: mol_type = other DNA
atggccagagccgccgcattactaccatcccggtcaccgccaactcctttgctctggcctctcctgcttctcctactgttagaaacaggcgcacaggacgtgcgggtgcaagtcctgcctgaagtgcgtggtcaactcggaggtaccgtcgagctcccctgccacctcctgccccctgttccaggcctgtacatctctctggtgacatggcagaggcctgacgctccagccaaccaccaaaacgtagctgcattccatcccaagatgggtccaagtttccccagcccgaagccaggaagcgagagactgtcctttgtttcggctaaacaaagtactggacaggacacagaagccgagctgcaagacgctactcttgcactccatggtttaacggtcgaggatgaaggaaactacacgtgtgaatttgctaccttccctaaggggtctgttaggggaatgacctggctgagagttatcgcaaagcctaagaatcaggcagaggcacagaaagtcacgttcagccaagatcccacaacagtggcgttatgcatctccaaagagggaagaccacccgcaaggatttcttggttatcaagcctcgattgggaggccaaggagactcaagtgtccggaaccctcgccggaactgtgaccgtcacatcccgcttcacgctggtccccagcgggcgggcggacggagtcaccgtcacttgcaaagtggaacacgagtccttcgaggagcctgccctaattcctgtcaccttgtccgtgcggtacccccctgaagtttctattagcgggtatgacgataactggtacctgggcagaactgacgcaacactgagttgtgacgtgagaagcaatcctgagccgacaggctatgattggagcactaccagcggcacatttccaactagtgccgtggcacaaggcagccaactggtaatacatgcagtggacagcttattcaacaccacattcgtgtgtacggtgaccaacgctgttggcatgggccgggctgagcaggtaatattcgtacgcgagacaccgaataccgctggcgcgggggcaactggcgggatcatagggggcatcatagcagcgatcatcgccactgcagtggccgccaccggaatcctgatctgtcgccagcagaggaaggaacagacgctccaaggcgcagaggaagatgaggaccttgagggacccccctcctacaagcccccgacccccaaagccaagctggaggctcaggaaatgccatcccagcttttcacccttggcgcctcagagcattctcctttaaaaaccccttactttgacgcgggagcttcttgcaccgagcaggaaatgccacgatatcacgaactgccaacactggaagaaaggtctggacctttgcatcctggggccaccagtctcggaagcccaatacccgtgcctcccggaccacccgccgtggaggacgtttccttggaccttgaggacgaagaaggcgaggaggaggaagagtatctcgataagattaaccccatatacgatgcactctcctattctagtccttccgacagctaccaggggaaaggattcgttatgtctcgggcgatgtatgtgtag

SEQ ID NO: 129093 - DNA, 1440 bp, synthetic construct
  misc_feature 1..1440: note = Description of Artificial Sequence: Synthetic coding sequence
  source 1..1440: mol_type = other DNA
atggcacgcgcagctgccctgttgccgagtagatccccccccactccgctgctgtggccactcctgttgctgctcctgctggagacaggtgcccaggatgtccgggtccaagtgctgcccgaggtgaggggacagcttggcggtactgtggaactgccctgtcatctgttgcctcccgtcccaggtctctatatatccctggtcacatggcagcggcctgacgctcctgccaatcaccagaacgtggcggctttccaccctaaaatggggccatcatttccgagtcccaaaccagggagtgaacgcttaagttttgtaagtgccaaacagagcacagggcaggacactgaggcagaactgcaggatgctacgctggctctgcacggtttaaccgtcgaggacgagggaaactatacatgcgaattcgcaactttcccgaaaggttctgtaaggggcatgacgtggttgcgcgttattgctaaacctaaaaaccaggcagaagctcagaaggtgacctttagtcaggaccccacaacagtcgccctttgcatttcaaaggagggccgccctcccgctaggattagctggttatcgtccctagattgggaggctaaggaaacacaggtgtccggcacactggccggcacagtgacagtgacctctagatttactctcgtgcccagcggaagggccgatggcgtgaccgtaacgtgcaaggtagagcacgagagtttcgaagaacctgcactcattcccgtgacactttccgtgcggtaccccccagaagtttccatcagtggttacgacgacaattggtatcttgggcgaacggatgctacgctaagctgcgatgtcaggtctaaccctgaaccaacagggtacgattggagcaccacgtctggaacatttcctacttcagcggttgcccagggttcacagctcgtgatccatgccgtggactcgctattcaacacgacctttgtatgcaccgtaactaacgctgtggggatgggacgcgccgagcaggtgatatttgtgcgggagactcccagagcttcacctcgcgatgtgggtcctctcgtatggggagcagtgggtggcaccctattagtgcttttactgttagccgggggctcactggcgttcatcctgcttagggtacgccgtagacgaaagtcgccgggcggggcggggggaggagcttcaggagacggagggttctacgacccaaaggcacaggtgctggggaacggcgaccccgtgttttggactcctgtggtaccaggccctatggagccagacggtaaagacgaagaagaagaggaggaggaggagaaggctgagaaaggcttaatgctgccacctccacctgctctggaagacgacatggagagccagctcgacggtagtctgatcagtcggagagcggtgtatgtgtag

SEQ ID NO: 129094 - DNA, 1101 bp, synthetic construct
  misc_feature 1..1101: note = Description of Artificial Sequence: Synthetic coding sequence
  source 1..1101: mol_type = other DNA
atggctaggaccttgcgaccatcccccctctgcccaggggggggcaaggcccagctctcaagcgcctcccttttgggggctgggctgctactgcagccccccacaccccccccgttactgctgctgctcttcccacttctgctgttctccaggctgtgtggagcactagccggacccatcatcgtagaaccccacgtgaccgccgtgtggggcaagaatgtgtcactgaagtgtctgatagaggtgaacgagaccatcactcagatcagctgggagaaaatccacggaaaatcttctcagacggtcgctgtccaccatccacagtatggtttttcggttcagggagaatatcagggtcgagtgctgttcaaaaattatagcctgaacgatgctaccataactttgcataacatcggattttcggacagcggtaagtacatctgcaaggctgttactttcccactcggaaacgctcagtcttctactacagtgacagtgttggtcgagccaactgtaagcttgatcaaggggcctgactcactcatagacggtggtaatgagacagtagctgctatttgtatcgccgctaccggaaagccagtggcgcatatagactgggagggtgacttgggagaaatggagagcacaactacctccttccccaacgagactgccaccataatcagccagtacaagctgttccccacaaggttcgcgagaggtcggcggataacatgcgtcgtgaagcatcctgccctggaaaaagatattcgctattctttcatcctggacatacagtatgcccctgaggtgtcggtgactggatatgacggcaattggtttgtggggcgcaaaggagtgaatttaaaatgtaatgccgatgccaatccccctccttttaagagtgtgtggtcccgcctggatggtcagtggccggatggacttcttgcctccgacaacaccctccactttgttcatcccctgacgttcaactatagcggagtgtacatttgtaaggttaccaatagtctgggccagaggtctgaccagaaagttatctacatttccgcatacaatagtgtggcaagtctgaactgttag

SEQ ID NO: 129095 - DNA, 1650 bp, synthetic construct
  misc_feature 1..1650: note = Description of Artificial Sequence: Synthetic coding sequence
  source 1..1650: mol_type = other DNA
atggcccgcacactgcgaccctccccattgtgccctggcggtgggaaggcgcagttgagcagcgccagtctgctgggcgctgggctgcttttgcaaccgcccaccccacctccgctgcttctgctactgttcccgttgttattattttcccggttgtgcggcgctctggctgggcccattatcgttgagccccatgtcacagctgtttggggcaagaatgtttcattaaagtgtctgatcgaggtgaacgaaaccataacccagatttcctgggaaaaaattcacggcaagtcgtcccagacagttgcagtgcatcaccctcagtacggcttctcggtacagggggagtatcaaggcagagtgctcttcaaaaactactccctaaacgacgcaaccattacattgcataacattggcttctccgactctgggaaatatatctgtaaggccgtgactttccctctgggaaatgcccagtcatccaccactgtcacagtcttggtagaacccacggtgagtctgattaaaggccctgacagcctgatcgacggtggcaatgagaccgtggctgcaatttgcatcgctgccacaggcaaacccgtagcccacatagactgggagggggatttgggggagatggagtctaccaccacatccttcccgaatgagaccgcgaccatcatctcacagtataaactcttccccacaagatttgctcgcgggagacgcattacttgtgttgtgaaacatcccgcactggaaaaggacattagatattccttcatcctggatattcagtatgcgcctgaagtgagtgtgactggatacgacggcaattggttcgtgggtaggaaaggggtgaatctgaagtgcaatgcggatgccaaccctccacccttcaagagtgtctggagtagacttgacgggcagtggccggacgggttgcttgctagcgataatacactgcacttcgtccaccccctgacctttaactacagtggagtctatatatgcaaggtgaccaattccctggggcagcggagtgatcagaaagtgatatatatctcagaccctccaacaactaccacattgcaaccaactattcagtggcatcctagtactgctgatatcgaagacctcgcaactgagccaaaaaagttaccatttcccttaagcacactggctacaatcaaagatgatacaatcgcaacaatcatcgcatccgtcgttgggggtgccttgttcatcgttctagtcagtgtcctggccggcattttctgttatcgccgcagacgaacattcagaggcgattattttgctaagaactacatacccccctctgatatgcagaaggaatcacagatcgatgtcctacaacaggacgagctcgattcataccccgattccgtcaaaaaggaaaacaagaatccagtgaacaatctaattcggaaagactacctggaagagccggagaagacccagtggaacaatgtcgaaaatctgaaccgattcgaacgacctatggattattacgaagatctgaagatggggatgaaattcgtctctgatgagcactacgatgagaacgaagacgacctagtctcccacgttgacggttccgttatcagtcggcgggagtggtacgtgtag

SEQ ID NO: 129096 - DNA, 1464 bp, synthetic construct
  misc_feature 1..1464: note = Description of Artificial Sequence: Synthetic coding sequence
  source 1..1464: mol_type = other DNA
atggcggagggatggagatggtgtttcgtcagaagaacaccagggttattaagagggccactcctccctaggtctttctccggaaatcctcgcgcactggctgggccaattatcgttgaaccccatgtcaccgctgtgtggggtaaaaatgtgtctctgaagtgcctgattgaggtgaacgagactatcacccagatatcctgggaaaagattcatggcaaatcctcccagaccgtggccgtccatcatccccagtacggcttttctgtgcagggtgagtaccagggccgagttctgtttaaaaattattcactaaatgacgcgacgatcaccctgcacaacatcgggttctccgacagtgggaaatacatctgcaaggccgtgacattcccgcttgggaacgcccagagcagtacgactgtcactgtgctcgtagagcctactgtgagtctgattaaaggtcctgattcgctgattgacggtggcaatgagacagtcgccgcaatttgcatcgcggcaacaggcaaaccagtggcacacatagattgggagggcgacctgggcgagatggagagcaccactacatccttccccaacgagactgctacgataatatcgcagtacaagctgtttcctacacggttcgcacgggggcgtcggatcacatgcgttgtaaaacatcccgccctggaaaaggacatccgatactctttcatccttgatattcagtacgctcctgaagtgtcagtcacagggtacgacggtaactggttcgtgggcaggaaaggtgtgaacttgaagtgcaatgctgacgcaaatccgccacccttcaagagcgtgtggtcgaggttggacggacagtggcccgatggcctgcttgccagcgataacaccctgcacttcgtgcatcctcttacctttaactactctggcgtgtacatctgcaaggtgacaaactctctcggacagcggtctgatcagaaagtgatctatatttccgacgtgcccttcaaacaaacaagcagcatagcggttgccggggccgtaatcggtgctgtactcgcactttttatcatagctatctttgtgaccgtcttgctcacaccgaggaagaagaggccttcatatttagataaggtgattgatctgccccccacccacaaaccacctccgctatacgaggaacgcagtccacctttaccacagaaggacttgtttcagcctgagcatttgcctctgcagacccagttcaaggagcgcgaagtcggcaacttgcagcattccaatggcctcaattcccggtccttcgactatgaagacgaaaaccccgtgggagaggatggaatccaacagatgtatcctctctataaccagatgtgttatcaagatcggagtcccggtaagcaccaccagaataacgatcccaagagggtgtatattgatcccagagaacactacgtgtag

SEQ ID NO: 129097 - DNA, 1533 bp, synthetic construct
  misc_feature 1..1533: note = Description of Artificial Sequence: Synthetic coding sequence
  source 1..1533: mol_type = other DNA
atgcctctttccctgggcgcagaaatgtggggcccggaagcttggctcctgctacttttgctgctcgccagtttcacaggccgctgtccggccggcgagttagagacatcggatgtggtgactgtggtgctggggcaggacgcaaaactgccatgtttctaccgcggcgactcaggcgagcaggtcggacaggtggcctgggcaagagtcgacgctggcgaaggcgctcaggaacttgcactgctgcactccaagtacggccttcatgtgtcacctgcgtatgagggtagagtagaacagccacctccccccagaaatcctctcgacgggtcagtgctgctccggaacgcagtgcaggccgatgagggcgagtacgaatgccgagtaagtacttttcccgccggctcattccaggcccgtttgcgcctgagagtcctcgtgccaccattgcccagcctaaatcctggacctgccctggaggagggtcagggccttacactcgcagccagttgtacggctgaggggtcgcccgcaccatccgtaacatgggacacggaggtgaaaggtaccaccagtagtagaagcttcaaacattcacggagcgctgcagtcacaagcgagtttcacctggtgccttcaaggagcatgaacggacagccactgacttgtgtggtgagccatccagggcttttgcaagatcagcgtatcactcatatcctgcacgtttcatttctcgccgaggcatctgtgcggggactggaagatcagaatctgtggcacataggtagagagggcgctatgctgaagtgtctgtccgagggccagccacctccttcctataattggacccgactggacgggcccctccccagtggcgttcgtgtcgatggagatacgctgggattcccgcccctgacaacggagcactctggcatatatgtctgtcacgtgtcgaacgagtttagcagcagagacagccaggtgactgttgatgtcctcgatccccaggaagattccggaaagcaggtcgatttggtctcagcgagcgtggtcgtggtcggagtaatagccgcccttctgttctgtctgctggttgtcgtggtggtcctcatgtctagataccaccgacgaaaagcgcaacagatgactcagaagtatgaagaagagctcactttgacacgggagaattctataagacggcttcatagccaccatacagaccccagatctcagcccgaagagtccgttgggctgagggcagaaggacaccctgattctcttaaagacaactcttcatgttctgtcatgagcgaggagcccgagggccggtcctatagcaccctgacaacagtgcgagagatcgagactcaaaccgaattgctaagcccagggagcggccgggctgaagaagaggaggaccaagatgaggggatcaagcaagcaatgaatcattttgtgcaggagaatggtactcttcgcgcaaagccaaccggcaacggaatatatatcaatggcagaggccacctcgtgtag

SEQ ID NO: 129098 - DNA, 660 bp, synthetic construct
  misc_feature 1..660: note = Description of Artificial Sequence: Synthetic coding sequence
  source 1..660: mol_type = other DNA
atgttgaaatgccttagcgagggtcagccaccccccagctacaattggaccaggcttgacggccctttgccttctggagtacgggtggatggggacaccctcggatttcctccgctcaccaccgaacacagcggcatttatgtctgccacgtcagcaacgaatttagttcccgtgatagtcaagtaacagtcgatgtgctggatccccaggaggactcagggaaacaggtggacctggtttccgcctcggtcgtggtggtgggggttattgctgcactgctgttctgtctactggtggtagttgtggtacttatgtctagataccataggcgaaaggcccagcaaatgacacaaaaatacgaggaggagctcacacttaccagagaaaattccatccgccgcctgcactctcatcatacggatccccgctcccaatcagaggagccagaaggccgttcctacagcacactgacaactgtgcgggaaattgagactcagaccgaactgctgagtccaggctctggaagagccgaggaggaggaggatcaggacgaagggattaaacaagccatgaaccacttcgttcaagagaatggcactctgcgggctaagcctacggggaacggcatctatatcaacggccgcggacacttggtctag

SEQ ID NO: 129099 - DNA, 2058 bp, synthetic construct
  misc_feature 1..2058: note = Description of Artificial Sequence: Synthetic coding sequence
  source 1..2058: mol_type = other DNA
atggagctgctgaggacgattacgtaccagcccgcagcatcaactaagatgtgcgagcaggcattagggaagggttgcggcgctgatagcaaaaagaagaggcctcctcagccgccagaagagagtcaacccccacagagccaagctcaagtccctcccgcagctccacatcaccatcatcatcacagtcattcaggcccggaaatttcgcgcattattgtggacccaactacagggaaaaggtattgtaggggtaaggttcttggtaaaggaggtttcgccaaatgttacgaaatgaccgacctgaccaataacaaagtctatgccgctaagattatcccacattctagggtcgctaaaccccatcagagggagaagatcgataaggagattgagttacatagaatcctccatcacaaacacgtcgtgcagttctaccattacttcgaggataaagagaacatatatatactccttgagtactgtagcaggaggtctatggcccatatcttaaaagccagaaaagttcttaccgagcccgaagttaggtactacctacggcagatcgtgtccggcctcaagtatctgcatgagcaggaaatcctgcaccgcgatctgaagctcggcaactttttcattaacgaggcaatggagctgaaagtgggtgactttgggctggccgcgaggctcgaacccttggagcatcgccgacgaacaatttgtggtacacccaattacctgtcccctgaggtgttaaacaaacagggacatggctgcgaaagcgacatatgggccctggggtgcgtcatgtacactatgctgctggggaggccccccttcgagactacaaacctgaaagaaacttacaggtgtatcagagaagcacggtacactatgccatcgtcgcttctcgccccagccaagcacctcatcgcttccatgttgtcaaagaatcctgaagaccgaccttcattggatgacataatcagacatgacttttttctgcaaggattcacccctgaccgcctgtccagttcttgttgtcatactgtgccagatttccacttgtcttctcccgctaaaaatttcttcaaaaaggcagccgccgccctgtttggaggaaagaaggacaaggctaggtacatagatactcacaatagggtgtctaaagaagatgaagacatctataagctacgccacgacctgaaaaagacttccattactcagcagccgagtaaacaccgaacagatgaggagttgcagccacccacaactacagtggcacgttccgggacccccgctgttgagaacaagcagcagatcggcgacgccatcagaatgattgtccggggcacactggggagctgttcatctagctcagagtgtctagaagacagtaccatgggttcagttgctgatacagtcgcacgtgtgctaagaggatgtctggagaacatgcccgaagccgattgcatccccaaagagcaattgtcaacctctttccagtgggtgactaagtgggtggattatagtaacaagtacggatttggataccagctctctgaccacactgtgggcgtgttgtttaacaacggcgcccatatgagcttactgcctgacaaaaagacagtgcactattacgcagaactgggtcagtgctccgtttttcctgcaaccgacgccccggaacagttcatctctcaagtaacggttctgaaatatttcagtcactacatggaagagaatctcatggacggaggcgacttgccttctgttactgatattcgcaggccacgtctgtatctgctgcaatggcttaaaagtgacaaggccttgatgatgctctttaacgatgggacatttcaggtgaatttctatcatgaccacacaaagatcattatctgtagtcagaacgaagaatacctgttaacctacattaacgaagaccgaatcagcactaccttccggctgactaccttgctgatgagtggctgctcctccgagctgaagaaccggatggaatatgccctaaacatgctgttgcagaggtgtaactag

SEQ ID NO: 129100 - DNA, 1164 bp, synthetic construct
  misc_feature 1..1164: note = Description of Artificial Sequence: Synthetic coding sequence
  source 1..1164: mol_type = other DNA
atggaactccttagaactatcacttatcaacctgccgcatccaccaagatgtgcgagcaagcactgggaaagggctgtggtgccgactccaaaaaaaagcggccgccacagccgcctgaagagtctcagcctcctcaatcccaggcccaggtccccccggaaatcagcagaatcattgtggatccaactactggcaagaggtattgcagaggaaaggtgctcggtaaagggggctttgcaaagtgttatgagatgaccgatctgacaaacaacaaagtatacgccgctaagataattccacactcacgggttgccaagccgcaccaaagggaaaagatagacaaggaaattgaactacatagaattctgcaccataaacacgtggtgcagttctaccattacttcgaggataaggagaacatttatatcctgctggaatactgctcgcgtagatccatggctcatatcctgaaagcgcggaaggttctaaccgagcccgaggtccggtattatctgaggcagattgtgtcaggcctaaaatacctacacgagcaagaaattctgcaccgcgacctgaagctagggaattttttcattaatgaggctatggagctaaaggttggcgattttggcctcgccgcccggctagaacctttggaacatcgcagaaggacgatttgtggaactcctaactatctttccccagaggtcttgaataaacagggccacggctgcgaatccgatatttgggctttaggatgtgtgatgtatacgatgttgctgggtagacctccattcgagaccactaatcttaaggagacatatagatgcatccgggaggcgagatatacaatgcccagctcgttgctcgctcccgcaaagcacttaatcgcctccatgctttccaagaaccctgaggatcggccgtctctcgatgacattattcgccacgacttcttctgcagggcatccttacgtaccgattgcctgctggccgttgtgatccaatttcagatctctacataccaagcccagctacgcatcagcctcagaaaacagctgctcctctttttggtcgccaagaaaaccaagcaggatattcttacgcacatcattgagtgtttaaaaaagatgaaaactagcacatcattgggtatgatatag

SEQ ID NO: 129101 - DNA, 1140 bp, synthetic construct
  misc_feature 1..1140: note = Description of Artificial Sequence: Synthetic coding sequence
  source 1..1140: mol_type = other DNA
atggaacttctaaggacaataacttaccagccagctgcctctactaaaatgtgcgaacaagctttgggtaaagggtgcggagcagactctaagaagaaacggccaccacagccccccgaggagagtcagcccccacaaagccaggctcaggtcccccccgccgccccccaccaccatcaccaccattcacattcaggccccgaaatcagtcgtataatagttgaccctacgactggtaagagatattgtcggggaaaggttctcggaaagggaggattcgccaaatgctacgagatgaccgatctgacgaataacaaagtctatgcagctaaaataattccccactctcgggttgccaaacctcaccagagggaaaagatcgataaggaaatcgaactgcacaggattttacatcacaagcacgtggtgcaattctaccactacttcgaggataaggaaaatatatacatattgttagagtactgctcgagaaggtctatggcacatatcttaaaggcacgcaaagtgctcacagaacccgaggtccgttattacctaaggcagatcgtatcgggattaaagtaccttcatgagcaagagattctgcatcgggacctgaagctgggtaatttcttcataaacgaggctatggagctgaaggtaggagattttgggcttgccgctagacttgagcctctggaacacagaagacggacaatttgcggcactccaaattacctgagtcctgaagtgctgaacaagcaaggccacggctgtgagtcagatatttgggcactgggatgcgttatgtataccatgctgctggggcgcccccccttcgaaacgacgaacctcaaggagacttatcgatgcatccgggaagctcggtatacaatgccctccagtcttctcgctcctgcaaagcatttaattgctagcatgctctctaagaatcccgaagatcgtcctagcctcgatgacattatcaggcatgacttctttctccaaggtttcactccagaccgtctgtcttcttcgtgttgccacactgttcccgattttcacctcagcagccccgccaagaatttttttaagagagccgcggagcatatcatctcagtcggacaccagatgggctag

SEQ ID NO: 129102 - DNA, 1476 bp, synthetic construct
  misc_feature 1..1476: note = Description of Artificial Sequence: Synthetic coding sequence
  source 1..1476: mol_type = other DNA
gtagatctcctgcgagctggcgaggttccaaagccattccccactcattacaaggacctgtgggacaataagcatgtcaagatgccctgtagtgagcagaacctttaccctgtcgaagatgagaatggggagaggacagcgggctcccgctgggaactaatccagacagcgctcctcaataaatttacacgaccccagaacctgaaggacgctattttaaaatacaacgttgcttactccaagaaatgggactttacagcgctgatcgacttctgggataaggtcctcgaggaggcagaagcccagcatttgtatcaatctatactcccagatatggtgaaaatcgctctgtgtctgcctaacatttgcacccagcccattcctcttctgaagcagaaaatgaaccactccataaccatgagtcaagaacagattgcgagtctcttggccaatgccttcttctgcacctttccgagacggaacgccaaaatgaagtcagagtactcatcctatcccgacattaacttcaacagattgttcgagggacgctctagccgtaagcccgaaaaacttaagaccttgttctgttactttaggagagtcacggagaagaagcccaccgggttggtcacgtttacccgtcaatccctcgaggatttccctgaatgggagcgttgcgagaaacctttgacacgcctgcacgtgacttacgagggcacaattgaggaaaacgggcaggggatgttgcaggtcgacttcgcgaataggtttgtgggagggggagtgacctcagcgggcctggtgcaggaagagattcgcttcctaattaatcccgagcttatcattagccggctgttcacagaggtgttggatcacaatgagtgtctgattatcaccggtaccgagcagtactctgagtatactggctacgcagagacgtatagatggtccagatcccacgaagatggatcagagcgagacgattggcaacgcaggtgcacagagattgtggcaattgacgccctgcacttcagacgatatctcgaccagttcgtgcccgagaagatgcggcgagagctgaataaggcgtactgcggctttctaagacccggcgtctcttctgaaaatctttcagctgtcgctaccgggaattggggatgtggcgcctttggcggcgatgcacgtctgaaggcccttatccagattctggccgcggccgcagctgagagggatgtggtgtacttcacttttggggacagcgaattgatgcgagatatctattccatgcacatcttcctcactgagagaaaactgacggtgggggatgtatataaattactgctgcgctattataatgaagagtgcaggaattgttcaacaccaggtcccgatattaaactctacccttttatctatcacgcagtggaaagttgtgcagagaccgccgaccattccggccagagaaccggaacctag

SEQ ID NO: 129103 - DNA, 579 bp, synthetic construct
  misc_feature 1..579: note = Description of Artificial Sequence: Synthetic coding sequence
  source 1..579: mol_type = other DNA
taaaccgaacagtattctgaatatacagggtatgctgaaacatatcgctggtctcgctcacacgaagacggttccgagagagatgattggcagaggcggtgtaccgagattgttgctatagatgccctgcacttcagacgctacctcgatcagttcgtaccagaaaagatgcgcagagaactgaacaaagcatactgtggcttccttcgacccggagtgagcagcgaaaacctgtcagccgtagctactggcaattgggggtgtggagctttcggcggggacgctcggctcaaggccctcattcagatactcgcagccgccgctgccgagagagatgtcgtgtatttcaccttcggggacagcgaactgatgcgggatatatactctatgcacatctttttaactgaaaggaaactcacggttggggatgtttacaagctactgctaagatattacaatgaggaatgccgaaattgctctacgccggggcctgacattaagctgtacccctttatataccacgccgttgagagctgtgccgagactgcggatcatagtggccagcggacgggcacatag

SEQ ID NO: 129104 - DNA, 468 bp, synthetic construct
  misc_feature 1..468: note = Description of Artificial Sequence: Synthetic coding sequence
  source 1..468: mol_type = other DNA
atggctgagagctccgacaaattatatcgggtggagtacgctaagtcgggccgggcttcctgcaagaaatgctctgaatcgattccaaaggattctttgagaatggccattatggtgcagagccctatgttcgacggcaaggtccctcattggtatcacttttcgtgcttttggaaagtaggccatagcattagacaccctgacgtggaagtcgatggattcagtgagcttcggtgggatgatcagcagaaggttaagaagacagccgaagctgggggcgtgactggagtctatatcctcgggcagcatgggcattctgcccctactctgaaactgcccgggggccccaggctccgggagcagtccaagcctcctccggcgtgtcctttgcctcatgtgcaaatcaagaggatggtacctatgctgttccagcaacacctgcttgattccgccagcagtgttgcatag

SEQ ID NO: 129105 - DNA, 327 bp, synthetic construct
  misc_feature 1..327: note = Description of Artificial Sequence: Synthetic coding sequence
  source 1..327: mol_type = other DNA
atggcagagtctagcgacaaactgtatagagtagaatacgccaagtccggaagagcatcctgtaagaagtgtagtgaatctatcccaaaggatagtcttcgtatggcgatcatggtacagagcccaatgttcgacgggaaggtcccgcactggtaccatttctcgtgtttctggaaggtggggcatagtattcgacacccagacgtggaggtcgacggtttctccgagttacgttgggatgaccaacagaaggtcaagaaaacggccgaagccggtggagttaccgagcctcctatcccatgcggtattgaagtcatgggacgctag

SEQ ID NO: 129106 - DNA, 327 bp, synthetic construct
  misc_feature 1..327: note = Description of Artificial Sequence: Synthetic coding sequence
  source 1..327: mol_type = other DNA
atggccgagtcctcagacaaattgtatagagttgagtacgccaagtcgggtcgcgcgagttgcaaaaaatgcagtgagtcgattccaaaagacagtctgcggatggccatcatggtgcagtcccctatgtttgatggcaaagttccacactggtaccatttcagctgcttttggaaggtcggtcattccatacggcatcctgacgtcgaagttgacgggttctctgaactgagatgggatgatcagcagaaagttaagaaaacggctgaggccggcggtgtgactgaaccaccaatcccgtgcggcatcgaagttatgggcaggtag

SEQ ID NO: 129107 - DNA, 3045 bp, synthetic construct
  misc_feature 1..3045: note = Description of Artificial Sequence: Synthetic coding sequence
  source 1..3045: mol_type = other DNA
atggccgaatcctctgataagctgtaccgcgttgagtatgccaagagcgggagagcatcttgtaagaaatgttctgaatctatcccaaaggattcccttcggatggccattatggtacagtccccaatgttcgatggcaaagtcccacactggtatcactttagctgcttctggaaggtgggacattctatccggcacccggacgtagaagtagacggcttctccgagcttagatgggatgatcagcagaaggtgaaaaagacagccgaggctggtggggtaactggaaagggtcaggacggaatcggcagtaaggcagaaaaaaccctgggggactttgcggctgagtatgctaagtctaatcgcagcacctgcaaaggctgcatggagaagatcgaaaaagggcaagttcgtctttcaaagaaaatggtggaccccgaaaaacctcagttgggaatgatcgacagatggtatcaccccggctgttttgttaaaaaccgcgaagaattgggcttccggcccgaatatagcgcctcgcaactgaagggcttttccttgctcgcaaccgaagataaagaagccttaaaaaaacagcttcccggtgtaaagtccgaagggaagcgcaaaggtgatgaggtggatggagtcgacgaagtagctaagaagaagagcaaaaaggagaaagataaggattcaaaactcgaaaaggcactcaaggcccagaatgacctcatctggaacatcaaggatgaactgaaaaaagtgtgcagtaccaatgacctgaaagagctcttgatatttaacaagcaacaggtccctagcggagaaagcgccatcctggatcgcgtcgccgacggcatggttttcggtgctctgttgccatgtgaagagtgtagtggccaattagtattcaaatcagacgcatattactgcactggtgatgtcacagcgtggacgaaatgcatggtgaagacacagacaccgaaccgaaaagaatgggtgacccccaaagagtttcgcgagatctcatacctgaaaaaactgaaggttaagaaacaggatcgcatttttccacctgaaacttcagcttcagttgccgccacacccccccccagtactgcctcagctcctgccgcagtcaacagttccgcttcagcggataagccactatcgaacatgaagatcctgacactgggtaagctctcgagaaacaaggacgaagtcaaggccatgatagagaaattgggagggaagctcaccgggactgcaaataaagcatctctttgcatctcaactaaaaaagaggtggaaaagatgaataaaaaaatggaggaagtaaaagaagcaaatatcagagtggtatcagaggacttcctgcaagacgttagtgccagcacaaagtcattgcaggagttgtttctcgcccacattctctcaccctggggcgctgaggtgaaggccgaaccagttgaggtggtggcaccaagaggcaagagcggcgccgcactttctaaaaagagcaagggccaggtgaaggaggaggggatcaacaagtccgagaagcgcatgaagctaactctcaaggggggcgccgctgtggatcccgattctgggctggagcactccgcacacgttcttgagaagggcggaaaggttttctccgctacactcggcctggttgatattgtgaaggggaccaacagttactacaagctgcagctcctggaggatgataaggaaaatcgatactggattttccggtcctggggacgggttggtactgtgatcggttcaaataagcttgaacaaatgccgagtaaggaggacgccattgaacacttcatgaaactgtatgaagagaagactgggaacgcttggcactccaagaattttacaaagtaccctaagaagttctacccgttagaaattgattacggccaggacgaggaggccgtaaaaaagctcacagtaaatcctggcaccaagtctaaattacccaagcccgtgcaggatctgattaagatgatcttcgatgtagagagcatgaagaaagcaatggtggagtatgagattgacctgcagaaaatgccattgggtaagctgtcaaagcgccagattcaggccgcttactctatcctctcagaggtccaacaggcggtaagccagggctcatccgacagccagatcctagatctgagtaaccgcttctatactctaatcccccatgatttcggcatgaaaaagcccccgctcctcaacaacgccgattcagtgcaagccaaggtagagatgctggacaatctccttgatatcgaagttgcctactccctgcttcggggcggatccgacgatagcagcaaagaccctatcgacgtgaactatgaaaagctaaagactgacataaaagtcgtggaccgggattcagaggaagcagagatcattcggaagtatgtgaagaatacacacgccacaactcacaatgcctacgatctcgaagtcatagacatcttcaagatcgaaagagaaggagagtgtcagcgttataagccattcaagcagttacacaacaggcgccttctgtggcatggcagtcgcacaactaattttgcaggaattctgtcccagggtctgaggatcgcaccccccgaggcccccgttacaggatacatgtttgggaaggggatctacttcgctgacatggtttctaaaagtgccaattactgccatacgtcccagggcgatccgataggcttgatactgttaggtgaggtggctttgggcaacatgtatgaattgaagcacgccagtcatatcagtaagctgcctaaggggaagcatagtgttaaagggctgggaaagaccacgcctgacccgtccgccaacatatctctcgatggggtcgatgtaccgctaggaacaggaataagttccggtgtgaacgatacaagtctcctatataacgagtacattgtctatgatatcgcacaggtgaacctgaagtatcttttgaaattgaaattcaatttcaaaacatctctgtggtag

SEQ ID NO: 129108 - DNA, 753 bp, synthetic construct
  misc_feature 1..753: note = Description of Artificial Sequence: Synthetic coding sequence
  source 1..753: mol_type = other DNA
atggctgagagctctgacaagctctaccgagtggagtatgctaaaagcgggcgcgcctcctgcaagaagtgctctgagtcgatacctaaggattctttgcgcatggcaattatggtgcagtccccgatgttcgatgggaaagtgccccattggtaccattttagttgtttctggaaagtgggtcatagcattcgccatcccgacgtggaagtggacggattctccgaattgcgttgggatgaccagcagaaagttaagaagactgcggaggccggcggcgtgaccggcaagggccaagatggcatcgggtccaaggcagagaaaactctgggcgatttcgctgcagagtatgctaaaagtaacaggtctacatgcaagggctgtatggagaagatcgaaaagggccaggtgaggctgtctaagaagatggtagaccccgagaagccgcagttgggaatgatcgacagatggtatcacccggggtgctttgtaaagaatcgcgaagagctgggatttcggcccgagtacagtgcgtctcagctgaaggggttctctctgttggccacagaagataaggaggctctgaaaaagcagctgcctggcgtaaagagcgagggcaagaggaagggggacgaagtagacggggtagacgaagttgctaaaaagaagtcgaaaaaggaaaaagacaagaagaagaagaagaaaaagaagaaggaacgtaagaagaaaaagaaaaagcggaaaaagaagtag

SEQ ID NO: 129109 - DNA, 2133 bp, synthetic construct
  misc_feature 1..2133: note = Description of Artificial Sequence: Synthetic coding sequence
  source 1..2133: mol_type = other DNA
atggatttttccatggtggccggcgccgcagcctataatgaaaaaagtgaaaccggcgcactgggtgagaattactcctggcaaatcccgatcaatcataacgatttcaagatattgaagaacaatgaaagacagctctgcgaggtgctgcagaataaatttggatgtatctcaacattagtgtcacccgtacaggaggggaatagcaagtccctccaggtatttagaaagatgctgacgccacgcatcgagctgtcggtctggaaagacgatcttactacccatgctgtcgatgctgtcgtgaacgctgctaatgaggatttgctccacggcggcggccttgccctggctttagtgaaggccggcggattcgaaatacaggaggagtcaaaacagtttgtggctaggtacggcaaggtttccgcaggtgagattgccgtgacaggcgcgggcaggctgccatgcaagcagatcatccatgcagtgggaccacgctggatggaatgggataaacagggttgtacgggaaaacttcagcgggcgattgtgtccatacttaactacgtaatatacaagaacacgcacatcaagacggtagccatacccgccctttcatcgggaatctttcagttcccgctgaatctgtgtactaagactattgtggagacaattagggtcagcttacagggcaaacccatgatgtctaatctgaaagaaattcatctggtttctaacgaagaccctactgtcgccgcctttaaggctgcaagcgaatttatccttgggaagtccgaacttggtcaggagaccacacccagtttcaacgcgatggtagttaacaacctcactctccagattgtacagggccatatcgagtggcagactgccgacgtcatcgtcaactccgtaaaccctcacgatattacagtgggaccagtggccaagtcaatactgcaacaggctggcgttgaaatgaagagtgaatttctggctaccaaagccaagcagtttcagcgcagtcagctggtcctggttacgaaaggcttcaacctgttctgcaaatacatctatcatgtgctgtggcactcagagtttccgaagccccaaattctgaagcacgctatgaaggaatgtctcgaaaaatgtatcgagcagaatattacctctattagtttccccgccctggggaccgggaatatggagatcaagaaggaaacagccgctgaaattttattcgatgaggtgttaacgttcgccaaggaccacgtcaagcaccaattaacagtgaaatttgtcatcttcccaacagaccttgagatttataaggcattttccagcgagatggctaaaaggagtaagatgttatccctgaataattatagtgtcccccagtcaacacgcgaagagaagagagaaaacggcttagaagccaggtctcctgcaattaacctgatggggttcaacgtggaagagatgtacgaggcccatgcttggattcagcgaattctttcactccagaatcatcacataattgaaaacaaccacattctgtacctagggcgaaaagagcatgatatcctgtcccagcttcaaaagacctcgtcagtatcaatcaccgagatcatttctccaggtcgcaccgaactcgagatagaaggggctagagctgatcttatcgaggtcgttatgaacattgaagacatgctatgtaaggtgcaggaagaaatggcccgtaagaaggagcggggattgtggcggagcttggggcagtggacgattcaacaacagaagacccaggatgagatgaaggagaacataatcttcctcaaatgtccagtcccacctacgcaggagctcctggatcagaaaaaacagtttgaaaagtgcggtttgcaggtgttaaaagtggaaaagattgacaacgaagtactaatggcggcattccagcgcaagaaaaagatgatggaagagaagctgcataggcaacctgtgagccacagacttttccagcaggttccgtaccagttctgtaacgtagtgtgcagggtgggttttcagagaatgtattcaaccccttgtggcaggtgtcaatgtctgatcatcggagcaacactctggaacctggtatcttag

SEQ ID NO: 129110 - DNA, 2460 bp, synthetic construct
  misc_feature 1..2460: note = Description of Artificial Sequence: Synthetic coding sequence
  source 1..2460: mol_type = other DNA
atggattttagcatggtcgccggagcggctgcttataatgaaaaaagtgaaacgggggcactgggtgagaattattcttggcagatccctataaaccataacgacttcaaaatcttgaagaataatgaacgccaactttgcgaggtcttgcagaataaattcggatgcataagcaccctggtgagccctgttcaggaggggaattctaagtctctccaggtgttccgaaagatgctgactccaaggatcgaactttctgtttggaaggatgatctgaccacccatgcagtcgacgccgtggtgaatgccgccaacgaagacctattacacggaggagggttggcgctggccttggtgaaggctggtggcttcgagatccaagaggaaagcaagcagttcgttgcgagatacggaaaggtgtccgcaggggagatagcagtcacaggcgccggtcggttgccctgtaagcagatcattcatgctgttggtccacgttggatggagtgggataagcaggggtgcactggcaaattgcagcgggccatcgtatctatcctgaattacgtaatttataagaatactcacatcaagactgtggccatccccgcattgtcatcagggattttccaatttcctctcaatctgtgcactaagaccattgtggaaaccatcagggtgtctctgcagggcaagcccatgatgagtaatcttaaggagatccacctggtgtcgaatgaagacccaacagtggctgcctttaaagcggctagtgaattcattcttggaaaatctgaactggggcaggagacaactccaagtttcaatgccatggttgtgaacaacttgactctgcagattgtgcaggggcacattgagtggcagacggcagacgtgatagttaactcggttaacccacacgatataactgtgggtccggttgcaaaatcaatactgcaacaggctggcgtggagatgaaatccgaatttctggctacaaaagccaaacagttccagaggtctcaactggtactggtgaccaagggatttaatcttttctgcaaatatatctatcacgtgctttggcattcggagtttcctaagcctcagatactgaagcatgctatgaaagagtgcttggagaagtgtatagagcaaaatatcacaagcataagctttcctgcactgggcaccgggaatatggagattaagaaagagacagcggccgaaatattattcgatgaggtgttgaccttcgccaaagaccatgttaagcaccagctgaccgttaagtttgttattttccctaccgacctcgaaatctacaaagcgttcagcagcgagatggccaagaggagcaaaatgctctcactaaataattactctgtccctcagtcaactagggaggaaaaaagagagaacggtcttgaggctaggtcgcctgccataaatcttatggggtttaatgtcgaggagatgtacgaggcccacgcctggatccagcggatcctgtcgttgcaaaatcaccacattattgagaataatcacatcctgtacctgggtaggaaggagcacgacattttgtcccagctccagaagacctcctctgtgtcaattaccgaaattatcagtcccgggcgcactgagcttgagatagaaggcgctagagccgatctgatcgaagtggtgatgaatattgaagacatgctttgcaaagtgcaagaggagatggcacggaagaaagaaagggggctctggagaagtcttggacagtggactatccagcagcagaaaacccaggacgagatgaaagagaacattatttttttaaaatgccctgtcccgcctactcaggagttgttggaccaaaagaagcagttcgagaagtgtggtctgcaggtgttgaaggtcgagaaaatcgataatgaggtcctgatggcagcttttcagaggaaaaagaagatgatggaagagaaacttcaccggcaacccgtttcccaccggctgttccaacaagttccctaccagttttgtaacgtcgtgtgcagggttgggtttcagcgcatgtacagcaccccctgtgaccccaaatacggcgctggaatctacttcactaaaaacctcaagaatcttgcagagaaggcgaaaaaaatttccgctgccgataagttgatttacgtgttcgaggcagaggtgctgactggctttttctgccagggccaccctctgaatattgtgcctccgcccctgtcccctggtgctatcgatggtcatgactccgtggtggataacgtgtcatctcctgagactttcgtgattttctccggcatgcaggccatcccccagtacctttggacttgtacccaggagtacgtgcaatcccaggactatagctctgggccaatgcggccgttcgctcagcatccatggcgtggctttgcatctggctcaccagtggactag

SEQ ID NO: 129111 - DNA, 2106 bp, synthetic construct
  misc_feature 1..2106: note = Description of Artificial Sequence: Synthetic coding sequence
  source 1..2106: mol_type = other DNA
atggcccaggctggagtggtcggagaggtcactcaagttctgtgtgccgccggcggggccctggaacttccagagctgcggcggaggctccgtatggggctatccgccgacgccctggagagactgctacgccagaggggccgtttcgtggttgccgttcgtgccggaggtgccgcagccgctccagagcgcgtggtcttagcggcaagccctctgaggctgtgtagagctcaccaaggttcaaaaccaggctgtgtgggactctgcgctcagttgcatttgtgtcggttcatggtgtatggggcatgcaagtttttgcgtgccggcaagaactgccggaactctcacagtttgacgacagaacacaatctgagtgtgctcaggacccacggggtcgatcacttgtcatataatgagttgtgtcagctgttgttccagaatgatccatggctgctgccggagatttgtcagcattacaataaaggagatggtccccacgggtcctgcgctttccagaagcagtgcattaagctacatatctgtcagtacttcctacagggcgagtgcaaattcggtactagttgcaagcgctcacatgatttttctaactccgaaaacctggaaaagctcgaaaaactgggtatgtctagtgacctcgtaagtaggctgccaactatatacaggaacgcccatgatatcaagaataaaagcagcgcaccgtctcgtgttcctccgctgttcgtccctcagggtacaagcgagcgcaaggattcctctggcagcgtgtcacctaacacactgtctcaagaagaaggtgaccaaatttgtctgtaccatattagaaagagctgctcattccaggataagtgccatagggtgcatttccacttgccatatcgatggcaattcctcgataggggaaagtgggaagacctcgataatatggaactaatcgaagaggcctattgcaacccaaaaatagagcgaatactctgctctgaaagcgcgtccaccttccacagccactgcctgaactttaacgcaatgacatatggggcaacacaagcgcggaggctgtctactgcgagctccgtcactaagccgccacacttcatactgacaaccgactggatctggtattggagcgatgaatttggctcgtggcaggaatacggccggcagggaacagttcacccagtcactacggtatctagcagcgatgttgagaaggcctacttagcttactgtactccgggctcagatggtcaggcggccacactcaaatttcaagctggcaaacataattatgaattagatttcaaagcgttcgttcagaaaaatctcgtttacgggaccacaaagaaggtttgccgccgccctaaatacgtcagtcctcaggacgtcactacaatgcaaacctgtaataccaaattccctggcccgaaatcaatccccgattactgggattcatccgccctacctgaccccgggtttcagaaaataactcttagttcctcatctgaagagtatcaaaaagtttggaatcttttcaataggacactgcccttctatttcgtgcagaagatcgaacgtgtccagaacctggcactgtgggaagtgtaccaatggcaaaagggccagatgcaaaagcagaatggtggaaaggcagtggacgaacgacagctgttccatggcacgtcagcaatttttgttgacgcaatctgccaacaaaatttcgactggagggtgtgtggcgtgcacggtacgtcctacggcaaagggagctactttgctagggacgctgcttattcacatcattactcaaagtccgatactcagactcacactatgtttctggctcgcgttcttgtgggtgagttcgtgcgcgggaatgcaagctttgtcaggcccccggctaaggaggggtggtccaatgccttttacgactcgtgtgtgaacagcgtttccgatcccagcatatttgtgatctttgagaaacaccaagtttatcccgagtacgtgattcagtacactacaagttctaaacctagtgttacaccatcgattttgctggcgctgggctctcttttttcatcacgccagtag

SEQ ID NO: 129112 - DNA, 393 bp, synthetic construct
  misc_feature 1..393: note = Description of Artificial Sequence: Synthetic coding sequence
  source 1..393: mol_type = other DNA
atgttcctggcacgtgtgctcgttggcgagtttgtgaggggaaacgcaagcttcgtcagaccacctgccaaggaggggtggagcaacgccttttacgattcatgcgtgaactctgtgtcagaccccagcatcttcgtgatcttcgaaaagactaggagtacccagtcaatgagttctagcacaccaccccctccttctcccaggtctcatcccccttcctgttggccctgggcgccttgttcggcagctgacagcgagagaaccggagtgtttcaggcgttccatctactctgcctagagatggctatatgggccttcccatttttgttcaaacagaaattgctaatgaactgcagcttgaatatcgatctgtctatgaaactctgctcttag

SEQ ID NO: 129113 - DNA, 849 bp, synthetic construct
  misc_feature 1..849: note = Description of Artificial Sequence: Synthetic coding sequence
  source 1..849: mol_type = other DNA
atgagtaagttggcctcctttctgggatttagtaagcagtcgccacaaaagaagaatcatctggttctcgaaaagaagacagagagcgcaacattcagagtttgcggggaaaatgtgacctgtgtagagtacgcaatatcctggctccaagatctgatagagaaggagcaatgtccatacacatctgaggacgagtgcattaaggatttcgatgaaaaggagtaccaggagctgaatgagctgcagaagaagttaaatattaacatcagcctggaccataaacgacctctgattaaggtactggggatttcacgggatgtgatgcaggcccgagacgagatcgaagctatgatcaaacgagtgagactggcaaaggagcaagagtccagagccgactgcatttcagagttcatcgagtggcagtacaacgataataatacatcccactgttttaacaagatgaccaatctaaagctggaagacgcccgtcgagaaaagaaaaaaactgttgacgtgaagataaatcaccgtcattacacggtgaaccttaacacatacaccgccaccgacaccaaagggcatagtctgtccgtccaacgcctgaccaaaagcaaagtggacatcccagctcactggtccgacatgaaacagcagaacttttgcgtcgtggagctcctcccctccgaccctgaatacaacaccgtggcttcaaagttcaaccagacatgctctcactttagaatagaaaaagtgaatgttatgatcagggcctgttcgccatcctactgggaagccgaggttgagggtttgcatgagcccaggtcactcacaccagtgtgggtgacctag

SEQ ID NO: 129114 - DNA, 2394 bp, synthetic construct
  misc_feature 1..2394: note = Description of Artificial Sequence: Synthetic coding sequence
  source 1..2394: mol_type = other DNA
atgtacttgaggcgcctgttgcgccccctacagatgctgctggtgaaagagggggtgcaaaacgccaaaaccgatgtagtcgtgaatagtgtgccgctcgacctggttttaagtcgcggccccttgagcaaaagcttactagagaaggccggccctgagctccaggaggagcttgacactgtaggccaaggagtggcagtcagcatgggcaccgtgctaaaaacctcctcttggaatctggattgcagatacgtgcttcatgtcgtggctcccgagtggagaaacggaagtacatcaagcttaaaaatcatggaggatatcataagggaatgtatggaaatcactgagtcccttagcctgaaatctattgctttccccgctattgggactgggaaccttggttttccgaaaaatatctttgctgaactgatcatttctgaggtttttaaattctcatccaagaatcaactcaaaaccctgcaggaagtgcatttccttctgcacccaagcgaccacgaaaacattcaggcgtttagcgacgagttcgcacgtcgggctaacgggaatttagtctcagataaaattcctaaagcgaaagacacccaaggattttatggcaccgtgtctagcccagacagtggcgtgtacgagatgaaaataggctcaataatcttccaggtggcctcaggagacatcaccaaagaggaagccgacgtgattgtgaacagcacgagcaactccttcaatttgaaggcgggcgtgtctaaggcaatcctcgagtgcgccggccaaaacgtggagagagaatgctcccaacaggctcagcagaggaagaacgactatatcataaccgggggaggcttcctgagatgtaagaatataattcatgttattgggggcaacgacgtgaaaagcagcgtgtcttccgtattgcaggaatgcgaaaagaagaattattcttccatatgcctgccagcgatcgggacaggcaatgctaaacagcatcccgacaaggtggcagaggcaattatcgacgccattgaagacttcgtccagaaaggttcagcccagtctgtcaagaaggttaaggtggtgatcttcctaccacaggtgctagacgtgttctatgcgaacatgaagaagagagaaggcacacagttgtcctctcaacagagtgtcatgtcaaagcttgcctcatttctgggcttctccaagcagtcaccacagaaaaagaatcacctggttctcgaaaagaagaccgagtccgcaaccttccgagtttgtggggagaatgtgacctgcgtcgagtatgctatttcctggttacaagacctaatcgagaaggagcaatgcccatacacctcagaggatgagtgcataaaggatttcgacgagaaagagtaccaggagttgaacgagttacagaagaaacttaacatcaacatcagtctcgaccacaagaggccacttatcaaggtgttaggtatttctagagatgtcatgcaggccagggacgagattgaagccatgattaaaagggtacggttggccaaggagcaggagtcccgcgctgactgcatatctgagttcattgagtggcaatacaatgacaataataccagccattgttttaataagatgacaaacctgaagctcgaggacgcacggcgggagaagaaaaagactgtcgatgtaaaaattaaccaccggcactatacagtcaatctcaatacatatactgctactgacaccaagggacactccctctcagtacaacgcctgacaaagagcaaggttgatattccagcccactggtctgacatgaagcagcaaaatttctgcgtcgtggaactgctgccaagcgacccggaatacaacaccgtagcttcaaagtttaaccagacctgttctcacttcagaatcgagaagatcgagcggattcagaaccccgatctgtggaatagttaccaggccaaaaagaagaccatggatgctaagaacgggcagacaatgaatgagaagcagctgtttcatggaacagatgctggatcagtcccccacgtcaatcggaatggtttcaatcggagttatgccggcaaaaatgccgtggcctacgggaagggcacttacttcgcggtgaatgcaaattatagtgccaatgacacctattctcgccctgacgccaacggacggaaacatgtctactatgtccgcgtgctgacagggatatatacacacgggaatcactctctgatcgttccaccatctaagaacccccaaaatcctactgatctgtacgatacagtcacagacaacgtgcaccatccctctttgttcgtagctttttacgattatcaggcctacccggaatacctcatcacattcagaaaatag

SEQ ID NO: 129115 - DNA, 5163 bp, synthetic construct
  misc_feature 1..5163: note = Description of Artificial Sequence: Synthetic coding sequence
  source 1..5163: mol_type = other DNA
atggccgtgccaggctcctttcctctgctagtcgaaggttcctgggggcccgacccaccgaagaatctgaacacgaagctccagatgtattttcagtccccaaaaaggtctggagggggtgaatgtgaagtacgccaggacccgagaagcccttctcgctttctggtgtttttttaccctgaagacgtgcgccagaaggttctagaaaggaagaatcacgaacttgtatggcaggggaaaggtacctttaaactgactgtgcagttaccagccacaccagacgaaatcgatcacgtcttcgaagaggagttactgaccaaggaatctaaaactaaagaagacgtaaaagaacccgacacaattaggtttgtcgacgactgtacaaaacatcactcaatcaaacagctgcagctgtccccaaggctcttggaggttactaatactatccgagttgagaaccttccccccggggccgatgactattctctaaaattattctttgagaacccctataacggagggggacgggtggccaatgtcgaatacttcccagaggagtcttccgcactgatcgaatttttcgatagaaaagtccttgacaccattatggccacgaaactggactttaataagatgcctcttagcgtgtttccatactacgcttcactgggtacagcattatacggaaaggaaaagcccttaattaaactgccggccccctttgaggagagcctggatctccccttatggaagttcctacagaagaaaaaccacctgattgaagaaataaatgatgagatgagacgctgccattgcgagctgacctggagtcaactcagcggcaaagttacgatcagaccagcagctaccctggtgaatgagggaaggccacgtatcaagacctggcaggcagatactagcacaaccctcagctcaatacggagcaagtataaagttaatcctataaaggtggatccgacgatgtgggatacaattaagaacgatgtgaaagacgaccgcatacttatcgaatttgacacgctgaaggaaatggtaatactggcgggcaaatcagaagacgtgcagtctattgaagtgcaagtgagggaactgattgaatccaccacacaaaagatcaagagagaggaacagtctctgaaagaaaagatgattatttctccaggccggtacttcctgctgtgtcactcttccctgctggaccatctcttgacggagtgcccagaaattgagatttgttacgatcgggtgacgcagcacctttgcttgaagggaccctccgctgatgtatacaaagctaagtgtgaaattcaggagaaagtatatacaatggcgcagaagaatattcaggtgtctccagagatattccaattcctgcagcaggtaaattggaaggagttcagcaaatgcttatttatcgctcagaagatcctagcactctacgaattggaagggaccaccgtcctgttgacctcatgttcctcagaagcattgcttgaggccgaaaaacagatgctttcagcactaaattacaagagaatcgaggtggaaaacaaggaggtgctccatggaaaaaagtggaaagggctcactcacaatctcctcaagaaacagaattcctccccaaatactgtgataatcaacgagcttacaagcgagaccacggccgaggttattattaccggctgcgtcaaggaagttaatgagacctacaaactgctttttaattttgtcgagcaaaacatgaaaatcgagaggctggtagaggtgaagccatcactggtgatcgattatttgaagactgaaaaaaaattgttctggccaaagattaagaaggttaatgtgcaggtgtcatttaatccagagaacaaacagaaaggcatccttctgacaggtagcaaaactgaggtgctcaaggcagtggacatcgtgaaacaagtttgggactccgtttgcgtcaagagcgtgcacactgataagcccggcgcaaagcagttctttcaagacaaggcgcgcttttaccagagcgaaatcaagcggctcttcgggtgttacatcgagttacaggagaacgaagtgatgaaagagggtgggagccctgcaggtcagaagtgcttctcgagaactgttcttgcaccgggggtggtgctaatcgtccagcagggggacttggctcggctgccggtcgacgtggtggtcaatgctagcaatgaggacctcaaacattatggaggactggctgctgctctgagcaaggccgctggcccggaactgcaggctgattgcgaccagatcgtgaaacgtgaggggcgtcttctgccaggtaacgcaacgatcagtaaagctggaaaactgccttaccaccatgtcatccacgcagtgggaccccgctggagcggctacgaagccccccgatgcgtatatctgctaaggagggcagtccagcttagcctgtgcctggcagagaaatacaaatatcgaagcattgcaatacccgccattagctctggggtgttcggattccctctgggacgctgtgtagaaaccatcgtgtctgccatcaaagagaactttcagtttaaaaaggatggccattgtcttaaagagatttatcttgtggatgtgtctgagaaaactgtggaggcctttgcggaggccgtgaaaacggtatttaaggcaactttgccggacacagccgcacctcccgggctcccccccgcagcagctggacccggaaaaactagctgggagaaaggaagcctcgtgtctccagggggattgcaaatgcttcttgtgaaggaaggagttcagaacgcgaaaacagacgtggtagttaactcagtgccgctagacctcgtcttatcacgcggcccgctgagcaaatccctgctggaaaaggccgggccagagctgcaggaggagcttgatacagtaggtcagggggtagcggtatccatgggcacggttctaaagacatcctcctggaacctcgactgccgatacgtgttgcacgttgtagcccctgagtggagaaatggaagtacctcctcgctaaaaattatggaagacatcattagggagtgtatggagatcaccgagtcactttccttgaagtctatcgcttttcccgccattgggaccggaaatctcggctttcctaaaaacatttttgctgagctgataatttctgaggtttttaaattcagttcaaagaaccagttgaaaacactgcaggaggtgcactttctgcttcatccctctgatcacgaaaatattcaagcattctctgatgagttcgctcgtcgcgccaacggcaacctagtcagcgacaaaattccgaaggccaaggacacacaggggttctacgggactgtgagctcaccggatagcggtgtgtacgagatgaagatcgggtccattatctttcaggtcgctagcggagacatcaccaaggaggaggcagacgttatcgtgaattccactagcaatagttttaacctaaaggtcggcgtgtccaaagctatccttgagtgcgccggtcagaacgtcgaacgggagtgctctcaacaagctcagcaaaggaaaaatgattatatcatcacgggtggcggttttttgagatgcaagaacatcatccacgtgattgggggaaacgacgtcaaatcctcggtgagttcagtgctgcaggagtgtgagaagaaaaattactcttcaatttgtctgccggccattgggacgggcaatgcaaagcagcaccctgataaggtagcagaagctatcatcgatgcgattgaggacttcgtgcagaaaggatctgctcagtccgttaagaaggtgaaggtcgtcatttttctcccccaggtgctcgacgtgttctacgctaacatgaaaaaaagggaaggtactcagctcagttcccagcaaagtgtgatgtccaagttagcctcttttctggggtttagcaagcagtcacctcagaagaagaaccacctggtgctggaaaagaaaaccgaatccgcaacttttagggtctgtggagaaaatgttacctgtgtcgaatacgcaatttcttggcttcaggatctgatcgagaaagaacaatgcccatacaccagcgaagatgaatgcatcaaagactttgatgaaaaggagtatcaggagctcaatgagctgcagaagaagctaaatattaacatctcactcgatcacaaacggcctctgatcaaagtgttgggaatcagcagagacgtgatgcaggctagagatgagatcgaggcaatgattaagcgggtcagactcgccaaagagcaggagtcgcgcgctgattgtatctctgaattcattgaatggcagtataacgacaacaacacgagccattgttttaacaagatgacaaatttaaaacttgaagatgctcgccgagaaaaaaagaagacagtggacgtcaaaattaaccatcgtcattacacagtcaacctgaatacatacaccgcaaccgacactaaagggcactcgttgagcgtgcagcgtctaaccaagagcaaagtggatatacctgcgcattggtctgatatgaagcagcaaaacttttgtgtcgtagagctacttcctagtgaccctgaatacaacacagtggcttcaaagttcaaccagacatgttcccactttcggattgagaagatcgagaggattcagaaccctgacctatggaatagctatcaggcaaaaaagaagaccatggacgcgaaaaatgggcaaactatgaatgagaaacagctgtttcatggcacggacgcaggtagcgtaccccatgttaatcggaacggattcaacaggagttatgctggcaaaaatgcagttgcctatggcaaggggacctactttgcagtgaatgcaaattactcagccaacgacacctattctagaccagacgccaacgggcggaagcatgtctattacgtgagagtgcttaccggaatctacacccatgggaatcactccctgatagttcccccctctaagaacccccagaacccaactgacctctatgataccgttacagacaacgtccatcatccatctctgttcgttgctttctatgactatcaggcgtatccagaatacctgattacttttcggaagtag

SEQ ID NO: 129116 - DNA, 5406 bp, synthetic construct
  misc_feature 1..5406: note = Description of Artificial Sequence: Synthetic coding sequence
  source 1..5406: mol_type = other DNA
atggctgtgccaggctccttccctctcttagtggaaggtagctggggccccgatcctcctaaaaacttaaacaccaaactccagatgtacttccaatcacccaaacgaagcgggggaggcgaatgtgaggttcgacaggaccctcggagccccagccgatttcttgtgttcttctacccagaagatgtgaggcagaaggttctggagagaaaaaatcacgagctcgtctggcagggtaagggcacctttaaactgactgtgcagctgcccgctacccctgacgagattgaccacgttttcgaagaggagctgctgaccaaggagagcaagaccaaagaggacgtcaaagaacccgatgtgtccgaagaactggatactaaactgcccctggatggaggcctagacaagatggaggacatccccgaggagtgcgagaatatcagctcgcttgtggctttcgaaaatttgaaagccaacgtcacagacattatgctcattctgctcgtagagaacatctctggactgtccaatgatgacttccaggttgagattatcagagacttcgacgtcgccgtggtaacgtttcagaagcacatagatacaatcagattcgtcgacgactgtacgaaacaccacagtatcaagcaactccagctcagcccgaggctcctagaggtaacaaacacaataagagtagagaatctcccacccggcgctgacgattacagcctcaagctcttcttcgaaaacccctacaacggaggaggccgcgttgctaatgtcgaatactttccagaggaatcttcagctcttattgaatttttcgacagaaaggtattagacactattatggcgactaagctcgactttaacaagatgccgctcagtgtgtttccatactatgccagcttgggtaccgcactgtatggcaaggagaagcctctgataaagctgccagcaccttttgaggagagcctcgacttgcctctctggaagttcctgcagaaaaaaaaccatctcatagaagagattaacgatgagatgaggaggtgccattgcgagctcacttggtctcagctgtccgggaaggtcaccatccggccagctgcaacgctcgttaatgagggacgccctcgtatcaaaacctggcaagcagatactagtacaaccctatcctctattcgaagcaagtataaggtcaatccaatcaaggttgatcctaccatgtgggacacaataaagaatgacgtcaaggatgacaggatccttattgagttcgataccttaaaagaaatggtcattctcgcggggaagtctgaagatgtgcagagcatagaagtccaggtacgtgagctgatcgagagcacaacccaaaagattaagagagaggaacagtccctgaaagaaaagatgatcatttctcccgggcgctactttctgctctgtcattcgagccttctcgatcacctgctgacagagtgcccagaaatcgagatttgttacgatcgcgtcacccagcacctgtgcctgaagggaccttcagccgacgtctataaggcaaagtgcgaaattcaagagaaagtgtatactatggcccagaaaaacatccaggtgtctccagaaatctttcaatttctccagcaagtgaactggaaagagttttcaaagtgcttattcatagcacagaagatcttggcactgtacgagcttgagggcaccaccgtgttactcacatcttgttcttctgaagccctgttggaggccgagaaacaaatgctcagtgcactaaattacaaacggatcgaggtggagaacaaagaggtgctgcacggcaagaaatggaagggtttgacacataacctgttgaagaaacagaacagctcgcccaacacagtcatcatcaacgagcttacatcagagactacggcggaggtcattatcaccggctgcgtgaaagaagtgaacgagacttacaaattactgttcaacttcgttgagcagaacatgaagattgagagactcgtagaggtcaaaccctctctggtgattgattatcttaagaccgagaagaagctgttttggccaaagataaagaaggtgaacgtgcaggtctcatttaatccggagaacaagcagaaggggattctgctgacgggaagcaagaccgaagtattaaaggcagttgatatcgtcaagcaagtatgggacagtgtctgtgttaagagcgtccatactgacaagcccggggctaagcagttttttcaagataaggcaaggttttaccagtccgagatcaaacggctgttcggttgctatattgagctgcaagaaaacgaagtgatgaaggaaggcggttcaccagctggccagaaatgcttttcacgaacagttctcgcccccggagtggtactgatagtccagcaaggagacctagctagattacctgtggacgtcgtggtgaacgcctccaatgaagatctgaagcactatggagggctcgccgccgccctgtctaaggctgcggggcccgagctgcaagcggattgcgaccagatagtgaagcgtgaagggaggcttctgcccggcaatgccacgatttccaaggccggtaagctaccataccaccatgtgatccatgccgtggggcctaggtggtctggttacgaggcacctcggtgtgtatacttactgcggcgtgctgtgcagctgtcactctgcttagccgaaaagtacaaataccgctcgatcgctatacctgccatctcgtctggagtgtttggcttccccctgggtcggtgcgtggagacaatcgtgagcgcaattaaggaaaatttccagttcaagaaggatggtcattgcctcaaagaaatttatctggtagatgtgagcgagaagactgtcgaggcctttgcggaggccgtgaagaccgtgtttaaggctacattgcctgacaccgccgcaccccccgggctgcccccagctgcagcagggccaggaaagacatcctgggagaagggatctctcgtatcacctggcggcctccagatgcttctagtgaaggaaggagtgcaaaacgccaagactgacgtggtagtaaattccgtgcctctcgacctcgttctgtcaagagggccactgtccaagagtttgctcgagaaggccggaccagagctccaggaggaactagatacggtgggccagggagtcgctgtttccatggggaccgtgttaaagacctccagctggaacctcgattgtcgatacgtactgcacgtggtcgcaccagaatggcgcaatggtagcacatcttcactgaagattatggaggacatcattagagaatgcatggagatcaccgagtcactgtccctaaaatctattgcttttccagcaatagggaccggcaacctcggcttcccaaagaatatttttgccgagctgatcatttcagaggtatttaagtttagttcgaagaaccagctaaagacccttcaagaggtacacttccttctgcacccaagtgaccacgaaaacatacaggcgttctccgatgaattcgctcgacgtgccaatggtaacctggttagcgacaaaattccgaaagccaaagatacacagggcttttacggaacagtgagtagccctgattctggtgtgtatgagatgaagattggcagcatcattttccaagtagcttcaggggatattactaaggaagaagcagacgtaattgttaactctacgtcaaatagcttcaaccttaaagccggcgtctccaaagcgatcttagagtgtgcagggcagaatgttgagcgagaatgtagtcagcaggctcagcagcgcaaaaatgattatatcattacgggcgggggtttcttgagatgcaaaaatattattcatgtgataggagggaacgacgtaaagagctccgtctcatccgtgctccaggagtgcgagaagaagaactattcttctatatgcctgccagctattggaacgggcaatgccaagcagcacccggataaagtcgccgaagctatcatcgatgccattgaggattttgtgcagaagggctcagcgcaatccgttaagaaagtgaaggtggtgattttcttgcctcaggtcctcgacgttttttatgccaatatgaagaaacgcgaaggcacccaactttcttcccaacaatcggttatgagtaagctcgcttcatttcttggattctctaagcaatcgcctcagaagaaaaatcacctagttttagaaaagaaaaccgagtccgcaacatttcgtgtctgtggcgaaaacgttacctgcgttgagtatgctatatcttggctgcaggatctgatcgaaaaagagcagtgcccctacacctctgaagatgagtgtattaaagactttgatgagaaggagtaccaggagctgaacgagctccaaaaaaagttgaatataaatatcagtctcgaccacaaacggcccctaatcaaggtactgggtatcagcagagatgtaatgcaggcacgggatgaaatcgaagcaatgatcaagcgcgtgagactggctaaggagcaggaatctcgtgccgattgcattagcgaatttatagagtggcagtataacgataacaatacatcgcactgctttaacaaaatgacgaaccttaagctggaagacgctagaagggagaagaagaagaccgtggacgtgaagattaaccaccgacactatacagttaatcttaacacctataccgctaccgatacgaaaggacactcattatcagtgcagcgactgactaagtccaaagtagacattcccgcccattggagtgacatgaagcaacagaacttttgcgtggtagaactcttgccttccgaccccgaatacaacactgttgcctcaaaatttaatcagacttgcagccacttccgaatagagaaaatcgagcgtattcagaatcctgatctgtggaactcctaccaggcaaagaagaaaactatggatgccaaaaatggccagactatgaatgagaaacagctcttccatggaactgatgccggttctgtgccccacgttaaccgtaacgggtttaatcggagctatgctggcaaaaatgccgtggcctatggtaagggaacatacttcgccgtaaatgctaattactccgcaaacgacacttactcacgtcccgacgccaacggacgcaaacacgtgtattatgtaagggtgctgacgggcatctacacacacggcaatcactccctgatcgtgccgcctagtaaaaatccacagaatcccaccgacctctacgacaccgtcactgacaacgtgcaccacccttcactctttgtggcgttttacgactatcaggcctaccctgagtacttaataacttttagaaaatag

SEQ ID NO: 129117 - DNA, 585 bp, synthetic construct
  misc_feature 1..585: note = Description of Artificial Sequence: Synthetic coding sequence
  source 1..585: mol_type = other DNA
tgagtcaggaggcgcgccgaattacgcatggccgtcccaggttcgttccctctgttggtagaagggagctgggggccggaccctcccaaaaacctaaacaccaaactgcaaatgtactttcagagccctaagagaagcggcggaggagaatgcgaggtcaggcaggatcccagatcaccctcccggtttctcgtgttcttctaccccgaggacgttcgtcagaaggtgctcgagcgcaagaaccacgaactcgtctggcagggaaaagggacctttaaattgaccgttcagcttcctgccacacccgacgagatcgaccatgtgttcgaggaggagcttcttacgaaggaaagtaaaaccaaggaagacgtgaaggagcctgatactatccgattcgtcgacgattgcacaaagcatcattctataaaacaactccaactgtcaccccggctgcttgaagttacaaacaccattagagtggaaaatctgccccctggagccgacgactatagcctcaagcttttttttgaaaatccctacaatgggggagggcgggttgccaacgtggagtattttccagaatag

SEQ ID NO: 129118 - DNA, 1335 bp, synthetic construct
  misc_feature 1..1335: note = Description of Artificial Sequence: Synthetic coding sequence
  source 1..1335: mol_type = other DNA
atgttgcagaggatcggccttatctttctccataacattgtagtagtgtccaattgcttttatttccaggcctttctcgacgaattcactaactggtctagaattaatcctaacaaggcgaggatccccatggccggagacactcagggtgttgtcggcaccgttagcaagccgtgcttcactgcatacgaaatgaagataggagccatcaccttccaagttgcgaccggcgatatcgccactgagcaggtagatgtaattgtgaacagcactgcccggacgtttaatcggaaaagcggcgtgagccgcgccatcctggagggggctggccaggcagtcgaaagcgagtgtgctgtgctggccgctcaacctcacagagatttcatcatcacccctggcggatgtctgaaatgtaaaatcattatccacgttccaggtggcaaggatgttcgcaagaccgtgacctctgtgctggaggaatgcgaacaacgaaagtacacttctgttagcctgcccgccatcgggactgggaatgctggcaagaatcccattactgtggctgataatatcattgacgctatcgttgacttttctagccagcacagcacccccagtctcaaaaccgtaaaggtggtgatttttcagcccgagttattaaacattttttacgactctatgaaaaagcgagatttgtccgctagtttgaattttcagagcacattcagtatgaccacgtgcaacctgccagagcactggacagacatgaaccatcaactcttctgcatggtgcagctggaaccagggcagtctgagtataataccattaaagataaatttacaaggacttgcagtagctacgcgattgagaagattgagcggatccagaacgctttcttgtggcagtcttaccaggtaaaaaagcgacagatggacataaaaaacgaccacaaaaacaacgagaggctgctgttccatgggaccgacgctgactcagtgccctatgtaaaccaacacgggttcaacagatcttgcgctggaaagaacgctgtgtcctatggcaagggtacctacttcgctgtcgatgcctcctacagtgccaaggacacgtactccaaacccgacagtaacgggaggaaacacatgtacgtagtcagagtccttacaggcgtattcaccaagggaagggcaggactcgttacccctccccccaaaaaccctcacaatccaaccgatctcttcgatagtgtgaccaacaatacgagaagccctaaactattcgtcgtctttttcgataaccaggcctacccggagtacctcattacctttacagcttag

SEQ ID NO: 129119 - DNA, 2037 bp, synthetic construct
  misc_feature 1..2037: note = Description of Artificial Sequence: Synthetic coding sequence
  source 1..2037: mol_type = other DNA
atggcggccccgggacccctaccagctgctgcgctgtctccaggggcccccacgccccgagagctgatgcacggagtggctggagtgacgagtcgcgctgggcgggacagagaggctggaagtgtcctcccagcgggaaatcggggcgcgcgaaaggcttcccgtcggagctcatctcggagcatgagtcgcgacaacaagttttccaaaaaagactgtttgagtattcgcaatgtcgtcgcctctatccagactaaagagggcttaaatctcaagcttatcagtggtgatgtactgtacatttgggctgacgttattgtcaactcagtccctatgaatttgcagctcggcgggggccctctgtctcgcgcgtttcttcagaaagcaggacccatgttgcaaaaggaattggacgataggcgaagggaaaccgaggagaaagtgggcaacatcttcatgacgagtggatgtaacctggactgcaaagcagtgctgcatgcagtagccccttactggaacaacggggcagagacgagctggcagataatggccaacataatcaagaagtgtctgactacagtggaggtcctgagcttttcatctatcaccttccccatgatcgggacagggtccctacagtttcccaaggctgtattcgcaaagctcatcctctctgaagtgtttgagtattcttcgagcactcgaccaattacctctcccctccaggaggtgcattttctcgtgtataccaacgatgatgaaggatgtcaggccttcttagatgagtttacaaattggtcccggattaatcccaacaaggcccgcattcctatggcgggcgacacccaaggtgttgtgggtacagtgtctaagccgtgcttcactgcctacgaaatgaagattggtgccattacctttcaggtggccactggagatatcgccaccgagcaggttgacgtgattgtgaacagcacggcccgtaccttcaataggaaatctggagttagtcgcgcaatccttgagggagccggacaggcagtggaaagcgaatgcgccgtcctagcagcccagcctcatcgggactttatcatcactcctggaggatgtttgaaatgcaagattataattcatgtgcctggcggaaaagatgtaaggaagacggtgacgagtgtgcttgaggagtgtgagcagagaaagtatacatccgtcagtctccccgctatcggtaccggaaacgcagggaagaatcccattacagttgccgataacattattgatgccatcgtggactttagtagccagcactccaccccctcattgaagacggttaaagtggtaatatttcagccagagctgctcaacatattctatgattcaatgaaaaagcgggacctttctgcctccttgaattttcaatcaacattcagcatgacaacatgtaacctccctgagcattggacagatatgaaccaccagttattttgcatggttcagctggagccagggcagtcggaatacaatacaatcaaagacaaattcacccgcacatgttcctcgtatgctatcgagaagatcgaaagaatccagaatgctttcctttggcaatcataccaggtgaaaaaaagacagatggatatcaagaatgatcataaaaacaatgagaggttattgttccacggaactgacgctgacagtgtgccctatgtaaaccagcatgggttcaataggtcctgtgcagggaaaaacgccgtctcctacggtaagggaacatatttcgccgtggacgctagctacagtgctaaagatacttattccaaacctgatagcaacgggcgcaaacacatgtacgtagtaagggtgctgacaggagttttcacaaaaggaagagccggtctggtcacacccccacccaagaacccccacaaccccaccgatcttttcgactccgtcaccaacaatacaagatcccctaagctcttcgtggtattctttgataaccaggcttatccggagtacttaatcacctttaccgcttag

SEQ ID NO: 129120 - DNA, 1278 bp, synthetic construct
  misc_feature 1..1278: note = Description of Artificial Sequence: Synthetic coding sequence
  source 1..1278: mol_type = other DNA
atgaaacataccgccttcttggacgagttcactaattggtctcggatcaatcccaataaagccaggatccccatggccggtgatacccagggggtggtaggcacagtctctaagccatgcttcaccgcctacgaaatgaaaattggtgccattactttccaagtggcgactggcgatattgccacagagcaggtggacgtcatcgtaaattccactgccagaacatttaaccggaagtctggtgtgtctagggcaattctcgaaggggctggtcaggccgtggaaagcgaatgcgccgtgctggcagcgcaacctcatcgggactttattatcacaccaggtggatgccttaagtgcaagatcattattcacgttccaggtggtaaggacgtgaggaagacggtgacaagtgtcttggaggaatgcgagcagaggaagtatacttcagtgtccctccctgctatcggaaccggcaacgccggaaagaatccaataacagttgcagataacataatcgacgcaattgtggatttctccagtcagcatagcaccccatcactaaaaaccgtgaaagttgttatctttcagcccgaactgttgaacatcttttatgattctatgaagaagcgcgacctttccgcgagcttgaactttcagtcaacgttttccatgacgacctgcaatctgcctgagcactggaccgatatgaatcaccaactgttctgcatggtgcagctggagcctggtcagagtgaatacaataccataaaggataagttcaccaggacatgtagctcctatgctattgagaaaatcgaaagaatacagaacgccttcctgtggcagtcgtaccaggtgaagaagcgtcagatggacatcaagaatgaccacaagaacaacgaaagactcctcttccacgggaccgacgcagactccgtcccctacgttaaccagcatgggttcaataggtcttgcgccggaaaaaacgccgtaagctatggtaaagggacatattttgccgtggatgcctcctacagcgcaaaagacacctatagtaaaccagattcaaatgggcgaaaacatatgtatgttgtgcgagttctgactggagtctttacaaagggtcgtgcgggattggtcacacccccacctaagaacccccacaatcccaccgatctgtttgattctgtaactaataacacaagatcacctaagcttttcgtagtgttcttcgataaccaggcctatcctgaatacttgattacgttcacagcctag

SEQ ID NO: 129121 - DNA, 2565 bp, synthetic construct
  misc_feature 1..2565: note = Description of Artificial Sequence: Synthetic coding sequence
  source 1..2565: mol_type = other DNA
atggacttttcaatggtggccggggctgccgcctataacgagaaatctggcagaattacctccttgtcactgctgtttcagaaggtgtttgcacagatcttcccccagtggaggaagggaaatacagaggagtgcctgccgtataagtgtagcgagacgggagccctgggcgagaattattcatggcagatcccaattaaccacaacgacttcaagattctaaaaaataacgagaggcagctatgtgaagtactacaaaataagttcggatgcatttccacattagtgtccccagtgcaagaagggaattctaagtctctgcaggttttccggaaaatgctgacgcccagaattgaactctctgtctggaaggacgatcttactacccatgctgtggatgcagtggtcaatgcagctaacgaggatttgctacacggtgggggactcgccctagcactcgtcaaagccggaggctttgaaatccaggaagagagcaagcagttcgtcgctagatacggaaaggtttccgctggcgagattgccgtcactggcgccggaagattgccctgcaaacagatcattcatgcggtgggtcctagatggatggagtgggataagcaagggtgtactgggaagctccagcgggccatcgtgagcatcctaaactatgttatctataagaacacacacattaagaccgtggccattcccgccctgtcttcgggtatctttcagttccccttaaatttgtgcaccaagaccatagtggagaccatcagggttagcctgcagggaaagcctatgatgtccaacctgaaggaaattcacctggtaagcaacgaggacccaacagttgccgccttcaaagcagcctcagaattcatcctgggcaagagtgaactcggccaggagactacgccctcattcaacgctatggttgtcaacaacttaacgctccaaatagtgcagggtcatatcgagtggcagactgccgatgtcatagtgaactctgtaaatccccacgacatcactgtgggtcccgttgccaagtcaatccttcagcaggccggcgtggaaatgaaatccgaattcctggctaccaaagcaaaacaattccagaggtctcagctggtattggtcactaagggctttaacttgttttgcaaatacatataccacgtactctggcacagcgagtttccaaagcctcagatccttaagcacgctatgaaggagtgtctcgagaagtgcattgagcaaaacattaccagtatatcgttccccgcattaggtactggaaacatggagattaagaaggaaaccgccgctgagatcctttttgacgaagtactcacttttgccaaggatcacgttaagcaccagctgacagtcaagtttgttatcttccctactgacctggagatctacaaagcctttagttccgaaatggccaagaggtctaagatgctctccctcaacaactattcagtgccccaatccacacgggaggagaaaagggaaaatggtttggaagccaggtcaccagctataaatctgatgggctttaatgtggaagagatgtatgaggctcatgcatggatacagagaatccttagcctgcaaaaccaccacattatcgaaaataaccacatcctgtacctaggaaggaaggaacatgatatcctgtctcagttgcagaagacatccagcgtctccatcacagagataatatcccctgggcgtaccgagttggaaatagagggagcgcgggctgacctcatcgaagtggtaatgaacatcgaggacatgctttgcaaggtgcaggaggaaatggctcgaaagaaagagcgcggcctctggcggagcctggggcagtggaccattcagcagcaaaaaacacaggacgagatgaaggaaaacatcatttttctcaagtgtcctgtaccacctacgcaggagctgctggatcaaaagaaacagtttgaaaaatgtggactacaggtgttgaaggtggaaaaaattgacaatgaagttcttatggctgcattccagagaaaaaaaaagatgatggaagagaagcttcaccgccagcccgtgtcccaccggctgttccagcaggttccgtatcaattctgtaacgtggtttgtcgggttggcttccagagaatgtacagtaccccatgtgacccgaaatacggagccggaatctacttcacaaaaaatttaaaaaacctcgccgagaaggctaagaaaatatccgccgctgacaagctgatttatgtgtttgaggcagaagtgctgacggggttcttctgccaaggacaccctctgaacatcgtgcctccacctctgagccctggagctattgatggacacgattcggtagtggacaatgtgagtagccccgaaacgtttgtgattttctcagggatgcaggccatcccccagtacttgtggacgtgcacgcaggagtacgtgcagagccaggactactcgagtggtccaatgcgccctttcgctcagcacccttggagaggtttcgctagcggcagccccgtggactag

SEQ ID NO: 129122 - DNA, 2334 bp, synthetic construct
  misc_feature 1..2334: note = Description of Artificial Sequence: Synthetic coding sequence
  source 1..2334: mol_type = other DNA
atgagtgtgtcctgcgtcaagtcctcaagaatctctcttgccgtcagtctgccatggagccttcagttccggaaggccaccgcaaacctttgcgtgtttagaaaaatgttgacaccacgcatcgagctgtccgtgtggaaagacgacctaacaacccatgccgtggatgccgttgtgaatgctgcgaacgaggatttgcttcacggagggggacttgccttggccctggttaaggcaggggggttcgaaatccaggaagagtctaagcagttcgttgccaggtacggcaaggtgagcgcaggggagatcgcagtcaccggggcaggacgccttccctgcaagcaaattatccatgccgttggacctcgttggatggagtgggataagcagggttgcactggaaaattgcagagagctatcgtatccatccttaactacgtaatttataagaatacccacatcaagacagttgccattccagcgttgtcctcagggatttttcaatttcctttgaacctgtgcaccaaaactattgtggagacaattcgggtgtcgcttcagggtaaaccaatgatgtctaacttgaaggagattcacctcgttagcaacgaggacccgactgtggccgcatttaaggccgcctcagagttcattttaggaaaatctgagctcgggcaggaaaccacaccaagcttcaatgccatggtcgtgaacaaccttacgctgcagatcgtacagggccatatcgaatggcagaccgccgatgtgatcgtgaactccgtgaatccccatgacatcacggtgggacctgtggccaaatccatcttgcagcaagctggcgtggagatgaagtctgagttccttgctacgaaggctaaacagttccagcgtagtcagctggtgttagtgaccaagggcttcaacctattttgtaaatacatttatcatgtgctgtggcatagcgaattccccaagcctcagatccttaaacatgccatgaaggaatgcctcgagaagtgcattgaacagaacataacgtctatttcctttccagccctgggaaccggcaacatggagattaaaaaggagaccgcagccgaaattctgtttgatgaagtgctgacattcgcgaaagatcatgtgaaacatcaacttactgtcaagtttgtaatttttcccacggatcttgagatttacaaggccttcagtagtgaaatggcaaaacgttccaagatgctctctctcaacaactattcagtaccgcaatccactcgggaggagaaacgggaaaacggccttgaggcacggtctccggctatcaacctgatgggcttcaacgttgaagagatgtacgaagctcatgcctggattcaacgtattctgagtcttcagaatcatcacatcattgaaaacaaccatattctgtacctgggaaggaaagaacatgacattctgagtcagctgcagaagaccagttccgtgagcatcaccgagatcatttcccccggacgtacagaactggagatcgagggggctcgcgctgacctgattgaggtggtgatgaacatagaggacatgctctgtaaggtacaggaagaaatggctcgaaagaaggaaagaggcctatggaggagtctgggtcagtggacaatacagcagcaaaagactcaggacgaaatgaaggagaacataatcttcctgaaatgccccgtccctcccacacaggaactgttggaccagaagaagcaatttgagaaatgcggtttacaggtcctgaaagtggaaaagattgacaatgaagtgctgatggctgcttttcagaggaaaaaaaagatgatggaagagaagctccatcgacagccggttagccatagattatttcagcaggtgccgtatcagttttgcaatgtagtctgcagggtgggctttcaacgcatgtactctaccccctgcgatccaaagtatggggccggtatctattttaccaaaaacctcaagaaccttgccgagaaagcgaaaaagatttcggccgctgacaaactgatctacgtcttcgaagctgaggtgctcactgggttcttttgtcaaggccaccctctgaacatcgtccccccacccctgtcaccaggagccattgacggccacgacagtgtcgtcgacaatgtttcctctccagaaacctttgtcatcttttccggcatgcaggccatcccccagtatctctggacctgcacccaggagtatgtccagagccaggattattcttctggaccaatgcgcccattcgcccagcatccctggcgcggtttcgccagcggtagccccgtggattag

SEQ ID NO: 129123 - DNA, 2460 bp, synthetic construct
  misc_feature 1..2460: note = Description of Artificial Sequence: Synthetic coding sequence
  source 1..2460: mol_type = other DNA
atggacttcagcatggtggccggcgctgcggcttataatgaaaaatcggagactggcgcgctgggggaaaactactcctggcaaattcccattaatcacaatgatttcaagattctgaaaaacaatgagcgccagctgtgcgaggtcttgcagaacaagtttgggtgcatttcaaccctcgtctctccagtacaggagggaaactcaaagtcgctgcaagtgtttcgcaaaatgctaactccaaggattgaactgtccgtatggaaggacgacttgacaactcacgcagtggacgctgtcgttaatgccgccaacgaagatctgttgcacggcggaggactggcactggctctggtgaaggccgggggcttcgaaatccaggaggagtccaagcagtttgtagcacggtacggtaaggtcagcgccggcgagattgccgttaccggcgccggaagattaccttgcaaacagataatacacgcagtgggacctcggtggatggagtgggacaagcaaggctgcactggtaagctgcaaagagcaatagtgtctatattaaattacgtgatctacaagaatacacacattaagaccgttgccatccctgccttatcctccgggatttttcaatttcctctgaatttatgcacaaaaacaatcgtggagactatccgggttagtcttcagggaaagccgatgatgtcaaacctgaaggagatccacctggtgagcaatgaagaccctaccgtggcggcttttaaggctgcaagcgagtttatccttggaaagtccgagctgggccaagaaacaacgcccagctttaacgctatggtagtgaataacctgaccttgcagatcgtccaggggcacattgagtggcaaacagccgatgtcattgtgaattcagtcaacccacatgacataacagtgggaccagttgctaagagtattttgcagcaggccggcgtggaaatgaaatcggaatttcttgccaccaaagcgaaacagtttcagaggtcccaactggtcctcgtgacgaagggttttaatctcttttgtaagtacatctaccacgtactctggcattcggaatttcccaaacctcaaatattaaagcacgcaatgaaggagtgcctagaaaagtgcattgagcagaatataacttctatcagctttccggccctcggcactggaaatatggagatcaaaaaagaaacagcagcagagatattgttcgacgaggttctcactttcgctaaggaccacgttaagcaccaactgaccgttaaatttgtgattttccccacggatctggagatttacaaggctttttcatccgaaatggcaaaacgtagcaaaatgctcagtctgaacaactacagcgttcctcagtcgacacgggaggaaaagcgtgaaaacgggctggaggctaggagccccgctatcaacctgatgggcttcaacgtggaagagatgtacgaggcccatgcctggatccagcgaatcttgtcgctccagaaccaccatattattgagaataaccatatcctctatctgggccggaaagagcacgatatcctttcacagctccagaagactagttcagtgtctatcactgagataatctcaccaggtcgtaccgaactggaaatcgagggagccagggcagacctgattgaagtggtcatgaatatcgaggatatgctgtgcaaagtgcaggaagagatggcgagaaagaaagagcgggggctttggaggtctctgggccagtggactattcaacagcagaagactcaggacgaaatgaaggaaaacattattttcctcaagtgccctgtcccgcccactcaggaattgcttgaccagaagaagcaattcgaaaaatgtggcctgcaggtcctcaaggtcgagaaaatcgacaatgaggtgttgatggccgcatttcagcgcaagaaaaaaatgatggaggaaaagctgcaccgtcagccagtgtcccaccgattgtttcagcaagttccctaccagttttgtaacgtggtgtgccgcgtgggatttcagaggatgtactcgacgccatgcgatccaaaatatggcgctggaatctatttcaccaagaatctcaagaacctcgccgagaaggcaaagaaaatcagcgctgccgacaagctgatatacgttttcgaggccgaagttttaacgggatttttttgccagggtcatccacttaacattgtacccccaccactgtccccaggagccattgatggccatgactcagttgttgacaatgtttccagtccagaaacgtttgtgattttttcaggaatgcaggcaattcctcagtacttgtggacttgtacccaggaatatgttcagtctcaggactattcctctggtcccatgcggccttttgctcagcacccatggcgtggctttgccagcgggtctcctgtcgactag

SEQ ID NO: 129124 - DNA, 1440 bp, synthetic construct
  misc_feature 1..1440: note = Description of Artificial Sequence: Synthetic coding sequence
  source 1..1440: mol_type = other DNA
atgtctgatggatttgatcgcgctccaggcgccggcaggggaaggagtagaggcctgggtaggggggggggagggcccgaggggggagggttcccgaatggtgctggccccgccgagcgtgctagacaccaacccccacaacccaaggctcccggattcctgcagcccccacctctgagacaaccaaggaccactccaccacctggggctcagtgtgaggttcctgctagccctcagcgacctagcaggcctggcgccctcccagaacagacacgacccctaagagcgcctcctagttctcaggacaaaattcctcagcaaaactcagaaagcgctatggcgaagcctcaggtcgtcgttgctccagtgctgatgtctaagctgagtgttaacgctcctgagttctaccctagtgggtattcctcaagttatactgaaagctacgaggatgggtgtgaggattacccaacgctgagcgaatacgtgcaagacttcttgaatcaccttactgagcagcctggaagttttgaaacagagattgaacagttcgctgagaccttaaacggatgcgttaccaccgacgacgcgctgcaggagctggttgaactcatctaccagcaggcgacctccataccaaattttagttacatgggggctcggctgtgtaattatctcagtcatcatctcacgattagcccgcagagcgggaatttcagacagctcttgcttcaaaggtgcaggaccgagtacgaggttaaagaccaggcagccaaaggcgacgaagtgacaagaaagcggttccacgcattcgtgctcttccttggggaactctatctgaacctggagatcaaaggcacaaatgggcaggttaccagggctgacattcttcaggttggattgagggagctattaaatgccctgttctccaatcccatggatgacaacctcatctgcgcggtgaagcttctgaagttgaccggcagcgtgctggaggatgcttggaaagaaaaaggcaaaatggacatggaagaaatcattcaaagaatcgaaaatgtggtgttagacgccaattgcagccgggacgtcaagcagatgcttcttaagcttgtggaactgagatcgtctaattggggaagggtccatgcgacatctacctaccgggaggcaacaccagagaatgaccccaactatttcatgaacgagcccactttttataccagtgacggagtgcctttcaccgccgcagaccctgattaccaagagaagtatcaagaattgttagagcgggaagacttttttcctgactatgaggaaaacggaacagatctgtccggagccggtgatccttatttagacgacatcgatgatgaaatggaccctgagattgaggaggcttatgagaagttttgcctggagtctgagaggaagagaaaacagtag

SEQ ID NO: 129125 - DNA, 1104 bp, synthetic construct
  misc_feature 1..1104: note = Description of Artificial Sequence: Synthetic coding sequence
  source 1..1104: mol_type = other DNA
atggcaaagccacaggtcgtcgtagcgcctgtactgatgtcaaagctgagtgtcaatgccccagagttctatccaagtggatactcgagctcatacacagagtcctacgaggatggctgtgaagattatcctactctgagtgagtatgtgcaagactttcttaatcatctgaccgaacagccagggtcttttgagaccgagatcgagcagttcgcagaaacgttgaacggctgcgtcaccaccgacgacgcactgcaggagctggtggagctaatttaccagcaggccaccagcatccctaacttcagctacatgggtgcccggttgtgtaactacttaagccatcatttaacaatctcaccccaatctggcaactttcgccagctgttgctgcaaaggtgccgcaccgaatacgaagtcaaggaccaggccgctaaaggggatgaagtcacgaggaagcgcttccacgctttcgtgctcttcctgggtgaactctacctgaatctagagattaagggaactaatgggcaggtgacgcgcgccgacatactccaagtgggcctgcgggagctcctgaacgctcttttcagcaatcccatggacgacaatctgatttgcgcagtgaagctgcttaagctgaccgggtccgtgttggaagatgcctggaaagaaaaaggcaagatggacatggaggagatcattcaacgtattgagaacgtggttctcgatgccaattgcagtagggacgtgaagcagatgttgctcaagctggtggagctgagatcttcaaactggggccgggtgcatgccacatccacctaccgggaggccacaccagaaaacgaccctaattatttcatgaacgaacccactttctatacgtccgatggggtcccttttaccgctgcagaccctgactaccaggaaaaatatcaggagctcctggaaagagaagatttcttccccgattatgaggaaaatgggaccgatcttagtggcgccggtgatccctacctggatgacatcgatgacgagatggaccccgaaatagaggaagcatatgagaaattttgtttagagagcgagcggaagcggaagcaatag

SEQ ID NO: 129126 - DNA, 1203 bp, synthetic construct
  misc_feature 1..1203: note = Description of Artificial Sequence: Synthetic coding sequence
  source 1..1203: mol_type = other DNA
atgtctgacggttttgacagagcaccagagcagacacgcccactgagggcacctcctagttcacaggataagatcccccagcagaacagcgagtccgctatggccaagccccaggtcgttgtggctcccgtactgatgagcaagctgtccgttaatgctcccgaattctatccctccggctactcgtcttcatatactgaaagctacgaagacggctgcgaagactaccctaccttgtcagagtacgttcaggactttctcaatcatcttactgagcagcctggcagtttcgagacagagattgaacaatttgctgagaccctgaatggttgtgtgaccacagatgacgcacttcaggagttggtggagcttatttatcaacaggcaactagcattcccaacttctcttatatgggcgcccggttatgcaattacctgtcgcaccacctcacaatctccccccagtcaggcaacttcagacagttacttttgcagcggtgtcgaactgaatatgaggtcaaggatcaggccgccaaaggtgatgaagtgactcgcaaaaggtttcacgccttcgtccttttcctgggagaattatatctgaatctggagataaagggtaccaatggtcaggtaacccgggccgatatcctccaggtgggattgagagagttactgaacgctctcttcagcaatccaatggacgacaatttaatttgcgctgtgaaactgcttaaactcacaggaagcgtgttagaagacgcctggaaagagaaaggcaagatggacatggaagagatcattcaacggattgagaatgttgtgttagacgccaattgctcacgggacgttaaacagatgctgctaaagcttgtggaactcaggtcttccaattggggccgagtgcatgcaacgtctacttacagagaggcgaccccagagaatgaccccaactacttcatgaacgagcccacgttctacacctccgatggagtgcccttcactgctgccgaccccgactaccaggagaagtatcaggagttactagagcgagaggacttctttcccgactatgaagagaacggaactgatctgtccggcgctggtgatccctaccttgatgatattgacgatgagatggacccagagatcgaagaagcttatgaaaaattttgtctggagagcgaacgcaagcggaagcagtag

SEQ ID NO: 129127 - DNA, 507 bp, synthetic construct
  misc_feature 1..507: note = Description of Artificial Sequence: Synthetic coding sequence
  source 1..507: mol_type = other DNA
atggccaaaccgcaagtggtggtagcccctgttctgatgagcaaattgagcgttaatgcgcctgagttctatccatcaggatacagctcatcctacacagaaagctatgaagacgggtgcgaggattatccaaccttatccgaatacgtccaagatttcttaaatcaccttacagaacagcccgggtctttcgaaactgagatcgaacagtttgctgagactctgaatggctgcgtcactactgatgacgcgctccaagagctcgtggagctcatatatcagcaggctacgtccattccaaatttcagctacatgggggccagactctgcaattacttgagtcaccacctgactatttctccccagtcagggaacttccgtcagctgctcctccagcggtgtagaaccgaatatgaggtgaaggaccaagccgccaagggggatgaggtcacaagaaagcggttccacgcattcgtgttgtttttgggcgaactgtacttgaactag

SEQ ID NO: 129128 - DNA, 603 bp, synthetic construct
  misc_feature 1..603: note = Description of Artificial Sequence: Synthetic coding sequence
  source 1..603: mol_type = other DNA
atggcaaaacctcaggtggtggtggcgcccgtgttgatgtcaaaactgtccgtgaatgccccagaattttacccttctggctatagcagcagctataccgagagctacgaggatggatgcgaagattacccgaccctctcggagtacgtgcaggattttctgaatcacctgaccgagcaaccgggctcttttgaaacagagatcgagcagtttgcagaaacattaaacgggtgcgtgaccacggatgacgcccttcaggaacttgtggaacttatttaccagcaggcaaccagcatccctaacttctcttatatgggtgcacggctttgtaactatctttcccaccatctgactatctcccctcagtccggcaatttccggcaactacttttgcagcggtgccggacggagtacgaagtgaaagatcaggctgccaagggtgacgaagtaacccgtaagagattccacgcctttgtgctcttcctgggcgagctttacctcaacctggagatcaaaggtacaaatggacaggtgacacgggctgatatcctccaggttgggctccgagaactcttgaatgctcttttctcaaatcctatgtag

SEQ ID NO: 129129 - DNA, 1056 bp, synthetic construct
  misc_feature 1..1056: note = Description of Artificial Sequence: Synthetic coding sequence
  source 1..1056: mol_type = other DNA
atgagtgacggttttgatcgagctcctgagcagacaaggccgttgagggctcccccttccagccaggacaagatcccccagcagaatagtgagagcgcaatggctaagcctcaggttgtggtcgccccggttctaatgtccaagctctccgtgaacgcacctgaattttatccaagtggatattcttcttcgtatacagagtcttacgaggacgggtgtgaggattatcctacactgtcagaatacgtgcaggatttcttaaatcacctcactgagcagcctggatccttcgagacggaaatcgaacagtttgctgaaacccttaatgggtgtgtcactaccgacgatgcactgcaggagctggtggagctgatttatcaacaggctacgtccatccccaacttctcttacatgggcgctaggctgtgcaattacttatctcatcatctgaccattagtccacagtccggtaactttcgccaactgctcctgcagagatgcaggacggagtatgaagtcaaggatcaggccgccaagggagatgaagtgacacggaaacggtttcatgcgtttgtcctgttcctgggggagctctatttaaacctggaaatcaaagggaccaatgggcaggtaacacgcgcagacattctccaggtagggttgcgggagctgttaaacgcccttttcagcaatccaatggacgacaatctgatctgtgctgtgaagttattaaaacttactggatcagtactcgaggatgcttggaaggaaaaaggcaagatggacatggaggagatcatccagcgcatcgagaatgtggttctcgacgctaactgctcgagagacgtgaaacagatgctgctgaaactggtcgaactgcgctcttctaactggggtcgcgtccacgcaacatctacctaccgcgaggcaacccctgagaatgaccccaactactttatgaacgaacctacattctacacgtctgatggagtccccttcactgccgccgatccagacacgtggatgattctgatgatgagatggacccaaagatag

SEQ ID NO: 129130 - DNA, 288 bp, synthetic construct
  misc_feature 1..288: note = Description of Artificial Sequence: Synthetic coding sequence
  source 1..288: mol_type = other DNA
atggcgaagccacaggtggtcgtcgcaccagtgttgatgtctaaactgagcgtgaatgcacccgagttttacccctctggctatagctcctcatacaccgagtcttatgaggatggatgcgaggactacccaaccctgagcgaatatgtgcaggattttttaaatcatcttacggagcagcctggcagtttcgagacggagatcgagcagttcgccgagacccttaatggatgcgtgaccaccgacgatgcactccaggagctggtggagctgatctatcagcaatag

SEQ ID NO: 129131 - DNA, 384 bp, synthetic construct
  misc_feature 1..384: note = Description of Artificial Sequence: Synthetic coding sequence
  source 1..384: mol_type = other DNA
atgaaagacccctcaaggtcgtccacttccccaagcattattaatgaggatgttataatcaatggccactctcatgaagacgataatcccttcgcagaatatatgtggatggaaaacgaagaagagttcaatcggcaaatcgaggaagagctgtgggaggaagagttcattgagaggtgtttccaggagatgctcgaggaggaggaggagcatgaatggttcattcccgctcgggacctgcctcagacaatggaccagatccaagatcaatttaacgacctcgtgatcagcgacggctccagtctggaagatctggtggtcaagtccaatctcaacccaaatgcgaaggaatttgtgccaggggtaaagtacgggaatatttag

SEQ ID NO: 129132 - DNA, 384 bp, synthetic construct
  misc_feature 1..384: note = Description of Artificial Sequence: Synthetic coding sequence
  source 1..384: mol_type = other DNA
atgaaggatccttcccgaagtagtactagcccttctatcatcaacgaggacgtgatcatcaatggccactctcatgaggacgataatccatttgcggagtacatgtggatggagaacgaagaggaatttaatcggcagatcgaggaagagctgtgggaggaagaatttattgagaggtgttttcaagagatgctggaagaggaagaggaacacgagtggttcatccccgcgcgtgacctgccccagaccatggaccagatccaggaccaattcaatgatctggtgatctcagacggctcttcactggaggacctcgtggtgaaatccaatttgaacccaaacgccaaggaatttgtgcccggcgtgaaatacggcaatatctag

SEQ ID NO: 129133 - DNA, 282 bp, synthetic construct
  misc_feature 1..282: note = Description of Artificial Sequence: Synthetic coding sequence
  source 1..282: mol_type = other DNA
atgaaagatccttcccgctcatctaccagccctagcataattaatgaggatgtcataatcaacggccacagtcatgaagacgataacccctttgctgaatacatgtggatggaaaatgaagaagagttcaaccgccagatagaggaggagctgtgggaggaagagtttatagaaagatgctttcaggaaatgcttgaggaggaggaagagcatgagtggttcattccagccagggacctgccccagacgatggaccagatacaggaccagtttaacgactag

SEQ ID NO: 129134 - DNA, 384 bp, synthetic construct
  misc_feature 1..384: note = Description of Artificial Sequence: Synthetic coding sequence
  source 1..384: mol_type = other DNA
atgaaggaccctagtaggtcatccacctctccctccatcatcaatgaggatgtcataatcaatggccattcacacgaagatgacaatccttttgctgagtacatgtggatggaaaatgaagaggaattcaaccgtcaaatcgaggaggaactttgggaggaagagtttatcgaacggtgtttccaggagatgctggaagaggaagaggagcacgaatggtttatacctgcccgggacctgccccaaactatggaccagatccaagatcagtttaatgatctggtgatttccgatgggtccagtctggaagatctggtggttaagtccaatctgaatcctaacgccaaggagtttgttccgggcgttaagtacggaaacatctag

SEQ ID NO: 129135 - DNA, 372 bp, synthetic construct
  misc_feature 1..372: note = Description of Artificial Sequence: Synthetic coding sequence
  source 1..372: mol_type = other DNA
atgaacgggtccaatatggcaaacaccagcccctctgtgaaatccaaagaggaccaaggtctaagcggccatgacgagaaagaaaatccttttgcagagtacatgtggatggagaatgaggaagatttcaacagacaggtcgaggaagagttgcaagagcaggatttcctggaccggtgctttcaagagatgctggacgaggaggatcaggattggtttatcccttcccgagacctcccccaggccatgggacagcttcagcagcagctaaatggtctgagcgtctccgagggccatgacagcgaggatattctctccaagagcaacctcaaccctgacgctaaagaattcatccccggagaaaagtattag

SEQ ID NO: 129136 - DNA, 1896 bp, synthetic construct
  misc_feature 1..1896: note = Description of Artificial Sequence: Synthetic coding sequence
  source 1..1896: mol_type = other DNA
atgaatccgtcaacgccgtcctatcctaccgccagcctgtacgtaggagatctgcaccctgacgttacggaggcaatgctgtatgaaaagtttagtcccgcaggaccgatacttagcataagaatttgcagggatttgataacctcagggtccagtaattatgcttacgtaaacttccagcataccaaggacgctgagcatgcacttgatacaatgaactttgacgtcattaagggaaaaccagtgaggattatgtggagtcagcgcgacccaagcttaaggaaatcaggcgtgggcaacatctttgtaaagaatcttgacaaaagcattaataataaggctctctacgacactgtatcagcctttggtaatattctatcttgcaatgtcgtatgcgacgagaatgggagcaagggctacggatttgtacacttcgagactcacgaagcagccgagcgagctataaagaagatgaatggcatgctactgaacggccggaaggtgtttgtggggcagtttaagtctcgcaaggagcgggaggcagaactaggcgccagggcgaaggaattcccaaatgtctacattaaaaattttggcgaagatatggacgacgagaggctcaaggatttgttcggtaaatttggacccgccctgtctgtaaaggtaatgacagatgagagtggcaagtcaaaaggctttgggttcgtgtcttttgaaaggcatgaggacgcccagaaagcagtggacgagatgaatggtaaggagttaaatgggaaacaaatctacgtgggtcgggcccagaagaaggttgagaggcagacagagctaaagaggaccttcgaacagatgaagcaggacaggataacaagataccaggttgtgaacctgtatgtgaaaaacctcgacgatgggattgacgacgaacggctccggaaagccttcagcccgtttgggacgattaccagtgcaaaggtcatgatggaggggggtagatccaagggctttggctttgtctgcttttcttcccctgaggaagccactaaggccgtgacagagatgaacggacgtatagttgcgacaaaacccctttacgtcgccttggcgcagcgtaaggaggaaagacaggcgtaccttactaacgagtacatgcagcgtatggccagcgtgcgcgccgtgcccaaccagagggcgcccccaagcggctactttatgacagctgtccctcaaacccagaatcatgctgcttattatccgcccagccaaatagctcggctgagacctagcccccggtggacagctcagggcgcccgcccccatccttttcagaacaagccatccgccatcaggccaggggcccctcgagtaccgttttccaccatgcggcccgctagcagccaggtccctcgcgtgatgagtactcagagagttgcaaatacctctacgcagacagtgggtccaaggccagccgcggccgctgctgccgctgccaccccagccgtcagaactgttccacgctacaagtacgccgctggagtgcgcaatccacagcaacaccgtaatgcccagcctcaggtaacaatgcagcagcttgccgttcatgtacagggtcaggaaaccctgaccgcatcaaggctggcttcagcgcccccacagaaacagaagcagatgttgggcgagcgtttgtttcctctcatccaagccatgcaccctactctggcaggaaagattacggggatgcttctggaaatcgataactccgagttgctctacatgttagagtcacctgagtcactcagaagtaaggtggatgaggctgttgctgtgttgcaagcccatcaggcgaaggaggctacacaaaaggccgtgaacagcgctacaggcgtcccaacagtctag

SEQ ID NO: 129137 - DNA, 1896 bp, synthetic construct
  misc_feature 1..1896: note = Description of Artificial Sequence: Synthetic coding sequence
  source 1..1896: mol_type = other DNA
atgaatgctgccgctagttcttaccctatggctagtctttacgtcggggacttgcactcagacgtcaccgaggccatgctgtatgagaagttctcccctgccggtcctgtgctgtcaatccgggtgtgcagagacatgatcacccgcaggtccttaggttacgcctacgtgaactttcagcagccagctgatgccgagcgggctttagataccatgaatttcgatgtcattaagggaaaacctattcgcatcatgtggtcgcagcgcgacccttctctgcggaagtccggcgtcggcaacgtgtttattaagaacctggacaaaagcatcgacaacaaagcactctatgatacctttagcgcattcggcaatatcctaagttgcaaggtcgtctgtgacgaaaacggcagcaaagggtatgcattcgtgcactttgaaacccaggaggctgctgacaaagcgattgaaaaaatgaacggtatgctcttgaatgacaggaaagtctttgtggggaggtttaaaagcaggaaggaacgcgaggctgagcttggcgcgaaggctaaagaattcaccaacgtctacatcaagaactttggggaagaggtggatgatgagtcactgaaagaactgttcagtcaattcggcaagaccctgagcgttaaagtgatgcgggaccccaatggaaaatccaagggatttgggtttgtcagctatgaaaaacacgaagacgccaacaaagcagtggaggaaatgaacggcaaggagatttcaggtaaaattatctttgtcggtcgcgcccagaagaaagttgagcggcaggccgaactcaagagaaagtttgagcaactgaagcaagagagaatctctcggtaccagggcgtgaatctctatattaagaacctggacgatacaattgacgatgagaaactacgcaaggagttctcccccttcgggtccatcacgtctgccaaagtgatgctggaggatggcagatcaaaaggctttggttttgtgtgtttctccagcccagaagaggccaccaaggctgttaccgagatgaatgggcgaatcgtcggcagtaagccactatacgtggctctcgctcaacggaaggaggagagaaaggcacatttgactaatcagtacatgcagagagtagctggtatgcgcgcccttccggccaatgcaatcttaaaccagttccagcccgccgctggaggttactttgtgcccgctgttcctcaagcgcaaggcaggccaccctattataccccaaaccaactggcacaaatgcgccctaacccgcgctggcagcaaggaggccgacctcagggatttcagggtatgccctccgctatcagacagtccggcccaagaccaaccctgaggcatctggcccctactggaaatgcccctgcctcacgagggctccccaccaccacacagagggttggggtccctaccgccgtccagaatctggcacctagggctgcggttgcagccgcggctccacgcgcggtggccccctataaatatgctagcagcgtgaggtcccctcacccggcaatacagcctcttcaagccccacagcctgctgtccacgtccagggccaggaaccgttgactgcctctatgctggctgccgcgccgccgcaggagcaaaagcagatgctcggcgaaaggctattcccccttatccagactatgcattcaaacctggccggtaaaattaccggcatgcttctggaaatagataattctgaattactccacatgttggagtctccagaaagcctccgttccaaggtcgatgaggcagtggctgtgctccaggcccaccatgctaagaaggaggccgctcagaaggtgggggccgtggctgcagccaccagctag

SEQ ID NO: 129138 - DNA, 1935 bp, synthetic construct
  misc_feature 1..1935: note = Description of Artificial Sequence: Synthetic coding sequence
  source 1..1935: mol_type = other DNA
atgaacgcagccgccagctcttatccaatggcctccctgtatgtcggagatctccactccgacgtaactgaggccatgctgtatgaaaaattcagccccgctgggcccgtcctgagtattagagtctgccgggacatgatcacccggaggagtctagggtatgcatacgtgaacttccagcagcccgcggacgccgagcgagccctagacaccatgaattttgacgtaattaaaggtaagcccattcggatcatgtggagccagcgggatccctctctgcgaaagtctggagtgggtaacgtgtttatcaagaatttggataagagcatcgacaacaaggcgctgtatgatacgttttcagcttttggcaatatcctttcctgcaaagtggtttgcgatgagaatggaagtaagggatacgcctttgtgcattttgagacgcaggaagccgctgacaaggccattgagaagatgaacggtatgctgctgaatgacaggaaggtatttgttggacgatttaagtcaagaaaggaacgggaagcagaactgggcgccaaagccaaggagtttacaaatgtgtacatcaagaactttggggaagaggttgacgatgagtctcttaaggagctgttcagtcagtttggaaaaacactgtctgtcaaggttatgcgggatcctaatggtaagagcaaaggctttggtttcgtatcttatgagaagcacgaagatgcaaataaggctgtggaggaaatgaacggaaaggagatctccggaaagataatatttgtcggacgggcccagaagaaagtcgaacggcaagccgagctgaagcgaaagtttgaacaattaaaacaggaacggataagccgatatcagggtgtgaacctgtacatcaaaaaccttgatgatactattgatgatgagaaactgcgaaaagaattctctccattcggctctatcaccagtgcaaaggtcatgctggaagatggccgctcgaagggattcggctttgtttgtttctcctcaccagaggaggccactaaagcagtgactgaaatgaacgggagaatcgtgggcagcaaaccgctgtatgtggcgctcgcccaacggaaggaggagcgtaaggctcatctcaccaaccagtacatgcagcgggtagccgggatgcgggcactcccagccaacgcaattctgaaccaattccaacctgccgcgggggggtattttgtaccagccgttccacaagctcagggacggcccccatactatacaccaaaccagctggcccaaatgaggcccaatcctcggtggcagcagggtggaagaccgcagggtttccagggtatgccctcagcgatccgtcagtctggaccgcggccaacactgcgacatctggctcctacaggcagcgaatgtcctgacagacttgctatggatttcgggggtgccggcgcagctcagcagggcctcacagatagctgtcagtcagggggcgtgccgaccgcagtccaaaacttggcaccacgggcggctgtcgcagccgctgccccacgcgctgttgcaccctataagtatgcctcctctgtgcgatcacctcatccagccattcagcccctgcaggcaccgcaacccgctgtgcatgtgcaggggcaggaacctcttaccgcaagtatgctagccgccgccccccctcaggaacagaagcagatgctgggagaacgtttgttcccactgattcagaccatgcacagtaacctggctggcaaaatcaccggtatgcttctggaaatcgataactccgagttgctgcacatgttggaaagccctgagtccttgcgctctaaggtagacgaggctgtcgcagtgctgcaggctcaccacgccaagaaagaggccgcacagaaggtcggtgccgtcgccgcagctacgtcatag

SEQ ID NO: 129139 - DNA, 1983 bp, synthetic construct
  misc_feature 1..1983: note = Description of Artificial Sequence: Synthetic coding sequence
  source 1..1983: mol_type = other DNA
atgaacgccgcagcctcttcataccccatggcaagcctctacgttggcgacttgcactcggatgtgactgaagccatgctttacgagaaattctcccccgccggtcctgttctctccatacgcgtgtgtcgcgacatgataacgcggcggtctctgggctacgcatatgtgaattttcagcagcccgcggatgctgagagggccctggatactatgaacttcgatgtgatcaaaggaaaacccatacggatcatgtggagccaacgggacccatctttaagaaagtcaggcgttggaaatgtgttcattaagaatctggacaaatctattgataacaaggctctgtacgacactttcagcgccttcggtaatatattgagctgcaaggtggtgtgcgatgaaaatggaagcaagggctatgcatttgtgcacttcgagactcaagaagcagccgataaggctattgaaaagatgaacggcatgctgctgaacgacagaaaggtgttcgtcgggagattcaagtcacgcaaggaacgggaggccgaattaggcgccaaggcaaaagaatttaccaacgtttatattaagaactttggcgaggaggttgacgacgaatcattgaaagaactgttcagtcaatttggcaagacgctgagtgtaaaagtaatgcgggacccaaacggtaagtctaaagggttcggctttgtgagctacgagaaacacgaggacgctaataaggctgttgaagaaatgaacggcaaagaaataagtggaaagattattttcgtgggtagagcacagaaaaaagtcgagcgccaggcagaactcaagcgcaaattcgagcagctgaagcaggaaaggatctccagatatcagggggtgaacctgtatattaaaaatctcgacgatacaatagatgatgagaagctgcgaaaagagttttcccctttcggtagcattacctcagccaaagtcatgttggaggatggtagatccaagggcttcggcttcgtctgttttagctccccagaggaggcaacaaaagccgtcacagagatgaacggccgcatagtgggaagcaagcccctatacgtggctcttgctcagcgcaaagaggaacgaaaagcacatcttaccaaccagtatatgcagcgcgtggctggcatgcgggcactccctgccaatgctatccttaatcaatttcaacccgcagcaggagggtatttcgtgcctgccgtgccacaagcccaaggtaggcccccctattatacccctaatcaactggctcagatgagacccaatccaagatggcagcaaggaggaagaccacagggattccagggcatgccatctgccatccggcagtccggccctagaccaacgctgagacacttggccccaaccggaaatgcaccagcctccagaggtttgcccaccaccacccaaagagtgggatcagaatgtccagatcgattggccatggatttcgggggcgccggcgctgctcagcagggcctgactgattcttgccaatctggaggcgtgccaaccgccgtgcagaacttggctccccgagctgccgtcgccgccgccgcccccagagccgtagccccctacaagtatgctagcagcgtgcgcagtccccacccagccattcagccgttgcaagcgccacagccagccgtacatgtgcaggggcaggagccactgaccgcaagtatgttggccgccgcccccccccaggaacagaagcaaatgcttggtgagagactgttcccgctcatccagacgatgcattcgaacttggccggcaaaatcacaggcatgttgttggagattgataattccgagttgttacacatgctggagagccctgagagcttgcggagtaaggtcgacgaagccgtggcagtactccaggcccaccacgccaaaaaagaggccgcacagaaagtgggagctgtggcggctgctacctcttag

SEQ ID NO: 129140 - DNA, 390 bp, synthetic construct
  misc_feature 1..390: note = Description of Artificial Sequence: Synthetic coding sequence
  source 1..390: mol_type = other DNA
atgaatgctgccgcaagcagttatcctatggctagtctctatgtcggagacctgcactctgatgtgacagaagccatgttgtatgaaaagttttctccagctggccccgtgctcagcataagggtgtgccgggatatgatcacacgccggtccctgggttacgcctacgtgaacttccagcaacccgccgatgccgagcgcgctctggacaccatgaattttgatgtgataaagggcaaaccgatacgtatcatgtggtcccagcgtgacccatcgctgcggaagtctggcgtggggaatgtcttcatcaagaatttggataaaagcatagataacaaggccttgtacgacaccttttctgcctttggcaacattctcagttgcaagtag

SEQ ID NO: 129141 - DNA, 207 bp, synthetic construct
  misc_feature 1..207: note = Description of Artificial Sequence: Synthetic coding sequence
  source 1..207: mol_type = other DNA
tgactgattcagactatgcatagtaacctggcgggaaagattactgggatgcttctcgaaattgacaactctgagctgctgcacatgctggagtcacccgagtctctccgcagcaaggttgatgaggctgtcgccgtactacaggctcatcatgctaaaaaagaggcagcccagaaagtgggcgcagttgccgccgctacaagttag

SEQ ID NO: 129142 - DNA, 120 bp, synthetic construct
  misc_feature 1..120: note = Description of Artificial Sequence: Synthetic coding sequence
  source 1..120: mol_type = other DNA
atgaatgctgcagcttcaagctaccccatggcctcactctacgtaggcgatttgcatagtgacgtaaccgaagcaatgctgtacgaaaagttctctcccgccggacccgtcctgagctag

SEQ ID NO: 129143 - DNA, 1149 bp, synthetic construct
  misc_feature 1..1149: note = Description of Artificial Sequence: Synthetic coding sequence
  source 1..1149: mol_type = other DNA
atgggttccggtgaacctaatccagctggtaagaaaaaaaaatatcttaaggcagccctctacgtcggcgacctcgatcctgacgtcaccgaagatatgctgtataagaaatttcggccagcaggcccactccggtttactcgcatctgccgagaccctgtaacacggagcccgctgggttatgggtacgtgaattttcggttccccgctgacgctgagtgggccctaaatacaatgaatttcgatctcattaatggtaaaccctttcggctgatgtggtctcagccggatgaccggctaagaaaatcgggggtaggaaatatctttattaagaacctggataagtccatcgataatagagccttattttacctgttctctgcctttggcaacatactgagctgcaaggtggtttgtgatgacaacgggtcaaagggttacgcctacgttcattttgactccctggctgccgctaacagagccatttggcatatgaacggagtgcggcttaacaacaggcaggtttatgtaggtcgattcaagttccccgaggaaagggccgccgaggtcaggaccagagaccgtgccacgtttacaaatgttttcgtcaaaaatatcggcgacgatatcgatgatgagaaacttaaggagctgttttgtgagtatgggcccacagaatccgtgaaggtcatccgcgatgcctcaggaaagtctaaaggtttcggctttgtccgctatgagactcacgaagctgcacagaaggctgtattggatctacacggcaaatctattgacggaaaggtcctctacgtagggagagcacagaaaaaaatcgaacgtttggctgagctgagaaggcgcttcgaacgcctccgtttgaaggaaaaatcaaggcccccaggtgtgccaatttacataaagaacctcgacgagaccatcaatgacgaaaagctaaaggaggaattttcttcgtttggaagtatttccagagctaaagtcatgatggaagtcgggcagggaaaaggcttcggcgtggtctgttttagttccttcgaggaggccacaaaggctgtcgacgagatgaacggtcgcattgttgggtctaagcctttgcacgtcacactcggacaggcccgccggcggtgttag

SEQ ID NO: 129144 - DNA, 657 bp, synthetic construct
  misc_feature 1..657: note = Description of Artificial Sequence: Synthetic coding sequence
  source 1..657: mol_type = other DNA
atgaacggtgtccggcttaacaatcgccaggtttacgttggcaggttcaaattccctgaggaacgggcagccgaggttcggacaagagatagagcgacatttactaatgtattcgtgaaaaatattggggatgatatcgacgacgagaagctcaaggagcttttttgtgagtatggccctacggaatcagtgaaggtgattagagacgcctcgggcaaaagcaaaggattcggcttcgtacgctacgagacccatgaagcagcccagaaggctgtcctcgatctgcacggcaaatctatcgatggcaaggtcctgtacgtcggaagggctcagaagaagatcgagcgcctcgccgagctccggcggagatttgagagactccggcttaaggaaaaatctagaccccctggcgtccccatctacattaaaaaccttgatgagacaataaatgatgagaaattaaaggaggaattcagcagctttggtagtatcagtcgtgccaaagtgatgatggaggtcgggcaaggcaagggctttggagtcgtctgtttttcatcgtttgaagaggcgactaaagccgtggatgagatgaacgggcgaattgttggttcaaagccactgcatgtgaccctgggtcaagcacgccgaagatgctag

SEQ ID NO: 129145 - DNA, 1053 bp, synthetic construct
  misc_feature 1..1053: note = Description of Artificial Sequence: Synthetic coding sequence
  source 1..1053: mol_type = other DNA
atgctgtataaaaagttcaggcccgccgggcccctccgtttcacacgcatttgtcgggaccctgtgacccgctcacccttgggctacggttatgtgaacttcaggtttccagccgatgccgagtgggcgttgaacacaatgaacttcgatcttatcaacggcaagccctttaggctaatgtggtctcagcctgatgaccgactccgtaagtctggtgtgggtaatatctttatcaaaaatctcgataagagcatagacaatcgggccctgttttatctgttctcagccttcgggaacattctaagctgcaaggtggtttgtgatgacaatgggagtaagggctatgcatatgtgcacttcgactcccttgcagctgccaatcgcgccatctggcacatgaacggagtgaggctgaacaaccgccaggtgtacgtgggaaggtttaagtttcccgaggaaagagccgccgaagtgcgcactcgcgatagagcaaccttcacgaacgtgttcgtgaagaacatcggagatgatattgatgacgaaaagctgaaagaattattttgtgagtatgggcctaccgagtctgtcaaggttattagagatgcaagcggcaaatctaaaggctttggattcgtgcggtatgaaacgcatgaggccgcccagaaagcagtgctggatttgcacggtaagtcgattgacggcaaggtcctgtatgttggcagagctcagaagaagatcgaacgtctagcagagctgcgacgacgctttgaaaggctgagactaaaggagaagtctcgcccacctggcgtgccaatatatatcaagaacttagatgagacaattaacgacgagaaactgaaagaagagttttccagctttgggtccatcagtagggccaaagtgatgatggaagtgggacaaggcaaaggcttcggcgtcgtgtgttttagttcttttgaggaagctacaaaagctgtggatgagatgaatggtcggattgtgggctctaagccactccacgtcaccctgggtcaagcccgtaggaggtgttag

SEQ ID NO: 129146 - DNA, 957 bp, synthetic construct
  misc_feature 1..957: note = Description of Artificial Sequence: Synthetic coding sequence
  source 1..957: mol_type = other DNA
atgcccaagcgcggcaagaaaggagccgtggccgaagacggagatgagttgcgaacagagcccgaggccaagaaatccaaaaccgcagccaagaaaaacgataaggaagctgctggggagggtcctgccctctatgaagaccccccagaccagaagacttccccaagcgggaagcctgctacccttaaaatctgttcctggaacgtcgacgggctgagagcctggataaagaagaagggactggattgggtaaaggaggaagcacctgatatcctatgtctgcaggaaaccaagtgtagtgagaacaaactgcctgcggagctgcaagagctgcccgggcttagccaccagtattggtcagcaccctccgacaaagaaggctattcgggcgtcggcttactgtcacggcagtgtcccttgaaggtgtcctatggaattggcgacgaggaacacgatcaagaggggcgggtgattgtggccgagttcgattccttcgtgctggtcaccgcttatgtcccaaacgctggacgcggtttagtgaggttggagtaccggcagaggtgggatgaagcttttagaaagttcctgaaaggcctggctagccgcaaacccctggtactttgcggtgacttaaacgtcgcacacgaggagatcgacctgcgcaaccctaaaggcaataaaaaaaatgctggttttacacctcaggagagacagggcttcggggaactcctgcaagcagtgccattagcagatagctttagacatctgtatcccaacacaccatacgcttacaccttttggacatacatgatgaacgcccggtctaaaaacgtcggatggcgcctcgattacttcctgctgtcacacagtttgttgcccgccctctgcgatagcaagatccggagcaaagcacttggtagcgatcattgcccaataaccctgtacctggccctgtag

SEQ ID NO: 129147 - DNA, 891 bp, synthetic construct
  misc_feature 1..891: note = Description of Artificial Sequence: Synthetic coding sequence
  source 1..891: mol_type = other DNA
atggccgctgccgccgccgccgcagcggcggccggggccgctggaggacggggaagcggcccagggcgcagacgccacctggtgcccggggccggaggggaggccggcgaaggggctcccggtggagctggagattatggcaatgggcttgagagtgaggaactggagccggaggagttgcttcttgagccagagccagagcctgagcctgaggaggagccccccagaccaagagctcctccaggcgccccaggtcccggccctggaagtggtgcacccgggagccaggaagaagaggaggaacctgggttagtagaaggggatccaggggatggcgcgatcgaggatcctgaactggaagctataaaagctagagtgcgtgaaatggaggaagaggctgaaaagctgaaagagcttcaaaacgaggtcgagaagcaaatgaacatgtcccctcccccgggaaatgccggccctgtaataatgtccattgaggaaaagatggaggcggacgcacggtccatttacgtgggtaatgtggactatggggcaacagcggaggagcttgaagcccattttcacggctgcgggagtgtgaacagagtcacaatactgtgtgacaaattcagcggtcacccaaaggggtttgcttatatcgagttctccgacaaagaatccgtgcgtacatctttggctctggacgagtccctgtttagaggacgccaaattaaggtgattcctaagcgaactaaccggccaggcatatctactacagacagaggctttccccgcgcgaggtatagagctcggactacaaattacaattcatccagaagccggttttactccggcttcaacagccggccccggggcagagtttatagaagcggatag

SEQ ID NO: 129148 - DNA, 1557 bp, synthetic construct
  misc_feature 1..1557: note = Description of Artificial Sequence: Synthetic coding sequence
  source 1..1557: mol_type = other DNA
atgtcctgcgtgaagctgtggccatctggggcacctgccccactcgtctcaatcgaagaactggaaaatcaagaactcgtgggcaaaggagggtttggaacagttttcagagcccaacatagaaaatggggctatgatgtcgctgttaagattgtgaactcgaaggccattagccgcgaagttaaagccatggcatccctcgacaatgaatttgtgctccgattggagggcgtcatcgaaaaggtgaactgggatcaggacccaaaaccggcccttgtaaccaagtttatggagaatggatccctgagtggcctcctgcaaagccaatgtcctcgaccgtggcctttactttgccggctactgaaggaggtcgtccttggcatgttttacctacatgaccagaaccccgtgctccttcaccgggatctgaagccctcgaacgtgctgcttgaccccgagctccatgttaaactggccgatttcggattaagtacatttcaaggcggcagccagagtggcaccggcagcggtgagcccggcggaacactcggctaccttgcacccgagctgttcgtcaatgtgaatcgtaaagcatcaacagcttccgatgtgtattcttttggcattttgatgtgggcagtcctcgctggccgcgaagtagaattgcctaccgagccttcgctagtatatgaggcggtgtgcaacagacagaatcgtccaagcctggcagagctgcctcaagcaggccccgagacccctggcctcgaggggctgaaggagctgatgcagctctgctggtcttccgagccaaaggatcgaccctctttccaagaatgtcttcctaagactgatgaagtgttccagatggtcgagaataatatgaacgcagccgtttcaaccgtaaaagactttctgtcacagctccgctccagcaaccgtcgtttcagtattccagagtctggccaagggggaacggaaatggacggttttaggcgtactatcgagaatcagcacagccggaatgatgttatggtcagcgaatggctaaataagctcaacctagaggagcctccaagctcagtgccaaaaaaatgtcctagcctaaccaagcgcagccgagcccaggaagagcaggttcctcaggcttggactgcgggcacttcgtcagactctatggcgcagccccctcaaaccccagaaacaagtacctttcggaaccagatgccctctccaacaagtaccggcaccccctctccaggtcccagaggaaaccagggcgcagagcgacagggaatgaattggtcatgccgtacacccgagcctaaccccgtaacgggtcgacccctggttaatatttataattgctccggtgtacaggtgggagacaataattacctgactatgcaacagacgactgccctcccgacctggggcctggctccatcagggaaaggtcggggccttcaacatccccccccggtcgggtcgcaggaggggccaaaggatcctgaggcctggtccagaccacagggctggtacaatcattctggtaaatag

SEQ ID NO: 129149 - DNA, 2223 bp, synthetic construct
  misc_feature 1..2223: note = Description of Artificial Sequence: Synthetic coding sequence
  source 1..2223: mol_type = other DNA
atgctgggtaggagaggatccgattgggccgtgcctgccccagaaaccatgcctttcccggtgacaactcaggggtcacagcagacacaaccaccccagaaacactacggcatcacctcccccatctccctggccgcccctaaagagacggactgcgtactgacacaaaagctaatagagactcttaaaccattcggggtgtttgaggaagaggaagaactccagcggaggattctgatcctgggtaagttaaacaatcttgtgaaggagtggatcagagagatctccgagagcaagaacttgccccaatcagttatagaaaatgtaggtggaaaaattttcacatttgggtcttacaggctcggggtgcatactaaaggcgccgacatcgatgccttgtgtgttgctcctcgtcatgttgacagaagtgatttttttacatctttctacgataaactgaaactccaggaagaggtgaaagacctgcgggcagtagaggaggccttcgtgcccgttattaaactgtgctttgatggcattgaaatagacatattattcgctagactggcattgcagaccattcccgaggacctcgatctgagggacgattcgctgctgaagaacctggatatcagatgtatcagatcacttaatggctgtagagtgactgacgagattctccatctggtacctaacatcgataattttaggttaaccttgagggccattaagctctgggcgaagaggcataacatctacagcaatattctgggatttctcggtggcgtgtcctgggcgatgctggtcgccaggacatgccagctttatcccaacgctattgcttcaacactagtgcacaagtttttcctggttttttcaaagtgggagtggcctaacccggtgctactcaaacaaccagaagagtgcaatctgaacctccctgtatgggatcctagggtcaaccccagcgataggtatcacctgatgcctattattactccagcttaccctcaacagaactccacttataatgtgtcagttagcacccggatggttatggtggaggagtttaagcaggggctggccattaccgacgagatcctgctcagcaaggcagagtggagcaagctatttgaggccccaaactttttccagaagtataagcactatatcgtgttgttagcctctgcacctactgaaaaacagagactggagtgggtaggcctggtggaatccaagattaggatactggtcggaagtctggaaaagaacgaattcatcaccctagcccacgtgaatccccagtcatttcccgccccgaaggaaaacccagacaaggaggaattcagaactatgtgggtgatcggtttggtgttcaaaaagaccgagaattctgaaaacctgagcgtcgacctgacctacgacatccaaagttttaccgacacagtttatagacaggccatcaacagcaagatgttcgaggtcgacatgaaaatcgctgccatgcatgtcaaaaggaagcagctgcatcagctgctcccaaatcacgtcctgcaaaaaaaaaaaaagcactctacagagggagtgaaactgacagcgctgaatgattctagcttggacctgtcaatggattccgataactccatgagtgtcccctcgcccactagtgctaccaagacaagccctctcaactcttcaggctctagtcagggacgtaacagtcctgcacccgcggttacagcagccagcgtgacaaacatccaggcaactgaagtgtctgtaccccaagtgaacagttccgaatcttccggtggtacttcctcagaatcaatcccccagaccgcgacccagcccgccataagtccaccaccaaaacctactgtgtcacgggtggtgtcatccacccggctggtgaacccaccccctcggtcgtccggcaatgccgcaacttcaggtaacgctgcaactaagattcccaccccaattgtcggcgttaagcgtacttcttccccccacaaagaagagtcccccaaaaagacaaagaccgaggaggaacagctggatactgagactagcaccacacagtccgaaacaattcagaccgctgctagcctgctggctagccagaaaaccagcagcactgacctgagcgatattccagcgcttcctgccaatccgatcccggtgattaagaattctatcaagttgagacttaacaggtag

SEQ ID NO: 129150 - DNA, 858 bp, synthetic construct
  misc_feature 1..858: note = Description of Artificial Sequence: Synthetic coding sequence
  source 1..858: mol_type = other DNA
atgcctttcccagtgaccacccagggctcccagcagacgcagccccctcagaaacattacggtattacatctcctatttccctagcggccccaaaagagaccgattgcgtactaacgcagaagctcattgagactctaaaaccgttcggtgtgtttgaggaggaggaggagttgcagagacggatactgatcctcggcaaactgaataatttggtcaaagaatggatcagggaaatttccgaatcaaagaacttacctcagtccgtgatcgaaaacgtaggcggcaagatcttcactttcgggagttatagactgggagtgcacaccaagggagctgacatagatgccctttgcgtcgcacccagacatgtcgaccgctcggattttttcacaagtttctacgataagctcaagttgcaggaagaggtaaaggacctgagagcggtcgaggaggcattcgttcccgtgatcaagctgtgcttcgatggtatcgaaatagatattctgttcgctcgcctggccctgcagaccatccccgaagacctggacttgcgggacgactcccttctcaagaacttggatattaggtgcattcgatcattaaacgggtgccgcgttacggacgaaatcctgcacctcgtgcctaacatcgacaattttagactcaccctccgtgcgatcaaactttgggctaagcggcacaatatttacagcaatatccttgggtttctggggggggtcagctgggccatgctcgttgcacgaacttgtcagctttaccccaacgctatcgcgtcgactctagttcataagttttttctggttttctccaagtggtacgtgtttcgtttatactag

SEQ ID NO: 129151 - DNA, 1911 bp, synthetic construct
  misc_feature 1..1911: note = Description of Artificial Sequence: Synthetic coding sequence
  source 1..1911: mol_type = other DNA
atgccatttccggtgaccactcaggggcccccccagccagccccacccccaaaccggtatggcgtctcctccccaatttccttagccgttcccaaagagaccgattgtcttttaacccaacgcctcatcgaaacactgcgtccctttggcgtctttgaggaggaagaggaactgcaacgcagaattctggtgcttgaaaaactgaacaacctagtcaaggaatggatacgcgaaatctcagaaagcaaatctctcccccagtcagtgatcgagaatgtgggcggcaagatcttcacctttgggagttacagattaggtgtgcatactaaaggggccgatattgatgctctctgcgtggccccctctcatgtggaccgctcggacttcttcacatcgttctacgcaaagctgaaacttcaggaagaagttaaggatctgagggccgtggaggaggcctttgtgcctgtgatcaagttgtgttttgatgggatagagattgacatccttttcgcccgattagctctgcagacaattccagaggacctggacctgcgcgatgacagcctcctgaagaacctggacatacggtgtattcggtccctaaacggctgtcgagtcaccgatgaaatcctacatctggtgcctaatatcgacaacttccgcttgaccttgcgggcaataaagctctgggctaagtgtcacaacatctacagcaatatcctaggtttcctgggtggcgtgtcgtgggctatgctggtggctagaacatgtcaactttaccccaatgccgtggcctccaccctggtgcgtaaatttttcctggtcttttccgagtgggaatggcccaaccccgtcctgcttaaggagcccgaggaaagaaatctgaatctgccggtctgggaccccagggttaatcccagcgacaggtatcacttgatgccgattatcacgccagcatacccgcagcagaattcaacttataatgtaagcatcagcacgagaatggtgatgatcgaggaatttaaacaggggttggctatcacccatgaaatactgctgtccaaggctgagtggagcaagctgttcgaggcaccaagttttttccagaagtacaaacattacatcgtgctcttagccagcgccagcaccgagaagcagcatttagaatgggtgggactcgtggagtctaaaatccgcattcttgtgggtagcctggagaagaacgagtttatcacattggctcatgtaaacccccagtctttcccagcaccaaaagaaaaccccgatatggaagagttcagaactatgtgggtcattggccttggcttgaagaaacctgacaattccgagatcctaagtatcgacctcacttacgatattcaaagttttactgacacggtgtaccgtcaggccgtgaatagcaaaatgtttgagatggggatgaagatcactgccatgcacctacgacgcaaagagctgcaccaactcctccctcaccatgtgcttcaagacaagaaggcccactcaaccgaggggagaaggcttaccgatctgaacgactcttccttcgacctgagtgcaggctgcgagaattcaatgagcgtgccaagttctacctcaacaatgaaaacaggccccttgatatcaagcagccaaggacggaactcccccgctctggccgtaatgactgccagtgttgctaatatccaggccacagagttctccctccagcaggtgaatacaaatgagtcctctggagtggctctgaacgaatcaattccccatgctgtgtcccagcccgcaatctcaccatcccccaaagctatggtcgccagggttgtgtcctccacatgtctcatttctcatccagacttacaggagacccagcagcaaacgtacttaatattatag

SEQ ID NO: 129152 - DNA, 1737 bp, synthetic construct
  misc_feature 1..1737: note = Description of Artificial Sequence: Synthetic coding sequence
  source 1..1737: mol_type = other DNA
atggacttcctgctgttccaatttggcctgtgcacgtttaagtacgactacacagatagcaagtatatcactaaaagctttaatttttatgtgtttccgaaaccatttaatcggtcaagccctgacgtgaagttcgtgtgtcaatctagtagcattgatttcctagcctcccaggggttcgatttcaataaagttttcaggaacgggataccctatctgaaccaggaggaggagagacagctccgggaacagtatgacgagaagagaagccaggcaaatggagctggagctctttcctacgtgagtcccaatactagcaaatgccctgtgactatcccagaagaccagaagaagttcattgatcaggtggttgagaagatcgaggatttgctgcagtcagaagaaaataagaacttggacttagaaccatgcacgggcttccagaggaaactcatatatcagactttgtcctggaagtaccccaaggggattcatgtggagaccctcgagaccgagaagaaggagcgatacatagtcatcagtaaagttgacgaagaagaaagaaagcggagggagcagcagaaacatgcaaaagagcaagaggaactgaacgatgccgtagggttcagtcgcgtcatacacgccattgccaattcaggcaaactggtgataggccacaacatgctgttagacgtcatgcacactgttcatcagttttattgccccctgcctgcggatctttcagagttcaaggaaatgaccacttgtgtcttcccaagactcttagacactaagctgatggccagtacccagccattcaaggatatcataaacaatacttcgctggcagaactcgagaagcggttaaaggaaacacccttcaatcccccaaaagtcgaatcggccgaagggttccccagctacgacacagcctctgagcaactgcacgaagccggctacgacgcctacataactggtctgtgcttcatttctatggctaactacctcggcagtttcctgagcccccctaagatccatgtgtccgcgagatccaaacttattgaacctttttttaacaaactattcctgatgagagtgatggatattccttacctgaacctcgagggacccgacctgcaaccaaagagggatcatgttctgcacgttaccttccccaaagaatggaagactagcgacctctaccagctgttctccgcctttggcaatatccagatcagctggatcgatgacacttcagccttcgtgtctctttcccagcctgagcaggtgaaaatcgccgtgaacactagtaaatatgcagagtcttacagaattcagacctacgccgaatacatgggtcgaaaacaagaagagaaacagattaaacgcaaatggaccgaggatagctggaaggaagcagacagtaaacggctgaatccccagtgtataccctacactctccaaaaccactattacagaaacaattcgttcactgcacctagcacagtgggaaagcgaaacttatcaccttctcaggaagaagcaggcctggaagacggcgtttccggggaaatatccgatacggagttagaacaaacagactcttgcgcggagccgttgtccgagggacggaaaaaggctaagaaactcaagcgcatgaaaaaggaactgtcccctgccgggtcaatcagcaagaattcaccagctacactttttgaagtgccagatacttggtag

SEQ ID NO: 129153 - DNA, 1782 bp, synthetic construct
  misc_feature 1..1782: note = Description of Artificial Sequence: Synthetic coding sequence
  source 1..1782: mol_type = other DNA
atggagataatcaggtcaaatttcaaatcgaatctgcacaaggtttaccaggctattgaagaagccgacttcttcgccattgatggtgaattttctggaatctcagacggaccctccgtttctgccttgaccaacggcttcgacacccctgaggagcgcagtagccccgacgtcaaatttgtgtgccagtcatcaagcattgacttcctggcctcccaggggtttgatttcaacaaggtgttcaggaatgggatcccttacctgaaccaggaggaggagcggcaactcagagagcagtatgatgagaagagatcccaggctaatggggccggcgcgctcagttatgtgtctccaaatacctcaaaatgtcccgtgactatcccagaagatcagaagaaattcattgaccaagtagtcgaaaagatagaggatctcctgcagagtgaagaaaacaagaatctggatctggaaccctgtacaggttttcagagaaaactgatctatcagactttgtcctggaagtaccccaaaggcattcatgtagaaactcttgagaccgagaagaaggaacgatacatcgtaatctccaaggtcgatgaggaggagcgaaagaggcgggagcaacagaagcatgcgaaagagcaggaggaactaaatgatgctgttgggtttagcagggtcatccacgcaatcgctaatagtggtaaattggttatcgggcataatatgctgctcgacgtcatgcataccgtacaccagttttactgccccctgcccgcagacctgtcagaattcaaagagatgaccacgtgtgtcttcccccggttgctggacactaagctcatggccagtactcagccatttaaagacatcattaataacacaagcctggcagaactggagaaacggttgaaggaaacgccttttaaccctcccaaggtggagtccgcagagggcttcccatcctatgatacagctagtgagcagcttcacgaggcaggttacgatgcctacattactggactgtgctttatcagcatggccaactacctgggcagctttctcagcccaccaaaaatacatgtcagtgcccggtctaagctgatcgagccattttttaacaaactgtttctcatgagggtgatggacatcccatacctaaatctggagggaccagatctgcagcctaaaagggatcacgtgttgcacgtcaccttccccaaggagtggaaaactagcgacttgtatcagctgttttccgctttcggcaacatacagatatcttggattgacgataccagcgccttcgtcagcttgtcacaacccgaacaagtaaagatcgctgtgaacacttctaagtacgctgagtcgtatcgcatacagacatacgcagagtacatgggacgcaagcaggaggaaaagcagatcaagagaaaatggaccgaggacagctggaaggaggccgactccaaacggctcaacccacaatgcattccatataccctgcagaaccattattaccggaataacagcttcacagcgccaagcactgttggtaagcgcaatctatccccgtcacaagaagaggcgggactcgaggacggagtgagtggcgaaatcagcgacacagagctggagcagacagattcgtgcgcggagccactgtccgagggtagaaaaaaggccaagaaactcaaacgcatgaagaaagaattgtctcccgccggctctatctcaaaaaattcccctgccaccctgtttgaagtgccggacacatggtag

SEQ ID NO: 129154 - DNA, 1920 bp, synthetic construct
  misc_feature 1..1920: note = Description of Artificial Sequence: Synthetic coding sequence
  source 1..1920: mol_type = other DNA
atggagattatcaggtccaatttcaagtccaacctccataaagtctatcaggccattgaagaggcggatttcttcgccattgacggtgagttctcaggtattagtgatggtccgagtgttagtgctttgaccaatggatttgacacaccggaagagaggtaccaaaagctgaaaaaacactcaatggactttcttctttttcagttcgggctttgcacttttaagtacgactatacagactccaaatatatcaccaaaagtttcaatttctacgtgtttcctaagccctttaaccgatcatcccccgatgtcaagttcgtctgtcagagtagctctatcgactttctcgcaagccagggctttgatttcaacaaggtttttagaaatggtatcccttatctgaatcaggaagaggaaagacagctcagagaacagtacgacgaaaaacggagccaggcaaatggggctggcgctctctcatatgtatctcccaataccagtaaatgtccagtgaccatcccagaggatcaaaagaagttcatcgaccaagtagtcgagaagattgaagatctgttgcagagtgaggagaataaaaacctcgatctggagccttgtacaggctttcaaaggaagctgatttaccagacgctgtcatggaagtatcctaaggggatacatgtcgagacactggagaccgaaaaaaaagagaggtatattgtgatttcaaaggtggacgaggaagaacgaaagaggagagaacagcagaaacatgccaaggaacaagaagagctgaacgatgctgtcggcttctctcgggtaatccacgcaattgccaactccggtaaacttgtcattggccacaatatgctgctggatgtgatgcacacagtccaccagttctattgtccgctcccagcagatctgtccgagttcaaggaaatgaccacatgcgtgttccctcgtctcctggatacaaaattgatggccagtactcagccgtttaaagatatcataaacaacactagcctggccgagctcgagaaacgacttaaagaaacgccttttaaccctcctaaggttgagagcgccgagggcttcccttcctatgatacggctagcgagcagttgcatgaagccgggtatgatgcgtatatcacagggctctgctttatctccatggccaactatttggggtctttcctgtcaccccctaagatccatgtcagtgcccgttctaagttgatagagcccttctttaataagcttttcctgatgcgcgtcatggacatcccatacctcaatctggagggacccgatctacagcctaaaagggaccacgttctgcacgtgactttcccaaaagaatggaagacgtctgatctctaccagctcttcagcgctttcggtaatattcagatttcttggatagacgatacatctgcgttcgtatcccttagccagcctgaacaggtcaagatcgccgttaatacatccaaatatgccgaaagttaccggattcaaacgtacgccgagtacatgggcagaaagcaggaggaaaaacaaattaaacggaaatggaccgaggacagttggaaagaagcggactctaagcggcttaacccccagtgtataccatatacactgcagaatcattactatagaaataactcatttacagcacccagcacagtgggaaagcgcaacctaagtccaagccaggaagaagccgggcttgaagatggcgtttccggggagatcagcgataccgaactcgagcagaccgatagttgtgcagaacctttgtctgaaggacgtaaaaaagcaaagaagctgaagcgtatgaaaaaggagctgtcaccagctggttcaattagcaagaattccccagccacccttttcgaggtgccagacacctggtag

SEQ ID NO: 129155 - DNA, 624 bp, synthetic construct
  misc_feature 1..624: note = Description of Artificial Sequence: Synthetic coding sequence
  source 1..624: mol_type = other DNA
atggagatcattagaagcaatttcaagagcaaccttcataaagtctatcaggccatcgaagaggcagactttttcgcgatcgatggagagttttcgggcatctctgacggcccatcagtgagtgccctgaccaacggcttcgacacccccgaagagagatatcaaaagctgaaaaagcactctatggattttctgttattccagtttggcctgtgcactttcaagtacgattatacggattctaagagctcgcctgatgtgaagtttgtttgtcagtcgagttctattgatttcttagcctcccaggggttcgattttaataaggtgtttcgcaatggtatcccatacttgaatcaggaggaagaacggcaattgcgggagcagtacgacgagaagaggtcgcaagcaaatggagccggggccctcagctatgtctctcctaacacctctaagtgccccgttacgattccagaagaccaaaaaaagtttatagaccaggtggtggaaaaaatcgaagacctcctccagtcagaagaaaacaaaaatctagatttggaaccctgtaccggttttcaacgcaaactgatctaccaaactctgtcctggaagaggagcgacatctag

SEQ ID NO: 129156 - DNA, 1395 bp, synthetic construct
  misc_feature 1..1395: note = Description of Artificial Sequence: Synthetic coding sequence
  source 1..1395: mol_type = other DNA
atggaaattatccgatctaatttcaagagtaatctgcataaggtgtatcaggccatagaagaggcggatttttttgccatcgacggggagttctctggaatctccgatggcccttctgtgtccgcactgacaaatggatttgacacacctgaagaacgttaccaaaaattgaagaaaaaagaacggtacatcgtaatcagcaaggtcgacgaggaggagaggaagcggagagagcagcaaaagcacgccaaagaacaggaggaactcaatgacgctgttggcttcagccgggtgattcatgcgatagccaactcaggcaagttggttatcgggcataacatgcttttggacgtgatgcacacagtgcatcagttttattgcccgctgcctgctgacctgagcgaatttaaagaaatgacaacatgcgtgtttcctagactgttggacaccaagctgatggccagtacacagccctttaaggatatcattaataatacctctctggccgaacttgagaaacgtctgaaggaaaccccctttaatcccccaaaggtcgagagtgcagagggctttccaagctacgacactgctagcgaacagctccacgaagcaggatacgacgcttatataactggcctgtgttttatttctatggccaactacttagggtcattcctgtcaccacccaagatccacgtgtccgccagatctaagctgatcgaacccttctttaacaagctcttcctgatgcgggtaatggacattccttatctcaacctcgagggccctgacctgcagcccaagcgggaccacgtgctccatgtgacatttccaaaggagtggaagacctccgatctgtaccagctctttagtgcttttgggaatatccaaattagttggatcgatgatacaagtgcttttgtgtccctgtctcagccagaacaggtgaaaatagccgtgaacacgagtaaatacgcggaatcttacagaattcagacgtacgcggagtacatgggccgcaagcaggaggagaagcagatcaaaaggaaatggaccgaagatagctggaaggaagctgattctaaacgtcttaacccccagtgcattccttacacattacaaaatcactattacagaaataattcttttacggccccatcaactgttgggaaacgaaatttgagccccagccaggaggaggccgggctggaggatggggtttctggggagataagcgacacagaactagaacagacagactcatgcgctgagcctctgagcgagggaagaaaaaaggctaagaaacttaagcgaatgaagaaggaactaagtcctgccggtagtatctccaaaaactccccagcaactttgtttgaagtgcctgatacatggtag

SEQ ID NO: 129157 - DNA, 1071 bp, synthetic construct
  misc_feature 1..1071: note = Description of Artificial Sequence: Synthetic coding sequence
  source 1..1071: mol_type = other DNA
atggatgccggggtcaccgagagcggattgaatgttacattgacaatccgtctactgatgcatggcaaagaagttggctcgatcatcggcaaaaagggcgaatcagttaagagaatccgggaagagtccggggctaggatcaatatctccgagggtaattgccctgagagaatcattacactgactgggccaaccaacgcaatctttaaagccttcgcaatgattatcgacaaactggaagaggatattaatagctccatgacgaattccaccgcagcctcgagacctccagtaaccctgagactggtagtccccgctactcagtgcgggagcctaatcggtaaagggggttgtaagataaaggagatcagagagagcacaggggcccaggtccaggtcgccggggacatgctccctaactctacggaaagggccattacaatcgctggagtcccgcagagcgtgacagagtgtgtcaaacagatctgtcttgtgatgttggagaccttgtctcagagtccacaggggcgtgtcatgaccatcccctatcagccaatgcctgcttccagcccagtcatatgtgctggggggcaggaccggtgctcggacgcagccggctatccgcacgccactcacgacctagaaggcccacccctggatgcgtatagcatccaggggcagcatacaatcagccccctagatttagcgaagttgaaccaggtcgctcggcagcaatctcacttcgccatgatgcacggcggcacaggctttgccggtatcgacagttcatctccagaagtgaagggctattgggctagtctagacgcctccactcaaaccactcacgagttgacaattcccaacaatttgatagggtgcatcatagggcgccaaggagcgaatatcaacgagattcgacagatgagcggcgcccagattaaaattgccaatcctgttgaaggctcttcaggacgtcaggttaccattactgggtccgccgcgagcatttctttagcacagtatttgattaacgcgaggttgtcatcagaaaagggcatggggtgcagttag

SEQ ID NO: 129158 - DNA, 957 bp, synthetic construct
  misc_feature 1..957: note = Description of Artificial Sequence: Synthetic coding sequence
  source 1..957: mol_type = other DNA
atggacacgggagtgatcgagggaggcctgaatgtcacactgacaattagactgctgatgcatggcaaggaagtaggcagtataattggaaagaagggagaatccgtcaaaaaaatgcgagaagagtcaggagctcgcatcaacatcagtgaggggaattgtcctgaacgcattatcaccttggctggtccaacgaatgccattttcaaggcattcgccatgattattgataaattggaggaggatatctcatcctcaatgacaaatagcactgccgcctctcgccctccagtgaccctgcgcctggtggtgcccgcatctcagtgcggtagcctgattggcaagggggggtgcaagatcaaagaaatacgggagagcacaggcgcccaggttcaagtagccggggatatgctcccgaacagtacggaaagagctatcaccattgctggtatcccccagtccatcattgaatgtgtgaagcagatctgcgtggtgatgctggaatctccccctaaaggtgtgacaattccctaccggcccaagccaagtagtagccctgtgatttttgcgggcggacaggcctacaccatccagggccagtacgctattccacagccagacctgacgaagttgcaccagttggcgatgcagcagtctcatttccccatgacccacggaaacaccggattttcagccgggcttgacgcctctgcccagaccacttctcatgagttgaccatacccaatgatcttatcggctgcattatcgggcgccaaggtgctaagatcaatgagataaggcagatgagtggggcccagatcaagattgccaaccctgtcgagggatcaaccgaccgccaggttaccatcaccggcagtgccgcaagcatctccctggcccagtatctgattaatgttagactatccagtgaaactggcggtatgggcagtagctag

SEQ ID NO: 129159 - DNA, 1098 bp, synthetic construct
  misc_feature 1..1098: note = Description of Artificial Sequence: Synthetic coding sequence
  source 1..1098: mol_type = other DNA
atggatactggagtgatcgagggagggctgaacgtcaccctgaccattagattgctgatgcacgggaaggaggtggggagcatcataggcaagaagggtgaatcagtgaagaaaatgagagaggagtccggagcccgcattaatatctctgagggaaattgcccagagcggattattactcttgccggacctactaatgccatatttaaggctttcgctatgatcatcgacaaactcgaggaggatataagtagtagcatgacgaactcaacggccgcaagccgcccaccagtcacattacggctggtcgtgcctgccagtcagtgtgggtccctgatagggaaaggggggtgtaagataaaggagatcagggagagtacaggtgctcaggtgcaggtggccggcgacatgttgccaaactccaccgagcgcgccataaccatcgctgggattccccagtccattattgaatgtgtcaagcagatttgcgtcgtgatgttggaaaccttgtctcagtccccaccaaaaggtgtcacaattccatacaggccgaaaccgagttcctctcccgtgattttcgccggaggccaggacaggtatagcactggaagcgactccgcttccttcccccatacaacgccgagcatgtgcctgaatcctgaccttgagggccctccactggaggcctacacgatacaggggcagtatgcgatcccgcagcctgacctgactaagctgcaccagctggccatgcagcagagccacttccccatgactcacggaaatacaggtttcagcggtatcgagagtagctcacccgaggtgaagggttactggggcttggacgcctctgcgcagactacttcccatgagctgacaattcccaatgaccttattggatgcattatcggcagacaaggcgcgaagattaacgagatcaggcagatgtctggagcccagatcaaaatagctaatccggtggaagggtccacggatcgacaagttacaatcacgggatcagccgcctccatttctttggcccagtatttaataaatgtgcggttatcttcggagacaggcggaatgggctcatcctag

SEQ ID NO: 129160 - DNA, 1008 bp, synthetic construct
  misc_feature 1..1008: note = Description of Artificial Sequence: Synthetic coding sequence
  source 1..1008: mol_type = other DNA
atggacaccggcgttattgaaggtggactgaacgtgaccttgaccatccggctcctcatgcacggcaaagaggtgggtagcattatcggaaaaaagggggagtcggtgaagaagatgagagaagagtccggcgctcgcatcaacattagcgaagggaactgccctgagagaattattaccttggctggccccacgaacgccatatttaaggcattcgcaatgataatagacaaacttgaagaagacatctctagctccatgacgaacagcacggccgcgagccggccgccagtgacactgaggcttgtggtgcctgcctcccagtgtggctccctgatagggaaaggcggttgcaagataaaggaaattagagagtccaccggcgcccaggtgcaggtggctggagacatgctgcccaactctacagagcgcgctattactatcgctggcattccccagtccattatcgaatgtgttaaacagatctgcgtggtaatgctcgagaccctctcccaatccccgcccaaaggcgtcaccatcccctataggcctaagcctagtagttcaccagtcatcttcgccggaggtcaagcttacacgatccaaggccaatacgccattcctcagcccgatctcacgaaactccaccagctcgcaatgcagcaaagtcattttccaatgacacatggcaatactgggtttagcgggattgaatccagcagcccagaagtaaagggctattgggctggacttgatgcctcagcacagacaaccagtcacgagttgaccattcctaatgatttgatagggtgtataatcggcaggcagggagccaaaatcaatgagataagacagatgagcggggcccagattaagatcgctaatccagtggaaggctccaccgatagacaggtgactattactgggagcgcagcatccattagtctagcccagtatctgattaatgtgcgcttatcttcggagactggaggcatgggcagctcctag

SEQ ID NO: 129161 - DNA, 906 bp, synthetic construct
  misc_feature 1..906: note = Description of Artificial Sequence: Synthetic coding sequence
  source 1..906: mol_type = other DNA
atggatacgggggttattgagggtggactcaacgtgaccctgacgataagattgctgatgcacgggaaagaagtcggctcaatcataggcaaaaagggagagtccgtcaaaaagatgcgagaggaatccggggcacggatcaacatctcagagggtaactgcccagagagaatcatcactttagccggacccactaacgccatatttaaagcctttgctatgatcattgataagcttgaagaggatataagctcatcaatgacgaacagtactgccgcctccagacctcccgttacactccggctggtggtgcctgcatcccagtgcgggtctctgatcgggaagggagggtgcaaaattaaagagattagggagtctaccggggcacaggtgcaggtagcaggagacatgctccctaattcgaccgagcgtgcgatcactatagcgggcattccacagtccattatcgagtgtgtcaagcagatatgtgtggtgatgctcgaaagtcctcctaagggagttaccattccttacagacctaaaccttcgtcaagccccgttatcttcgccggggggcaggaccggtattctaccggatctgactcggcctctttccctcacaccactccttctatgtgcctcaatccagatctcgagggtcctccactcgaggcttacaccattcaggggcagtacgcaattccccagccagacctaactaagctccatcagcttgccatgcagcagtctcacttcccgatgacccacggaaacactggattcagcggtatggataccagcgtgttcatctcagtgcggtgctcagcaagagaacggccagttccgaggagccagctggacatttgtctcaagcaaactagcctgtctagcatcctactcgtatag

SEQ ID NO: 129162 - DNA, 1089 bp, synthetic construct
  misc_feature 1..1089: note = Description of Artificial Sequence: Synthetic coding sequence
  source 1..1089: mol_type = other DNA
atggacactggagtgattgagggtggacttaacgtaacattgaccatcagacttctcatgcatgggaaggaagtgggatccattatcggcaagaaaggggaatcggtcaaaaaaatgcgggaagagtccggggcacgcatcaatatcagcgaaggaaattgccccgaaagaatcatcaccctggcgggccctaccaacgctatttttaaggctttcgctatgattatcgataagctcgaagaagatatttcctcaagcatgacaaattccacagccgcaagtcggcctcccgtgactttgcgcctggtggttccagcatcgcagtgcggaagtttgatcggcaagggcgggtgtaagatcaaggaaatcagggagtcaactggagcccaggttcaggtggccggagacatgctgcctaactctacggaacgcgctatcaccatcgctggcatacctcaatcgatcattgaatgcgttaaacagatctgcgtcgtgatgctcgaatcgccgccaaagggagtgacaatcccctaccggccaaaaccttcttcaagtcccgttatctttgctgggggtcaggaccgctactcaacaggatctgacagcgccagcttcccgcacacaacaccctccatgtgcctaaaccccgatctggaagggccacccctcgaagcctacacaattcaagggcaatatgcaatcccccagcctgatctgacaaagctgcatcaactcgctatgcagcaatctcacttccctatgactcacggtaatactggattcagcggcattgagagtagcagccccgaggtcaaaggctattgggcaggcctcgacgccagtgcgcaaaccaccagccacgagttgaccatccctaacgatctgatcggatgcattatcggacgacagggagccaagataaatgaaattaggcagatgagcggagcacagatcaagatcgccaaccctgtcgagggctccactgacaggcaggtcacaatcaccgggagcgcagcctccataagtctggctcagtaccttatcaacgtgcgcctgtccagcgagaccggaggaatgggatcaagctag

SEQ ID NO: 129163 - DNA, 996 bp, synthetic construct
  misc_feature 1..996: note = Description of Artificial Sequence: Synthetic coding sequence
  source 1..996: mol_type = other DNA
atggatacaggggtgatcgaaggggggttgaatgttacccttactattcgattgttgatgcacggcaaggaggtcggctctattatcggaaaaaagggggagagcgtgaagaaaatgagggaagaatccggagcccgaatcaacatatccgaaggtaattgtcccgagaggattatcaccctcgctgggcccacgaacgccatcttcaaagcctttgccatgatcatcgacaaactggaggaagatatcagctcatctatgaccaattctaccgcagcaagcagaccacccgtgacccttcgcctagttgttcccgcatcccaatgtgggagtctgatcgggaagggaggctgcaagatcaaagaaatcagagagtcgacgggagcccaagtgcaggtggccggagatatgttacctaatagcacagaacgggccatcacaattgcaggtatccctcagtcgatcatcgaatgtgttaagcaaatttgcgtagtgatgctggaatccccccctaagggggtcaccatcccatataggcctaaaccttcaagctctccagtcatatttgcaggaggccaagcatatacgattcagggtcagtatgcaattccccaacccgacctgaccaagctccatcagctcgccatgcaacagtcccattttccaatgacacatgggaatactggcttctctgggattgaatcctcctctcccgaagtcaaaggctactgggctggcctcgatgcttctgcccaaacgacctcccacgagttaacgatccccaatgacctcatcgggtgcatcatcggtcgccaaggcgctaaaattaacgaaatccgccagatgtccggtgcacaaatcaagattgctaacccagtggagggtagtaccgaccgccaagtgacgattacaggtagcgctgcttcaattagtctggcacaatatctcattaacgtgcgactgtcttccgaaactgggggtatggggagctcctag

SEQ ID NO: 129164 - DNA, 1101 bp, synthetic construct
  misc_feature 1..1101: note = Description of Artificial Sequence: Synthetic coding sequence
  source 1..1101: mol_type = other DNA
atggacactggggtaatcgaaggaggcctcaatgttacgcttacaattaggctgttgatgcatggcaaagaagtgggaagtatcatcggaaagaaaggagagagcgttaaaaagatgcgggaggaatctggcgcacgcataaacatctctgaggggaattgccccgagcggataataacactggctgggccgaccaacgccatcttcaaagcctttgccatgataatcgataagttggaggaggacatcagctcttctatgaccaacagcacagctgcttccaggcctcccgtgaccctcagacttgtggttcccgcttctcagtgcggctctctaattggcaaaggcggatgtaaaatcaaggaaattagagagtctacaggcgcacaggtccaagtcgcgggtgatatgctgccaaactctactgagcgggccatcacaattgctggcataccacaatccatcattgaatgcgttaaacaaatttgtgttgtgatgctggagacgctgtcccagtcccctcccaaaggagttaccatcccctaccgtccgaagccctcttcttctccagtgatcttcgctggggggcaagaccgctacagcaccgggtctgacagcgcctcattcccccatacaaccccatctatgtgtctgaatccagacctcgagggcccgcctctcgaagcgtacacaattcaaggccaatacgctattccgcagccagatctgaccaagctgcaccagctggcaatgcagcagtctcatttccctatgacccacgggaataccggcttttccggtatcgaatcttccagtccagaagtgaaagggtactgggccggcctcgacgcaagcgctcagaccacctcacacgaacttacaatacctaatgacctgatcggatgtattattggcagacaaggagccaaaataaacgagatcagacagatgagtggtgctcagattaagatcgccaatcccgtggagggctccaccgatcgccaggtgacaattactggaagcgccgccagcatctctttggctcagtatctgattaacgtgcgtttgtcttcagaaaccggcggcatgggctcttcctag

SEQ ID NO: 129165 - DNA, 1086 bp, synthetic construct
  misc_feature 1..1086: note = Description of Artificial Sequence: Synthetic coding sequence
  source 1..1086: mol_type = other DNA
atggatactggagtgatcgaaggtggcctcaacgtgacactcaccatacggctgttaatgcatggaaaggaagtgggttctattatcggcaaaaagggcgaaagtgtgaaaaaaatgagggaggagtcgggagccagaatcaacatctctgagggaaactgccccgaacgtattatcaccctcgccggcccaaccaacgctattttcaaggcctttgcaatgattattgataaactggaggaggacatctctagcagcatgacgaatagtacagctgcctctcgtccgccagtcacacttcgcctggtggttcctgcatcacagtgcggcagcctgattggaaaggggggctgtaaaatcaaggaaatcagggaatctaccggggcccaggtgcaagttgcaggcgacatgcttcccaatagcactgagagggccattaccatcgctgggatcccccagtccattatcgaatgtgtgaaacagatatgcgtcgtcatgttggagtcacctcctaagggcgtgaccattccttaccgtcccaaaccttcgagtagccctgtgatcttcgcagggggccaggacagatacagtacagggtctgattctgcatcgtttcctcatacaacaccctcaatgtgtcttaatcccgacctggagggccccccactcgaggcctacaccatacagggccagtacgccataccccagcctgatttaacgaaactccaccagctggctatgcaacagtctcactttcccatgactcacggcaacacgggcttttctgggattgaaagctctagtcctgaggtgaagggttattggggtctggacgcctctgcacaaaccacctcccatgagctgacaatccccaatgacttgatcggatgcatcatcggacgacagggtgccaagatcaacgaaattagacagatgtctggagcccagattaagattgcaaatcccgtcgaagggtctacggataggcaggtcaccatcacaggctccgccgccagcatcagcttggcccagtacctcatcaacgtgcgtctttcgtccgaaacgggggggatgggaagctcatag

SEQ ID NO: 129166 - DNA, 1056 bp, synthetic construct
  misc_feature 1..1056: note = Description of Artificial Sequence: Synthetic coding sequence
  source 1..1056: mol_type = other DNA
ttgtctccaggggacgctttctgggcaccaagcgtcctgccacactcgactctatcgacactgtcccatcatcctcagccccagttcggcagaagaatggaaagcaaagtgagcgaaggcggcttaaacgttaccctgacaataagactactgatgcacgggaaagtccggggcgccgccatcgttagcaaaggggagaccgtgaagaagatgagagaggaaagtggcgcacggatcaacatctcggagggcaactgtcctgagaggatagtcaccataactggcccaaccgacgcaatatttaaggcctttgccatgatagcctataaattcgaggaagacataatcaatagtatgagtaacagcccagctacatccaaaccgcccgttacactgcggctagttgtccctgcgtctcaatgcgggtctctgattggcaagggaggcagcaagatcaaagaaattcgggagtcgacaggcgctcaggttcaagtcgccggcgacatgctgcccaattcaacggaacgggcggttaccatctcaggcacacctgatgcgatcattcagtgtgtgaaacaaatctgcgtcgtgatgcttgagtctcctcctaagggagctaccatcccttaccgtccgaagcccgcctcaacaccggtaattttcgccgggggacaagcatacaccattcaggggcaatacgcaatacctcacccagatcagctcacaaagctgcaccagcttgctatgcagcagactccgttcccaccgctggggcaaaccaaccctgccttcccgggcctggacgcttctcctcctgcgtcaacgcacgaactaactatccccaatgatcttatcgggtgcattattggccgccagggaactaaaatcaacgagatcaggcagatgtccggggcgcaaatcaaaatcgccaacgctactgagggaagttccgagcggcagatcaccatcacaggtacccctgcaaatatttccctggcccaatatctgatcaatgcccgattgacgtccgaagttactggcatggggacactttag

SEQ ID NO: 129167 - DNA, 969 bp, synthetic construct
  misc_feature 1..969: note = Description of Artificial Sequence: Synthetic coding sequence
  source 1..969: mol_type = other DNA
ccacagcctcagtttggtcgccgaatggagtctaaggtgagcgagggggggctcaacgtgacgctcacgatccggctccttatgcacgggaaggaggtgggcagtatcattggcaagaaaggcgagactgttaaaaaaatgagagaagaaagtggagcacgaatcaacatatctgaggggaactgcccagagcgcatcgtgaccataactggcccaacagacgctattttcaaagctttcgccatgatcgcctataaattcgaggaagacattataaacagcatgagtaactcacctgcgacttcaaagcctccagtcacactgagactggtggtgcctgccagccagtgtggctccctcatcggcaagggcggctccaagatcaaagaaatacgcgaatccacaggtgctcaagtccaagttgctggcgatatgcttcctaatagcacagagcgtgccgttacaatctcaggaactcctgacgcaattatacaatgtgttaagcaaatttgcgtggtgatgctcgaagcttataccattcaagggcagtatgctatcccccatcccgaccagctgacaaagctccaccagctcgccatgcagcagactccatttcctcccctggggcagacgaaccccgctttccccggtgagaaactgcccctacacagctctgaagaagcacagaatcttatgggccagtcatctggtctcgatgcctcaccccccgcctcgacccacgagttgacaattccaaatgacctcatagggtgcataattgggcggcagggtactaagatcaacgagattagacagatgagcggggctcagatcaagatcgcgaatgccactgagggatccagcgagcggcagatcactatcacgggaacgcccgccaatatatcccttgcccagtacttgatcaatgcaagacttacctcagaagtgaccggcatgggcaccttgtag

SEQ ID NO: 129168 - DNA, 1038 bp, synthetic construct
  misc_feature 1..1038: note = Description of Artificial Sequence: Synthetic coding sequence
  source 1..1038: mol_type = other DNA
atgggcgaaggcgacgccttctgggccccctcagtgctgccccattccaccctctctacattgtctcaccacccgcaaccccagttcggtcgccgaatggaaagcaaggtgtcagaaggcggacttaacgtgaccctgacgattcgtctactcatgcacggtaaggaggtcggctccatcattgggaagaagggtgaaacggtgaagaaaatgagggaggagtccggggctaggataaatatttctgagggcaactgccccgagcggattgtgaccatcactggacccactgatgccatattcaaggcattcgccatgatcgcttataagtttgaagaggatataatcaactccatgagcaactctcccgccacatcgaaaccccccgtaaccctgcgactggtagtgcctgcaagtcagtgcggcagtctgattgggaaaggcggatcaaagatcaaggagataagagaatccaccggggcgcaggtgcaagtagccggagatatgctgcccaatagtacagaacgggcagtcacaatctccgggacacctgatgcaattatccagtgcgtgaagcagatctgcgtcgtaatgctggaggcctatactattcaggggcaatacgcgatccctcaccccgaccttactaaactccatcagctcgctatgcagcagacccccttccctccacttggccagaccaatcctgcgtttcctggagaaaagctccctctgcactcttcagaagaagcccagaacctcatggggcagtcgtccggtctagatgcctcccctcctgcttctacacacgaactgacaattcccaacgatctgattggctgcattattggaagacagggcactaaaatcaacgagattagacaaatgagcggtgctcagatcaaaattgcaaatgccactgaaggatcaagcgagaggcagatcaccatcacaggaacaccggccaacatcagtctcgcacagtacttgatcaacgccagactcacatcagaagtgaccgggatggggaccctgtag

SEQ ID NO: 129169 - DNA, 1113 bp, synthetic construct
  misc_feature 1..1113: note = Description of Artificial Sequence: Synthetic coding sequence
  source 1..1113: mol_type = other DNA
atgggggagggggatgccttttgggccccttcagttctgccccactcaacattatctaccctgtctcatcatcctcagccccagtttgggagaaggatggagtcaaaggtgtctgagggggggctgaacgtaaccctgactatccgacttttaatgcacggtaaggaggtgggcagcatcattggaaaaaaaggcgaaacggttaaaaagatgagggaagaatccggggcccggattaacatttccgagggtaactgccccgagcggatcgtaactatcaccggtccaaccgatgctatctttaaggctttcgcgatgatcgcctataaatttgaggaagatataattaactccatgagcaattcaccggctaccagtaagccacctgtgacacttcgcctggtcgtaccagcttcccaatgtggtagtctgatcggcaagggggggtccaagatcaaggagataagagaatctacaggggcacaggtccaggtggcgggcgacatgcttcctaacagtactgagcgcgctgtaactatttctggaacgcctgatgccataattcagtgtgtgaagcaaatctgtgttgtcatgctggaaagcccaccgaagggtgctaccattccatatagaccaaaacctgcttcaactcctgtcatttttgctggcggacaggcctacactatccagggccagtatgccataccacatcctgatctgactaagctccatcagctagccatgcagcaaaccccatttcccccactcggccagacaaaccccgcgtttccgggcgagaagctgcctttgcacagttccgaggaggcgcagaatctaatgggacagtcgagtggcctggatgcctccccccccgcttctacccatgagttaacaatccccaacgacttgattggttgtattattggccgccaggggaccaagattaatgagatccgccagatgagtggagcacagataaagattgccaacgccacagaaggtagctcagagcgacaaatcaccatcacaggcacaccggctaacattagtcttgctcaatatttgattaatgccaggctcacctccgaagtgaccgggatgggaacactctag

SEQ ID NO: 129170 - DNA, 1056 bp, synthetic construct
  misc_feature 1..1056: note = Description of Artificial Sequence: Synthetic coding sequence
  source 1..1056: mol_type = other DNA
atgggagaaggagatgccttttgggcaccgtctgtgctccctcattcaactctgtctacactttctcaccaccctcagccacagttcggccggcgaatggaatccaaggtttcagagggcggactcaatgtgaccctcaccatcagactattaatgcacggaaaagaagttggttctataataggtaaaaagggcgagacagtgaaaaaaatgagagaagagtcaggcgccaggataaacattagtgagggtaattgcccggaacgaatagttacaatcacaggccccacagatgccatttttaaggcctttgccatgatcgcctataagtttgaagaggacattataaactctatgagcaactcccctgctacaagcaaacctcccgtgacactccgactggtggtgcctgcttcccagtgcgggtctctgattgggaagggtggtagcaaaataaaggagataagagagtccacaggagcgcaggtgcaggtggccggcgacatgctcccgaatagcaccgagcgggcagttactatctccgggacacctgatgccattattcagtgcgtcaagcagatatgcgtggtgatgctcgagtcaccccctaagggagccaccattccctatcgccccaagcctgcctccactcctgtgatctttgccggcggtcaggcatatacaatccaggggcagtacgcgatcccacacccagaccaactgactaagctccatcagttagccatgcaacagacccccttccctccccttggacagaccaaccctgctttcccaggcttggacgcgagccctcctgcttccacccacgagctcacaatccctaatgacctcataggctgtatcattgggcgccagggcaccaaaatcaacgagattagacagatgtccggagctcaaattaagattgcaaatgcaaccgagggatcatccgaacgtcagatcacgatcaccggtacgccagctaatatctctctcgcccagtacctgatcaatgcacgtcttaccagcgaagtcactggcatgggcaccctttag

SEQ ID NO: 129171 - DNA, 1116 bp, synthetic construct
  misc_feature 1..1116: note = Description of Artificial Sequence: Synthetic coding sequence
  source 1..1116: mol_type = other DNA
atgggtgagggggatgctttctgggccccttccgttttgcctcacagcacactgagcaccctgtctcaccatccacagcctcagtttggtcggcggatggaatctaaggttagcgaaggtgggctgaatgtcaccctgacaattagactgctgatgcatggcaaagaagtgggctctatcatcggcaaaaaaggagaaaccgtgaagaagatgcgagaagagagcggcgccagaattaacatttctgagggcaactgccctgaacggatcgttacgattaccgggccaaccgatgcaatctttaaggcttttgcgatgatcgcctacaaattcgaagaagacatcatcaattcaatgtccaattctccggctacctccaagccccctgtgacactacggctcgtggtccctgcgtcccaatgcgggtctctgattggcaaaggaggctcaaaaatcaaggagattcgtgaatctacgggagctcaagttcaggttgcaggagacatgctgcccaattcaaccgaaagggcagtgaccatatccggcactccagacgccattatacagtgcgttaagcaaatatgcgtggtgatgttagaaagcccccctaaaggagccacaatcccgtacagacccaaaccagcatccacccccgtcatcttcgcaggaggacaggcctacactatacagggccagtacgctatcccgcaccccgatcagctgactaaactacatcaactggctatgcagcagaccccctttcctcccctaggtcagacaaaccctgccttccctggggagaaactccccctgcattcatctgaggaagcccagaatcttatgggccagagcagtggattggatgcttccccccccgcatcaacccacgagctgaccatccctaatgatcttatcggatgtatcattggaaggcaggggactaaaattaatgagatcaggcagatgagtggtgctcaaattaagatagcaaatgcaacagaggggtctagcgaacggcagataactattaccggcacaccggcgaatataagcttggcccaatatctcatcaacgccaggttaacttctgaggtcaccgggatgggtactttgtag

SEQ ID NO: 129172 - DNA, 1116 bp, synthetic construct
  misc_feature 1..1116: note = Description of Artificial Sequence: Synthetic coding sequence
  source 1..1116: mol_type = other DNA
atgggggaaggtgacgcattctgggctccaagtgtgctcccccactccacattaagcacactttctcatcatcctcagccacaatttggcagacggatggaatctaaggtaagcgagggagggttgaacgtcactttaaccatccgcctgcttatgcacggcaaggaagtaggttccattatcggaaagaaaggggaaactgtgaagaagatgagggaggaatctggcgctcgaataaacatctccgagggcaactgtccagagagaattgttacaattactgggccaactgacgccatttttaaagcattcgctatgatcgcctacaagttcgaagaagacatcattaactctatgagcaattccccagcaacttccaagcctcccgtcactttgcgacttgtggtgcccgcatcgcagtgcggcagtctgattggcaagggggggtccaagatcaaggagattcgcgagagtactggagcccaggttcaggtggccggagatatgctcccgaactccacggagagggctgttaccatttcagggacccccgacgctattattcagtgcgtgaaacaaatatgtgtcgttatgcttgagtcacccccaaaaggcgctacgattccctatcggcccaagccagcaagtacacccgtgatttttgctggcggccaggcatacaccatccagggacagtacgctatcccccatccggatcagttgacaaaactgcaccagttggcaatgcagcaaaccccattccctccactgggccaaactaaccctgcctttcccggcgaaaagctcccactgcattcctccgaagaagcccaaaatttgatgggccagtcaagtggtctggacgctagtccccccgcaagcacccacgagttgactattccaaatgacttgatcggctgcattattggcaggcagggcacgaagatcaacgagatcagacagatgtccggcgcacagataaagatcgctaatgcaactgaagggagcagcgagcgccagataactatcaccgggactcccgccaacatttcactggcccagtatttaataaacgctaggcttaccagcgaagtcactggcatgggaacactctag

SEQ ID NO: 129173 - DNA, 18 bp, synthetic construct
  misc_feature 1..18: note = Description of Artificial Sequence: Synthetic coding sequence
  source 1..18: mol_type = other DNA
atggagagtaaagtatag

SEQ ID NO: 129174 - DNA, 5070 bp, synthetic construct
  misc_feature 1..5070: note = Description of Artificial Sequence: Synthetic coding sequence
  source 1..5070: mol_type = other DNA
atgggatcaaagagacgtcgggccacatctcccagtagctccgtgtcgggggactttgacgatggacatcactccgtctcaactcccggcccatctcgaaagagacggcggttaagcaacctgcccaccgtagaccctatcgccgtatgccatgaattgtacaatacaattagagactataaagatgagcagggcagattgctgtgtgagttgtttattagggcgccaaaaagacggaatcaacccgattattacgaagtggtgtcgcagccaatagatctgatgaaaattcagcaaaagctcaaaatggaggagtacgacgatgtgaatctgcttactgccgatttccagctgttgttcaacaatgctaagagctattacaagcccgattcgcccgaatacaaggctgcttgtaaactctgggatctgtacctgagaactcgcaatgagtttgtccagaagggggaggcggacgatgaggatgacgacgaggatggtcaagacaaccagggtacggtcaccgagggctcttctccagcgtatctgaaggagatcctggagcagctgctggaagccatcgtcgtggccacaaatccctcaggccgactgattagcgagctgttccagaagctacccagcaaggtgcagtaccccgattattatgccattatcaaggagcctattgacctaaaaaccatcgcacagcgcatccaaaatggttcttacaagagcatacacgcgatggctaaggacatcgacctattggccaagaacgccaagacttacaatgaacctggatcgcaggtgtttaaggacgctaactcaatcaaaaagatcttctatatgaagaaagcagagatcgagcatcacgaaatggccaagtccagcttacgcatgaggacacctagtaacttggccgccgccagactgactggcccatcccatagcaagggctcactgggcgaggaaagaaacccaacctcaaaatactatagaaataagcgtgccgttcagggcggccggctgtcagctatcaccatggctttgcagtacggctccgagagcgaggaggacgccgccctggcagcggcacgttacgaagaaggcgagtccgaagccgaaagtatcacttcattcatggacgtctcaaatccattctaccagctatatgacaccgtccgttcttgccgaaacaaccagggccaattgatagcagaacctttttatcacctgccgtctaagaagaaatatcctgattattaccagcaaattaagatgcctatctctctgcagcagattaggacaaaactcaaaaaccaggagtacgagactttagaccacctcgaatgtgacttgaatctaatgttcgaaaacgctaagcgctacaacgtgccaaactcagctatttacaagagggtgctaaagctgcaacaggtgatgcaagctaagaaaaaagagctggcccgccgggacgatatagaggatggagacagcatgatcagtagcgctacatccgacactggctccgctaagcgaaagtcaaagaagaatatccgaaaacagcggatgaaaatcctgtttaatgtggtattggaagcccgggaacccggttccggcagacggctttgcgacctgttcatggtgaagccatccaaaaaggactatccagactattacaaaataatcctggagcccatggatctaaaaatcatagagcacaatattaggaacgacaagtacgctggagaagaagggatgatcgaggacatgaagcttatgtttagaaacgcgaggcattacaacgaagaaggtagtcaggtatacaacgatgctcatattctggagaaactcctgaaagagaaaagaaaggagctagggcctctacctgacgatgatgatatggcatcgccgaaactgaagctctcccgaaaatctggcatatcccccaagaaaagtaaatacatgaccccaatgcagcaaaaactgaatgaggtgtatgaggccgtcaagaactatacagacaaaagggggcggaggctgtccgccatattcctgaggctgccatctaggtcagagttgccagactattatctgacaatcaagaagcccatggacatggagaagatccggtcccacatgatggcgaacaaatatcaggatatagacagcatggtggaagactttgtgatgatgttcaataacgcttgtacctataacgagcccgagtctctaatctacaaagacgccctcgtgctgcacaaggtcctgttagagacacgacgcgatctggaaggcgacgaggatagccacgttcctaacgtcaccctgctgattcaggagctcatccacaacttgttcgtgagtgtcatgtcacatcaagacgatgagggacggtgctactctgatagtcttgccgagatccccgccgtggatccaaacttcccgaataaacccccactcacgtttgacatcatccgcaagaacgtggagaacaacaggtaccggaggttggacctctttcaggagcacatgtttgaagtgttggagcgagctcggcgcatgaatcggacagattccgagatctacgaggacgccgtcgagctccagcagttcttcataaaaatccgagacgagctttgcaaaaacggagaaatcctgctctcccctgccctgtcttacaccaccaaacacttgcacaacgatgtggaaaaggagcggaaggaaaagctaccaaaggaaattgaggaagataagctcaagagggaggaggaaaagagagaagcagagaaatcagaagatagcagcggagctgccgggctttctggcctgcacaggacctacagtcaggactgctcctttaagaactccatgtatcatgtgggtgactatgtctatgtggagcctgccgaggcaaacctccagcctcacatagtctgtattgaaaggctctgggaggactccgcaggagagaaatggctatacggatgttggttttaccgaccaaatgaaacatttcacctggccaccaggaagttcttggagaaggaagtgtttaagtctgactactacaataaagtgccggtttccaaaatcctgggcaagtgtgtagtgatgttcgtgaaagagtacttcaagctctgtccagaaaattttcgagatgaggatgtgttcgtgtgtgaatcacgatacagtgctaagacgaagtcattcaaaaagattaagttatggacaatgcctatcagctcagttagattcgtgcctagggacgtgccattgccagtggtgagggttgcttcggtatttgcaaatgcagacaagggagatgatgaaaaaaacacagacaactccgaagacagcagggctgaagacaatttcaaccttgaaaaagaaaaggaggacgtgcccgttgagatgagcaatggagaaccggggtgccactacttcgaacaactccactacaacgacatgtggctgaaggtgggggactgtgtatttattaaatctcacgggcttgtgagaccgagagtgggcagaattgaaaaagtttgggtgcgcgatggggctgcctatttttacggaccgatattcattcatcccgaagaaaccgagcatgaaccgactaaaatgttctacaaaaaggaagtatttctgtcaaacctcgaggagacatgtcctatgacctgtattttaggaaaatgtgccgtcctctccttcaaggacttcttgtcctgccgtcccacagaaattcctgagaatgacattctgctatgtgaatcacgttacaatgagtcggacaagcagatgaagaagttcaagggactgaagaggttcagccttagcgccaaagtagtggacgatgaaatttattatttcaggaagccgatcgtgcctcagaaggaacctagccccctactagagaagaagatccaactacttgaagccaaattcgcggagctggagggcggagacgatgatatagaggagatgggggaggaagatagcgaggtgatcgagccaccaagccttccccaattgcagacccccctggccagcgagcttgacctcatgccttacactccacctcagtccacacccaagtcagcgaaaggctctgctaagaaggaaggcagtaagagaaagatcaacatgtccggttacattcttttctctagcgagatgcgagccgttatcaaagcacagcatcccgactatagctttggagagctttcacgactagtcggaactgagtggagaaatctggagaccgccaagaaggcggagtacgaagaaagggccgccaaagtcgcggaacagcaagaaagggagcgtgccgcacagcagcaacaaccgagcgcctccccacgtgctggcacccctgtcggggcgctgatgggtgtcgtaccgccacccaccccaatgggaatgctcaaccagcaacttacaccggtggcaggtatgatgggcggatatccacccggcctgcccccactgcaagggcccgtggatggccttgtgtcaatgggaagcatgcagcctctgcacccaggcggtccacctccacaccacttgccccctggcgtgcctggtctacctggaattcctccgccaggagtgatgaaccagggcgtagccccaatggtgggaaccccagcccctggtggttctccctacggccagcaggtcggggtcctagggcctccggggcaacaagccccacctccgtatcctgggcctcacccagccggccctccggtgattcagcagcctacaactcctatgtttgtggcgccaccgcctaagactcagaggctgttgcacagcgaagcttacctgaagtatatcgaggggcttagcgcagagtccaacagtatctcgaagtgggatcagacgctggccgcccgacgcagagacgtgcacctgtcaaaggagcaggagagcagactcccaagtcactggctgaagtcaaagggggcacatacgacaatggccgatgcactttggcgactgagggacctaatgctcagggatacattgaacatccgacaagcgtacaatttggagaacgtgtag

SEQ ID NO: 129175 - DNA, 4749 bp, synthetic construct
  misc_feature 1..4749: note = Description of Artificial Sequence: Synthetic coding sequence
  source 1..4749: mol_type = other DNA
atggggagcaaacgccggcgagcgacatcacctagctctagcgtctccggggactttgatgacggccaccacagcgtttccacgccagggccctcccggaaaagaagaagactgtctaaccttccaaccgtagacccaattgccgtgtgccacgagttgtacaatactataagggactataaggacgagcagggcagactcctatgcgagcttttcatccgtgctccaaaacgacggaaccagcctgattactacgaggtcgttagtcaacctatcgacctcatgaaaatccaacagaagctgaagatggaagaatatgacgacgtcaacctgcttacagccgattttcaactgctatttaataatgccaaatcgtattataaacccgattcccccgagtacaaagcggcctgtaaactctgggacctttatttgcgaacccggaatgaattcgtgcagaaaggtgaggccgacgacgaagatgatgacgaggacggtcaggataatcaggggacagtgactgagggttcttcacctgcatacttgaaagagatcttagaacaactgttggaggccatcgtcgttgccactaacccgtcaggtcgcctcattagcgagctgttccaaaagttgccatctaaagtgcagtacccggattactatgctatcattaaggagccaattgatttgaagactattgcacaacgtattcagaatgggtcctataagtctatccacgctatggcaaaagatatcgatttgctggctaagaacgccaagacttacaatgaacctgggtcccaggtgtttaaggacgctaatagtatcaaaaaaatcttctatatgaagaaggctgaaatcgaacaccacgagatggctaagtcctctcttcgcatgaggacaccatcaaatctggccgctgcccgtctaactgggccttcgcactccaagggcagcctaggagaggagagaaaccctactagcaaatattataggaacaaaagagctgtgcagggcggcaggctgtccgccataaccatggcactccagtacggatccgagtctgaagaggacgcagctctcgccgctgcccgatacgaggagggagaatctgaggccgagagtatcacgagttttatggatgtgagtaaccctttctatcagttatatgacacggtgcggagctgccggaacaaccaggggcagctgattgccgaaccattctatcacttacctagtaaaaaaaagtatccggattactaccaacagatcaaaatgcccatttctctgcagcaaatccgtaccaagcttaagaatcaggaatatgaaaccctggaccacctcgagtgtgacctcaatctgatgtttgagaatgccaagcgctacaacgtgcctaatagcgctatctacaaacgggtcctcaagcttcaacaggttatgcaagccaagaagaaggagctggcacgcagagacgacattgaggacggcgatagcatgataagctcggctacgagtgacacaggaagcgcaaagagaaagtctaaaaagaacatacgtaagcagcggatgaaaattctgttcaacgtggttttggaggcgagggaacctggcagtggacggcgattatgcgacctatttatggttaaacctagcaagaaggactatccagattattacaaaattattctagagcccatggacctaaagattatagagcataatatcagaaacgacaagtatgcgggagaggagggcatgatcgaggacatgaagttgatgttcaggaacgcgcgacattacaatgaagagggctcacaggtatacaatgacgcccatattttagaaaaattgctcaaggagaagcggaaagagttgggccctctgcccgatgacgatgacatggccagccctaagttgaagctgagccgaaaatccggcatttcccccaaaaagtccaaatacatgacccctatgcagcagaagctgaatgaggtatacgaggccgtaaagaattacacagataaaagaggccgccgtctgtcagccatcttcttaaggctccctagcaggtcagaactcccagactattatcttaccatcaaaaaaccaatggatatggaaaaaataaggtcacacatgatggcgaataaatatcaggacattgacagcatggtagaggattttgtgatgatgtttaacaacgcctgcacctataatgaaccggagagtctaatctacaaggacgcccttgtcttacataaggtgcttctcgagacacgccgcgatctagaaggtgatgaagattcccacgtccccaacgtgacactgctgatccaggaactgatccacaacctttttgtgagtgtcatgtctcatcaggatgacgaaggccgctgctattctgatagtctcgctgagattccggctgtggacccaaactttccaaacaagccccctttaacattcgatatcattcggaagaatgtggaaaacaataggtaccgacggctggacctgtttcaagagcacatgttcgaggtattagaacgtgccagaaggatgaatcggaccgactctgaaatttatgaggatgccgtcgagctgcagcagtttttcatcaagattcgagatgagctctgtaaaaacggcgagattttactgagccctgccttatcatatacgacgaagcatctacacaacgatgtagaaaaagaacgcaaagagaaacttcccaaggagattgaggaagataagctgaagagagaagaagagaaacgcgaagcggagaagagtgaagatagttccggcgctgccggcctctccggcctacacagaacgtactctcaggactgtagttttaaaaattcaatgtatcatgttggtgattacgtgtacgtcgaaccagctgaagccaatttacagcctcatatcgtttgcatcgaaaggctatgggaggattcggccggggaaaagtggctgtacggctgttggttttataggccaaacgagacatttcatctggcgactcggaaattcttggaaaaggaggtgttcaaaagcgactattataataaagtccccgtaagtaagatactaggtaagtgcgtcgtgatgttcgtgaaggagtacttcaaactttgtccagaaaacttcagagatgaggacgtgttcgtctgcgaatctcgttattctgcaaagaccaaatcctttaagaaaatcaaattatggactatgcccatttcttccgttagatttgtgcctcgggacgtaccactgcccgtggtgcgggtcgcatcagtcttcgctaacgccgacaaaggggacgatgagaaaaacacagacaattcagaagatagtcgcgctgaggacaatttcaatctggagaaagaaaaagaggatgtgccagtggagatgtctaatggcgaacctggctgccactactttgaacagctccactataacgacatgtggctcaaggttggcgattgcgtcttcattaagtctcatgggttggtacggccacgagtaggtcgcatcgaaaaagtttgggtgcgggatggagcagcctatttctatggaccgatattcatccaccctgaagaaactgaacacgaacctaccaaaatgttctacaaaaaggaagtctttctgtcaaatctcgaagaaacgtgccccatgacatgcattctgggcaagtgtgccgtcctgtccttcaaggacttcctctcctgccgtccaactgagattcctgagaacgatatcttactgtgcgagagcagatacaacgagtccgacaagcaaatgaaaaagttcaaaggcctgaagcggttttccctcagcgctaaggtggtcgacgatgagatttactactttcggaaacccatcgtaccccagaaagaaccgagcccattgctggaaaagaagattcagttgctcgaggccaaatttgcagagctggaggggggggatgacgacatagaagaaatgggcgaggaagacagtgaagttattgagcctcccagcctgccccaactgcaaacacctctagcctctgagttggacctgatgccctacactcctccacagagtacacctaaatctgcaaaaggtagcgccaagaaggagggcagtaagcgcaaaattaacatgagtggctacatacttttttcatcagagatgcgggctgtgatcaaggcccagcacccggactactcttttggggaactgtcccgcctagtggggacagagtggagaaacctcgaaaccgctaaaaaagcagaatacgaaggagtgatgaatcagggcgtggccccgatggtgggcacccctgctccagggggatccccgtatggacagcaggtcggcgtactgggcccacctggacagcaagccccccctccttatccagggccccaccctgcagggccaccagtgatacagcaacccactactccaatgttcgttgctccccccccgaaaacccagcgcctgttgcactcagaagcctatctgaaatatatcgaaggactctccgccgagtctaacagcatttcaaagtgggatcagacccttgcggccaggcgtcgagatgtacatctttctaaggaacaggagtccagactcccctcccactggcttaagagcaagggtgcacacaccaccatggccgatgccttgtggcgtttacgggacctgatgctccgggacaccctgaacatcagacaggcctataaccttgagaacgtgtag

SEQ ID NO: 129176 - DNA, 4809 bp, synthetic construct
  misc_feature 1..4809: note = Description of Artificial Sequence: Synthetic coding sequence
  source 1..4809: mol_type = other DNA
atgggaagcaagaggcgaagagcgacatccccttcctcatctgtcagtggtgacttcgacgatgggcaccatagcgtgtcgacccccggaccttcacgcaagagacggagactgtcgaatctaccaacggtggaccccatagctgtgtgccatgagctctataatactattagagactacaaagatgagcagggtcgcctgctctgtgagttatttattagagctcctaaaaggagaaaccagccagactattacgaggtagtgtcccagccaatcgaccttatgaagatccaacaaaagcttaagatggaggagtatgacgatgtgaacctcttgaccgccgactttcagctgctttttaacaatgccaagtcctactacaagcccgacagccctgaatataaggcagcgtgtaaactctgggatctctacctcagaaccagaaacgaattcgtgcaaaagggcgaggccgatgacgaggatgacgatgaagatggacaggataatcaggggacagtcacggaaggtagtagtcctgcttatctaaaagaaatcctggagcaactgttagaggccattgtcgtggctacgaatcctagcgggcgactcataagtgaactgttccagaagttgccttccaaggtgcagtacccggattactacgccatcattaaggaaccaatcgacctaaaaacgatcgcccagcgtattcagaatggtagctataaatccatccatgcaatggcaaaagatattgatctgctggctaaaaatgcgaaaacctacaatgagccaggatcacaagtgttcaaagatgcaaactctatcaagaaaatcttctatatgaagaaggccgagatagagcatcacgaaatggccaagtcttccctgagaatgtctaacaagagagctgtccaagggggacgtttgtcagcaattaccatggctctacagtacggttccgagagcgaggaggatgctgcattggcggcggcaagatacgaggagggagagagcgaagcagagtctataaccagcttcatggatgtgagtaatccgttctatcaactgtatgacactgtccgctcctgcaggaataatcagggccagttgatcgcagagcctttctaccatttgccttctaagaagaagtaccccgattactaccagcagatcaaaatgccaatttcgttgcagcagatccgtaccaagctgaagaatcaggagtatgagactctcgaccatttggaatgcgatcttaatctgatgttcgagaatgccaaaagatacaatgtcccaaatagtgcaatttacaagcgggttctcaagctgcagcaagtgatgcaagccaagaagaaggagctggctcgcagggatgacattgaagatggtgattccatgatcagttcagctacttctgacaccggatccgccaaacgtaaatcgaaaaaaaacatacgcaaacagaggatgaaaatccttttcaatgtcgtattggaagcaagggagccaggtagcggcaggcgcttgtgcgacctgtttatggtaaagccaagcaaaaaggattacccggactattacaagataattctcgagcctatggatttgaaaatcatcgagcacaatatcagaaatgataagtatgccggtgaagaggggatgattgaagacatgaagctgatgttcaggaacgcaagacattataatgaggagggaagccaagtttataatgacgctcacattctggaaaagctgctaaaagaaaagcgcaaggaactcggtcctctgcccgatgacgacgacatggcctcccccaaactcaagttgagccgaaaatcaggcatatctccaaaaaagagcaagtacatgacgccaatgcagcaaaagctcaatgaagtctacgaagcggtgaagaactacacagacaaacgggggaggcggctgtcagctatcttcctccgcctacctagcagatctgaattgcccgattattaccttacaatcaagaaacctatggacatggagaagattcgatcccacatgatggccaacaagtaccaagatatcgattcgatggtcgaggacttcgtcatgatgttcaataatgcctgtacatataatgagccagagtcactcatctataaagatgccctagttttgcataaggttctgctagaaacaagaagagaccttgaaggagatgaggactcccacgtccccaatgttaccctcctaatccaggagctcatacacaacctctttgtgtctgttatgtctcaccaggacgacgagggtagatgttattctgatagcctggccgagatccccgcagtagatccaaattttccaaacaagcccccactcacgtttgacatcatccgtaaaaacgtcgagaacaacaggtatcggcgactggatctgttccaggaacacatgtttgaagttctggaaagagcccgccggatgaatagaacggactcagaaatctacgaagacgccgtggaactgcagcagttttttataaaaataagagacgagctctgcaagaacggggagattcttctctctccagccctttcatatactaccaagcatctacataatgatgtcgagaaggagcgcaaggagaaactcccaaaagagatagaagaggataaactgaaacgcgaagaggagaaacgggaagccgaaaagagtgaggattcctctggcgccgctggactctccggcctgcacagaacctattcccaagactgttcattcaagaactctatgtatcacgtgggtgactacgtctatgtcgagcctgccgaggccaatctacaaccacacatagtgtgtatagaaagactgtgggaagactccgccggtgaaaagtggctgtatgggtgctggttctaccgcccaaatgagaccttccatttagctacgaggaaattcctagagaaggaggttttcaagtccgattattataataaagtacccgtatccaagatcttgggaaagtgtgttgtgatgttcgtgaaagagtacttcaagctgtgtcctgagaacttccgagatgaggacgtttttgtgtgcgagtccagatactctgctaagacgaaaagtttcaagaaaatcaagctctggacaatgcctatttcatctgtgaggttcgtgccacgcgatgttcctctgccagtggtgagagttgcctctgtcttcgcaaacgcagacaagggagatgacgagaaaaacaccgacaactctgaggactcaagggccgaagacaatttcaatctcgagaaggagaaagaagacgtgccagtcgagatgagcaatggggagcctggctgtcattacttcgaacaactccattacaacgatatgtggctcaaggtgggagattgcgtcttcattaaatcacacggcctggtaaggccacgcgttgggaggattgaaaaagtgtgggtccgggatggagccgcctacttttatggtccaatttttatccacccggaagaaactgaacacgaacctacaaagatgttttataagaaggaggtttttctgtcaaacctggaggagacttgcccaatgacatgtattctgggcaagtgcgccgttcttagtttcaaggacttcctgtcctgccgccctacagagatcccagaaaacgacatccttctctgcgaaagccgctataacgagagtgataagcagatgaagaaattcaagggtctgaagcggtttagtctgtcggcaaaagtggtcgacgatgaaatctattacttcaggaagcccatcgtgccgcagaaggaacccagtccactcctcgagaagaaaatacagctcctagaggccaagttcgctgaattggaaggcggcgacgatgacatcgaagaaatgggagaagaggattctgaagtcatagaacccccctccctccctcagctgcagacccctctggctagcgagctggaccttatgccttacactcctcctcaatcaacccctaaaagcgccaagggaagtgctaagaaagagggaagtaaacggaagatcaatatgagtggatatatcctgttctcctcagagatgcgcgctgtgataaaggctcagcaccctgattactcgtttggggaattatcaagactggtggggacagaatggagaaacctcgagacagcgaagaaggccgagtatgagggcatgatggggggatacccgcctgggttgccccccttgcagggcccagttgacgggctggtcagtatgggttcaatgcagcccctgcatcccggcgggccgccacctcaccacttgccacctggcgtgccaggtctccccgggataccaccaccaggagttatgaaccagggcgtagccccaatggtcggcacccccgctccaggtggcagtccttacggacagcaggtgggtgtgctcggacctccaggccagcaagcccctccgccgtaccctggaccccaccctgccggaccacctgtcatccagcagcctacgacacctatgtttgtcgctccccctcccaaaacccagcgacttctccattcagaggcctatctgaagtatatagaaggtttgtccgccgaaagcaacagtattagcaaatgggaccagacattggccgctcgcagaagagacgtgcacctgtcaaaagagcaagagagtagactgccaagccactggctcaaaagcaagggggctcataccactatggccgatgcactgtggcggctgagggatctgatgctacgcgatacccttaacattcgtcaggcctacaacctcgagaatgtttag

SEQ ID NO: 129177 - DNA, 4749 bp, synthetic construct
  misc_feature 1..4749: note = Description of Artificial Sequence: Synthetic coding sequence
  source 1..4749: mol_type = other DNA
atgggaagcaaaagacggagagccacatcccccagtagttctgttagcggggatttcgatgacgggcaccacagcgtgagtacaccaggaccttcgcgaaaacggagacgcctgtccaacctcccgactgtggaccccatcgccgtgtgccacgaactatataatactattcgtgattacaaagacgaacagggaagactgctgtgcgaattgttcatccgtgcaccaaaaagaagaaatcagccggattattacgaagtggtctctcaaccaatcgaccttatgaagatacagcagaagctcaaaatggaagagtacgatgacgttaacctgctcacagccgactttcagcttttgtttaacaatgccaagtcctattacaaaccggactcgcctgagtacaaggcagcatgcaagttatgggatctgtacctccggacccggaatgagtttgtgcagaaaggcgaagcggatgacgaagacgacgacgaggatggccaagacaatcaagggaccgtcaccgagggctcttcccccgcttatttgaaggagatcctggagcagttgttggaggcaattgtggtggccaccaacccgtctggtaggctgattagtgaacttttccagaagctgccatctaaggtgcagtatcccgactactacgccattataaaagagccaatcgaccttaagactattgcccagcgcatccaaaacggctcatacaagagtattcacgcgatggctaaggacatcgatctcctagctaaaaatgccaaaacatataatgaacccggaagccaggtgttcaaagatgcaaactccatcaagaagatcttctacatgaagaaggcagaaatagagcaccacgagatggctaagagtagccttcgaatgaggaccccctcgaacctggctgcggccagacttacagggccatctcactctaagggctctttaggagaggaaagaaaccctaccagcaaatattaccggaataagagagccgttcaaggtggacggctttcagccatcaccatggccctgcaatacgggtctgagtccgaggaagacgccgctctcgccgccgcccggtatgaagaaggagaatctgaagcggagtcaattacaagcttcatggacgtctctaatcctttttaccagctgtacgacaccgttagaagctgtcggaataatcaaggacaactcatagctgagcccttctatcacctgcctagcaaaaaaaaatacccagactactaccagcagatcaagatgcccataagtctgcagcagattcgcaccaaactaaagaatcaggagtacgagactctggatcatctcgaatgtgatctgaacttgatgttcgaaaatgcgaaaaggtacaatgtgcctaatagcgccatttacaagcgtgtgctcaaactacagcaggtgatgcaggctaagaagaaggagttagcccgacgcgatgatattgaagacggtgattctatgatctcaagtgccacgagtgacaccgggagcgctaagagaaaaagtaaaaagaatattcgaaaacagcgcatgaagatcctgtttaatgtggtacttgaagccagagaacctgggagtggccgacgactctgcgacctcttcatggttaaaccttcgaaaaaggattatccagattactataaaataattctggaaccaatggatctgaagattatcgagcacaatattaggaacgacaaatatgccggtgaagagggaatgatagaagatatgaagttaatgttcaggaacgctaggcactacaacgaagagggctcacaggtatacaatgatgcgcacatactggagaagctgctgaaagagaagagaaaagaactgggaccactgccagatgatgatgatatggccagtccaaaattaaaactgtcgcggaagagtggaataagccctaaaaaaagcaagtatatgacgccaatgcagcagaaactgaacgaggtctacgaagccgtcaaaaactacacagataaaagaggccgccgtttatccgctattttcttgcggttgccctcaagaagcgagttgcctgattattatctgaccattaaaaaacccatggatatggaaaagattcgaagtcatatgatggctaacaagtatcaggacatcgattcaatggtggaggattttgtgatgatgtttaacaacgcatgcacctataacgagcctgagtccttaatttacaaggacgcccttgtcctacataaagtcctactggaaacaaggagggatttggagggcgacgaggacagccacgtgccaaacgtgacactgttaattcaagagcttattcacaatctgttcgtgagcgtgatgagtcatcaggatgacgaaggcagatgttacagtgattctctggccgaaatccccgctgttgacccgaatttcccgaacaaacccccactcactttcgatataattcgaaagaatgtcgagaataataggtatcggcgcctagacctattccaagagcacatgttcgaggtcctagaacgggctaggcggatgaaccggacggattcggaaatctacgaagatgccgtagagctgcaacagtttttcattaaaatccgcgacgaattgtgtaagaacggggagattctgctatcaccagccctttcgtacactaccaagcacttgcacaacgatgtcgaaaaggagagaaaagagaagctgccgaaggagatcgaggaggacaagctgaagcgggaggaggaaaagagagaggctgagaagagcgaagacagcagcggtgcagcagggctgagtggcctccatcggacttactcacaggactgtagctttaagaactcgatgtaccatgtaggcgattacgtctacgtagaaccggcagaggcaaacctccagccccacatcgtttgtattgaaaggctctgggaggattccgctgaaaaagaggtttttaaatctgactattataacaaagtgcccgtatcaaagatcctggggaagtgtgttgtgatgtttgttaaagagtatttcaagctatgtccagagaactttcgtgatgaagacgtgtttgtgtgtgagagtagatactcagccaaaaccaagtcttttaagaaaattaaactgtggaccatgccaatctctagcgttcgctttgtgccaagggacgtacctttacccgtggtgcgtgtcgctagcgtgttcgccaacgctgataaaggggatgatgagaaaaataccgacaacagcgaggacagtcgggccgaggataattttaacctagaaaaggaaaaagaggatgtgccggtcgaaatgtcaaacggggagccagggtgccactactttgagcagctgcactacaatgacatgtggctgaaagttggggattgtgtgtttatcaaaagccacggattagtaaggccacgggtgggccggatcgaaaaagtatgggtcagagatggtgcggcttacttctatgggccaatatttatccacccagaggaaactgagcatgagcctaccaaaatgttttacaagaaagaggtcttcctaagcaatctggaagagacttgtccaatgacctgcatactaggcaaatgtgcggtactgtctttcaaagatttcttgagttgtagaccgactgagattcccgagaatgacatcctgttgtgtgagagtagatataacgagtcggataagcaaatgaagaaatttaaagggcttaaaaggtttagtttgtctgccaaagtggtggacgatgagatttattattttcgcaagccgattgtgccacagaaggagccctcgccccttctggagaagaagattcagctgcttgaagcaaagttcgccgagttagagggcggtgacgatgatattgaggagatgggtgaggaagactcggaatcaacaccgaagagtgcaaaaggtagcgcaaaaaaggaaggttccaagcgaaagatcaacatgtctgggtacatcctgttttcttctgagatgagggcagtgattaaagcgcagcacccggattacagctttggagaacttagccgattggtcggaacagaatggcgtaatctggagactgcaaaaaaagccgagtacgagggaatgatgggcggataccccccaggactaccccctctccaaggcccggtggacggccttgtgagcatgggtagtatgcagccactacacccaggggggcccccgccccaccacctgccgcccggcgtgcccggactgccgggcattcctccgcctggggtcatgaatcagggtgtcgcccccatggtcggtaccccagcccccggagggtctccatatggccaacaagtgggcgtgttgggccccccaggacagcaggcacccccgccctacccgggcccacacccagccgggcctcctgtaatccagcagcccacaacaccaatgtttgtagctccaccacctaaaacacagaggctgttgcatagcgaagcttatcttaagtacatagagggcttatctgccgagtccaacagtatttccaaatgggatcagactcttgctgccaggaggcgcgacgttcacctttcgaaagaacaggagtcccgtttaccatcccactggctgaagagtaaaggtgcacatacaactatggccgatgctctgtggaggctgcgggacctcatgcttcgggacaccctgaatatcaggcaagcgtacaacctggagaacgtatag

SEQ ID NO: 129178 - DNA, 4905 bp, synthetic construct
  misc_feature 1..4905: note = Description of Artificial Sequence: Synthetic coding sequence
  source 1..4905: mol_type = other DNA
atgggcagcaagagaagacgggcaacttctccctccagtagcgtgtccggcgattttgacgatggacatcactcggtcagcacccccggccctagtcggaagagacgacggctgtccaatctgccaacagtggaccctattgcagtgtgccacgagctatacaataccatacgggactataaagacgaacagggacgccttctttgtgaactgttcatcagagctcccaaaaggagaaaccagcctgactattatgaggtggtgagccaaccaatcgaccttatgaaaatccagcagaagttgaagatggaggaatacgacgatgtgaacctgctgaccgccgacttccaactactgttcaataatgctaagtcctattataagcctgactctccagagtacaaagctgcctgtaagctctgggacttatatttacggacacgcaatgaattcgtgcaaaaaggcgaggcagatgacgaagatgacgatgaagacgggcaggacaaccagggaaccgtcactgagggcagctcccctgcgtatttgaaagagatcctggaacaactcctggaggccattgttgtggcgacgaacccaagcggccggctgattagtgaattgttccagaaattgcccagcaaggtccaatatccagactattatgccatcataaaggagcctatagatctgaagacaatcgcccaaagaatccaaaacgggtcgtataagtctattcacgcaatggccaaggatattgatctgctcgctaagaacgccaaaacatacaatgaaccaggttctcaggtctttaaggacgctaactccattaaaaaaatcttttatatgaaaaaggccgagatagaacatcatgagatggctaaaagttcactgcgcatgagaaccccttccaatctggcggctgcacgcttgaccggcccaagccatagtaaaggtagcctgggagaagagagaaacccgactagtaaatactatcggaacaagcgtgcagttcagggagggagactgagcgccatcacaatggccctgcagtacgggagcgagtcggaagaggatgcggctctcgctgctgcgcggtacgaggagggtgagtctgaggcggaaagtattacttctttcatggacgtgtccaaccctttctaccagctgtacgatactgtcaggtcctgtaggaacaaccaggggcagttgattgccgagccattttatcacctgccctctaaaaaaaagtacccggattactaccagcagatcaagatgccaattagtctccagcagattaggaccaaacttaagaaccaggaatatgagacactggaccacctggaatgcgatctgaacctcatgtttgagaacgctaaaaggtacaacgtccccaacagtgcaatttacaagcgtgtgctaaaactgcagcaggtaatgcaggccaaaaagaaagaacttgcccgccgtgacgacatcgaagatggtgattccatgatttcatccgcgacgtctgacactggctccgccaagagaaagtccaagaagaatatcagaaagcaacgaatgaagatcctctttaacgtggtgctggaagccagagaaccagggagcggtcgccgtctgtgtgatctcttcatggtgaaaccctccaagaaggattaccccgactattacaagattatcctagagccgatggaccttaagattatagagcacaatatcagaaatgacaagtatgccggtgaggaaggtatgatcgaggatatgaaactgatgttccgcaatgctcgacactacaatgaggaaggttctcaggtctataatgatgcacacatccttgaaaaattgctaaaggaaaagcgaaaagaactgggaccactgcccgacgacgatgatatggctagtcccaagctgaaactctcccggaagtcaggcattagtccaaaaaagtctaaatatatgactcctatgcaacaaaaactgaacgaggtatacgaggccgtgaaaaattataccgacaagcgcggtcgccgactcagcgcaatcttccttagactgcccagccggagcgaactgcctgactactatttgaccatcaaaaagcccatggacatggaaaagatcagatcacacatgatggctaataagtaccaggacatagactccatggtggaggactttgtcatgatgttcaacaacgcatgtacctataacgagccagaatcactgatctataaggacgcattggtcctacacaaagttctgctggagacaaggcgagacttggaaggagatgaagattcccatgtaccaaacgttacactgctgatccaggaactgatccacaatctattcgtgtctgtcatgtcccatcaggatgacgaggggcggtgctattctgactcgttagctgagataccagctgtagatcctaacttccccaacaaacctcccctcacatttgatattatccgtaagaacgtagagaacaatcgttaccgaaggctggacctcttccaggaacatatgtttgaagtactcgaacgggcaagaaggatgaaccggacagattccgaaatctacgaggacgcagtcgaattacagcagttctttatcaagattcgcgatgagctgtgtaaaaatggggaaatcctgctcagccctgcactgtcctataccacgaagcatttacacaacgatgttgaaaaagagcgcaaggaaaagctgcccaaggaaatcgaggaagacaaactgaaacgcgaggaagaaaaacgcgaggcagaaaaaagcgaggacagcagcggggcagccggactaagtggtttacatcgtacctattcccaagactgctccttcaaaaatagtatgtaccacgtgggcgattacgtctatgttgaaccggcggaggccaacttgcagccccacattgtttgcattgaaagactttgggaagattccgctggcgaaaagtggttgtacggatgttggttttatagacccaacgaaaccttccacttggctactcgcaaattcctggagaaggaagtctttaagtctgactattataacaaggtccccgtctcaaagatcttggggaaatgtgtagttatgttcgttaaggagtatttcaagttgtgcccggaaaatttcagagatgaagacgtgtttgtgtgcgaaagtaggtattctgcaaaaactaaatcgttcaagaagatcaaattgtggaccatgcccattagtagtgtccgcttcgttccaagggatgtgcctctacctgtggtgagagtcgcctccgtgtttgccaacgcggacaagggagacgatgagaagaatacagataactcagaggactccagggcagaggacaactttaatctggagaaggagaaggaggatgtgcctgtcgagatgtcaaacggcgaaccaggttgccactacttcgagcagctgcattacaacgacatgtggttaaaggttggcgattgcgtgttcatcaagagccacggccttgtgaggcccagagtcggtaggatcgaaaaagtttgggtcagagacggcgctgcctacttttacggtcccatctttatccatcccgaggagacggagcacgagccaactaaaatgttttacaagaaggaagtctttctttccaatctcgaggagacctgcccaatgacttgtattctcggaaagtgcgccgtactgtcttttaaagacttcctcagctgtaggcctacagagattcctgagaacgatattctcctgtgtgaatcacggtataatgagagtgataaacagatgaagaagttcaagggcctaaagagattctccctttcagcaaaggttgtagatgatgaaatctactattttaggaagcctatcgtccctcagaaagagccaagtcctctgctcgagaagaagattcaactgcttgaggcaaagtttgcagaactcgaaggaggtgatgacgacattgaagagatgggcgaggaggactctgaggtgatagagccaccctcactgcctcagcttcagacacccctagcatcagagctggatctaatgccatatactccaccccaatcgactcccaaaagcgcaaaaggcagtgctaagaaggagggttcaaaacgcaagattaatatgtctgggtacatcttgttctcttccgaaatgcgtgccgtgatcaaggcacagcatccagattattccttcggcgagctgagtcgcttagtcggtacagagtggagaaatcttgagaccgctaaaaaggccgagtatgaaggcatgatgggcggttacccccccggcctgcctccactgcaggggccagtggatgggctggtgagtatgggttctatgcagcctttacaccccggtggaccaccccctcaccatctgcccccaggagtgccaggccttcccggtattcccccacctggagtcatgaaccagggggtggcccccatggtgggaacccctgctcccggaggaagcccttacggccagcaggtgggggtgctcggcccgccgggacagcaggctcctcccccttaccccggtccccatccagctgggccaccggtgatccagcagccaaccacaccaatgtttgtggctcccccccctaaaacccagcgactcttacacagcgaggcatacctgaaatacattgagggcctatctgctgagtctaactccatctccaagtgggatcagactctcgcagcaaggcggcgtgacgtgcatctgagcaaggagcaggagagtaggctccctagtcactggcttaaaagcaagggcgcacacaccaccatggcggacgcattatggagattacgcgaccttatgctacgagacactctcaacatcaggcaggcctacaaccttgagaatgtctag

SEQ ID NO: 129179 - DNA, 459 bp, synthetic construct
  misc_feature 1..459: note = Description of Artificial Sequence: Synthetic coding sequence
  source 1..459: mol_type = other DNA
atgggtagtaagcgacggagggctacttccccctctagttcagtgtccggcgacttcgatgacggacatcactctgtgagtacccccggcccttcccggaaaaggcggaggctgtcaaatctccccaccgttgatccaatcgctgtgtgccatgagctctacaacactatcagggattataaggatgagcaggggagactcctgtgcgaactgtttattcgagcccctaaacggagaaaccagccagactactatgaggtggttagtcagcccattgatctgatgaagatccagcagaagttgaagatggaggagtacgatgatgtgaacctgctgacagctgacttccagttgctctttaacaatgctaagtcctactataaacctgactcccctgagtacaaagcagcttgcaaactgtgggacttgtatctcaggacacggaatgaatttgtgtag

SEQ ID NO: 129180 - DNA, 81 bp, synthetic construct
  misc_feature 1..81: note = Description of Artificial Sequence: Synthetic coding sequence
  source 1..81: mol_type = other DNA
atgggatccaagcgccggagagctacctccccctctagtagcgtgtcgggtgattttgatgacggacaccacagcgtgtag

SEQ ID NO: 129181 - DNA, 693 bp, synthetic construct
  misc_feature 1..693: note = Description of Artificial Sequence: Synthetic coding sequence
  source 1..693: mol_type = other DNA
atgggaagcaagcgacgccgagccaccagtccatcctcctcagtgagtggcgactttgacgatgggcaccacagcgtgtccaccccgggcccttctagaaaaaggagaaggctctcaaacttgccaacagttgacccaatagccgtgtgtcacgaactctataacactatccgggattataaagatgagcagggtaggctgctttgtgaactttttattagagcccccaagagacgtaatcagcctgactactatgaagtggtgtctcaaccgattgacctaatgaagatccaacagaagctaaagatggaggaatacgacgatgtgaacctccttactgcggactttcagttgctgttcaacaacgcaaagtcatattacaaaccggattcccctgagtacaaggccgcgtgcaaattgtgggacctctacttgaggacccgtaacgagttcgtccagaaaggagaggcagacgacgaagatgacgacgaggatggacaggataatcagggaaccgtaaccgaaggtagctctccggcgtatctcaaagagatactggagcagctgttagaagctattgttgtggccactaaccctagcggacgcctaattagcgaactgtttcagaaactgcccagcaaagtgcagtacccagattattatgcgatcattaaggaaccaatcgatctctag

SEQ ID NO: 129182 - DNA, 132 bp, synthetic construct
  misc_feature 1..132: note = Description of Artificial Sequence: Synthetic coding sequence
  source 1..132: mol_type = other DNA
atgggatctaaaaggcgccgcgctacgtccccctctagcagcgtgagtggcgactttgatgacggacatcactctgtgagcacccccggaccctcccggaagcgccgccgactcagcaatttacccacatag

SEQ ID NO: 129183 - DNA, 357 bp, synthetic construct
  misc_feature 1..357: note = Description of Artificial Sequence: Synthetic coding sequence
  source 1..357: mol_type = other DNA
atggggtctaagcgccggcgggctacttccccgagctcatctgtcagtggagacttcgacgatgggcaccattccgtcagtacacctggccctagtagaaagcggcggagactgagcaacttgcccaccgtggaccccatcgcggtgtgccatgaactgtacaacacaattcgagattacaaagacgagcagggaagacttctctgtgagctgttcatcagggccccaaagcggaggaaccaacccgactactatgaggtggtttcccagcccattgacctaatgaaaattcagcagaagctgaagatggaagaatacgacgacgtgaacctcttgaccgctgatttccaattgtag

SEQ ID NO: 129184 - DNA, 264 bp, synthetic construct
  misc_feature 1..264: note = Description of Artificial Sequence: Synthetic coding sequence
  source 1..264: mol_type = other DNA
atgggctcaaaacggcgcagagccacaagcccatcttcctcggtgagtggagactttgatgacggccatcattctgtgtctacacccggcccttcacgcaaacggagacggctcagcaatctcccaactgtagacccaattgccgtgtgtcacgagctatacaacaccatccgtgattacaaggatgagcagggaagactgttgtgcgagctcttcattagggcacccaagcggaggaatcaacccgactactacgaggtgtag

SEQ ID NO: 129185 - DNA, 132 bp, synthetic construct
  misc_feature 1..132: note = Description of Artificial Sequence: Synthetic coding sequence
  source 1..132: mol_type = other DNA
atgggtagtaaaaggcggcgcgccaccagcccctcttcgtcagtatctggagattttgatgacgggcaccactctgtgtcaacaccaggaccgagcaggaaaaggagaagactttctaatttgccaacttag

SEQ ID NO: 129186 - DNA, 828 bp, synthetic construct
  misc_feature 1..828: note = Description of Artificial Sequence: Synthetic coding sequence
  source 1..828: mol_type = other DNA
atggaaggagtcgctgtcgtgactgccggctcagttggagctgcgaaaacagagggcgccgcggctttaccccccccgcctccagtgtctcccccggccctgacaccagcccccgcagccggggaagaggggccggcccctttgagtgagaccggtgctccaggatgttctggcagtcggcctcccgagctggagcccgagcggtcgctgggtaggtttcggggccgatttgaggatgaagatgaggaactcgaggaggaggaagaactcgaagaggaggaagaagaagaggaggaggacatgagccacttcagcctccggctggaaggtgggagacaagactccgaagatgaggaggaacggcttattaatttgagcgaactgacgccatatattttatgttccatctgtaagggctacctcattgacgctaccacaattacagagtgtcttcacacattttgcaaatcttgcattgtgaggcacttttattactccaaccgatgtcctaaatgtaatatcgtggttcaccagacacagcctttatataatatttccgccaacgagggaacgggccactttaagccgttagagaagaagtttgtaagggtctcaggggaggcgaccatcggtcatgtcgaaaagtttttgagaagaaaaatggggcttgatccagcctgtcaggtagacatcatatgtggcgaccacctgctggagcagtatcaaaccttgcgggagatccgaagagctatcggcgacgctgccatgcaggacggcttattggttcttcactatgggctggttgtctcgcccctcaagattacatag

SEQ ID NO: 129187 - DNA, 1053 bp, synthetic construct
  misc_feature 1..1053: note = Description of Artificial Sequence: Synthetic coding sequence
  source 1..1053: mol_type = other DNA
atggagggggtggctgtagtgacagctgggtctgtgggggccgccaaaaccgagggagccgccgctttacctcccccccctccagtatctccacctgcactgacacccgcacccgccgcaggggaagagggcccagcacctctgtctgaaacaggggcacccggctgcagcggcagcagacctcctgaattggagcctgagagaagtctcggccgattcagaggcagattcgaagatgaggacgaggaactcgaagaggaagaggaacttgaagaggaggaagaagaagaggaagaggacatgtcacacttctccttgcgcctagagggaggacgtcaggacagcgaagatgaggaggaaaggctgatcaatctgagcgagcttacaccttacatactctgcagcatttgcaaaggatacctgatcgatgccactacaattactgagtgtctgcatacattttgcaaatcctgcattgttcggcacttctattattctaatagatgtcccaaatgcaatatagtcgttcatcagactcagcctctttacaacattcgactagatagacaactgcaggacatcgtgtacaaactggtgataaatctcgaggaacgagaaaagaaacaaatgcacgacttctacaaggagcggggattggaagtgccaaagcccgccgtccctcagccagtacctagttcaaagggtcgatccaaaaaggtgttggaatcagtgtttagaataccaccagagctggatatgtccctgctgctggaattcatcggagcaaacgaaggcaccggccattttaagccgttggaaaagaaatttgtacgggtgagtggcgaagccacaattgggcatgtcgaaaaatttctgagacggaagatggggctggacccagcatgtcaggtagacatcatttgcggggaccaccttttggaacaataccagacactgagggagatcaggagagctatcggagatgctgctatgcaagatggcctgctggtcctgcattacggcctggtggtgtctccgcttaagatcacttag

SEQ ID NO: 129188 - DNA, 10191 bp, synthetic construct
  misc_feature 1..10191: note = Description of Artificial Sequence: Synthetic coding sequence
  source 1..10191: mol_type = other DNA
atgactgcctggctcatttcactaatgtcaattgaggtcctgctactggcggttaggcacctgagtttgcacattgagccggaagaaggctcacttgctgggggaacttggataacagtcattttcgacggacttgaactgggtgtgctgtacccaaacaacggatctcaactggagattcacctcgtaaacgtgaatatggtagtgcccgccttacggagcgtaccttgcgatgtgtttccagttttcctcgatttaccagtagtaacctgccgaacccgatcagttctgtccgaagcccacgaggggctctacttcttggaggcctatttcggcggacagctcgttagctctcccaatcccggcccgcgagacagctgcacttttaagttttcgaaagcccagacacctatcgtccaccaagtgtatccaccgtctggcgtcccgggaaaactgatacatgtatatgggtggatcattacaggaaggctggagacttttgatttcgatgcggaatatatcgattcccccgtaatactggaagcgcaaggcgataagtgggtcactccttgtagccttattaatcggcagatgggtagttgttatccaattcaagaagatcatggtcttggtacactgcagtgtcacgtggaaggtgactatatcggttctcagaatgtctccttctctgttttcaacaaaggaaagtccatggtgcacaagaaggcttggcttatctctgcaaagcaagacctgttcctataccagacccactcagagattctatctgtgttccctgagactggctcacttggcgggagaactaacatcacaattaccggtgatttcttcgacaactcagcacaggtcaccatcgcgggtattccctgtgatatacgccacgtaagtccaaggaagatcgaatgcaccacccgcgcccctggcaaagatgttaggctgaccaccccccagcccggcaatagaggcctgctgtttgaggtcggcgatgctgtggaggggcttgaactcacggaggccaccccgggctaccgctggcaaatagttcccaatgcttccagtccttttggattctggagccaagagggacagccatttcgcgccaggctgtccggctttttcgtagcccccgaaaccaacaattacacattttggattcaagctgattctcaagccagtctccatttttcatggagcgaggaaccccggacgaaggtgaaggtggcgtctatatcagtggggactgcagattggttcgatagctgggagcaaaatcgagacgagggcacatggcagcagaaaaccccaaagcttgagctgcttgggggagcgatgtattatttggaagccgagcaccacgggatcgcaccttcaagaggaatgcggatcggcgttcagatccataatacttggttgaatccagacgtggtgacaacatacctgcgcgagaagcaccagatccgagtaagggcccagcgacttcccgaagtgcaggtcttaaacgtttccggaagaggaaacttttttttgacatgggataacgtttccagtcagcccattccagcaaacgccaccgctcatctgatccagaccacaatcgaagaactcctggccgttaaatgcaagctcgaacccctgtggagtaatatactactgcgcctgggcttcgagagggggcccgaggtgtctaacagcgacggagatttaactagtggcaccgagccgttttgtgggcgctttagcctgaggcagccacggcatcttgtgctgacccctccagctgcacagaaagggtatcgattggatcaatacacccacctctgccttgcatataagggccacatgaataagattcttaaaatgattgtgagcttcactattggttttcagaatatggtgaagaacacaacatgcgattggtcactgaccagaacatccccagaatcatggcagtttgactgtacagatctctgggagacatgtgtcagatgcttcggggacctgcagccgcccccagccaattctccagtgttggtgcaccaaatcaaccttcttcctcttgcccaggaaacgggcctcttttacgtggacgaaataattatagctgatacgaatgtgactgtgtcccaagccgactccggaaccgctaggccaggcgggaacctagtcgaatcggttagcgtcgtcgggagcccacctgtctattctgtaaccagctggctcgcaggctgcggtacagagctacctctcattaccgcaaggagtgtccccaccgagggcactgaagaaggatctggactcgttctcgtcactacacaaagaaggcagaggactagccctcctctgggaggacacttccggatccagctgccgaacaccgtaatcagcgacgtgcctgtccagattagtgcgcatcaccttcaccagctgctgcagaataacgctgatgatttcacttctagatatctgaacgcgagcgacttcaccgtgaaggaggatctgtacacatgttacgagcacgtgtggactctgagttggagcacccagatcggtgacttgcctaattttatcagggttagcgatgagaacttgaccggcgttaacccagctgccgcaactcgggtggtgtatgacggcggggtcttccttgggcccatcttcggcgatatgctggccaccgcaaaccaacacacgcaggtggtggtgagggtgaatgatgtgcccgcacattgccccggctcatgcagctttcagtatttgcagggctccactccttgcgtccactccgtatggtacagtattgatggcgacattaatttgatgatatacatcaccggaacaggattctccggagattcccagtttctgcaagtaaccgtaaacaagacctcttgtaaggtgatatttagtaaccaaaccaatgtggtatgtcaaacagatctgttgcctgtaggtatgcatcggatacttatgctcgtacgaccgtctggattggccataagtgccacaggggaggatctgttcttgaacgtcaaaccaaggcttgacatggtcgagcctagtcgggcagctgatattggcggcttgtgggccaccattcgaggcagcagcttggaaggggtatcccttattctattcggctcctatagctgcgctataaatgttgctacctctaactcttcccgaatacagtgtaaagttcctccaagaggtaaggacggacgcatcgtgaacgtcaccgtcatcagaggggactatagtgccgtcctgccccgcgcatttacatacgtttctagtcttaaccctgttatagtgacgctcagcagaaatatctccaatatcgccggcggtgaaaccttggtgattggtgttgccagattgatgaattacacggatctggatgtagaggtacatgtacaggatgctctcgctcccgtacatacccagtcagcctggggactggaagtagccctccctccactcccagcaggcctgcacaggattagcgtgagcataaatggcgttagtatccactcccagggagtggatctgcatattcagtatcttaccgaagtgttctcaattgagccgtgctgcggaagcctgcttggaggcacaattctatccataagtgggattggcttttcacgagacccagccttggtctgggtgctggtcgggaatcgatcctgcgacattgttaacttaacagaggcctcaatttggtgcgaaaccctgcctgccccccagattcccgacgctggtgccccaaccgtccctgcggcggtggaggtttgggctgggaataggttcttcgcgaggggaccctcgccgagtctagtgggcaaaggattcacattcatgtatgaggctgccgccactccagttgttaccgccatgcagggcgaaatcacaaacagctcattgtcactgcacgtaggaggcagtaatcttagcaattctgtgatccttttaggcaatttaaattgcgacgtcgagacacagtcgtttcagggcaacgtctctctgtccggatgttctataccgctacactccctcgaggctggcatctaccccttacaagtaaggcagaaacagatgggcttcgctaatatgagtgtggtgctgcagcagttcgccgtgatgccgaggattatggccatctttccaagccagggctcggcatgcgggggaaccatcctcaccgtacgcggcctcctcctgaactcaaggaggcgcagcgtgagagttgacctgagcggcccgttcacatgtgtcatcctgagcctcggcgaccacacaatcctctgccaggtgagcctggagggagaccctttgccaggggcttcctttagcttaaatgtcaccgtattggtcaatggcttgacaagcgagtgtcaaggcaactgcactctgttcattagggaggaagcaagcccagtgatggacgccctgagcacgaataccagtggtagccttaccactgttctcatccgtggacagcgcctggcaaccacagccgacgaaccaatggtgtttgtggatgatcaactgccctgtaatgtaacctttttcaacgcctctcacgtggtatgtcagaccagggacttggctccaggacctcactacttaagtgtattttacacccgaaatggatatgcctgctccgggaacgtcagccggcatttctacatcatgccccaggttttccactatttccccaaaaatttttccctgcacggaggctcattattaaccatcgaaggaactggcctcaggggccaaaacactacctcagtgtacattgatcagcagacctgccttacggtgaacatcggggcagagttgattcgatgtattgtccccacaggtaacgggtcagtggctttagagatcgaggtcgacggcctgtggtatcatattggagtaatcggatacaacaaggccttcacaccagaactcatttcaataagccagagcgacgacattctgacattcgccgtcgcgcagatctctggtgccgccaatatcgacatctttattgggatgtccccctgtgtgggcgtgagtggaaatcacactgtcttgcaatgtgtcgtgccatcactcccagccggggagtatcacgtgcgaggatacgactgtattcggggatgggcatccagcgctttggtgtttacatctcgggtgatcatcactgccgtaacggagaactttggatgcctcggaggtcgtctcgtgcatgtgtttggcgccgggtttagccccggtaacgtcagcgccgcagtatgtggcgcgccgtgccgagtgctcgctaacgccaccgttagcgccttctcctgcctcgtcctgcctttggacgtctcattagcttttttgtgcggattgaaaagagaggaggattcttgtgaagctgcacgccacacctacgtgcaatgcgacctaactgtggccatggcaactgagcagctactggagagctggccttacctctacatctgtgaggagagttcccagtgcttgttcgtgcctgaccactgggctgagagcatgttcccatcattcagtggtctcttcatatccccaaaacttgagagagatgaagtgctgatatacaatagttcttgcaatatcacaatggagaccgaagcagaaatggagtgcgaaactcctaatcagcctatcactgtaaaaatcactgaaatccgaaagaggtggggccagaacactcaagggaacttttcactgcagttttgcaggcggtggagccggacccactcttggttccctgaacggctcccccaggacggggacaacgtcaccgtggaaaatgggcaactcctcctgttggatactaatacgtctattctgaacctccttcacatcaagggtgggaagctgatctttatggcacccggaccaattgaactgcgggcccatgcaattttggtttccgacggaggcgaattaagaatcgggagcgaagataaacccttccagggaagagctcaaattacgctctacggaagctcatactcaaccccctttttcccatatggtgtcaagttcctcgccgtccgtaacggaaccctgtccctgcacggatccttacccgaagtcatcgtgacatgcctgagagccactgcccacgctttggatacggttttggcattggaggatgcagtggactggaatcccggagacgaagttgtcattataagcggtactggcgtgaaaggagcaaaacccatggaagaaatagtgacagttgagacagtgcaggataccgatctctacctgaaatcccctttgcgctatagtcacaatttcaccgagaactgggtcgcaggggaacaccatatcctaaaggccacagtagccttgctctcccgctctatcacaatccaaggaaacctcactaacgagagggaaaagctgctagtgagctgccaggaagccaacgccccggaaggtaacttacagcactgtttgtacagcatgtccgagaaaatgctgggatccagggacatgggtgcccgcgtgatcgtacaaagctttccggaagaaccatcacaggtgcagctcaagggggtccagttccaagtgctcggacaggcattccataagcatctgagttctttgaccctcgtcggcgcaatgagagagtccttcatccagggatgcacagtacggaatagtttttctcgggggctctcgatgtgtgggaccttggggctgaaggtggactccaacgttttctacaacatactggggcatgctcttcttgtcggcacttgcacagaaatgcgatacatttcgtgggaggccattcacggacgcaaggacgactggtctggacatggtaatattattcggaataatgtgattatacaagtgtctggtgcagagggcctctccaacccagagatgcttactccttccggcatctacatttgctcacctaccaacgtgattgaagggaaccgcgtttgcggggcaggttatggctacttcttccacctcatgacaaatcagacatcccaggcacctctgctctctttcacacaaaatatagctcacagctgtacaagatatgggcttttcgtgtaccccaagttccagccgccttgggacaacgtgacagggacaacactgttccagagttttactgtttgggagtccgctggaggggctcaaatctttcggagcagtaatttgaggctgaaaaatttcaaggtctactcttgccgcgactttggcatcgatgtgctagagtcagatgctaatacgtccgtcactgacagcttgttgctcggccactttgcgcataaagggtcattatgtatgtcctccggcattaagactcctaaaaggtgggagctcatggtttccaatacaacttttgtcaattttgacctaatcaactgcgtggctatccgcacttgtagcgattgttcacagggccaaggcgggttcactgttaagacctctcagttgaaattcacaaattcaagcaatttggttgccttccccttcccccacgctgctattttagaggacctggatggctctctgagcgggaagaacagatcccacatccttgccagcatggagaccctaagtgccagctgcttggtgaactctagctttggccgagtagtgcacggaagcgcctgtggcgggggcgtgctctttcatcggatgtctattggtcttgccaatacaccagaggttagttacgacttgaccatgaccgattcaagaaacaaaaccactacagtaaactatgtccgggacacattgagtaacccaagaggatggatggcactcctcctggatcaagagacttatagcctgcagagcgaaaacctgtggattaatagatcactgcaatacagcgcgacatttgataactttgctccgggtaattacctactgctggtacataccgacctccccccataccctgacatccttctccgctgcggctcacgggtgggcctgtcctttccgttcctccccagtcccggtcagaaccaggggtgtgactggtttttcaacagtcaacttagacagttaacatatttggtgtcaggcgagggtcaggttcaggtgattttgcgtgtcaaggaaggcatgccccctactatcagtgcatcgaccagcgctcccgagagcgccctgaagtggtctctccccgagacttggcaaggagttgaagagggttggggcggctacaacaacacaatcccagggcctggggatgacgtgctaatattacccaatcgaactgtcctcgtggatacagatctcccctttttcaaaggactttacgtgatgggaacattggactttccggtggatcgtagtaacgtactgtccgtagcttgtatggtgattgctggcggagagttaaaagttggaacacttgagaatccactggagaaagagcagaaactcctgatcctgttgagagccagcgaaggtgtcttttgcgaccggatgaatggcatccatatcgaccccggtaccataggcgtgtacggcaaggtgcacttgtattccgcgtatcctaagaactcatggacacatttaggagccgacattgcctcgggaaatgagagaatcattgtggaggatgccgtggactggaggcctcacgataaaattgtgctttcctccagctcatatgaaccacacgaagctgaggtcctcaccgtcaaagaagtgaagggacatcacgttcgtatatacgagcggctcaaacacagacatatcgggagcgtgcatgttaccgaggacggacggcacatccgcttggctgctgaagtcgggctgcttactaggaacatacaaatccaacccgacgtcagctgcagaggtcggctcttcgtcggaagcttccgcaagagctcacgtgaggaattctcaggagtccttcagttactaaacgtggaaatacagaattttggtagccccctgtactcctcagttgagtttagtaacgtgtctgctggaagctggatcatcagctcaaccctgcaccagagctgcggcggaggcattcatgcagccgcctctcacggcgtgcttcttaatgacaacatcgtcttcggcacagccgggcatggcatagaccttgaagggcaagcctataccgtgaccaacaatctcgtggtgctcatgactcaaccagcatggagcaccatttgggtcgccggtatcaaggtcaaccaagtaaaggatataaacttgcatggaaacgttgtggcgggctctgaacgcctgggattccacattcgcgggcataaatgtagctcttgcgagttgctctggagcgacaatgttgcccactcctctctccatggcctgcacttatacaaggagtcaggactggacaactgtacccggatatcaggattcctggctttcaaaaactttgattatggtgccatgctccacgtcgagaattcggtcgagattgagaatataacgctagtggataataccattggactgttggccgtagtttacgtttttagtgcccctcagaattctgtcaaaaaggtgcagattgtgctgcggaactccgtgatcgtcgcgacatcctctagtttcgactgtatccaggacaaggtgaaaccccatagtgcaaacctcacgtccactgatcgcgcaccatctaacccgcggggaggcagaattggcattctgtggcctgtcttcacctcggagccaaatcagtggccacaggagccgtggcataaggtgcgcaatgaccatagcatctccggtattatgaagctgcaggacgtaacctttagctcctttgttaagtcctgctatagtgatgacctggacgtctgtattcttccaaatgctgagaactctggcatcatgcatcccatcactgcggaacggacaaggatgttaaaaattaaggacaaaaacaaattctacttcccttcactgcaaccccgcaaagaccttggtaaagttgtgtgtcctgagctggactgtgcatcccctcgaaagtacctgttcaaagacctggacgggagggcgcttggcctgcccccgccagtatcagttttccctaagaccgaggctgaatggaccgcctccttttttaatgcagtcaccactgagcaggcactgaaaataagtgagtag

SEQ ID NO: 129189 - DNA, 12225 bp, synthetic construct
  misc_feature 1..12225: note = Description of Artificial Sequence: Synthetic coding sequence
  source 1..12225: mol_type = other DNA
atgaccgcttggctcatcagcctcatgtcaattgaggtcctgctactggccgtcaggcatctgagcctgcacattgaacctgaagagggctccttagcagggggcacgtggatcaccgttatatttgacggtttagagctgggcgtgctgtacccaaataacgggagtcaattagagattcatctggtgaatgtgaatatggtggtacctgcgcttcgctctgtgccatgtgatgtgtttccagtgtttctcgacctgcccgtcgtgacctgtagaactcgtagcgtactatctgaggctcacgaaggcctgtactttttggaggcatatttcggagggcagctggtgtccagcccgaatcccgggccacgagactcatgcacgttcaagttctctaaagcgcagaccccgatcgtccatcaggtgtatccaccaagcggagttcctgggaagttgatccatgtctatggctggatcattacagggagactggaaacatttgacttcgatgcagagtacatcgactctccggtgattttggaggcccagggagataaatgggtgacaccctgcagtctgatcaatcgccagatgggcagctgttaccccatacaggaagaccacgggttaggaacactgcagtgccatgtggagggagactacatcgggtcccagaatgtttcattttcagtgtttaacaaaggaaaaagtatggtccacaagaaggcttggctaatctcagctaagcaagatctctttctgtaccaaacacatagcgagattctcagtgtgttcccggaaactgggagcttgggcggcagaacgaacatcaccatcaccggcgatttctttgacaatagcgcacaggtcacgatcgccggtatcccttgcgatatccgccatgtgtccccgcgaaaaatagagtgcacgacgcgggctcctgggaaggacgttaggcttacgacgccccaacctggtaatagaggccttcttttcgaagtaggcgatgcggtggagggcctggagctcactgaggcaacccccggatacagatggcagattgtacccaacgcgtcaagccccttcggattttggagccaggaggggcaacctttccgcgcccgcctcagtggatttttcgtggcccctgagactaacaattacaccttctggattcaggcggatagtcaggcgtcacttcacttctcctggagcgaggagccccgcacaaaagtgaaagtggccagcatttcagtcggcacagccgactggttcgatagctgggaacaaaatcgagacgagggtacctggcagcagaaaacgcctaaattggagttactcggcggggcaatgtactaccttgaggcagagcaccacggaattgccccctctcgcgggatgagaatcggagtccagattcacaatacttggctgaaccccgatgtagtgacgacgtatctgagagaaaagcatcagattagagtgagggctcagaggctgcccgaagtacaggtcctaaacgtcagtgggcgggggaattttttcctcacttgggataatgtatctagccagccaatccctgctaacgctaccgcccacttaatacagactactatagaagagcttctggcggtaaaatgcaagctggagccactgtggtcaaatattttgctcaggttaggctttgagcgaggtccagaggtgagtaacagtgatggagacttgacctcgggaacggagcctttttgcggacggttttctctgcgccagccacgacacctagttctgactcctcctgccgctcagaaaggttacaggctggaccagtatacacatctgtgcctggcctacaagggacacatgaataagatcttgaagatgatagtcagcttcactattggattccagaatatggttaagaacactacgtgcgattggtctctgacgaggacgtcacccgagtcctggcagtttgattgcacagacttgtgggagacatgtgtcaggtgttttggggacctgcagccaccccctgcaaacagcccagtgttagtccaccagattaacctcttgccactggctcaagaaaccggcctgttttacgtggatgagatcataatcgccgatactaatgtgaccgtgtctcaggccgactcaggcaccgccaggcccggtggaaacctggtggaaagcgtgtcagttgtggggtcccccccagtatactccgtcactagttggctcgcaggctgtggaacggaactgcccctaattaccgccagatcagtgcccacggaagggaccgaagagggttcaggattagtgctggtcacgacccagcgacggcagagaacctctccaccattaggcggccatttccggattcaactgcccaataccgttatctccgatgtccccgtccagatttctgcccatcacctccatcaacttctgcagaataatgcggatgatttcacatcccgctacttaaatgcctcagatttcaccgtgaaagaagacctatacacctgctatgaacatgtgtggactttatcttggtcaactcagataggcgaccttcctaattttataagagtgagtgatgagaatctgaccggcgtgaatcctgctgctgcgacccgggtcgtttacgatgggggtgtttttttaggaccaatattcggcgacatgctagctacagctaaccagcacacacaggtggtggttcgcgtgaatgatgttccagcccactgcccaggttcctgctcgtttcagtatctgcagggtagtactccttgcgttcattcagtgtggtactctatcgatggcgatatcaatctcatgatatacatcaccggcactggcttctcgggcgatagccagttccttcaggtaacagtaaataaaacctcttgcaaggtgatcttcagtaaccagactaacgtcgtgtgtcaaacggaccttctccccgtaggaatgcacaggatcctaatgctagtcaggccctccgggctagccattagcgccaccggggaggacttgtttctgaatgtgaagccccggctggacatggttgaaccttctcgcgctgctgatatcgggggcctctgggcgaccatccgcggaagttccctcgagggagtatcccttatcctgttcggatcttacagctgcgccataaacgtggccacaagcaacagctccaggatccaatgcaaggtcccaccacgtgggaaggacggtcggattgtcaatgtcacagtgattcgcggcgattactccgctgtgctgcctcgcgccttcacctatgtctccagtttgaaccctgtgatagtgaccctgtcccgcaacatctccaacatcgccggaggcgaaactcttgttatcggtgttgctagacttatgaattatacagacctcgacgttgaggtgcatgtccaggacgccttagcaccagttcatacacagtccgcttggggacttgaggtggctcttcctccactgccggccggcttacataggatctccgtgtccatcaacggggtctcaattcacagccagggtgtggatcttcacattcagtatttgactgaggtcttctctatcgagccctgctgtggatcgctcctgggagggacgatcctgtctatctctgggatcggtttttcacgcgacccggccctcgtgtgggtgctcgtgggcaaccggtcttgtgatatcgtgaacctgacagaagcgagtatctggtgcgaaacactacccgcacctcaaatccctgacgccggggcccctacggtcccagctgcagtcgaagtctgggccggtaaccggtttttcgcgcgagggccaagtcctagcctggtgggaaagggtttcaccttcatgtacgaggctgccgctacgcctgttgttactgcgatgcagggggaaatcaccaattcatccctgtcacttcatgtggggggttcaaacctgtcgaactcagtcattctcctggggaacttaaattgtgacgtggaaactcagagtttccaagggaacgtttcactgtccggctgctctattcctctgcactccctggaggcagggatctaccctctacaagtgaggcagaaacagatggggttcgctaatatgagcgtcgtgctgcaacagtttgcggtgatgcctcgcataatggcaatctttccctctcaagggagtgcttgtggcgggaccatactcaccgttagaggcttactgctcaacagccggcgccgaagcgttcgggtggacttgtccgggccattcacatgcgttatcctctcgttaggcgatcacaccattctatgtcaggtctcattggagggggaccccctcccaggggcatcttttagcctgaatgtgacagtcctcgtgaatgggttgacttccgaatgccagggaaattgcaccctgttcattcgggaagaggcgagtccagtgatggatgcgctctctactaacacgagcgggtcccttaccacagtgctgatcaggggccagcggctagcaaccaccgctgacgagcccatggttttcgtggatgatcaactaccttgcaatgtcaccttttttaatgcaagccatgtggtatgtcagactagagatttggcccctgggcctcactacctgagcgtgttttacaccagaaacggatacgcttgcagcggaaatgtgtcccgacatttttatatcatgcctcaagtttttcattattttccaaaaaatttcagcttacacggcgggtcccttcttacaatcgaaggaactggcctgaggggacaaaatacgacttcagtgtacattgatcagcaaacatgcctgacagtgaatatcggggcagagttaattcggtgtatcgtccccaccgggaacgggtccgtcgccctggagatcgaagtagacggcttatggtatcatatcggcgtcatcgggtacaataaagcttttacccctgaacttattagcatcagccagtccgatgatatcctgacctttgctgtggcccagattagcggagcagcaaatatcgacatattcattggtatgtccccatgtgtgggggtctctggaaatcatacagtactgcaatgcgtggtgccttcactccccgcaggagagtaccacgtgcggggatacgattgcattcgtggctgggcatcatccgctttagtgttcacaagcagagtgatcatcactgccgttacagagaattttggctgcctgggcggaagacttgttcatgtgttcggcgccggcttctcacccggaaatgtaagtgccgctgtctgtggagctccatgtcgagtcttggccaacgccaccgtgagcgcattctcctgcctcgttctgcctctggatgtgtccctggctttcctgtgtgggttaaagagggaagaggattcctgtgaagcagcccggcatacttacgtgcagtgcgatctcactgtcgcaatggccacagagcagctgctcgaaagctggccatatctgtatatttgtgaggagtccagccagtgcttatttgtaccagatcactgggctgaaagcatgttcccctcattctcaggccttttcatctcacccaaactggagcgggatgaggttctgatctacaacagttcttgcaacatcactatggagactgaagcagagatggaatgcgagactcccaaccagcctataaccgttaaaatcacagaaatccgcaagaggtggggacagaacactcagggcaactttagtttgcagttctgtaggcggtggtctcgaacccatagctggttcccagagcgactgccccaggacggcgacaatgttacagtggaaaatggccagctcctactgctggatacaaacacaagcattctgaacctgctccatatcaagggtggcaaattgattttcatggcccccggccccatcgagctcagagcccatgccatactagttagcgacggcggagaattgcgaatcggatcggaagacaagccattccaggggcgagcacaaatcaccctatacgggtctagctactccactcctttttttccttatggcgttaagttcctggcagtcagaaatggaacccttagcctgcacggtagcctgccagaagtgattgtcacctgcctgagagcgacggctcacgccctggacaccgtgctggctcttgaggatgctgtggactggaatccaggagatgaagtcgtcatcatctcaggcaccggggtgaaaggggcgaagccaatggaggaaattgtcaccgtcgagactgtccaggacaccgacctgtatctgaagagcccactgaggtacagccataactttaccgagaactgggtggccggcgaacaccatatactgaaggctacagtggctttgctgtctcgctctatcacgatccagggaaaccttaccaatgagcgtgagaaactcctagtgagttgtcaggaagctaacgcacctgaaggcaaccttcaacactgcctgtatagtatgagcgaaaaaatgctcggaagcagggacatgggcgcacgcgttatcgtccaatcattcccagaagaaccctctcaagtccagcttaagggagttcagtttcaggttctcggtcaggcgtttcataagcatcttagctcgctgacactggtcggcgctatgcgagaatccttcatacaaggatgtacagtgagaaacagcttttctagaggcttatcaatgtgcggtacattgggcctcaaagtcgactcaaacgttttctataatattctgggccatgccctactggtcgggacctgcaccgagatgcgctacattagctgggaggcaatacacggacgaaaggatgactggtccggccacggaaacattatacgtaacaacgtgattattcaggtgtcaggtgctgaggggctttcaaatccggagatgttaactccttctggtatctacatctgttctccaactaatgtgatcgagggaaatagggtttgcggtgcaggatatgggtatttcttccacctgatgaccaatcagacgtctcaagcaccactgctgtctttcacccagaatatcgcccattcgtgcacacgctacggcctgtttgtataccctaagttccagcctccttgggacaatgtgacaggaacaactttattccagtcctttacagtgtgggaaagcgcagggggagcacagattttccgaagctcgaatttacggctgaagaatttcaaagtgtacagttgtagggattttgggattgacgtcttagagagcgacgccaacacttcagtgactgactccctgctgctcggacacttcgcccacaaaggatccctctgtatgtcgtccggcataaagacgccgaagagatgggaattgatggtctcaaacacgacatttgtgaactttgatctgattaactgcgtggctatcaggacttgctccgactgcagtcagggccaggggggcttcacagtaaagacctcgcagctgaaattcacaaattcatctaacttagtagctttcccatttccccacgcagccatccttgaggacctcgatggctccctcagtggtaaaaatagaagccacatcctggcgagtatggagacattatctgcctcttgtctcgttaactcctcattcggccgggtggtgcatggttctgcatgtggcggaggggtcctgttccaccgtatgagcattggacttgccaatacacctgaggtgtcctacgatctcacaatgacagattccaggaacaagaccactaccgttaattacgtgcgggataccttgtctaaccctcgaggctggatggcactcctgctcgaccaggagacatattccctccagagcgaaaacttatggataaataggagtctgcaatacagcgctacctttgataattttgcacctggcaactacctgctgctggtccacacagacctccctccgtatccggacatattattgaggtgtgggagcagagttggactatcatttcccttcctccccagccctggccaaaaccaaggctgtgactggttcttcaattctcaactccggcagctcacatacctggtgtccggcgaggggcaggtccaggtgattttgagggtgaaagaaggaatgccccccactatctctgcctcaacatcggcacctgaatccgctctgaagtggtccctgcccgaaacatggcagggcgtcgaagaaggctggggcggctacaacaatacgattcccggccctggtgacgacgtgctcattttgcccaatagaactgtacttgttgacacggacctccctttcttcaaggggctttatgttatggggacgctggatttcccagttgatcgcagcaatgtgctgtctgtggcatgtatggtgatcgcgggcggcgagcttaaagttggcacactagaaaacccactcgaaaaggaacaaaaactcctgattttacttcgggcaagtgagggagttttttgcgatcgcatgaacgggatccacattgatcctggaaccatcggcgtgtacgggaaagtacatctgtatagcgcttaccctaaaaattcatggactcacttaggcgctgacatcgcttcaggtaacgaacgcatcattgtcgaggacgccgtcgattggcgtcctcacgacaaaatcgtcttgtcttcatctagttatgaaccacacgaagccgaggtgctgacagtaaaagaggtcaaaggacaccacgtgaggatctacgaacgattaaaacatagacatatcgggtcagtccatgtgaccgaggatggcagacatatacgcttggcggccgaggttgggttactgaccaggaatatccaaattcagcccgatgtatcctgtcggggacggctgttcgtggggtcatttcgcaaatcctctcgggaagaattcagtggagtactccaattgctcaatgttgaaatccaaaatttcggatcaccactttatagttcagtggagttttccaacgtatctgctgggagttggataatctcgagcaccctgcatcagtcatgtgggggcggtatccatgccgctgcctctcatggcgtcctcctgaatgataacattgttttcggcacagctggccacggcatcgatctggaggggcaggcttataccgtaacaaacaatctagtggttctgatgacccagcccgcttggagtactatctgggtcgctggaatcaaggtaaatcaggtgaaggacatcaatctgcacggaaacgtagttgcagggagcgagcggctggggtttcacatcagaggacataagtgttcaagctgcgaactgctctggagcgacaatgtggcccactcttcattgcacggattacacctctacaaggaatctgggctggacaactgtactcgtatatccgggtttctcgccttcaagaactttgattacggagctatgctgcatgtggaaaatagcgtggaaatcgaaaacattacactggtagacaatactattggtctgctggcagtagtgtatgtattctccgctccccagaactcagtaaagaaggtgcagatcgtattgaggaattctgtaatcgtggccacctcttcttctttcgactgtatacaggataaggtgaagccacatagtgcaaatctgacctcaaccgatcgcgcaccatccaacccacgaggcggccgcattgggatactttggcctgtgttcacatcggagcctaatcagtggccgcaggagccgtggcacaaagtccgcaatgatcattccatctcaggtatcatgaaattacaggacgtgacatttagcagcttcgtgaagagttgctattctgatgacctggacgtctgtatcctccctaacgctgaaaacagcggtattatgcaccctattactgccgagcgaactcggatgcttaaaatcaaggacaaaaacaagttttattttccatcgcttcagccacgtaaggacttggggaaagtcgtctgtccggagctagattgcgcgagcccacgcaagtatttattcaaggacctggatgggagagccctgggtcttccaccgcccgtgagtgtgtttcccaagaccgaagccgaatggacagcctccttcttcaatgccgggaccttccgggaagaacaaaaatgtacgtaccagtttctgatgcaggggtttatatgcaagcagaccgaccaggtggtgctgatcctggactccgccgacgcaatctgggcaatccaaaaactgtatcctgtggtgtctgtgactagcggcttcgtcgatgtcttctcatctgtgaatgccaatatcccttgtagtacctccggatctgtgtcgacgttttacagcatcctccccatccggcaaatcaccaaagtctgcttcatggaccagaccccacaggttctgaggttctttctgctagggaataaatcaacctccaaactcctgttagccgtcttttatcatgagctgcagtccccccatgtttttctgggcgaatctttcattcctcctacacttgtccagagcgcctccctgctgctcaacgagtcgattggtgccaactatttcaacataatggacaacctgttgtacgtcgtgctgcagggcgaagagccgatcgaaatccggagcggcgttagcattcacctggctcttacagtgatggtgagcgtgttggagaaaggctgggagattgtgatcctcgagagattaactaatttccttcagattgggcagaatcagattaggttcatccatgagatgccaggacacgaagaaaccctgaaggccatcgctgacagccgagcgaaaagaaagagaaattgccccacagtaacctgcacgtcacattaccggagggtaggccagaggaggcctctaatgatggaaatgaattctcatcgtgcctcccctccgatgacagtggagacgataagtaaagttattgtgatcgagatcggcgactcacctacagtcaggtcgaccgggatgatcagcagtctgtcaagcaacaaactgcagaacctcgctcaccgcgtgatcaccgctcaacagacaggtgtactggaaaacgtcctcaacatgacaattggggctctcctagtcacccagtctaagggtgtgatcggctatggtaataccagttctttcaagacgggaaatctgatttatatcaggccttatgccttgagcattcttgttcagccctcagacggtgaggtcggaaacgagctgccagtccagcctcagctggtatttctagacgaacaaaaccgccgggttgagtctcttggaccaccttccgaaccctggacaatctctgcctctctggaaggagcatccgattccgtgctgaaaggttgcacacaggctgaaacccaggacggttacgttagcttctacaacttggccgttctcatttcaggctccaactggcattttatttttactgtcacgagccccccgggagtaaattttactgccagaagcaagcctttcgccgtgttgccggtcaccaggaaggaaaaatccacaattatactggccgcctccctgtcgagcgtagcatcctggctggcactttcatgccttgtatgttgctggctcaaacggagcaaatccagaaagaccaaaccagaagagatcccagaatctcagacaaacaatcaaaatatccacatccacatctcctctaagcgacgggagagccagggacccaaaaaggaagacaccgtggttggggaagatatgaggatgaaggtgatgctgggcaaagtcaaccagtgccctcaccaacttatgaacggcgtgtcccggcgtaaagtttcccgccacatcgttcgcgaggaggaggccgccgtgccagctcccggaacaactggcataacatctcatggccatatctgtgcccccggtgccccagcccagcaggtgtacctccaagaaactggaaactggaaggaaggccaagaacagctgcttagataccagttggcaggtcagaaccagctgcttctcctgtgtcctgacttccgccaggaacggcagcagctgccgggtcagtccagattgtccaaacagagcggatctctcggtctcagtcaagagaaaaaggccagctgcggtgctacagaagcattttgtcttcattctgtccatcccgagaccattcaagaacaactgtag

SEQ ID NO: 129190 - DNA, 10191 bp, synthetic construct
  misc_feature 1..10191: note = Description of Artificial Sequence: Synthetic coding sequence
  source 1..10191: mol_type = other DNA
atgaccgcttggctgatcagcctcatgtcaattgaagttttgttacttgcagtgcgccacctgagtttgcatatcgaacctgaagagggttcgctggcggggggaacatggatcacagtaattttcgacggtctggagctcggcgttttataccctaacaacgggtcccagttggagatccacctggttaacgtgaacatggtcgtgccagcattgagaagcgtaccctgtgacgtcttccccgtttttctggacttgcctgtcgtgacatgcagaacaaggtccgtcctgagtgaagcgcacgagggactgtacttcctcgaggcttactttggcggtcagttagtgtcctcgcccaacccagggcctcgagactcgtgcaccttcaaattttccaaagcccagacacctatcgttcaccaggtctatccaccgagcggagtacccggcaagttgatccatgtgtacgggtggataatcacaggaaggctggagaccttcgattttgatgccgagtacatcgactcccctgttatcttggaggcccagggcgataagtgggtaaccccatgtagcctcattaatcggcaaatggggtcttgctaccctatccaggaggatcacggtttaggtacgctgcaatgccacgtcgagggagactacattggtagccagaacgtttcttttagcgtcttcaataaaggcaagtcgatggtccacaaaaaggcatggctcataagcgcgaaacaggacctgtttctctaccagactcattctgaaatattgagcgttttccccgagactggctctctcggtggcagaacaaatattacaatcacaggcgacttttttgacaacagcgcccaagtcaccatcgcgggaattccttgtgatattaggcacgtgagtccccgtaagattgagtgcacaaccagagcacctgggaaagacgtgcgcctaaccacgccacagcctggcaacagggggctgctgttcgaagtgggcgatgccgtcgaagggctcgagctgaccgaggctacccctgggtacaggtggcagattgtgcccaatgcctctagtccctttggcttctggagccaagaggggcagcccttccgcgcaaggctctccggattctttgtggctcccgaaaccaacaactacaccttttggatccaggcagactcccaggcaagtctgcacttttcgtggtccgaggagcctcggacaaaagttaaggtggcaagcatcagcgtgggtaccgccgattggtttgactcctgggagcagaaccgcgacgaaggcacttggcagcagaagactcctaaactggagctgctgggtggtgccatgtactacctggaggccgagcatcatgggatcgcgccgtcccgcggaatgagaatcggagtccaaattcacaacacatggctcaaccccgatgtggtcaccacttacttgagggaaaaacaccagatccgcgtcagggcccagcgcttgcccgaagtccaggtgttaaatgttagcgggaggggcaatttcttcctgacgtgggataacgtatctagtcaacctataccagccaacgcaaccgcacaccttattcagactaccatagaggagctgctcgcagtgaagtgcaagctggagcccctgtggtctaatattctcctgcggttaggctttgagcggggtccggaggtgtcaaacagtgacggcgatctgacttccgggaccgagccgttctgcggccgcttcagcttgaggcagcctcggcacctggtgctcaccccaccagccgcacagaaagggtatcgcctggaccaatatacgcacttgtgtttagcctataaagggcacatgaataagattctgaagatgattgttagttttacgattggctttcagaacatggtgaagaacactacctgtgattggtctcttactagaacatctcctgaaagctggcagtttgactgcacagacctttgggaaacctgtgtgagatgcttcggggacctgcagccaccacccgcgaactctcctgttttagtccatcagattaacctgctcccactggcccaggagaccggcttattttacgtcgatgagatcatcattgccgacacaaatgtaactgtgagccaggctgattccggaaccgcaaggccaggtgggaacctcgtcgaatcagtcagcgtggttggttctcctccagtgtattctgtgactagttggttggccggctgtgggactgaacttcctttgatcaccgcaagaagtgtgccaacagaggggaccgaggaaggttccggtctagtgcttgtgaccacgcagaggcggcagcgaacgtctcccccactcggaggacacttccgcattcaacttcccaatacagtgattagcgacgtcccagtccagatttccgcccaccacctgcaccagctcctgcagaacaacgctgatgattttacttctaggtacttgaacgcctcagactttacagtcaaagaagacctctacacctgttatgagcacgtctggacattgagctggagcacgcagattggcgaccttccgaatttcatcagagtgtccgatgagaatctgacaggtgtgaaccccgccgctgcaacccgggtggtctacgacgggggagtgtttctgggccctattttcggggacatgctggccactgcaaatcagcacacacaagtcgtggtgagagtaaatgacgtgcccgcccattgccccggatcttgctccttccaatacctacagggatccactccatgcgtccattctgtatggtattctatagacggggatattaaccttatgatctacattaccggcacaggttttagcggagactcccagttcctgcaagttactgtgaataagacatcttgcaaggtcatattctctaaccagaccaatgtcgtttgccagacagaccttttgcccgttgggatgcaccggatcctgatgttggtgcgacccagtggtctagctatttctgccaccggtgaggatttgttcttgaacgtaaagccgcgcttggatatggtcgaaccgagtagggccgccgatataggggggttatgggccactattcggggctcttctctggagggggtctccctgatactatttggttcctacagttgcgctataaacgtggccacatcaaacagctcaagaattcagtgtaaggtaccaccgcgggggaaggatgggagaatcgtgaatgtgacggtcatcagaggagattatagcgccgtgctcccccgcgcctttacatacgtcagttcactcaaccccgtcattgtaacactgtcgcgtaacatcagtaacattgcgggtggggaaacactcgtaatcggtgtggcgcgtctaatgaattacaccgacttagatgttgaagtgcacgtgcaagacgctctcgcccctgtacacactcagagcgcatggggccttgaagtggcattgccccctctccctgccggcctgcaccgtatcagcgtgtcgatcaacggcgtatccatacattcacagggtgtggacttgcatatacagtatctgaccgaggtgttttcaattgaaccttgttgcggctcgcttctcggtggcacaattctgtccatctccggcatcggcttctctcgcgacccggcgcttgtttgggtcctcgtaggtaataggtcctgtgatatcgtgaatttgaccgaagcttctatctggtgcgaaacactgcctgcacctcagatccccgatgcaggagctcccacagtgccggcagcagtagaggtttgggctgggaatcggtttttcgcacgaggccctagcccaagccttgtaggcaaaggattcacatttatgtacgaggccgcagccaccccagtggtgacagcaatgcagggagagattactaatagctcactttccctccatgtggggggcagcaatctgtcaaattccgttattctcctgggaaacctgaactgcgacgtggaaacacagagttttcagggtaacgttagtctgagtggatgttccatacccctccactccctcgaagccggcatatacccactgcaggtgaggcagaagcaaatgggatttgctaatatgagcgtggtgctacagcagtttgctgttatgccaagaataatggccatttttccttcccagggttctgcatgtgggggaacaattctgactgtgcgcggacttctacttaattcaagaaggagatccgtcagggtggatttgtccggtcctttcacctgtgtcatcctcagtctcggtgatcacacaatcctgtgtcaggtttctctcgagggagacccactgccaggggcttctttttctttgaacgtaactgtcctagtgaacgggctaaccagcgagtgtcagggcaactgcacactgttcattagagaagaagcaagccctgttatggatgccctatccactaacacaagcggctcactcacaacagtgctgatcagggggcaaagactcgcaaccaccgcagacgaaccgatggtgtttgtggacgatcagctaccttgtaatgtgactttcttcaatgcttcccacgttgtttgtcaaactagagacttagctcccgggccacactacctgtccgtgttctatacacggaatggatacgcctgtagtggtaatgtatccagacacttctacatcatgccacaagtttttcactactttcctaaaaactttagcctgcatggcgggagcctcctgacaatagagggcacaggcctccgcggccagaatacgacatccgtctacattgatcagcagacttgtttgaccgtgaacattggtgccgaactcatcaggtgcatcgtgcccacagggaacggaagtgtcgcactggagattgaggtggatggtttgtggtaccacatcggggttattggttacaacaaggccttcactcccgaattgatcagtattagtcaaagtgacgacatcctgacattcgcggtggcacagattagtggggccgccaatatagatatttttattggtatgagcccttgcgtgggggtaagcgggaatcatacagtgctccaatgtgtggtcccgtctctgcccgctggagagtaccatgtgaggggatacgattgtatccgaggctgggcgagttcggctttagtttttacttcacgggtgatcattacagccgttactgagaatttcggctgtctgggaggccgcctggtccacgtcttcggtgcagggttttcaccggggaatgtgtccgccgccgtatgcggagcaccctgccgagtcctcgccaacgcaacagtgagtgcgttctcatgcctcgtcctgcccctagatgtgagccttgctttcctttgcggcctcaaacgagaggaggactcctgcgaagccgctcgccatacctacgtacagtgcgatctcacagtggccatggctacggagcagttactcgagtcatggccctatctttatatatgcgaggaatcctcacagtgtcttttcgttcccgaccattgggctgaaagcatgttcccttctttcagtggcctgttcatctcccctaagctcgagagagacgaggtgcttatctacaactcttcttgtaatattaccatggaaacagaggcggagatggaatgcgaaacgccaaatcaacctatcacagttaagatcactgaaattaggaagcgttgggggcagaatacccagggaaactttagtctccagttctgtagacgctggagccgtacacattcctggttccccgagagacttccacaagacggcgacaatgtgacagtggagaacggacaactcttactgctggacactaacacatcaattctgaacttgcttcacatcaaaggcgggaaactcatcttcatggcaccaggcccaatcgaattaagggcccacgcaattctcgtgtcagatggtggggaactcaggattggatctgaagacaagccattccaaggcagggcccagattacgttgtacggatcttcctattcaaccccgtttttcccttacggggtgaagtttctggcagtgcgcaacggaacactgagcctccacggttcgctgcccgaggttatagtaacctgcctgagagcgacagcccatgccctcgacacagtgctggccctcgaggatgccgtggattggaaccctggagacgaggtcgtgatcatcagcggcaccggggtcaagggagctaagcctatggaagaaatcgtgactgtagagaccgtacaggacacagacctctacctgaaatctcccctgagatacagccataactttactgagaattgggtcgccggtgagcaccacattcttaaagcaacagtcgcactccttagtcgctctatcactatccagggtaacttgacgaacgagcgcgagaagcttctcgtgtcatgccaggaggccaacgctcctgaggggaacctacagcactgcctgtactccatgtccgagaaaatgctgggcagtcgcgacatgggagcaagggttatcgtgcagtcgttcccagaggaacccagccaggtgcagctgaaaggcgtgcaatttcaggtcctcgggcaggcctttcacaagcatttgtcctcactcaccttagtaggagctatgagggaaagcttcatccagggatgcacagttaggaattctttctctcgcgggctgagcatgtgcggaacactcggcctgaaggtcgactccaacgtgttttacaatatcctgggccacgcactgctcgtggggacatgtacagaaatgcgctatatcagctgggaggccattcacgggagaaaggatgattggtcaggacacggcaacatcatcaggaacaatgtgatcattcaggttagcggagccgaggggcttagcaatccggagatgttgactccctccggaatatacatctgctctcctacaaacgttatcgaagggaacagggtgtgtggagctgggtacggttattttttccatcttatgaccaatcagaccagccaagcaccactgttgtcatttacacagaatatagctcacagctgtactcggtatgggctctttgtgtaccccaaattccagcccccatgggataacgttactggcacgaccctgttccagagctttacggtctgggagagtgcaggaggcgcccagatctttcggtccagcaacctccgcctgaaaaactttaaagtctatagttgccgcgattttggcatcgacgtactggaatccgacgccaacacaagcgtaacagattccctgctcctcggccattttgcacacaagggcagcttatgtatgagtagcgggataaagaccccaaaacggtgggaactgatggtctccaacaccaccttcgttaacttcgatctgataaattgcgtggcaatccggacctgtagcgattgcagccagggccaaggcggatttaccgtaaaaacatcccagttaaaattcacgaactccagtaacttggtcgcttttccttttcctcacgccgcaattctcgaggatcttgacgggtccctgtctggaaagaaccggtctcacatccttgcgtccatggaaactctctcagcctcctgcctcgtgaacagttccttcgggcgcgttgtgcacggaagcgcctgcggcgggggcgtcctctttcatcggatgtctatcggactggcgaatacccctgaagttagctatgatctgaccatgacggacagcaggaataaaactaccaccgtcaactatgtccgtgacaccttgagtaatcctagaggctggatggccctgttgctcgaccaggaaacatacagcctccagagcgagaatctgtggattaacaggtcgctgcaatacagtgcgacctttgataactttgcccccggaaactacttactgctcgtgcacactgatctgcccccctatccagatattcttctgcgttgcggctcacgagtgggtctgagcttcccctttcttccgtctcccggacaaaaccagggctgcgattggttttttaattctcagttacgtcagctgacctacctggtatccggcgaaggtcaggttcaggtgatcttacgcgtaaaggaaggtatgccgcctaccatttccgcatcaacaagcgcaccagagagtgcactaaaatggagtttaccagaaacctggcagggggtggaagaggggtggggcggttacaacaatacaatccccgggcctggggatgacgtcttaatccttcctaatcgaaccgtattggtggatacggatctgccgtttttcaagggcctgtacgttatgggaaccctcgacttccctgtagatcggagtaacgtgttatcagtcgcttgcatggtgatcgctgggggagagctcaaggttggaactcttgagaaccctcttgaaaaggagcagaagctgcttattctactgcgggctagcgaaggcgtgttctgtgataggatgaacggaattcatatcgatccaggtacaataggggtgtatggcaaagtccatctgtacagcgcatatcctaaaaacagttggacccacttaggtgcagacatcgcttcaggtaacgaacgaatcatcgtcgaggatgccgtcgattggagacctcatgataaaatcgtgttgagctccagctcctacgaacctcacgaggccgaagtgctgaccgtaaaggaggtcaaaggccaccacgtgcgtatctatgaaagactgaaacaccgacacattgggtccgttcatgtgacggaggacggtcgccatatcagattagcagccgaggtcggactactgacacgaaacatacagatccagcctgacgtgtcttgtcgagggcggctgtttgtagggagctttcgtaagtcctcaagggaggagtttagcggcgtcctccagctccttaatgtggaaatccagaacttcggttcgcccctgtactcgagtgttgaattctctaatgtgtctgccggaagctggatcatctcgtcaacgttacatcagtcctgtggcgggggcatccatgcggcagcctcacacggcgtgctcctgaacgacaatatcgtttttggtaccgctggtcacggcatcgacctcgagggtcaagcttacacggtcacaaacaatctggtggttttgatgacacagcccgcatggtcaacgatttgggtcgctggaataaaagtaaaccaggtgaaggatatcaatctacatggaaacgttgtcgcaggctctgagcggcttggatttcatatcagaggtcataaatgctcctcttgcgaactactttggagcgacaatgtggcccattccagcctgcacggcctacacctgtataaggagagtggactagacaattgcaccagaatcagtggtttcctcgccttcaaaaatttcgattacggggccatgcttcatgttgagaactcagtcgaaattgagaatattactctggtcgataatacgattgggctgctcgcagttgtgtacgtttttagcgccccgcagaatagtgtgaagaaggtgcagattgtcttacgcaacagcgtcattgtcgcaacatcctcaagcttcgattgcatccaagataaggttaagcctcatagtgccaacctgacatcaaccgatcgtgccccgtcaaaccctcgcggaggcaggattggcattctgtggccagtgttcacaagtgaacccaatcagtggccgcaggaaccatggcacaaggtgagaaatgatcatagcatcagcggcattatgaaattgcaggatgtcaccttctcttcatttgtgaaatcgtgctactctgacgatttagacgtgtgcatcctgcccaatgcagagaattcaggcattatgcatcccattaccgcagagcgtaccaggatgctgaaaattaaggacaagaacaagttctatttcccgagtctgcaaccaagaaaagatctgggcaaagtagtgtgccctgagctggactgtgcttctcctcggaagtatctgtttaaagacttggacgggagagcactcggtttacctcccccagtgtcagtattccccaagaccgaagccgaatggacagcttcattcttcaacgcaggcaccaaagagcaatctatcgagatcaatgtatag

SEQ ID NO: 129191 - DNA, 12732 bp, synthetic construct
  misc_feature 1..12732: note = Description of Artificial Sequence: Synthetic coding sequence
  source 1..12732: mol_type = other DNA
atgggacacttgtggcttctcggaatatggggactgtgcgggctgctgctgtgtgccgccgacccttcaactgatgggtcccagattatcccgaaggtgacggagatcattcccaaatatggatccataaatggcgcgacgcgtctcacaatacgcggagaagggttttctcaggctaatcaattcaattacggggtggacaacgctgagctcggaaatagtgtgcaattgatatcatctttccagtctattacatgtgacgtggaaaaagacgcgtcacatagtacccagatcacctgctacaccagagcgatgcctgaggactcttacaccgtgcgggtgtcagtagatggggttccagtcacagaaaataatacctgcaaggggcatatcaattcatgggagtgtacattcaacgcgaagagctttcgcactcctaccattcggagcattacccctcttagcggtacaccaggcaccctcatcacaatccagggacggatctttacagacgtgtatggctccaacatagcgcttagcagtaacggcaagaatgtgcggatccttcgggtgtacatcgggggcatgccctgcgaactgctgattccacagtccgacaatctctacggcttgaagctcgatcacccaaatggtgatatggggagtatggtgtgtaagacaacaggcacattcattggtcaccataacgtctcatttatcctggacaatgactacggcaggtcatttccccaaaaaatggcttacttcgtgagttcactgaataagatcgctatgttccagacttatgccgaggttactatgatttttcccagccaaggcagcattcgcgggggaacaacgcttacgatttcggggcgtttttttgatcagacagatttcccagtccgcgtcctggtcggaggtgaaccctgtgacattctgaacgtcactgaaaactctatctgttgtaagacccctcccaagcctcacattttgaagaccgtgtacccaggcgggcgtggcctgaaactcgaagtgtggaacaatagccgtccaatcagactggaggagatccttgaatataacgagaaaactcctggctatatgggggcaagttgggtggacagtgcaagctacatttggctgatggagcaggacacattcgtcgcgaggttctctggctttctcgtagcccccgacagcgacgtatacagattctatatcaaaggggatgacagatatgccatctacttttcccagaccggtctcccagaggacaaggtgaggatcgcttaccatagcgcaaacgccaacagctactttagtagtcctacccaacgttccgatgacatacatctgcagaaagggaaggagtactacatcgagatactcctccaggaataccggctctcagctttcgttgacgtggggctgtaccagtaccgaaatgtttacaccgaacagcagactggcgatgccgtgaacgaggaacaggtaattaaaagccagagtacgattctacaggaggttcaggtgatcacgcttgaaaactgggaaacaacaaacgctatcaatgaagttcagaaaatcaaagtgactagcccctgtgtcgaagcaaatagttgtagcctctatcaatacagactaatatacaatatggaaaagaccgtttttctgcccgcggatgcctcagagttcatactgcaatcagccctgaacgacctgtggtctattaagcccgatacggtgcaggtcatacgcacacagaacccccagagctatgtttatatggtaacttttatcagcacccggggggatttcgatctactgggctacgaagtggtggaaggaaacaatgttacccttgacattactgagcagactaaaggaaagccgaaccttgaaactttcaccctcaattgggatggaatagccagcaagccactaacactgtggagtagcgaggccgaattccagggcgcggttgaggaaatggtgtcaacaaagtgtccacctcaaattgcaaacttcgaggaaggtttcgtcgtcaagtattttagggactacgagaccgatttcaacctcgagcatattaaccgggggcagaaaacagcagaaacggacgcctactgtggcaggtactctctcaaaaatcccgccgtcctcttcgactcagctgacgtcaaaccaaaccggaggccctacggagatatactgttgtttccctataaccagctctgcctagcatacaaagggtttttggcgaattacatcggactgaagttccagtatcaagataacagcaaaatcaccaggagcactgacacacaattcacctataattttgcatacggaaataattggacctacacgtgtatcgacctcttggatctggtacgcactaaatacaccggaaccaacgtgagtctacagagaatctctctccacaaggcgagcgagtcccaatccttctatgtggacgtcgtctatattggacacacttcaacaatcagtacactcgatgagatgcctaagcggcggcttcccgctctagccaataagggaatcttcctcgagcatttccaggtaaaccaaaccaaaactaacggcccaacaatgacgaatcaatacagtgtaacaatgacctcctataactgcagctataatatacctatgatggccgtctcgttcggtcagattatcacccacgaaaccgagaacgaattcgtgtatcgaggaaacaactggccaggtgagtccaagatccacatccaaagaattcaggctgcttctccaccactgtctgggtcttttgatattcaggcttacggtcacatcttgaagggcctgcctgccgcagtgagcgccgcagacctacagttcgcgctgcaatctctggaggggatgggccgaatctcagtgaccagagaagggacgtgcgcgggctatgcatggaacatcaagtggcggagtacttgtgggaaacagaacctcctgcagataaatgattctaatataattggcgaaaaggccaacatgacggtaactcgtataaaggaggggggcttgtttcgacaacacgtcctaggcgaccttcttcggactccaagtcagcagccccaggtggaagtctatgtgaacggcatccccgccaagtgttcaggtgattgtggcttcacctgggattcaaacatcacccccttggtcctcgcaatcagccctagccagggctcctatgaggaaggcacaatcctgacaatcgtaggaagtggattctccccctcaagcgcggtcaccgttagtgtcgggcctgtagggtgtagcctcctgtcggtcgatgagaaagaactgaagtgccagatcctgaacgggtcagcaggacacgcaccagttgccgtgtccatggcagacgttggcctggcacagaacgtgggtggtgaggagttctattttgtgtatcagtcccagataagccacatatggcctgattcagggagcatagccggagggactctgctgactctttccgggttcggatttaacgagaatagcaaggttctcgtgggaaatgaaacctgtaatgtgattgagggagaccttaaccgtattacatgtagaacccctaaaaagacagagggaacagttgacatttctgttaccaccaacggatttcaggccactgcacgagatgctttctcttataactgtctccagacgccaattataaccgacttctctcctaaggtgcggactattctgggcgaggttaatctgacaataaaggggtataatttcggaaacgaattaactcagaatatggccgtctatgtcggaggcaagacgtgccagatcttgcactggaactttaccgacattcggtgcctcctccctaaactttcacccgggaaacacgacatctatgtggaggtgcgtaattggggtttcgctagcacccgggataagctgaactccagcatccagtatgtcttggaagtgacatctatgtttccccaacgaggatctctgtttgggggcacagagattacgattcggggatttggcttttcaacaattcccgctgaaaacaccgttctgctgggcagtattccatgcaacgtcacatcctccagcgaaaacgtcataaagtgcatcctgcacagcaccggcaacatatttagaataactaataatggaaaggacagcgtccatggattgggttatgcttggtccccgcccgttctaaatgtttccgtgggcgataccgtggcctggcattggcagactcatcccttccttcgggggatcgggtacaggattttttccgtgagcagtccgggtagtgttatctacgatgggaagggcttcactagcggccggcagaagtccacttcaggatcgtttagttatcagttcacgtctccaggtatccactactactctagtgggtacgttgatgaggcacatagcatcttcctgcagggcgtcatcaatgttctaccagcggaaacccggcatatccccctccatctgttcgtgggacggagtgaggcaacctatgcctatgggggaccagaaaacctgcacttagggtctagcgtggctggttgcctcgccacagagcctttgtgtagtttgaataacacccgtgtcaagaactccaagagactgctttttgaggtcagctcatgcttctccccaagcattagtaacatcactcctagtactggtacggttaatgagctaatcacaattatcggccacggcttcagtaatctgccctgggccaacaaagtcacaatagggtcatatccatgtgttgtcgaggaatcatccgaagacagcatcacctgccatatcgatccccagaatagtatggatgtcggtattcgggaaaccgtcaccctgaccgtgtataatctggggaccgctatcaatacactgtctaatgaattcgatcggaggtttgtcctgctccctaacatcgacctggtgttgccgaatgcaggaagtactactggcatgacaagcgtaactattaagggctctggattcgcggtgtccagtgccggtgtcaaggtgctcatgggccactttccctgtaaggtactttccgtgaactatacagctatcgagtgtgagaccagtcccgctgcacagcaactcgttgacgtcgatctgttgattcacggggtcccagcacagtgtcagggcaactgcaccttttcctacctggaatctattacaccttatataacaggcgttttccccaattctgtgatcggcagtgtcaaagtgctgattgaaggagaagggttgggcacagtcttggaagacatcgccgtgttcattggtaaccagcagtttcgggcaatagaggttaacgagaataatattactgcgctggtaacacccctgccggtgggtcatcactcggtatccgtcgtggtcggcagcaagggactagccttaggaaacctcactgtgtcctctcccccagttgcaagtctgtcaccgacgtccggctccattggcggaggaactactctggtgatcaccgggaacgggttctaccccggaaatacaaccgtgaccataggagacgagccctgtcagattatttcaattaacccaaacgaggtgtattgtcgaacgccggcgggaaccactggcatggttgacgtgaagatcttcgtgaacacaattgcttatccacccctgctgttcacatatgcattagaagatacccctttcctgagagggatcatcccaagccgagggcctccaggtacggaaatcgagatcacggggtccaattttggctttgagatcctagaaataagcgtcatgatcaataacatacagtgcaacgtgaccatggccaacgactctgtggtgcagtgcattgtcggggatcacgcggggggcacattccctgtcatgatgcaccataagaccaaagggtcagcaatgagcactgtagttttcgagtatccgcttaatattcaaaacattaacccgagtcaggggtcatttggaggcgggcagaccatgacggtaacaggtacgggtttcaacccacagaacagcatcatcctcgtgtgtggctctgaatgcgcaattgatagactcagatctgactatacaactttgctgtgcgaaatcccgtcaaataacggtaccggagctgaacaagcgtgtgaagtgagtgtggtaaatggcaaggacctcagccagtcaatgactccgtttacatatgctgtctctcttacgcctcttattacagccgtcagtccgaagagaggttctacagctgggggtacaagattgaccgtcgtggggagcggtttttcagaaaacatggaagacgtgcatattaccatcgccgaagctaagtgcgatgtggagtactctaataagacccacatcatctgcatgacggacgcccacacactgtcaggctgggctccagtgtgcgtgcacatcaggggcgtgggaatggcaaaactggataatgcagactttctctatgtggatgcttggagcagcaacttctcatggggagggaagagtccgcccgaggaggggtcgctggttgttatcacaaagggacagacaatcctgcttgaccagtcaactcctatcctcaaaatgctgctcatccagggaggaacactgatttttgatgaagcagacattgagctccaagccgaaaatatccttataacagatggaggcgttctgcaaattggcaccgagacgtcaccatttcaacacaaagccgtcattactctgcatggccatctaaggagtccagaactccccgtgtatggtgctaaaacacttgctgtgagggagggcattctggacctgcatggtgtgcccgtccctgtcacgtggacccggcttgcccatacggctaaggccggcgagcgaatcctgattctccaggaggccgtcacatggaagcctggcgataacatcgtcatcgccagcacagggcaccgacatagccagggggagaatgagaagatgactatagctagcgttagcgctgacgggattaacattacactgtctaatcctttgaactatacccacctcggaataacagtcacattgcctgatggcacattattcgaagccagggcggaggtaggcatactaacaagaaatatccttatcagagggtcagataacgtggaatggaataacaaaatcccagcatgccctgatggcttcgacacaggagaatttgctactcagacgtgtttacagggcaaattcggcgaggagattggctccgaccaattcggaggctgcgtgatgttccatgctccagttcccggcgccaacatggttaccggtcgcatcgaatatgttgaagtatttcacgcaggccaggcgtttagactgggtagatacccaatacactggcacttgcttggagacttgcaattcaaatcgtatgtccgcggctgtgcaattcatcaggcctataacagagccgtgacaatccacaacacacaccatctcctcgtggagcgcaacatcatctacgacatcaaagggggagcgttctttatagaagacgggattgagcacggtaacatcctccagtacaacttggccgttttcgttcagcagtcaactagcctgctgaatgacgacgtcacaccagccgctttctgggtgactaacccaaacaacacaattcgccataacgccgtcgctggagggactcattttggcttttggtacaggatgaacaatcaccccgatgggccttcctatgacaggaatatctgccagaagcgagtgcccttgggcgagttctttaacaacacggtccatagtcagggttggttcggaatgtggatcttcgaggagtactttccgatgcagactggaagctgtaccagtactgtcccggcccctgccatttttaatagcctcacaacgtggaactgtcaaaagggcgcagaatgggtaaatgggggagccctacagttccacaattttgtgatggttaacaattacgaagcaggcatcgagaccaagcgtattctggccccttatgtgggtggctggggagagactaacggagcagtgatcaagaacgccaaaattgtcggccacttggacgagttagggatgggatctgcattctgtacggctaagggcctcgtgttaccattttctgagggcctgacggtgtctagcgtccactttatgaactttgacagaccaaattgcgtggcgttgggtgtgactagcatctctggggtctgcaacgacagatgcggaggctggagtgcaaagttcgtggacgtgcagtactctcatacacctaataaggctggattccgttgggagcacgaaatggtgatgatcgacgtggatggatcactgaccggccacaaaggacacacagtcattccacattctagcttgcttgatccatcacattgtacgcaggaggcagagtggagtataggctttccgggctctgtgtgtgacgcgtcggttagtttccaccgtctcgcgttcaaccaaccctcaccggtctcgctgctggagaaagacgttgttttatccgatagctttggaacctccattattccttttcagaaaaagaggttgacccacatgtccggctggatggctcttatacctaacgccaatcatattaactggtactttaaaggggtggaccatatcactaatatcagctatacctccactttctatgggtttaaagaagaagattatgtcattatttcacataattttactcagaaccccgacatgttcaacatcatcgatatgcggaacggatcaagtaaccctttgaactggaacacgtccaaaaatggggattggcatttggaagccaacactagcacactgtactatctagtctcagggaggaatgatctgcaccaatctcagttgatcagcggaaacctggaccccgacgtcaaggatgttgtgatcaatttccaggcttactgttgcatcctccaagactgttttccggtgcacccgccgtcccgaaaacccatccccaagaagagacccgcgacgtataatctctggagcaatgacagcttctggcagagctctcgagaaaacaactatactgtgcctcaccctggcgctaatgtcattatccccgagggcacatggattgttgccgacatcgacatgccttctatggagaggctcatcatttggggggtccttgaactcgaggacaaatataatgtgggggccgctgagtcctcttatcgggaagtggtgttaaatgccacttacatttccttacaggggggccggttaattggcgggtgggaggacaatccatttaaaggcgatttaaagatagttttgcgcgggaaccacaccacccaagactgggccttacctgaggggccgaatcagggagccaaagtgctgggcgtgtttggggagctggatttacacggaattcctcattcaatatataagacaaagctgtccgaaaccgctttcgcgggtagcaaggtgttgtccctgatggatgcagtcgattggcaagagggcgaggagatcgtgattacgaccacatcctacgatttccatcagactgagacccggtcgattgtgaagatactgcatgaccacaagatcctgatcctcaacgattcactgtcatatacccacttcgccgagaaatatcacgtaccgggcaccggcgagtcttatacattagccgctgacgtgggcatcctttctagaaacattaagatagtgggcgaggactaccctgggtggagtgaggatagctttggggccagagtgcttgttggttcctttaccgaaaacatgatgactttcaagggcaacgcgagaatttccaacgtggagttctatcacagtggccaggagggtttccgtgacagtacggatccaaggtatgctgttacatttctgaatctgggtcaaatccaggagcacgggagctcctacattcgaggctgtgcgttccaccacggcttctctcccgccatcggcgtgttcgggactgatggactggacatcgacgacaacattattcattttacagtcggagagggtatccgcatctggggcaacgcgaaccgggtccggggaaaccttattgcgctatcagtatggccaggcacctatcaaaacaggaaggatctctctagcactctctggcatgcagccattgagatcaatcgggggacaaacacagtcctgcagaacaacgtagtcgccggcttcggtcgggctggatacagaatcgatggcgaaccttgccctggtcagtttaatccagtggagaagtggtttgataatgaggcccatgggggtctttatggtatttatatgaatcaagacggtttgccaggatgctcactgatccagggattcactatttggacatgttgggactatggaatctatttccagacaacggagtctgtccatatttacaacgtaactcttgtagacaacggcatggccatcttccccatgatctatatgcccgcggctatctctcacaagatatcatctaagaatgtgcagattaaaagtagccttatcgtaggatcttccccaggattcaattgttccgacgtgctaacaaatgacgaccccaatattgaacttaccgcagctcataggtcaccgcggtcgccttccggaggaagatccggcatctgctggcccaccttcgcttctgcacacaatatggcgccacgcaaacctcacgccggaatcatgtcctacaacgcaattagtggcttgcttgatattagtgggtcgacatttgttggctttaaaaatgtatgttccggagagactaatgttatcttcattaccaacccactaaatgaggaccttcagcaccccatacatgtgaagaacatcaagctggtggacaccaccgaacagtctaagattttcatacatcgtccagatataagtaaggtcaatccatctgactgcgtcgatatggtttgcgacgccaagcgaaaaagctttctgagggatattgacgggagctttctgggtaatgcgggctctgtcataccccaggccgaatatgagtgggatggcaactcccaggtgggcataggtgattatagaattcccaaggctatgttgacttttctcaacggctcacgcatccctgtcaccgaaaaagcccctcacaaaggtattatccgcgactccacctgtaaatacctgccagaatggcaatcatatcagtgcttcggaatggagtacgccatgatggtcattgaatctctcgatcccgacacagagacgcggcgtttgtcaccggtggctatcatgggaaacggatacgtagacctgattaatggtccacaggaccatgggtggtgcgctggctacacttgccagcgccgtctttcattgtttcatagcattgtggccctgaacaaatcctatgaggtctatttcaccggaacttcaccacagaacctgagattaatgctgctgaacgttgaccataataaggcggtcctcgtcggaatttttttctcaaccctccagaggcttgatgtgtacgtgaacaacctgctggtgtgtccgaagacaaccatttggaatgctcagcagaagcattgcgagctgaataatcatctctacaaagaccagtttctgccgaacctcgattcaactgtgctgggagaaaactacttcgacgggacttatcagatgctatacctgctggtgaaaggcaccattcctgtggagatccacacagcaacggttattttcgttagttttcagctgtccgtggcgacggaagacgatttctacacaagccataatctagtaaagaatttggccctcttccttaaaattccctccgataagatacggatctcaaagatcagggggaagagcttgcggcggaagcgaagtatgggctttataatcgagatcgagattggcgaccctcccatccagttcatttctaacggtactaccgggcagatgcagctcagtgagctgcaagagattgcaggaagtctgggacaagccgtgattcttggcaatatttcgagtattctgggctttaacatctcttccatgagtattacaaaccccttacccagtccttctgatagcgggtggatcaaagtgactgcccagccggtggagagaagtgcttttccagttcatcatgtagctttcgtgtccagcctgctcgtcattacacagcctgtggccgcacagcctggacagcctttccctcagcagccaagtgtgaaggccactgacagcgacggcaattgcgtcagcgtgggcattactgccctgaccctccgcgccatactgaaggactctaataacaaccaagtgaacggtctgagcgggaataccaccatcccattcagtagctgttgggctaactacactgatctgacgcccctgagaaccggaaagaactacaagatcgaatttatccttgacaacgtggtaggtgtggaatcgcgcactttttccttgctagccgaatccgtgagcagctcgggttcatcctcctcgagtaactcaaaagcgtcgaccgtggggacgtacgcacaaatcatgaccgtcgtgatcagctgcctcgtgggaaggatgtggctcttggagatcttcatggcagctgtcagcactttaaacatcaccctgcgaagttattag

SEQ ID NO: 129192 - DNA, 6762 bp, synthetic construct
  misc_feature 1..6762: note = Description of Artificial Sequence: Synthetic coding sequence
  source 1..6762: mol_type = other DNA
atgaggcctgggcccgctctcctcttgctgggtgtggggttgtcactaagtgtaggcaggctgcctcttccaccggtgccacggggagcccaggcggccgtctcgggagccccaggggggctgcttaggggagccccagggttgggagtcaggggcggccgggccttgttgagcctccgaccttcagcggtgagagccggcggcgccgtcctctcaggcaggggtagtctctgttttccgcacgggggcaccggaaggcggtggtattgtctagacctccgcgtgctgttgtcagctcaacgccttccatggccggctgccccagccctggccctcgtagaccttcagctttcagctcgaggtggaaggctatccctaacatggtctgtgcggttgcctaggagtcccgggcggctcgcgtgggctttcaggctcaggctgctcgggcccggagctgcccgtcctgcttcacctgcggcacgggtgtccccaagaagtgcagcccctggcccccggcctcaacagggattcgtcgccaggaccgaatgtcccacagatggcccagcaagggtgatgctgcaggccgtgaatagtagtagccacagggcggtcgagagttcagtctcatgtcaaattaacgcctgtgtgatccagcgagttcggatcaatacggaccagaaaggcgctccagttcggctgtcgatgcaggccgaggccaccataaacgcgtccgttcagctggattgtcctgccgcaagggccatcgcccagtattggcaagtatttagtgtcccagctgtcggccaggcacccgactggacacaacccttggatcttcctcaactggagatcagaaactcaccgctctttatccacattccaaacaacagcctgcagtggggtgtgtatgtgttcaattttacagtgtcaatcaccaccggaaacccaaagatgccagaggtgaaagatagcgatgctgtctatgtgtggatcgttagatcttcactgcaagctgtaatgctgggcgatgcaaacataaccgctaacttcacagagcaactcatcctcgacggatcaacttcttccgatcctgacgcagattcccccctccagggtctgcagtttttctggtactgcaccacagaccccagaaactacggtggggacaggatcattctcggttctaaagaggtttgtcacccggagcaggctaacctgaaatggccctgggcctcagggccagtgttgactctgctccctgagactttaaaaggtgatcacgtctacttcttccgaatggtcatcagaaaggactcccgtactgcttttagcgacaagagggtgcatgtgctccaaggccccaaggccatcgcccacatcacatgcatcgaaaactgcgaaaggaacttcatcgtgtccgaccgattctctcttttcttgaattgtaccaactgtgcctcacgagatttctataagtggtccattctcagctcttccggtggggaaatgttatttgattggatgggcgaaactgtgacaggtcgcaacggcgcttatctatctatcaaagctttcgccttccgccattttctagaggcagagttcagcatctctctgtatctggcctgttggtccggcgtgacaagcgtttttcgtcattcctttattattaatcatggccctcagatcggggagtgcaagattaacccggccaagggtattgcactgattacgaagtttgtagttcagtgttctaacttccgggataagcacgttccgctcacttacaagatcattgtgtccgaccttcacagtgtgggtgaaatctctagcgtgaaagagaatactctgggcactattttatacttgggcccccagagcaccgtccccccgtccttcctcccagtggggatgcttgcgtcacagtacgggcttaaaatctatgcccaggtgtacgactcactcggggcttttagccaggtgacgctgcatgcgactgcacaggccccaactgataagaattcgtctaagaccgttctaaaccagctgttgtcgtttaccgttggcccctccagcttactctcgacacttattcaaaagaaggattttctaccggctggatacctgctgtacattgttgcaagcgtcctcaacaacatgaagacagagctacctcttcgtgatgatcgcgtgaacctgcgaaaacacttgattgatcagtccttcctgctaccagtgtccaccctggtcgaaattggccaagttgtgatgactataactaaactcactcagaagcccagcgagttcacatgggacgcacagaagcgggccaccatgcgcgtctggcaggcaaatcaagccctgcaggagtatcagcaaaaagacaaaaggttcagaagcgagcagatagaaatcgtcagcacaggcatactcatgtccctgtccaatatactgaagatgacttccccacatcaggtggtgaaggaccctttttacgtcatagaaagtctgtcggacactattctggctaataaagtgcccggaaacaagacgacctcaatgcgaactcccaattttaatatgtacgtgaaaaaagtggagaagtgggggattaaccagctgtttcgcaacgaaaaacattgccgtaactgcttctaccccacacttaacgtgtcaagcgtgccaggactatctgcaaatggtcccataagcaccatgttttgcgacttcacaaatgatctctttccttggttgaacgatcaggaaaacacatccgttgaagtgtcagggtttaggatgactggagtggcagacaacggtagtgtgctggagatcactcctgacgtggccgaggtctacctcgttcgaaaaaatcttacattcgctgcattcaatctgactgtgggaccaaacagcgaagtggatggcagtctgaaaaaaaccacgggaggctttagcttccaggtggacagtactgttctgcgcgaggttctggtacacattgtaacggaagtgatggtcttgttcaccgtgttagtatatactggcagccagattacacctacagcccttgtcgcaaccttcctggtgccacatgatattcctccttttgccagccagtctgcactgttcgaccctgcctgcactgtcaagaaggcccgggttgtctgtctccctgtgtcccttctgcaattgatagcacagcacagtcactccccccactgcacagtcagcattgtgttgcaggcccccaggttcgtgatgaagctgaatgataagctggttagaatctcaattttctcagtccagtgcttggacatgtacggcatccagagcgagtggcgagaggggtactgtattctaggcgagaagacatcatggtatgaagtccactgtatctgcaagaacgtggtgagagcacgccgacagctcggaactataggcctaacaggtattcatcttcacactcattacgtcatggcaaaagtgatcgttatccctaacccagtggacctacgactgaatatcatcaaatcattgcatcagaaccccgtgactctttttacggtgctgttcattattttgctctatgttggactggcattttgggccctttaccgagacgagatggaccagcacctgcgaggccacgtcatcgtgctaccggataatgacccttacgacaacttgtgctatctcgtgacaatcttcactggctcacggtggggctccggcactcgcgccaatgtgtttgtccaactacgtggcactgtttcaaccagtgacgtccactgcctgagccatccccattttacaacactgtaccgtggatccatcaacactttcctgcttaccacaaaatcagatctaggcgacatacacagcatcagagtttggcataacaatgaaggtcgttcaccatcctggtatctgtctagaataaaggtggagaacctgttctctcgccatatctggctgttcatctgtcagaaatggttatccgtggatactaccctggatcgaacctttcatgtgacccaccccgacgagcgtctcacacggaaagatttcttctttatagatgtttcctctaacctgaggaaaaatcatatgtggttctcaattttcgcctccgtggtggcgaagacctttaatagactacagagactgagctgctgcttggccatgttattgagttccttgctgtgcaacattatgttttttaacctcaacaggcaggagcagaccgaatcccgggagcggaagtacatgaggagtatgatgataggaatagaatccgttctgatcaccatccccgttcaacttctcatcactttcctgttcacgtgttcccagaggaagccacaggctgatttaaaagaggtcagccctcaaaagcatcccctgatgtcagaagcatctgagcactgggaagaatatctgcgcaagtggcatgcttacgagaccgccaaggtgcatccgagagaggtcgccaagccagcatcaaaaggaaagccgcggcttccgaaggcctctcccaaggccacctcgaagccaaagcaccggcacagaaaggcccagattaagactcctgaaaccttaggccccaacaccaatagcaataataacatcgaagacgaccaggacgttcattcggagcagcatccctctcaaaaggacctccagcagctgaagaaaaaacctcggattgtccttccctggtggtgtgtttatgtggcatggtttctggtttttgccaccagttccatttcctccttttttatagtgttctacggattgacttatggatatgataagagtatcgagtggctctttgccagtttttgcagcttttgccagtcagttctgctggtgcagccttcaaagataatactattatccgggtttagaaccaataagcccaagtactgcaagaatctctcctggtcgaccaaatataagtataccgaaatcaggctggacggcatgcgcatgcatcccgaggagatgcagaggatacatgaccagatcgtgcgcatccgcggaaccaggatgtaccagccgctgacagaggacgaaatacgaatcttcaagcgtaaaaagcgaattaagagacgggccttacttttcttatcttacattcttacccatttcatcttcctggccttactcctgattctcatcgtgcttctccggcatactgactgcttttattataaccagttcattagagatcggttttcaatggatctggcaaccgtaaccaaactcgaagacatctaccggtggcttaactccgttttgctgcctcttcttcataacgacctcaatcctacttttttacctgaatcaagctcgaagatactgggccttccactgatgcgccaggtgcgagcgaagagttccgagaagatgtgtttgccagcagaaaaatttgtccagaattcaatccgaagggagatacattgtcaccccaagtatggcatagaccccgaggacaccaaaaattactcagggttctggaatgaagtagataaacaggcgatcgatgagtcaactaacgggtttacttacaagcctcagggcacacagtggctctactacagttacggattactgcatacctacgggagtggtggttatgccctgtacttctttcccgaacagcagagatttaatagcacattgcggctcaaggaactgcaggagtccaattggcttgacgaaaaaacatgggcggtagtgctggagttgaccacatttaaccctgacattaacctcttctgtagcatctcagtgatctttgaagtttcacagcttggggtggtgaacaccagtatatccctccacagcttttctctggcagattttgacaggaaggcaagtgcagaaatctatctatatgtcgcgatactcatcttctttctggcatacgtggtggacgaggggtgtatcattatgcaagaaagagcctcttacgttcgttcagtttacaatctgttgaatttcgcgctgaagtgtattttcacagtcctgatcgttttgtttctgagaaagcactttctagccaccggcattatacgcttttacctgtcaaatccagaagacttcatcccgttccatgccgtgtcacaggtggaccacattatgcggattatactgggattcctcctgttcctcacaatactgaagacccttaggtactctaggttcttctatgatgtgagactggcacagcgggcgatccaggccgccctgcctggaatctgtcatatggccttcgttgtgtccgtctacttttttgtgtacatggctttcggctatttggtgtttgggcagcatgaatggaattatagcaacttgattcattcaacacaaaccgttttcagttactgtgtgagtgcctttcagaacaccgagttcagcaataacagaatcttaggcgtcctattcctgtcttctttcatgctggtgatgatttgcgtgctcattaacctattccaggcagtgattctcagcgcttacgaagagatgaagcaacctgtgtatgaggagcctagcgatgaagtggaggccatgacatacctgtgcagaaaattgcgcactatgtttagcttcctgacaagccaatcaaaagctaaggatgagcctgagttcttcatcgatatgctgtatggccagcctgaaaaaaactcccacaggtatcttggacttaaaacccgtaatattaacggtaagaaaatggtgtatttggtggtgtag

SEQ ID NO: 129193 - DNA, 12912 bp, synthetic construct
  misc_feature 1..12912: note = Description of Artificial Sequence: Synthetic coding sequence
  source 1..12912: mol_type = other DNA
atgcctcctgcagcgcccgcacgcctcgctctggcactcggactaggactgtggctcggggccctagcaggagggcctggtagagggtgcggtccctgcgagccgccatgcctctgtgggccagcgccaggagcagcctgtagagtgaattgctcaggccggggtctgcgcacactcggtccagctctgcgtattcctgccgatgctacagccctggatgtttcacacaacctcctaagggcccttgacgtgggtttgctggcaaacctctcagcactggccgaactggatattagcaataataaaatctccaccctagaagaaggtattttcgcaaatctatttaacctgtccgaaattaaccttagcggcaatcccttcgaatgtgactgcggcctggcttggctgccccggtgggccgaagagcaacaggtgagagtggtgcagcccgaggccgccacatgtgctggacctgggagtctcgctggtcagcccctgctggggatccctctcttagacagtggttgtggtgaggaatatgtagcttgtttacccgataattcttcgggtactgtggccgctgtgtcttttagtgcagcacatgagggtcttctgcagcctgaggcctgctctgccttctgtttttctactggtcaggggctcgccgccctgagcgaacagggttggtgcctgtgcggcgccgctcagccaagctccgctagctttgcatgcctgagcttgtgctcagggcctccacccccgccggcgcctacttgccgagggcccacactgctccagcatgtctttcccgcctcacctggagccactcttgtgggcccccacgggccgttggcttccgggcagcttgccgcgttccatattgcagctccactgccagtgacagccacgcgatgggatttcggcgatggaagtgccgaagtggacgctgcagggcccgcagcctcgcatcggtacgtcttgcctgggcgttaccatgttacagcagtgctcgccttaggagctgggagtgctctgctaggcaccgatgtacaggtcgaggcagcccccgcggcccttgagcttgtttgtccaagctctgtgcaatctgatgagtcactggacctgtccattcaaaatcgtgggggatctggccttgaggccgcctatagcatcgtggctcttggagaggaacccgcgcgggcagtccatccactgtgtccctctgatacggaaatcttccccggcaatggtcattgctacaggctagtcgttgaaaaggctgcctggctgcaggcccaggagcagtgccaggcctgggccggtgctgccctcgcaatggtcgacagtccggccgtccagcggttcctcgtttctagagtgacccggtcgctggatgtgtggatcggcttctccacagtacagggcgtcgaagtcggccctgcccctcaaggagaagcattctctcttgaatcttgtcagaactggctgcctggcgaaccacatcctgctacagccgagcactgcgttagactgggtcctacaggatggtgcaacacagatctctgctccgccccgcactcttacgtttgtgaactgcagccaggcggccccgtgcaggacgctgagaatctcctggtgggagctccctctggagaccttcaaggaccactgacgcctctcgctcagcaggacggattgagtgccccacacgaacccgtggaggtgatggttttcccaggcctgagactctctcgggaggcattcctgacgactgccgagttcggcacacaggaactccggcgacctgcacagctgaggctacaggtttatcggctgctgtcaaccgctggtacaccggaaaacgggtctgagcctgagtccaggagccccgacaaccggactcagctggcacccgcctgcatgcctggcggccggtggtgtccgggagcgaatatttgtctgcccttggatgcgtcttgccaccctcaggcctgcgccaacggctgtacttctggtccaggtctgcctggcgcaccctatgccctgtggcgagaattcttgttttccgttcccgccggcccacccgcgcaatatagcgtgaccttacacggccaggacgtgctgatgctacccggtgacctggtcggtcttcagcacgatgccggtcccggggctctgcttcattgttccccagccccaggacatccaggtccccgggccccttatctgtcagcaaatgcaagctcctggctgccccatttgccagcccaactcgaaggtacttgggcttgcccggcatgcgctttgcgccttctggccgcaacagagcagctcaccgtcctcctggggcttcggcccaaccctgggctgagacttcccggccggtatgaggtcagggccgaggtgggcaatggtgtttcccgccacaacctatcctgttcattcgacgtggtgagtcccgtggccggcctgcgggtgatctatcccgcacccagggacggacggttgtacgtgcccacaaatgggtccgctcttgtgctgcaggtcgacagcggcgccaatgccacagccaccgctcgttggccaggcggttccgtgtccgctcgatttgagaacgtctgcccagcacttgtggcaacatttgtccccgggtgcccatgggaaactaatgataccctattcagtgtggttgccctgccctggttgtctgagggagaacatgtcgttgatgtcgtcgtagaaaattcagcctctagggctaatctctcactgagggtcaccgccgaggagccaatttgtggactgcgggcgaccccatctcccgaggccagagtgttgcagggcgtgctcgttagatattctcccgtggtagaagcaggatctgacatggtgttccgatggaccattaacgacaaacagtccttaacgtttcaaaatgtggtgttcaatgtgatttatcagagcgccgccgtctttaaattgtctctcactgccagcaaccatgtgtccaatgtgaccgtgaactacaatgttaccgtggagagaatgaatcggatgcagggactgcaggtgtctaccgtgcctgctgtattgtcgcccaacgcaacattggctctaacagccggagtgctggtggattcagccgtggaagtggccttcctgtggacctttggggatggagagcaggctctgcatcagtttcaaccgccgtataacgaatcattccctgtccccgacccgtcagttgcccaggttcttgtcgagcacaatgtgatgcatacttacgctgcccctggagaatatctcctgacagttctcgctagcaatgcttttgaaaatctcactcagcaggtacctgtgtctgtgcgagcaagcctcccctctgtcgcagttggcgtgtctgatggcgtgctcgtggctggacgccccgtgacgttctatcctcatcccctgcccagcccagggggcgtcctatacacctgggattttggggacggtagtcctgtgctgacccagagtcaacccgctgcaaaccatacatatgccagcagaggaacctaccatgtgcgactagaggtgaacaacaccgtgtctggcgccgcggcccaggccgatgtgcgcgtgtttgaagagctgcgcggtctatccgtcgatatgagcctggctgttgagcagggcgctcctgtggtggtaagtgccgccgtgcaaaccggggataatattacctggacattcgacatgggagacggtactgttctgagcgggccagaagccaccgtcgagcacgtttacctgcgggcacaaaactgtactgtgacggtcggggcggcatcccccgccggccatttggccaggagcctccacgtactggtgtttgtcctggaagtcctgagggtggaaccagctgcctgcatccccactcaacccgatgctcgtctcacagcctatgtcactggtaacccagcacactatctctttgattggacttttggcgatggatcctcgaatacgacagtaagaggatgtccaacagtcacgcataattttacacgatctggaaccttcccactggcactggtgctcagctctagggtgaaccgcgctcattacttcaccagtatctgcgtggaacccgaggtgggcaacgtcacactccagcctgagaggcagtttgtccagctgggggatgaagcatggctggtggcctgtgcttggcccccctttccataccgatacacctgggacttcgggacagaggaggccgcacccacacgcgcacgtggccccgaggttaccttcatttatagggaccctgggagctacctggtaacggtcaccgccagtaataatatctctgccgccaatgattctgccctagtcgaggttcaggaacctgtcctcgtcacttccatcaaggtgaatggctctttggggttggaacttcaacagccatatctgttttcagctgtcggacggggcaggcccgcatcttatctttgggatctgggagatggaggttggctcgaagggcctgaagtcacacacgcctataatagtactggagattttacagtcagggttgccggctggaacgaggtctctcgcagcgaagcctggctcaacgtgacagtaaaaagacgagtgcgcggcctggtggtaaacgccagcaggacagtggtcccactgaatgggagcgtttctttctcgacaagcctcgaggctggctctgacgtgcggtattcttgggttctttgcgaccgttgtacccctatcccaggtgggcccaccatttcctatacctttagatccgttgggacctttaacatcatagtgacagctgaaaacgaagtgggctcggcccaagattcgattttcgtttatgtgttacagctcatcgaaggcctacaggtggtggggggcgggcggtattttccgacgaaccacacagtgcagctgcaggccgtcgtaagagacgggacgaacgtttcttatagctggaccgcatggcgggatcgtggccccgcgttagccgggagtggcaaaggattctctctgacggtactggaggccgggacctaccatgtccagcttagggccacaaacatgttaggtagcgcttgggctgattgtaccatggactttgtcgagcccgtggggtggctgatggttgccgcgagtcccaacccagctgcagtaaatacatccgtcacgctctccgccgaactggccggaggctccggggtcgtttatacctggtctctggaggaaggcctctcttgggagacaagcgaaccgttcaccacgcactcctttccaacccccgggctccaccttgtcaccatgaccgccggcaatccccttggttccgccaacgctaccgtggaggtggatgtccaagtgcccgtgtccgggctgtccatcagagctagcgagcctgggggctcctttgtagccgcaggatcatctgtcccgttttggggacagctggccacgggtacaaatgtttcttggtgctgggcggttcccggcgggagcagcaaaagggggccccatgttacaatggtgttccccgacgccggtaccttcagcattcgtctgaacgccagcaacgcggttagctgggtgtccgcgacttataacctgactgctgaagaacccatcgtaggacttgtgctctgggcctcttccaaggtggttgcccctgggcagctggtccattttcagattctcttggccgccggctctgccgtgaccttccgcttacaggttggtggcgccaacccggaggtgcttccaggtccccggttcagccacagctttcctcgggtaggggatcacgtggtgagcgtgcgcgggaaaaaccatgttagttgggcccaggcccaggtgcgcatagtggtgcttgaggctgtgtctggtctccaagtgccaaattgttgtgaacctgggatcgcaaccgggaccgaaaggaatttcacagctagggtccagcgcggatcacgggtggcttacgcatggtacttttccctccaaaaagtccagggggatagcctggtaattctctccgggagagacgtgacatatacaccagtggcagctggattgcttgagattcaagtacgggccttcaacgcactgggatcagaaaatagaacgcttgttctggaggtacaggatgcagtgcagtatgtcgctttgcagtctggaccctgcttcacaaacagaagcgcccagttcgaagccgcaacatctccgtcaccgcgtagagtggcttaccactgggacttcggggatggttctcctgggcaggacacagatgaaccaagggcagaacatagctacttaaggccaggcgattaccgagtccaggttaacgcatcaaatcttgtgtccttttttgttgcccaggctactgtcacggtgcaggtgttggcttgtagggagcctgaggtagatgtcgtcctgcccctgcaggtgctaatgagacgtagccagcggaattatttagaggcccacgtggatctgcgcgactgtgttacttatcagacagagtatagatgggaagtatataggacggcgagctgtcagaggcctggacggcctgcccgggtggcactgcccggcgtcgacgtttcacgaccccgcctggttctacctcgactggcgttacctgttgggcactactgttttgtgtttgtggtcagctttggtgatacgcccctgacccaaagcatccaagctaatgtgaccgtggcaccagaaagactggtcccaataattgaggggggttcttacagggtctggagcgacacccgggatctagtccttgacgggtctgagtcttacgatccaaatctggaggacggcgaccaaacccctctctctttccactgggcttgtgtggctagcacccaacgggaggcagggggatgtgctttgaactttgggcctcgaggatcttccacagtcacaatcccccgcgagcgtctcgcggcaggagtcgagtacactttttctttaaccgtgtggaaggccggccgtaaggaagaggcgaccaatcaaacagttctgatccgttcagggcgggtgccaatcgtctcattggaatgtgtctcgtgtaaggcacaagctgtctacgaagtgagtcgaagcagttatgtgtatctggagggccgttgccttaattgctccagtgggagcaaacgcggtagatgggccgccaggacattttcgaacaagacactggtgctcgacgaaaccaccacttcaacagggtctgcaggaatgcgcttggttctgagaagaggggtcctgcgagatggcgaaggttacacctttacactgacagtgctggggcggtccggcgaagaggaggggtgcgcgagcatacgcctctcaccaaacagacctccactcggaggaagctgcagactgtttcccctgggcgccgtacatgcactgacgacaaaggttcactttgaatgcacagggtggcacgacgctgaagatgcaggtgcccccctggtctacgctctgcttctgcgccggtgccggcagggacattgtgaggagttttgtgtgtacaagggatctctgtccagttacggggccgttctaccacccgggttccgtccccattttgaggttggcctcgcagtggtcgtccaggaccagctcggtgctgcagtggtggcacttaaccgaagtctggccataaccctaccggaaccgaatggttccgccaccggattgacagtatggctccacggcctgacggccagcgtgctgcccggactgctgcgacaggcagatccccagcatgtcatcgagtactcgctcgccctcgtgaccgttctaaatgagtacgaaagagctctggatgtcgcagctgaacctaagcacgaaagacaacaccgcgcccagattagaaagaatataaccgagactctcgtcagccttagagttcatactgtcgatgatatccagcagatcgctgccgccttggcacagtgcatgggaccgagtcgggaactggtatgtcggagctgcctgaaacagaccctgcacaagctggaagccatgatgctgatactgcaagcggagacaaccgccgggacggtaactccaaccgccattggcgattcaatcttgaacataactggagatcttatccacctggcctcatccgacgtccgggctccacaaccttcagaactgggagcagagtccccatcacgcatggttgcatcccaagcttacaatctcactagtgctctcatgcggattctgatgagatcaagggtgctcaatgaggagccattaacccttgcgggagaggagatagtggcgcaggggaaacggagcgacccccgttcactgttgtgctacggtggtgccccaggacctggctgtcacttcagcataccggaggctttctccggcgccctagccaacctgtcagatgtggttcaactcatctttcttgtggattccaacccctttccatttggctacatttccaattataccgtatctaccaaagtggcctccatggctttccagacccaggcgggagcccagatccccattgagcgcctcgcttctgaaagggccattactgtgaaggtgcccaataactcggattgggcagctaggggccatcggtctagcgctaactctgcaaactcagtggtggtgcagcctcaggctagtgtaggagccgtggtgaccctggattcatcaaatccagcggccgggttacaccttcaactgaactatacactgctagacggccactatcttagcgaagaacccgaaccatacttggcagtttacctgcacagcgaacctaggccaaatgaacataactgctccgcctccaggcggatccggcccgagtcattgcaaggtgccgaccatcggccttataccttctttatatcgcctggctcaagagatcctgcaggatcctatcaccttaacctaagctctcattttagatggtccgctttgcaagtgtctgtggggctctacacctccctgtgccagtacttcagcgaggaggatatggtctggagaacagagggactcctgcctctagaggagacatctcctcgacaagccgtctgccttacaaggcatctaaccgccttcggcgctagtctgttcgtgcctccgtctcacgtcaggtttgtgtttccagagccgaccgccgacgttaactacattgttatgttgacgtgcgcagtgtgcttggtgacatacatggtcatggccgctatcttgcataagctcgaccagctggatgcatcacgcggccgggccatcccattttgtggacagcgaggacgctttaagtacgagattttggtaaaaaccgggtggggacggggttctgggaccaccgcccacgtcggcataatgttatatggcgttgattcacggtccggacacaggcatcttgatggcgaccgcgcattccatcggaacagcctggacatttttcgcatcgctaccccgcacagcctaggatctgtttggaagattagagtgtggcatgataataagggactcagccctgcatggttccttcagcatgttattgtgcgagaccttcagactgccagatccgctttcttcctcgttaatgactggctatcagtggagaccgaagcgaatggcgggttggttgagaaagaggtactcgccgcaagtgacgcagcacttctgagattccggcgattgctggtcgctgaacttcagcgtggtttctttgacaagcatatctggctcagtatctgggatcgtccgccaagatctagattcaccaggattcagcgcgcgacctgttgcgtgctgctgatatgtcttttcctgggtgctaacgcagtgtggtacggcgctgttggtgattctgcttacagtaccggacacgttagtcggctgtctccgctgtctgtggatacagttgctgtgggcctcgtgtcgagcgttgtggtgtatcccgtctatctggccatcctctttttgttcagaatgagcaggtcgaaagtcgccggatcgccaagtcctactcctgccgggcaacaagttttagacattgatagttgcctcgatagtagcgttcttgatagttctttcctgaccttttcgggcctacatgccgaacaggccttcgtgggtcagatgaagtcagaccttttcctggacgattccaaatctctcgtctgttggcccagcggcgaaggtaccctctcctggccagatctcctgtctgatccatcaattgttggaagcaaccttcggcagctggcccggggccaggctggtcacggactgggcccagaggaagatgggttcagtctcgcctccccctattcccctgctaagtccttttctgccagtgatgaggacttgatccagcaagttttggctgagggtgtatcaagccctgcccctacccaggacacgcatatggaaactgatcttctgtctagtttgagcagtacgcccggggagaaaacagaaaccctggccctgcagcggctcggggaactgggccctccaagcccaggccttaattgggaacagccccaggcagctaggctgtcgagaaccggcctagtggagggacttcggaaacgcctgttgcctgcttggtgcgcttctcttgcacatggcctgtcccttcttttagttgccgtggctgtggcagtcagcggctgggttggagctagcttcccacctggcgtgtcagtggcctggttgttgtctagttccgcttcatttctggcatctttccttggatgggaacctctgaaagtgctactggaagccctgtacttcagtctcgtcgctaagaggcttcatcccgatgaggatgatacactggtggagtcgcctgctgtcaccccagtctcggcacgagtccctcgtgtgaggcctccacacggattcgcattgttcctggccaaagaagaagcccgaaaggtcaagcgactgcatggcatgcttcgtagtctgctagtttacatgctgtttctgttagtgacactgttggccagctacggggacgcttcatgccacggccatgcctatcggttacaatccgccatcaagcaagaactgcattctagggcttttctggcgattacccgcagtgaagagttatggccgtggatggcccacgtgttacttccctatgtacacggaaaccagagctcccccgagcttgggcctcccagactgagacaagtccggcttcaggaggcactgtatcccgaccctcctggaccgagagtgcatacgtgcagcgccgcaggtggcttctcgacatctgattatgacgttggctgggagtcgccacataacgggagtggcacctgggcctactctgctccagacctgcttggggcgtggagctggggatcgtgtgccgtgtatgacagcggaggatatgtacaggaactgggtctgagcttggaggagtcacgcgatcgcttacgcttcctgcagctgcacaattggctcgataacaggagtagagcggtgtttctcgagctgacccggtattccccagctgtgggactgcatgctgcagtgacactccgccttgaattccccgcagccggccgggcgttagctgctttgtctgtgcgccccttcgcacttcggaggcttagcgccgggctgagtttacctctccttacatcagtatgcctgttactctttgccgtacactttgccgtcgccgaggcccggacatggcaccgggagggtcgatggcgagttctacgcttaggtgcttgggctcggtggctgttggtggctctcactgcagcaactgcgctggtgaggctggcgcagctgggcgccgccgatcgacagtggacccgctttgtcaggggtaggccccgtaggttcacctcttttgatcaggtggcacagctgtcctctgccgcacggggactggctgcttcacttttgttcctgctgctcgtgaaggctgctcaacaactgcggtttgtgcgacagtggagcgtgttcggtaaaacgctgtgcagggctttgccagagctactgggcgtgacgctgggactggttgtgctgggcgtggcctacgctcagctggccatcttgcttgtgagctcttgtgtagactctctgtggtcagtggcccaggcgctgctggttctctgccctggtactgggctatcaaccctatgcccagccgagagctggcatctctccccacttctctgcgtgggcctctgggccctgcgcctatggggggccctccgcctgggggcagtgatactgaggtggaggtaccacgccttgaggggagagctgtatcgtccagcatgggaacctcaagactacgagatggtggaactgtttctgagacggctgcggttgtggatggggctcagcaaggtaaaggaatttcgccataaagttagattcgaaggaatggagccactacccagtcgctccagtcgcggctctaaggtgagtcccgatgtcccgcctccttctgccggctcagatgcatctcatccgagcacttcttcatctcaactcgatggactgtccgtgtcccttggacggctaggaaccaggtgcgagccagagccttcacgcctacaagctgtttttgaggccctcctgacccagtttgacagactgaatcaggcaaccgaagacgtgtatcagttggagcaacagttacacagcctgcaggggcgaagaagttccagagccccggcaggaagctcaaggggccctagcccaggcctccgccccgctctgccatcccgactggccagagcctctcgcggtgtggacttagctacaggtcctagccgcacaccccttcgggccaaaaataaagtccatcctagtagcacatag

SEQ ID NO: 129194 - DNA, 10914 bp, synthetic construct
  misc_feature 1..10914: note = Description of Artificial Sequence: Synthetic coding sequence
  source 1..10914: mol_type = other DNA
atgccccccgcagcccccgctcgactcgcccttgctctgggcctcggactgtggcttggggcactggccggcgggcccgggagaggctgcggaccttgcgagccgccgtgtctatgcgggccagctcccggcgccgcatgcagagtcaattgttccgggcgcggactccggaccctcggacccgccctcaggattcctgccgacgctaccgcactaactgcgatggctaaagccgatggggacgttaagaaatatggatccaaacggggcgctctcgccttaacccacggacactcacttcttagggatgtgagtcacaatctcttacgggccctggacgtgggacttttggctaatctgtcagccctggctgaactcgatatttcgaacaacaaaatcagtacgctggaggagggtatttttgccaatctcttcaacctctccgagatcaacctcagcggcaacccatttgagtgcgactgtgggttggcttggctgccacgatgggccgaggaacaacaggtccgggttgtccagcccgaagctgctacctgcgcaggccccggctccctcgctggccagccactcctgggcatacctctgttggattccggctgcggcgccaccctggtcggcccccacggtcctctagcgtccggacagctcgctgcattccatatcgcagcaccactccctgtcacagctacccgttgggatttcggtgacggtagtgccgaggtggacgcggctggccccgcggcctctcacaggtacgtacttccgggcaggtatcacgtgactgctgttctcgccctcggcgctggatctgctctgttaggcaccgacgtgcaggtggaggccgcaccagccgctttggagctggtgtgtccaagcagcgtccagagcgatgaatccctggatctgtcgatccaaaaccgcggagggtccggactggaagcagcttattctatcgtggctcttggcgaggaacctgcacgcgccgttcatcctctttgtccttcggacaccgagatttttccaggaaatggacattgctatcgccttgtagtcgagaaagcagcttggttgcaggcacaggagcaatgccaggcttgggcgggcgccgccctagctatggtggactccccggccgtgcagcgctttctggtgtcaagagtaaccagaagcctcgatgtatggataggtttttctacggttcaaggagtggaagtcgggcctgcccctcaaggtgaggccttctccctggaaagctgccagaattggttacccggagaacctcaccccgcaacggcagagcattgcgtgcgcctcggaccaactggatggtgcaatacggatctctgctcagctcctcactcctacgtatgtgaattacaaccaggcggacccgtgcaggatgccgagaaccttttagttggagcacccagcggtgacttgcaggggcccctgaccccactggcccagcaggacggcctgtccgccccacatgaaccagtcgaggcaggaatgggatccgtggaactccgccggcctcccgcacaccaggtgatggtgtttcctgggctgagactgagccgagaggcctttcttaccactgctgaatttggtacccaggagctgcgcaggccagcccaactcagacttcaggtctacagacttttgtccacagccggaactccagagaacgggagcgaaccggagagtaggtcaccggataaccgaactcagctggcccctgcctgtatgcccggtgggaggtggtgtcctggcgccaacatctgcctcccgcttgacgcctcttgccatcctcaggcttgtgccaacggctgcactgaaggagaacatgttgtggacgtggtagtggagaacagtgcatcaagggctaatctctccttgagggttactgccgaagagccaatttgtggtctccgggctactccctctcccgaagctcgagtcctccagggagtgctggtacgatacagtcccgtggttgaggccggttccgacatggtgttccggtggactataaatgacaaacagagtctgacctttcaaaatgtagtctttaatgtcatctatcagagcgctgccgtgttcaagctttcactaactgctagcaaccacgtcagcaatgttacagtcaactacaacgtaacagtggaaagaatgaaccgcatgcaaggactgcaggtttcaacggtgccagccgttctctctcctaacgccacactggccctgactgccggtgtactcgtcgactccgccgttgaagtcgctttcctttggaccttcggagatggtgagcaagctttacatcagttccagcccccatataacgaatcctttcctgtgcccgaccccagtgtggcccaggtcctcgtggaacacaacgttatgcacacgtatgctgccccgggcgaatatctgctgacagtgctagcaagcaatgcctttgagaatctgactcaacaagtacccgtgtccgtgagagcctccctaccaagcgtggcggttggcgtgtctgacggggtactctcccagccagccgcaaatcacacctacgcaagtcgagggacctaccatgtacggctggaagtgaacaatactgtgagcggcgccgccgcccaggcagacgtccgagtcttcgaggagctgcgggggctgagtgttgacatgtccctggcagttgagcaaggcgcacctgtcgtagtctctgcagcagtgcaaactggcgacaatataacttggacgtttgacatgggcgatggaaccgttttgtcaggccctgaagccacagtggaacacgtctacttacgtgcccagaactgcacagtcacagtgggcgcagcgtcacctgccgggcacctggcccgaagcctccatgtactcgtgtttgttcttgaggtgctgagagtggaacccgccgcgtgcattccaacacaaccggatgctcgcttaacagcctacgtgaccggtaacccagcgcactacctatttgattggacattcggtgacgggtcttcaaacacaaccgtgcggggctgtccaaccgttacacacaactttactaggtctgggaccttccccttagccttagtcctgtccagccgggtcaacagggcacattacttcacctccatctgcgttgaacctgaggtcgggaatgtcacactacaacctgaacggcagtttgtccagttgggggacgaggcgtggctggtcgcctgtgcgtggccccccttcccgtacaggtacacatgggacttcgggaccgaagaggctgcccctactcgggcgaggggccccgaagtgacatttatctatagagacccaggatcgtacctcgtgaccgtgacagcaagcaacaacatttctgctgcaaacgacagtgcgttagtggaagtacaggaacccgtgctcgtgacctctattaaagtcaatggaagtctcgggttggaactccagcagccctacttgttttctgctgtagggaggggccgccctgcctcgtacctgtgggacttaggcgacggcggatggctggaggggccggaggtcacacatgcatataatagcaccggagatttcacgggacccggcccgggtaggcaacggcaacgcttactcgcccaccgagaagccggcacttatcacgtgcaactccgagctacaaacatgctggggagcgcatgggcagactgtaccatggacttcgtggaaccagtcggttggctgatggttgccgcctcgcctaaccctgcagccgtcaataccagcgtgacactttcagctgagctggccggcggttccggggtcgtctacacctggtcactcgaggaaggactgtcttgggagacctctgagcccttcaccacccactcctttccaactcccgggctccatctggtgacaatgactgcagggaaccctctgggttccgcaaatgccaccgtggaagttgacgttcaagtcccggtgtctggacttagtataagggcttctgaaccaggggggagcttcgtcgcagcagggtcttccgtgcccttctggggccagctagctactgggacaaatgttagctggtgttgggccgtccccggtgggtcctctaagcgtggaccacacgtcacgatggtttttccagatgcgggaactttctctattcggctgaacgcctcaaatgcagtgtcctgggtcagtgcgacttacaatctcactgcagaggaacccatcgtggggctggtcctatgggccagcagcaaagtggtggcccccggacaacttgttcactttcaaattctgctggccgcaggcagcgccgttacatttagactgcaggataccgacgagccaagggccgagcattcttatttgcgcccaggcgattaccgagtccaggttaatgcctccaacttagtgagctttttcgtagcccaggccacggtgacagttcaggtgctagcctgtcgggagcccgaggttgatgtcgtgttacctctgcaggtacttatgagacgcagtcagagaaactatctggaggcccacgtagatcttcgcgactgtgtcacctaccaaactgagtacagatgggaagtctatcggacggcctcgtgtcagcggccagggcggcccgctcgcgtcgccttacctggagtggacgtgtcaagaccacgactggttctgccccgcctcgccctacccgtgggacactattgctttgtatttgttgtctcattcggtgacactcctttaacacagtcgattcaggcgaacgttactgtggccccagagcgattagtgccaattattgagggcggttcttaccgcgtgtggtccgacacccgtgacctcgtcctcgacggctctgaatcctatgatcctaacttggaggacggggaccagacacctttaagcttccactgggcatgtgttgcgtccacgcagcgcgaggccggcggctgtgccttaaatttcggaccacgtgggagcagcactgttacaatccctagggaacggctggctgctggagtggagtacacattctcacttacagtgtggaaagctggcaggaaagaggaagccacgaaccagacagtcttgattcgatctggacgagtgcccattgtgtcactcgaatgtgtgtcttgcaaggcgcaagccgtctacgaagtgagtagatcctcctatgtctatcttgagggcaggtgtttaaattgttcctcagggtcaaagcgcggacgctgggctgctcgaacattctctaataaaacattggtgttagacgaaaccaccacctcgaccggtagtgctgggatgcgtcttgtgttacggcgcggcgtgctgagggatggagaaggatacacttttacgctcacagtgctggggagaagtggtgaggaagagggatgcgccagtattcggttaagtcccaataggccgccactgggaggatcctgcagactgttcccattgggcgctgtgcatgccctcaccactaaagtgcactttgagtgtacagggtggcacgatgcagaggacgccggagctcctctcgtgtacgccctcctcttaaggcggtgcaggcagggtcactgcgaggagttctgtgtctacaaaggatctctgtcctcgtacggagctgtgctgccccccggattcagaccccattttgaggtggggctcgccgttgtcgtccaggaccagcttggggctgcggtggttgctttgaaccggtcgttagccatcactctccctgaaccaaatgggagtgctaccgggctgactgtgtggctgcacggattaacggccagtgtcctaccaggactcctccgacaagccgatccgcagcacgtcattgagtatagtttagctctggtaacagttctgaatgagcacagggcacaaattcgcaagaacatcacagagactttggtctctctcagggtacacaccgttgacgacatccagcagatcgccgccgctttggcacagtgcatgggtccatcccgggagctggtgtgtaggtcatgtttgaagcagactctgcataaactcgaggccatgatgttaattctccaagctgaaactactgctgggacagtgacccccacagcgataggggactccatcttaaacataaccggcgatctcatccacttagcttcctcagatgtgcgcgcccctcagcctagcgaattaggcgccgaaagcccatctaggatggtggcgagccaagcctacaacctcacctcagccctcatgcggatattgatgaggtcaagagtgctgaatgaggagccactgactctcgccggggaagaaatcgtggcacagggtaagcgatctgatcctcgttccctcctgtgctacggaggcgcaccaggacctggttgtcacttttcgatcccagaggcgttttccggcgctttggctaacctgtctgacgtcgtgcaactcatctttctggtggattcgaacccgtttccttttggctacatcagtaattacaccgtgtcaaccaaggtggctagtatggcgtttcagacgcaagcaggagcccagattccaattgaacgcctagctagcgaacgagcgatcacggtcaaagtgcctaacaacagtgactgggctgctaggggccaccgaagctcagctaatagtgccaatagcgtagtggtgcagccacaagcgtccgtaggtgcagtcgtgacccttgatagtagcaaccccgctgctggactgcacctgcagctaaattacacattgctggatgggcattacctgagtgaagaacccgagccatatctggccgtctatttacacagcgagccccgcccaaacgagcacaactgttcagcaagcaggcggatccgccccgagtcccttcagggcgccgatcatcggccttacacattttttatctcacccggatcacgggaccccgccgggtcctatcatttaaacttaagctcacactttcggtggagcgctctgcaggtgtctgtgggcctgtataccagtctgtgtcaatacttctccgaggaggacatggtatggcgcaccgaggggcttctgccactggaggagacaagccccaggcaggctgtgtgcctcacccgccatctcacagcatttggcgcatcacttttcgtgcctccaagccacgtccggtttgtattccctgaaccaactgccgacgtgaattacattgtcatgctcacttgtgcagtatgtctggtgacctatatggttatggccgcaatcctgcacaagttagaccagctagacgccagccgaggccgggccatccccttttgtggtcaacgtggccgctttaagtacgagatcctggtcaaaaccggatggggccgcggatctggcacgactgcacatgtagggatcatgctgtacggcgtggactctcggagcggccacaggcatctcgacggagatcgggcattccatcggaatagcttggacatcttcaggattgctactccacactctctggggtctgtctggaagatcagggtttggcatgacaacaagggcctgtctcccgcctggttcttgcaacacgtgatcgtgcgagatctgcagacggccagatcagctttttttttagtcaatgattggctcagcgtcgagacggaggcgaacggggggctcgtcgagaaggaggtcctcgcagccagcgatgctgctctcctgaggtttagacgcctacttgtggctgagctgcagcgcggattctttgataagcacatatggttgagtatctgggataggccaccaaggtcacgcttcactcggattcagagagctacctgttgcgtgcttttgatctgccttttccttggggctaacgccgtgtggtatggcgccgttggcgatagcgcctacagtactgggcacgtatccagactctccccgcttagcgtggacaccgtggccgtggggctggtgagtagcgtcgttgtttatcctgtttatctggccattctgtttctgtttaggatgtctcggtccaaggtggcgggcagtccctctcctacgccagccgggcagcaggtactggacattgattcttgtctggatagctcagtcctagattcctctttcttaacctttagcgggttgcacgctgaggccttcgtaggccagatgaagtctgatctgtttctggatgattccaaaagcctggtatgctggcctagcggagaaggcactctgagctggcctgatctcctctcagatccgagcatagtagggagtaacctccggcagcttgctaggggccaagctggacacggattgggaccagaggaagatggctttagtcttgcctcaccttatagcccagcaaaaagtttcagcgcgagcgatgaagacctgatccagcaggtgctggctgagggggtcagctcccctgcgccgacacaggatacccacatggagacagacctcctgtcgtcactaagtagcacgcctggcgagaagaccgagacccttgcgttgcaacgcttaggggagttgggccccccctctccaggactgaattgggagcaaccccaagctgcgcggctgagccgaacggggttggtagaaggactgcggaaacgtctgttaccagcttggtgcgccagccttgctcacggattgtctctgcttttggtggccgtggcggtcgcagtctctggctgggtgggcgcatctttccctcctggcgtgtctgtggcgtggcttctgagctcttcagcctcttttttggcctcattcctgggttgggagcctctaaaggtgctgttggaggccctatactttagtctggtcgctaaaagactccacccagacgaggatgataccctagtggaatcacccgcagtcacgccggttagcgcgcgggtgcctcgggtgcgtccccctcatggatttgcactcttcttggccaaggaagaagcgagaaaggtcaagcgactgcacggcatgttgagatccctgctcgtgtatatgctgttcctgctggtgactctccttgcatcatacggagatgctagttgccacggccacgcttacaggttacagtccgccatcaaacaagagctgcactctcgcgcttttttggccatcactagatccgaggagttgtggccctggatggctcacgtgctcctgccgtacgtgcatggtaaccagagcagtcctgagctaggtccaccccgcctgagacaggtgagattgcaagaagcactctatcctgaccctccaggcccccgcgtgcacacctgttcagctgcagggggctttagcacgagcgattacgatgtgggatgggagtctccccataacggctcaggcacttgggcctattctgctccagacctgcttggtgcttggagctggggctcttgtgccgtgtacgactcaggagggtacgtgcaggaattggggctaagtctggaggagtccagagaccggctaagatttctacagttgcataattggctcgacaataggtcaagggcggtatttctggaattgaccaggtacagtcctgctgtcggtctgcacgcagcagtgaccctgagactggaatttcctgcagcaggcagagctctagcggctctcagtgtccgcccattcgccctgcgccgcttgagcgcagggcttagcctgccactcttaacgagcgtgtgtttgttgttgttcgccgtgcattttgccgtcgcggaagcacggacatggcatcgggaagggagatggagagtgctacggctaggcgcatgggcaagatggcttctcgtcgccctgaccgccgcgactgccctggtccggctcgcccagttgggagcggcagacagacagtggacaaggttcgtccgaggccgaccaagacgcttcaccagctttgatcaagttgcacagttgtcttccgcagcccgcggccttgcagcatctttgctgttcctactcttagtaaaggcagcccagcaattgagattcgtgcgccagtggagtgtgttcggcaagactctgtgtagagctcttccagaattgctcggcgtgacgctaggactcgtggtccttggggtggcctatgctcagttggctattcttcttgtgtcttcctgcgtggatagcctttggagtgtggcccaggcattgctggtattatgccctggaactgggctttccaccctttgtccagccgaatcctggcacttgtcgccattgctttgcgtgggattatgggcccttagactgtggggcgccctgaggcttggcgctgttatcctgcgttggagataccacgcactccggggagagctctaccgccccgcctgggagccacaggactacgaaatggtagagctgtttctgagaaggctccgcctgtggatgggactatcgaaggtgaaagagttcaggcacaaggtgcggttcgagggaatggaaccactgccaagtcggagctctagaggaagtaaagtgagtcccgatgtgcctccgccttctgcagggagcgatgcttctcacccgtccacatccagtagccagctggatggcctgtctgtttctttgggtagattaggtacccggtgtgaaccggaaccttctcggcttcaggccgtgttcgaggcacttctgacacaattcgatcgcctcaatcaggcaactgaggatgtgtatcaactcgagcaacagctccattccctgcagggcaggcgctcgtctcgagcaccggcaggctccagtaggggaccttctcccggcctcagaccagcactgccttcccggttagcacgagcttctaggggcgtggacctggccactggtccatcacgcaccccccttagggcgaaaaataaggttcacccaagttccacttag

SEQ ID NO: 129195 - DNA, 3693 bp, synthetic construct
  misc_feature 1..3693: note = Description of Artificial Sequence: Synthetic coding sequence
  source 1..3693: mol_type = other DNA
atggtggccgccagtccaaacccagcggccgtgaatacatccgtcaccctctctgcagagctcgcaggtggcagcggagtggtatatacttggtcactggaggaggggctgtcgtgggagaccagcgaaccatttacgactcactctttcccgacaccaggactgcatctggttactatgaccgccgggaacccgctggggagcgccaacgctacagttgaggtcgatgtacaggtgcccgtgtctgggttatccatccgcgctagcgagccaggcggtagctttgtggctgcaggatccagtgtgcctttctgggggcagctggctacaggcactaatgtgtcatggtgctgggcagtacctggcggatcatctaaacgggggcctcacgtaacgatggtttttcccgatgcgggaaccttcagcatcagattgaacgcctccaacgccgtttcgtgggtatccgcaacttacaatctcaccgcggaagaaccaatcgtaggcctggtcttatgggcctcgagcaaagtggttgcccctggccaactcgtgcactttcagatcctgctggctgcaggctccgctgtgacctttcggctgcaagtgggcggggctaatcctgaggtcctgcccggaccacggttcagccactcttttccacgggtgggggatcatgttgtgagtgtacggggcaaaaaccacgtgtcttgggcacaggctcaagtgcgaatcgtcgtcttggaggccgtgagcgggctgcaggtccccaactgttgcgaacccggaatcgcaacaggtactgagaggaatttcacagctcgtgttcagcgcggctcccgggttgcatatgcttggtatttttccctccaaaaggtgcagggggacagtctggttatcctgtccggtagagacgtcacgtacactccagtagctgccggactgctggagatccaagtgagagcattcaacgccttgggttcggagaatagaacccttgtgctcgaggtacaagacgccgtccagtatgtggcactgcaaagcggtccttgtttcacaaacagatccgcgcaattcgaagcagcaactagcccctccccgaggcgggtagcctatcattgggattttggtgacgggtccccaggtcaagacacagacgaacccagggctgaacactcttatcttagaccaggtgactacagagtacaggttaacgcatcgaatctggtttcattctttgtggctcaggccacagtaacagttcaagtgctagcctgccgagagccagaggttgacgtggtgctcccccttcaggttctgatgcggcgcagccagaggaactacttggaagcccacgtggatctgcgcgactgcgtgacctaccagacagagtaccggtgggaagtatatagaaccgcctcgtgtcagaggcccggccgccccgcccgggttgctctccccggagtggacgtcagccggccacgactggttctccctaggctggcacttcctgttgggcattactgtttcgtctttgtagtgtcttttggcgacacccccctcacccagtccatccaggcaaacgtgactgtggctcctgagagattagtgcccattattgaaggcggcagctaccgcgtgtggtcagatactcgcgacctcgtgttagacggcagcgaatcgtatgatccaaatctagaagatggcgaccagacgcctctgtcttttcactgggcttgtgtggctagcactcagcgcgaggctggcggctgtgccttaaacttcggcccacggggatcctccaccgtgaccatacccagggagagactggccgccggagtggagtatacgtttagcctgaccgtgtggaaagcagggcgtaaggaagaagccacaaatcaaacagtgctgatcaggagcggacgcgtgcctatcgtttctcttgaatgtgtttcctgcaaggcacaagcagtgtatgaggtaagtcggagctcatacgtgtatcttgagggacggtgtttaaattgttctagcggctcaaagcgcggcaggtgggccgctcgcacattctctaataaaaccctcgtgttagatgagaccaccacatccacaggctccgccggaatgcggctggttctgcggaggggtgtgttaagagatggagaggggtacacctttactctgacagtgctgggtcggtcaggagaggaggaagggtgtgccagtatccgtctgagtcctaacagaccaccacttggagggtcttgccgattgttccctctgggagctgtgcatgctctcacaactaaagtgcacttcgagtgcaccggctggcacgatgcagaggacgccggtgctccgcttgtctatgccctccttctgaggagatgcagacaaggccattgcgaggaattctgcgtgtacaaaggttcactgtcttcctacggcgccgtgctccctcccggtttccgcccccattttgaggttggcctggcagtcgtggtgcaggaccaactgggcgctgctgtagtcgccttaaataggtctctggctatcaccttgcccgaaccaaatggaagtgcaactggcctgactgtctggctgcatggactgaccgccagtgtgcttcctgggctactgagacaggctgacccacagcacgttatcgaatactctctggccctggttacagtcctgaacgagtatgagagggcactcgatgtggctgccgaaccgaaacacgagcgccagcaccgcgcccagatacgcaagaatatcaccgaaactctcgtttccctgcgtgtgcatacggtcgatgacatccagcagattgccgctgccctagcacagtgtatgggcccctctagagagctggtgtgtagatcgtgcctcaagcagacacttcacaagctcgaggccatgatgctgatactccaggctgagaccacggccggaacagttacacccacagctatcggagactccatcctcaacataactggggatctgatccacctggcatcatcagatgtcagggcaccccaacccagtgaattgggggcagagagccccagtcgaatggtagcttctcaagcttacaatctaacctctgctttaatgaggatcctgatgaggtctagagtgctaaatgaagagcctctgacgctggcaggcgaggaaattgttgctcagggaaagcggtccgaccccaggagtttgttgtgctacgggggggcacccggccctggctgccacttctctatcccagaggctttcagcggtgcgctcgcaaatctctcggacgtggtgcagctgatatttctggtggattcaaatccttttcctttcggctatattagtaactatacagtctctaccaaggctcccccaaccccccctactcctctatggtccagcccaagaccccccagtgtcctgtggtcaccatggacggctgccactctccggcccggctgtatctgctcctccacaatccgctgctggacggcaaccacttgtctccgtaacctgtcaccaacctggcaatctacctatacccgctctcctgggccaatgagtaccactgctcgcctggccggcggatcagcccaatcccactctcgtgtgctgactactggcccgacgccgagttcattcccacgcggagctgaaacccagaggggagtcaccatctag

SEQ ID NO: 129196 - DNA, 12909 bp, synthetic construct
  misc_feature 1..12909: note = Description of Artificial Sequence: Synthetic coding sequence
  source 1..12909: mol_type = other DNA
atgccacccgccgcccccgctagacttgcactggcattaggtttagggctttggctgggagcccttgccggggggccggggagagggtgcgggccctgtgaacctccatgcctttgtggaccagctcccggagccgcgtgtcgcgtcaattgttctggcaggggcctgcgcactctgggtcccgcgttgcggattcccgccgacgccacagccttggatgtttcccataatctcttaagagcgctggacgtagggttgttagctaacttatcggcacttgcggagctcgatatttctaataataaaatcagcaccctcgaggagggaattttcgctaacctgttcaacctgagcgagatcaatttatctgggaatccttttgagtgtgattgtggattggcttggctgccccggtgggcagaggaacagcaggtcagagttgtccagccagaggcggctacttgcgccgggcctggaagtctcgccgggcagccactccttggcatcccactgctcgattcaggatgtggcgaagaatatgtagcttgcttgcccgataactccagtgggactgtggctgctgtttcattttcagcagcacatgaaggccttctgcagcctgaggcgtgtagtgctttttgtttctcgacaggccaaggactggcagcgctgagcgagcagggctggtgtttgtgcggcgcagcacagccaagttccgcctccttcgcgtgcctttccctatgcagtggacctccccccccaccagctccgacctgtcgaggccctactctacttcaacacgtctttcccgcgtcgccgggggccactctggtgggaccccacggccccctggcctctggacaattggccgcatttcatattgccgcccctctgcctgtaacggccacccgctgggattttggcgacgggtcagctgaggtcgatgcagcagggcctgctgcctcccacaggtacgtactccctggaaggtatcatgtcaccgccgtccttgccttgggcgctgggtcggccctcctgggtacagacgtccaggtggaggcagctcccgctgcacttgagttagtttgtccgagttctgtgcagtccgacgaatcattggacctgtctatccagaaccgtgggggtagtgggcttgaagcagcatacagtattgtcgcgctaggcgaagagcccgctcgcgccgtgcatcccttatgccccagtgatacggagattttccccgggaacgggcattgctaccgcttagtggtggagaaagccgcctggcttcaggcacaggaacaatgccaagcttgggcgggagccgctctcgccatggtggacagccctgccgtgcaaagatttctcgtttcacgtgtcactcgctccttggacgtctggattggcttctccacggtgcagggcgttgaagtagggccagcaccccagggcgaagcattttcacttgagtcctgccagaattggctgccaggagaacctcaccccgctacagctgaacactgtgtgcgactggggcccaccggctggtgtaatacagacctctgttctgcccctcacagctatgtctgcgaattacagcccggcggccccgttcaggacgcggagaacttgctggttggagcgccttccggtgacctccagggaccactgactccgctggcacagcaggatgggttgagcgctccccatgaacctgtagaagtgatggtgtttccaggcctacgcttgagccgcgaagcctttctgacgacggctgaattcggaacccaagagctgcgacgccctgcgcagctgcgcttacaggtgtacaggctcctgagcaccgctgggacccctgaaaatggatctgagcctgagtcccggtctcccgacaatcgaacccagctggcacctgcgtgcatgcccggaggaaggtggtgtcctggggcaaatatttgtctaccgctggacgcttcctgccacccacaggcgtgtgccaatggttgcacatcagggccaggcctccccggagctccctatgctctgtggcgtgagttcttgttctccgtgccagcgggccctcccgctcagtatagcgtgacactccatggccaagacgtgctgatgttgccaggcgaccttgttggactacagcacgacgccggacctggggcgctgctacactgttctccagcgcccggccatcccggaccccgcgccccatatctgtccgccaacgcatcatcatggctgccccatttaccggcccagctggaaggcacctgggcctgcccggcctgcgctcttaggttgcttgccgctactgagcagctgacagtgctgttggggttgcgccccaatcccggcttgaggctgccgggacggtatgaggtgagagccgaagtcggaaacggagtcagccgacataacttgtcctgttcgtttgacgtagtgtctccagtagcaggactccgcgtgatctatcctgccccacgggacggcagattgtacgttcctacaaatggtagtgctctggtgctccaggttgattcaggagctaacgccactgcaaccgccagatggccgggcggcagcgtctccgcaagatttgagaacgtgtgccctgcactggtggccacatttgtccctggatgtccgtgggaaaccaacgacacgctgttctccgtggtagctctgccctggctctctgagggagagcacgttgtcgacgtggtcgtagagaactcagcctcaagagcgaacctgagtcttagggtcaccgcagaagagccgatctgtggactcagggcaacaccttctcctgaagcacgggtcttgcaaggcgtcctcgtgcggtattccccggttgtggaggccgggtcagatatggtatttcggtggaccattaacgataaacagtccctgaccttccagaatgtggtgtttaatgtgatctatcagagcgctgcagttttcaagctgtctctgaccgctagcaaccacgtgtccaacgtgacagttaattataacgtgactgtggagcgaatgaaccgcatgcaaggcctgcaggtgtcaactgttccagctgtcctctccccaaacgcaaccctagctctaaccgcaggagtcctggttgattccgccgtggaggtggccttcctttggaccttcggcgacggtgagcaggccttgcaccagtttcaaccaccctacaacgaatcttttcctgtgcctgacccatccgtcgctcaggtcctggtggaacacaacgtgatgcatacttatgccgctccgggagaatacctgctcactgtgctggcctccaacgcttttgagaacctcactcagcaggttccggtctctgtaagggccagtctcccaagcgttgccgtgggagtatcggatggcgtgttagttgcgggtagaccagttaccttttaccctcaccctctgcccagcccgggcggtgtgttgtacacctgggattttggcgacggctcccccgtcttaacgcagtcgcaacctgcagccaaccacacatacgctagtcgcggcacctaccatgtgaggctggaggtgaacaacaccgtgtccggagctgccgctcaggccgacgtgcgagtgttcgaggagctccgggggctgtccgtcgatatgtcactggcagtggaacagggagctccagtcgtggtttccgccgccgtgcagacaggcgacaacattacttggaccttcgatatgggcgacggtacagtcttgagtgggcctgaggcaaccgtagagcatgtctatctaagggcccaaaattgcactgtgacggtgggtgctgcttccccggccggtcaccttgcccggtctcttcacgtgctggtatttgtgctcgaggtgctacgggtcgagccagccgcctgtattcctacccagccagacgcgaggctgactgcttacgtgactggcaaccccgcccactatctgtttgactggacgttcggcgatggtagttccaataccacagtaagagggtgtcccacagtgacgcacaactttacccgcagcggcacattccccttagctctggtgctgtcctcacgggtgaatagggcgcactacttcacctcgatttgcgtcgagcctgaggtcggaaacgtcacactccagccagaaaggcagttcgtccagctcggagacgaggcctggttggttgcttgcgcttggccacctttcccatatcgctacacttgggatttcggaacagaggaggccgctccaaccagagcacggggcccagaggtgacatttatctacagagatccagggtcttatctggtaaccgtgactgcgagtaacaacatctccgccgcgaacgatagcgcactggttgaggtgcaggagcctgtcttagtgacctccattaaggtgaatggaagtctgggacttgaactgcagcaaccctatctgtttagtgccgtgggaagaggaaggcctgccagctacctgtgggacttaggggacgggggttggctagaaggtcccgaagtgacccacgcgtacaactcaacaggggactttactgtccgagtggctggctggaatgaagtctctcggtcagaggcgtggctgaacgtcaccgtcaaaaggagggtgagaggtctggttgttaacgcctctcgtacagtagttcctctgaatggctcggtgtccttctcaaccagcctagaggccggcagcgatgtgcggtattcctgggtcctgtgtgataggtgtactccaattccaggcggcccaacaattagctatacctttagatccgtaggaactttcaacattattgtgactgccgagaatgaagtgggaagcgctcaggattcgattttcgtctacgtgctccaactgatagagggcctgcaggtggtgggtggcggtagatacttcccaactaaccatacagtacagctgcaggccgtggtgcgcgacggtactaatgtcagctacagttggacagcttggcgggacaggggccccgccctcgctggatctggtaaaggtttctctcttaccgttcttgaagcaggcacttatcacgtgcagcttagagccactaacatgctcggcagcgcctgggcagattgtacaatggatttcgtagagcccgtgggttggctgatggtcgcagcctcccctaaccctgcagcagtgaacacctcagtgaccctgtccgccgagctagcaggcggttcaggggtggtgtatacctggtccctggaggaagggttatcctgggagacgagtgaaccattcacaacccatagtttccctactccaggactgcatctggtcactatgactgccggaaaccctctgggttccgcgaatgcaaccgtagaagtagacgtgcaggtccccgttagcggtctgtcaattagggccagcgagccggggggcagcttcgttgccgctggctcttctgttcccttctgggggcagcttgcaaccggaactaatgtgagctggtgttgggctgtgcccggcggcagctcaaagcggggaccccacgtcacaatggttttcccagatgccggcacattcagcattcggctgaatgcgagcaacgcagtgtcgtgggtgtcagctacatacaaccttaccgcggaggaacccatcgtagggcttgttctgtgggcctctagtaaagtggtggcccctgggcagctggtgcattttcagatcttgctcgctgccggttccgcagtcacatttcggctgcaggtggggggtgcaaacccggaggtcctgccaggccctaggttctcccatagcttcccacgggtgggagatcacgtggttagcgtgaggggaaaaaaccatgtttcgtgggctcaggcgcaggtcaggatagtagtcctggaagccgtgtctggcctgcaggttccaaattgttgcgaaccaggcatcgccaccggtacagagcggaatttcacagccagggttcaaaggggttccagggtggcatatgcctggtatttctcattgcagaaagtgcagggcgactcactcgtcatcctatcggggcgggacgttacttacaccccggtcgcagccggcctattggagatccaggtgcgcgcctttaacgccctagggtcagagaatagaaccttggtgcttgaagtgcaggacgccgtgcaatatgtcgccctgcaaagcggcccttgtttcaccaataggagcgctcaatttgaagccgcaacctccccaagtccccggcgggtggcctaccattgggactttggggacggctcaccaggtcaggatactgacgagccaagggccgaacacagttatctgagacccggtgattacagagtccaggtcaacgctagcaacttagtcagcttttttgtggctcaggctaccgtgactgtccaggttctggcctgtcgagaaccagaagtggacgtcgtgctgccattgcaagttctgatgaggagatcccagagaaactatctggaggctcacgtagaccttcgcgactgcgtgacataccagacggagtacagatgggaagtctaccggaccgccagttgccaaagaccaggacggccagccagagtcgccctgccgggtgtggacgtctccagaccacgcctggtgctcccgaggctggcccttccggtgggacactattgcttcgtgtttgtggtgtccttcggcgacacaccgcttacacaatctattcaggcaaatgtaaccgtggcaccagagaggctggtcccgatcatcgagggtggttcctacagagtgtggtcagacacacgtgatctggttcttgacggatcagagagctacgatccaaacttggaagatggagatcaaaccccactgtcgttccattgggcctgtgtggcaagtacccaacgggaagctggggggtgtgccctcaacttcgggccccggggcagttctaccgtgacaatccctcgggagcggcttgccgcaggcgtcgagtacacattctcgcttaccgtgtggaaggccggccgtaaagaggaggctacaaaccagactgtgctcataagatccgggcgggtacccattgtgagcctggaatgcgtttcatgtaaggcccaagccgtgtacgaagtatccagatcatcttatgtatacctggaaggaagatgcctcaactgtagttccggcagcaagcgagggaggtgggctgccagaaccttctccaataaaaccctcgttctcgacgagacaactacctccacaggcagcgcaggtatgagattagtcctgaggaggggagtcctgcgtgatggcgagggctatacttttacattgacagtgctcggacggtctggcgaggaggaaggctgcgcttctattagactgagtcccaaccgcccacccttggggggcagctgcagactgtttccacttggcgccgtgcatgccttgacaacaaaggtgcactttgagtgcaccgggtggcacgatgccgaagacgctggcgcccccctggtgtatgcgctgctgttgcgccggtgtcggcagggacactgcgaggagttttgtgtgtacaagggctcactgtcctcctacggtgccgtgttgccaccaggcttccggccacacttcgaagtggggctggctgtggtggtgcaggaccagctcggagcagccgtggtggccctcaaccgctcattagcaattactttgccagagccgaatggttctgcaactggattaaccgtatggctgcacggcctgaccgcgagcgtgttgcccggcctactgagacaggcagatccacaacacgtgattgaatactctcttgctctcgtcacggtcctgaatgagtatgaaagagccctggacgtggcagccgaaccaaagcacgagagacagcatcgcgcacagatcaggaagaacatcaccgaaaccctcgtgtccttaagggtgcataccgtagatgacattcagcagattgccgcggccctggcccaatgtatgggcccatccagagaactcgtatgcaggagctgcctcaaacagaccctccacaaactggaggccatgatgttaattttgcaggctgaaaccacagccggcaccgtgacacccacagctatcggggacagtatcctgaatattaccggcgacctgatccacttagcctcaagtgatgttcgagctccccagccctccgaacttggggcagaatctccatcccgcatggtggcttctcaggcttacaacctcacgtcggctctgatgaggatcttgatgcgatcacgggtactgaacgaggagccgctgacgctggccggtgaggagatcgtggctcaggggaaaaggagcgaccctagaagtctgctgtgctacggaggcgcacccggcccgggctgccatttctctattcctgaggcattctctggggccctggcgaatctgtccgatgttgtccaactgatatttctcgttgattctaacccattcccctttggatacatttccaactacacagtgtcaacaaaggtcgcgtctatggctttccaaacccaggccggggcccagatccctattgaacggctggctagtgagcgggcaattacagtgaaagtgccaaataattcagattgggctgcccgtggccacagaagcagtgctaacagcgctaattccgtcgtcgtgcagccccaagcgagcgtcggggccgtggtcacactggactcgagcaaccccgcggcaggactccacctgcagcttaactacactctgctggacggacactacctctcggaggagcccgaaccttatctcgccgtctatctccacagcgaacctagaccaaacgaacataattgttcagctagccggcgcatccgacccgagtcactccagggcgcagaccatcgcccttacaccttttttatttcacccggcagcagagatcctgcgggctcctaccaccttaacctgagctcacattttagatggagcgcgctgcaggtgtcggtcggtctctatacctctctgtgtcagtacttctccgaagaagatatggtgtggaggacggagggacttctgcccctggaagaaacatcaccgcgacaggccgtgtgcctgacgcgccatctcactgcgttcggcgcgtcccttttcgtcccaccaagtcacgtccggtttgtctttccagaacccactgcagatgttaactatattgtgatgttgacttgcgctgtgtgtctcgtcacttacatggtgatggccgcgatcctgcacaagcttgatcagcttgatgctagtcgggggcgagccatccccttctgtgggcagcgcggacgctttaagtatgaaatactcgtgaagacaggctgggggaggggttccggtactaccgcacatgtgggcattatgctgtacggcgtggactcccggtccggacacagacacttagacggcgatagggcatttcacaggaatagcttggatatcttccgtatcgcaactccacactctctcggtagcgtctggaaaatccgagtctggcacgacaacaagggtctttctcccgcatggttcctccagcatgtaattgtgcgggacttgcagactgctcgatccgcttttttcctggtaaatgattggctttccgtcgaaacagaggccaacggggggttggtcgagaaggaagtgctcgcagcaagtgacgcagcactcttgaggttccgccgactcttggtggccgagctgcagagaggcttttttgacaagcatatctggttatccatttgggaccgaccaccccgaagtcggttcacaaggattcagagggcaacctgctgtgtcctcctaatttgcctctttcttggtgccaatgccgtgtggtacggagcggtgggcgactctgcttatagcaccggacatgtgagcagattgagccctctgagcgtcgatactgttgctgtgggcctcgtaagcagtgtcgtggtttatcctgtgtacctggccatcctgttcctgtttagaatgtcaaggtcaaaagtcgccggctctccatcccctactcccgccgggcaacaggtgcttgacatagactcatgcctcgactcaagcgtgctggatagctcattcctcacctttagcggtctgcatgcagaagcattcgtgggacagatgaaatctgatctttttttggatgattctaagtctctggtgtgttggcccagcggagaaggaaccctgagctggcccgatctgctatctgaccccagtattgtggggtctaacctgcggcaactggccaggggccaggctggtcatggcctgggccctgaggaggacgggttttcactcgcctcaccctattcgccggctaaatctttcagcgctagcgatgaggatttgattcagcaggtattggccgagggagtgtcatcccccgcacctacccaggatactcatatggaaacagacctgctcagctcacttagtagcaccccaggcgagaagaccgagaccctggcactgcagaggctaggtgaactcggcccccccagccccggcctgaattgggagcaacctcaagctgcccggctgagcagaaccggcctggtcgagggtctgcgcaaacggcttttgccggcctggtgcgcatccctggcccacggcctctccctgctcctggtcgccgtcgccgtggctgtgagtggctgggtgggggcctctttcccccccggggtgagcgtggcgtggctgctgtcatcctctgcctcctttcttgcgtcatttttgggttgggaaccactgaaggtgttacttgaggctctgtatttttcattagtggcaaaaaggctacatcctgacgaggatgataccctggtcgagagtcccgcagtgactccggtgagcgcccgtgtgcccagagtgaggcctcctcatggttttgctctgtttttagccaaagaggaagcccgcaaggtgaagcgcctccatggtatgttgcgatccctgctggtgtatatgctgttccttctcgttacattgctggcttcttacggggacgcttcttgtcacggccatgcgtatcgtttacaatctgcgatcaaacaagaactgcacagtagagcttttttggctatcacaaggtccgaggaactatggccttggatggcgcacgtcctgctcccgtatgtgcatggaaatcagagctctccagaattgggccctccaagattgcggcaggtgaggctccaggaagctctatatccggacccacccggccctagagtccacacgtgtagtgcagccggtggtttcagcaccagtgattatgatgttggatgggaatctccacacaacggttccggtacctgggcctactccgcccccgacctgctcggcgcatggagttggggcagctgcgccgtgtacgattccggtggatacgtgcaagaactcggactctccttagaagaaagccgcgataggctacgattcttgcaattgcacaattggctggacaaccggagccgagccgttttcctggaacttacgaggtattctcctgctgtcggcttgcacgcagctgtgaccctccgtctcgaatttccagccgctgggcgggccttggctgctctgtctgtgcgcccctttgcgctgaggaggctctccgccggcctcagcctgccattactgacttccgtctgtctgctcctgttcgccgtccacttcgccgtcgctgaggctcgcacctggcatcgcgagggaagatggcgcgtcctgaggttaggagcttgggctaggtggctgcttgtggccctgaccgctgccaccgcgttagtgcgccttgcccaacttggtgcagcagacagacaatggactcgcttcgttagaggccgtccacgacgctttacgagcttcgaccaggtagcccagctttcttcagcagcacgggggctcgccgccagcctgttgtttcttctgttggtcaaggcagcccagcagttacggttcgttaggcagtggagtgtttttggaaagacgctttgccgggccctgccagaactcttaggggtcacactcggcttggtggtactgggggtggcctacgctcaacttgccattctcctggtaagttcttgcgtggatagcctgtggtccgtcgcacaggctctgcttgttctgtgccctggcactggcctgtctaccctctgtcccgctgaaagctggcacctgagcccccttctctgtgtagggctttgggccctcaggctgtggggagctctaaggttgggggccgtaatcctgcgatggcgctatcacgcccttagaggcgagctctacaggcctgcctgggagccccaggactacgaaatggttgaactcttccttaggaggcttcgtctgtggatggggctctccaaagttaaagagttccgccataaagtgaggttcgagggcatggaacccttaccaagtagatcgtcacgtggatcaaaggttagtcccgatgtgccacctcccagcgccggctcagacgcaagccatccatctacttctagcagccagctcgatggcctgtcggtgtctctgggtaggcttggcaccaggtgcgagcccgagccctcccgcctgcaggcagtgtttgaggcccttctgacccagtttgaccggctcaatcaggctacagaagatgtatatcagcttgagcagcagctccacagtctgcagggccgacgctcaagtcgagcccccgctggctcctctcgaggacctagtcctggcttacgacctgcactcccaagtcgtctggccagagcgtctagaggagtggatctggccactggcccctcgcgcactcctctcagggcaaaaaacaaagtgcatccctctagtacttag

SEQ ID NO: 129197 - DNA, 8550 bp, synthetic construct
  misc_feature 1..8550: note = Description of Artificial Sequence: Synthetic coding sequence
  source 1..8550: mol_type = other DNA
atggcagaggaggctgctcagaacataagtgacgatcaggaacggtgtctccaggctgcatgttgcctatcatttggaggcgaactcagcgtcagtacagataagtcttggggacttcacctatgttcttgtagtccaccaggaggtggattgtgggttgaggtgtacgccaaccacgtgctccttatgagtgacggaaagtgtggttgcccatggtgcgcgctgaatggcaaagctgaggatcgtgagtcgcagtctccctccagtagcgcgtctcgccaaaagaacatctggaaaacgaccagtgaggccgccttgtctgttgtgaacgaaaaaacccaggccgtggtgaacgaaaagacacaagctccgcttgactgtgataacagtgccgatcgcatcccacacaaacccttcatcattatagcccgcgcgtggagctctggcggccctcggtttcatcaccgacgcctgtgtgcaaccgggacagcggactcgactttctcagccttgttgcagctacagggaactacctccgccgccgccccatgctccttaaagatggaagcctcctgttgcgtgcttcgtctgctgtgttgcgcagaggatgtagccaccggcctccttccagggacagtaacaatggagactcctacgaaagtggctcgccctacccagacaagcagtcaacgggtgccactctggcccatctcccacttccccacatcaccgaggtcatcccatggactccctcctggcatacctcggaccccctcttttacggccagccagagcggctccgaaattctctaccctcccacacagcatcctccagtggcgattctggcacgtaacagtgataacttcatgaatcctgttcttaactgtagcctagaggtggaggccagggctccacctaaccttgggtttagagttcatatggctagtggggaagccttgtgcctgatgatggacttcggggatagtagcggagtggagatgaggttgcataatatgtcggaggccatggccgtgacggcttatcatcaatactctaaaggaatctttttccacctgttacattttcaattagacatgagcacctacaaggaggctgaaacacaaaacactaccctcaatgtctacctttgtcagtccgagaattcatgcctggaggactccgaccctagcaacctggggtatgaactgatctccgctttcgtcacgaagggcgtgtacatgttaaaagctgtgatttataacgagttccacggcaccgaggtcgaactcggaccttattatgtcgaaattgggcacgaggctgtgtctgctttcatgaattcatcctccgttcatgaagacgaggtgctggtgttcgctgacagccaagtcaatcagaagtccacagtagtgattcatcactttcccagcatccccagctataacgtgtcctttatctctcagacacaggtgggcgattcccaggcatggcacagcatgacagtgtggtacaaaatgcagagcgtgtccgtgtatactaacggtaccgtgttcgccaccgacactgacattacgttcacagctgtaactaaggagaccattccactggaatttgagtggtatttcggagaggatccaccagtccgcaccacctctcggtcgatcaagaaaagactttccattccccagtggtatcgcgtgatggtgaaagcttccaatcgcatgagctctgttgtgtcagaaccccacgtgatccgcgtgcagaagaagatagtggcgaatagactgacaagcccaagtagtgcgctagttaatgcttctgtggccttcgaatgctggattaatttcggcaccgacgttgcctatttatgggatttcggcgacgggacagtgtcactcggctcttctagctcatcccacgtgtactccagagagggagaattcactgtcgaggtgcttgcgtttaataatgtgtccgcctctaccctccgacagcagctgttcatagtctgcgaaccttgccagccgccgttggtgaagaatatgggccccggaaaggtgcagatctggcggagccagcccgtgaggttgggcgtgacctttgaagcggcagtcttttgtgatattagccagggtctctcatatacctggaatctgatggatagcgagggccttcctgtatccttaccagccgcagtggatacccatcgccagaccttgatacttccaagtcacaccctggaatacggcaactacactgcattagctaaagtacagattgaagggagcgtggtgtatagcaattactgtgttggcctggaagtccgggcgcaggctccggtgagtgttatctcagagggaacgcatctcttcttttccaggaccacaagcagccctattgtcttgaggggaacacaatcgttcgatccggacgaccccggagccacactccgctaccattgggaatgcgctacagcgggttcaccggcccacccgtgctttgattcaagcacagcgcaccaactggatgctgccgcccccacggtgtcctttgaagcccagtggttgagcgactcttatgaccagttcctggtaatgctgcgggtgtcctccgggggaaggaattcatccgaaaccagggtgtttttgtcaccgtaccccgactctgcattccgctttgtgcacatttcctgggtttccttcaaagatactttcgtcaactggaacgacgagctaagtctacaggctatgtgtgaggactgctctgaaattcctaatctaagctacagctgggacctgtttctcgttaatgctaccgagaagaacagaatcgaggtgcccttctgccgcgtggtgggactcctgggctctctcggcttgggcgcgatctcggagagctctcaattgaaccttcttcccactgagcccggcaccgccgaccccgacgctaccactactcccttttctcgggagccttcgcctgtcactcttgggcagcccgctacctccgcccctagaggtaccccgactgagccaatgaccggcgtgtattggattccccctgcaggggattccgccgtactgggcgaggcaccagaggagggatcacttgatctggagcccggacctcagtcaaagggtagcctgatgacagggaggtcggaacgcagtcagccaactcactcccccgacccacatctgtctgatttcgaggcttactactccgacatccaagaagcgattccatcaggcggcagacagccagccaaggacactagctttcctggatctggtccgtctttatccgccgaggagtcgcctggcgacggggacaacctagtagaccctagcttgtctgctggaagggctgaacccgtgcttatgatcgactggcccaaggccctgctaggacgcgctgtgttccagggatatagcagctccggcatcactgaacagacggtcaccattaagccttactcactctccagcggggagacatatgtactgcaggtcagcgtggcgtctaagcacggtcttctgggtaaagctcagctttatctgaccgtgaacccagccccccgagatatggcatgtcaggtgcagccccaccatggtctggaggcccacaccgtgtttagcgtcttttgtatgtctggtaagcctgatttccattacgagttcagctatcagattggaaatacatctaaacataccctgtaccatggtcgggatacccaatattatttcgtactgcctgctggggagcatttggacaattacaaagtaatggtgtctactgagattaccgatggcaaggggtcaaaggttcagccctgtacagtagtggtgactgttctgcctcgatatcacgggaatgattgtctcggggaagatctgtacaactcatctctaaagaacctctcgactttgcagctcatggggagctacactgaaataagaaattatatcaccgtgatcaccaggattttaagtagattgtccaaggaagacaaaactgcttcatgtaatcagtggtctcggatccaggacgctcttataagtagcgtctgtcgccttgcgttcgtggatcaagaagaaatgatcggcagcgtgctcatgctgcgcgaccttgtgagcttttcaaacaagctggggtttatgtctgcagtgcttatactgaagtacacaagggctctgctcgcacaggggcagtttagtggcccattcgtgattgataagggtgtccgcttagagctgatcggacttatctctagagtgtgggaggtatcagagcaggagaattcaaaggaggaggtttacagacacgaagagggtataaccgttatttctgacttactcttgggctgtctgtctctgaaccatgtctcaacgggacagatggaattcaggactctgcttcattataacttgcagagcagtgttcagagtctgggttcagttcaggttcacttgccgggcgacctggctggtcacagcccagccggagcggaaactcagtctccatgctacatctcgcagcttattctatttaagaaaaacccgtatccaggatctcaagctccagggcaaatcggtggcgtagtcggtcttaacctgtacacttgctcctcacgacgccctatcaataggcagtggctgaggaaaccggttatggttgaatttggcgaggaagatggtttggacaaccgccgcaacaagacaacctttgtgctcctcagagacaaagtgaatctccaccagttcaccgaactgtctgaaaacccgcaggagagtctccagatcgaaatcgagtttagcaagccggtcacgcgcgcgttcccagtgatgctgctggtgcggtttagcgagaagccgactcccagcgatttcctggtgaaacagatatacttctgggatgagagcatcgtgcagatctatattcccgcggcctcccaaaaggacgcatcagtcggctatctttcactgctggatgccgactacgatagaaagcctcctaaccgctacttggcaaaagccgtgaactacactgttcactttcagtggatcagatgcctgttttgggacaagcgggaatggaagtctgagagattctccccacagccggggaccagtcctgaaaaagtcaactgttcgtaccacagacttgccgcgtttgcactgttgcggcggaaattgaaagctagtttcgaggtctctgacatctccaaactgcagagccacccagagaatctgttgccttctatattcattatggggtccgtcattctttacggattcctggtcgcaaagtccagacaggtggaccatcacgaaaaaaaaaaggctgggtatatcttccttcaagaggccagcttgccaggacatcagctctatgctgtggttattgacactggattccgcgcccctgctaggctgacgtccaaggtgtatatcgtcctgtgcggtgataatggactgtccgaaactaaagaattgagttgtcccgagaaacccctgtttgagcgtaactcacgccacaccttcatcctctctgcccctgcccagctcggacttctacggaagattcggctgtggcatgacagcaggggtcctagcccaggctggtttatttctcatgtgatggtcaaagaactccataccggacaggggtggtttttcccggcccaatgctggctgtctgccggacgacatgatggacgagtcgaacgagagctgacatgcctgcagggaggactcggctttcgcaaactgttttactgtaagttcacagagtatctcgaggattttcatgtctggctctcagtatacagcaggccatcatcgagccgatacctgcacacccctagactcactgtcagcttttctctgctgtgcgtctatgcatgcttgacggctcttgtggctgccggtggccaggagcagcctcatttagacgtgagccccacccttggcagttttcgggtcgggcttctctgtaccctactcgcatcgcctggggcacagctgctaagcctgttgttccgacttagcaaggaggcccctggctctgcccgggtggagccgcactcccccctgcgcggcggcgcgcagacagaagcacctcatggtcctaactcttggggacggattcctgatgcacaggagccccgtaaacagcctgcgagcgctatcctgagcggatccggacgagcccagagaaaagccgcttcagataacgggaccgcctgtcctgcaccaaagctgcaggtgcacggagccgatcactccagaacctccctgatgggtaagtctcattgctgcccaccccacacacaggcaccatcatcaggactcgaaggacttatgccccaatggtcacgagctcttcaaccttggtggtcatccgccgtatgggcaatatgcggcaccgccagcctagcttgctctctgggcacgggctttcttgcctatagatttggtcaggagcagtgtgtccagtggcttcacttactcagcctctccgtcgtgtgctgtatcttcatcactcagccgcttatggtatgtctaatggccctgggcttcgcttggaagcggagagctgataaccattttttcacagagagtctttgcgaggcaacccgggacctggactctgaactggccgaaagatcatggaccagactgccattttctagcagttgctctattcccgattgcgccggagaagtggagaaggtgctggctgcacgacaacaggccagacatcttcgatgggctcacccaccctccaaggcccaactgagggggactagacagcgcatgaggcgtgaatcccggacacgggcagccctgcgcgacatttccatggatattctcatgctcctcctgttgctctgtgtaatttatggtcggttctcccaggacgagtatagccttaaccaggccattaggaaagaattcactcggaacgctcgaaactgcctcggaggccttagaaacatagctgattggtgggactggtctctgacaacgttacttgatggcctgtacccaggggggacaccatcagcccgcgttcccggagcacaaccaggggcattaggaggcaagtgttatctgattggttcaagtgtgatcaggcagctgaaagtgttccctaggcacctatgtaagcccccgaggccatttagtgctctgatagaggacagtatcccgacctgctcaccagaggtcggagggcccgagaacccatatctgatcgatcccgagaatcagaatgtgacattaaacgggccaggggggtgcggaacccgcgaagactgcgtcctttctcttgggagaactagaacagaagctcataccgctttgagtcgactgagagcatccatgtggatcgatcgaagcacacgcgctgtgagcgtgcactttaccttatacaatccccccacccaactgttcacctcagtgagtctgcgggtggagatcttgccgacgggttcactggtcccgagttccctcgtagagtcattcagcatcttcagatcggactcagcattgcagtaccatctcatgctgccccaactcgtgttcctagctctgagtctgatacatctatgcgtacagttatatcgcatgatggataaaggtgttctctcctattggcggaaaccacgtaactggctggaactatctgtcgtgggcgtgtcactgacctattacgccgtgagcggtcatctcgtgaccctggcaggagacgtgactaatcagttccataggggcctttgccgggcttttatggatctaactttgatggcttcatggaaccagagagccagatggctccgcggaatcctgctgtttctgtttaccctgaaatgtgtgtatctcccaggaatccaaaataccatggcatcatgcagctccatgatgagacactccctccctagcatattcgtggctggcctagtgggcgcgttgatgctggccgccctctcgcacctgcacaggttcctgctgtccatgtgggtgctaccaccgggaaccttcacagacgcctttccaggtctgctgttccattttccacggagaagtcagaaggattgtttactgggtctgtcaaagtcggaccagagggcaatggcgtgttacttcggcattttactaatcgtgtcggccactttatgctttgggatgctccgaggtttcttaatgacattgccacaaaaaagaaaaagctttcagtccaaaagtttcgttaggcttaaagacgtgactgcatacatgtgggaaaaggtcttaactttcttaaggctggagacccctaaattggaagaagcggagatggtggagaatcacaactactacctagacgagtttgcaaatttgctggatgagctattgatgaagatcaatgggctctcagattctcttcagttgcctctgctcgaaaaaacaagcaataacacaggtgaggcccgaactgaagagtctcccctggtagacatttcatcataccaggctgctgaacccgccgatatcaaggatttctag

SEQ ID NO: 129198 - DNA, 495 bp, synthetic construct
  misc_feature 1..495: note = Description of Artificial Sequence: Synthetic coding sequence
  source 1..495: mol_type = other DNA
taggtcggcggacccgagaatccttatctcattgaccctgagaatcagaatgtaacattgaacggcccaggggggtgcggcacccgggaagactgcgtcctgtctcttggccgcaccaggaccgaggcacacaccgccctgtctcgtctgcgcgcctccatgtggatcgaccgtagcactcgggctgtctctgtccattttaccttatacaacccgccgacacagctctttacaagcgtatccctgcgggtcgaaattcttcctaccggatctttagtgccgtcgtctctcgtggaatctttctctatattcagaagcgatagcgctctgcagtaccatcttatgttgccccagcttgtgtttctagccttgagtctcatccatttatgcgtgcagttatatcgtatgatggacaaaggcgtattgtcatactggcgaaaacctcggaattggttggaggtggcgtccctggtttccttttcctttgagaaatag

SEQ ID NO: 129199 - DNA, 2907 bp, synthetic construct
  misc_feature 1..2907: note = Description of Artificial Sequence: Synthetic coding sequence
  source 1..2907: mol_type = other DNA
atggtgaacagttctcgggtccaaccacagcagcctggcgatgcgaaacggcctcctgctcccagagctcccgatccaggaaggctgatggctgggtgcgccgctgtcggcgcatcactggctgcgcccgggggactctgcgaacaaagaggactggagattgaaatgcagcgcatccgccaggcagctgcccgagacccccccgctggcgcagcagccagtccttccccccccctctcaagctgtagtcgacaggcctggtccagggacaacccaggctttgaagctgaggaggaggaagaagaggttgaaggtgaagagggcgggatggttgtagaaatggatgtggaatggaggccaggttcgaggcggtccgcagcgagcagcgctgtgtctagcgtgggagcaagaagccgcggtttggggggataccatggggcgggacacccctctgggaggcgaaggaggagagaggatcagggccctccttgccctagtccagtgggcggtggcgatcctctgcatagacacttgcccctggagggccagcctccccgcgtcgcctgggctgaaagactggttcgcggcctcagggggttgtggggaacgaggctgatggaagaatcaagcactaacagggagaaataccttaaatctgtgctgagggaactcgtgacatacctactcttcctgatcgtcctgtgcattttaacttacgggatgatgtcatctaatgtttactactacacccggatgatgagccaactgttcctcgatacccctgtgtccaagacggagaagacaaacttcaaaaccctgtcttccatggaggacttctggaagtttacggagggttctttattagatggcctttactggaaaatgcaaccgagcaatcagacagaagccgacaatcggagctttattttctatgagaatcttttgttaggtgttcccaggattcgacagttacgcgtgcggaatggctcgtgcagcattcctcaagatctgagggatgaaatcaaagagtgttatgacgtctattcagtgtcttcagaggaccgagcaccgttcggaccgaggaatggcacagcttggatatacacgtcggagaaggatctcaacggatcgtcacattgggggattatcgcaacttattccggggctggttattatctggacctgtccaggaccagggaagagacagctgcccaggttgcatcgctgaagaagaacgtatggttagaccgcggcaccagggcgacattcatcgacttctctgtgtataatgccaacatcaacctgttctgtgtcgtgaggctgcttgtggagttccccgccacaggtggagttattccgagctggcagttccagcccctgaagctgattcgttatgtaaccacatttgacttcttcctcgccgcttgcgagatcattttttgtttctttattttttactatgtcgtggaagaaatccttgagatccgcatccacaagttgcactacttccggtccttttggaactgcttggacgtggtaattgtggtgctgtctgtggtcgctattggcataaatatctacagaacgagtaatgtggaggtgctgctacagttcctggaggaccagaatacttttccaaatttcgaacatctggcctattggcaaatacaattcaataatattgccgccgtgacagtattttttgtgtggatcaaactgttcaaattcattaatttcaaccgtactatgtctcagctgagtactacaatgagtaggtgtgcgaaggacttgtttggctttgccattatgtttttcataatcttcctggcctacgcccagctcgcatatctggtctttggcacccaggtggatgatttctccacattccaggagtgtatcttcactcaattccggattatattgggcgacataaacttcgctgaaatcgaagaggctaaccgggttttaggccctatctacttcacgacctttgtcttctttatgttttttattttgctgaatatgttcctggctattataaacgacacatactcagaggtgaaatcagacctggcacagcaaaaggcagaaatggaactgtctgacctgatccgtaaagggtaccacaaggctctcgtgaagctaaaactgaaaaagaacactgttgacgatatcagcgaatcactgcggcaaggaggggggaagctgaactttgacgagctgagacaggacttaaaaggaaagggccacaccgatgctgagatagaggccatcttcactaaatacgatcaagacggagaccaggagctcacagagcatgagcaccagcagatgcgagacgacctcgagaaggaacgagaggatctcgatttggaccacagctccctgcccaggcccatgtctagccgctcctttccaaggagtcttgatgatagtgaagaagatgatgatgaagactccggccatagttccaggcgccgcggaagcataagcagcggagtgagttatgaggaatttcaagtgctggtccgcagggtggatcgtatggaacattctatcgggagcatcgtgtcaaaaatagacgccgtaatcgtaaagctggaaatcatggaaagggcgaaattgaagaggcgtgaggtgctgggccgcttgctggatggtgtggccgaagacgagaggctcggccgcgactctgaaatccatcgggagcaaatggagcgactggtgcgggaagagttagaacgctgggaatcggatgacgctgcgtctcagatatcccatggacttgggacgcccgttggcctgaacggccagccacggccgcgctcctcgagaccttcttcatcgcaaagtacagaggggatggaaggagccgggggtaacggctccagcaacgtacacgtatag

SEQ ID NO: 129200 - DNA, 1161 bp, synthetic construct
  misc_feature 1..1161: note = Description of Artificial Sequence: Synthetic coding sequence
  source 1..1161: mol_type = other DNA
atgagtcagctctctaccacgatgtcccgctgtgccaaagatctgtttggtttcgctattatgttcttcattatctttctcgcctatgcacagctcgcatatctcgtgttcggcactcaggtggatgatttttccactttccaggaatgcatcttcacgcagtttagaataatactcggcgatataaactttgccgagatagaggaagctaatcgggtcctgggcccgatctacttcacaacttttgtgttttttatgtttttcatcttactgaatatgtttctcgccatcattaatgacacttattccgaggtgaaaagcgacctggctcagcagaaagccgaaatggagctcagcgaccttattaggaagggctatcacaaagctctggtcaagctgaaactgaagaagaacacagttgacgacatttccgaaagcctgcgtcagggtggagggaaactgaattttgacgaattgcgtcaggacctcaaaggtaagggtcacaccgatgccgaaatcgaagccatattcaccaagtacgaccaggacggtgaccaagaactcaccgaacacgaacatcagcagatgcgggacgatctcgagaaggagcgtgaggaccttgatcttgaccacagttcgctgccgagacccatgtcatcccgatccttcccacggtccctggacgactctgaggaagacgatgacgaagactccgggcacagctcaaggaggagaggatccataagtagcggggtgtcatatgaggagtttcaagtgctcgttcgtcgtgtggaccgcatggagcacagtataggttctatagtgagtaaaattgacgccgtcatagtaaagctagaaatcatggaaagagcaaagctcaaacgacgagaggttctgggccgacttttagatggtgtggctgaggacgagcgcctaggtcgggatagcgagatccaccgcgaacagatggagcgactcgtgagggaagagcttgagagatgggagagtgatgatgcagcatcccagatatcccatggtctgggcaccccggtggggcttaatgggcaaccaaggcctcgaagttccagaccttcgagttctcaatccaccgagggcatggagggcgccggagggaatgggtcctcaaatgtacacgtctag

SEQ ID NO: 129201 - DNA, 1161 bp, synthetic construct
  misc_feature 1..1161: note = Description of Artificial Sequence: Synthetic coding sequence
  source 1..1161: mol_type = other DNA
atgtctcagctgtcaactaccatgtctagatgtgccaaggacctgtttggctttgcaatcatgtttttcatcattttcttagcctacgcacagttggcttatttggtgttcggaactcaggtggatgattttagcactttccaagagtgtattttcacacagtttcggattattctgggggacatcaatttcgccgaaatagaagaggcaaatagggtgcttggtcctatttacttcacaacctttgtattttttatgttctttatacttctgaacatgttcctcgccatcatcaatgacacatattccgaggtgaaaagcgacctggcgcagcagaaggcggagatggagttatctgacttgatacggaagggttaccacaaggccctcgtgaaactgaaattgaagaaaaacaccgtcgacgatatctctgagtcactaagacagggtggagggaagctgaatttcgacgaattaagacaagacctaaagggtaagggacataccgatgcagagatagaggcaatcttcaccaagtatgatcaagacggcgatcaggagctgactgaacatgagcatcagcagatgcgggacgatctcgaaaaagagcgcgaggatctcgaccttgaccactcctcattgcctcgccctatgagctcgcgctccttcccccggagtctcgacgactctgaagaagatgatgacgaagactcgggccactcttctcgtcgtagagggtcaataagcagtggcgtttcctatgaggagtttcaggtcttggtccgccgtgtggaccgaatggaacatagcattgggagcattgtgtccaaaatcgacgccgtgatagtcaagctggagattatggagcgggccaagctgaaacgacgagaggtactaggcaggctactcgacggggtggcagaggatgagcgcctcggcagagattccgaaatacaccgcgagcagatggaacgtttggtgcgcgaggaactcgagaggtgggaaagtgatgacgccgcctctcagattagccacgggcttggcaccccggtggggctgaatggacaaccgagaccgaggagcagccgcccatcgagttcacaaagcaccgagggcatggagggcgctggcgggaatggatcatcgaacgtgcacgtgtag

SEQ ID NO: 129202 - DNA, 2418 bp, synthetic construct
  misc_feature 1..2418: note = Description of Artificial Sequence: Synthetic coding sequence
  source 1..2418: mol_type = other DNA
atgaatgctgttggaagtccagagggtcaggagctccagaaactgggcagcggcgcatgggataacccggcatactcaggacctccttcaccacatggtaccctgcgcgtgtgtactatctctagtaccgggcccctccagccacagcctaagaagccagaagacgaacctcaggagactgcgtacagaacgcaggtgtccagttgctgccttcacatttgccaaggaattcgtgggttgtgggggaccacattgactgagaacacagcagagaacagagagctgtacatcaaaaccaccctgcgtgaactactggtttacatcgtatttttagtcgatatttgtctgctaacctacggtatgactagttcctccgcttactactacacgaaggttatgtctgagctttttctacatacacccagcgacacaggtgtctcattccaggccattagctcaatggctgacttttgggatttcgcacagggtccccttctcgactccctgtattggacgaagtggtacaataaccagtcattgggacatggctcccatagcttcatctattacgaaaatatgctgctaggcgtgccccgcctgcgtcagctgaaggtccggaacgactcctgcgttgtgcatgaggatttccgggaagatatcctctcctgttatgacgtatactctcccgataaagaggagcaactcccctttggacccttcaatggtacagcttggacttaccactcgcaggacgaactgggtgggttttcacactgggggcgactaacctcctactcaggaggcgggtattaccttgatctgccaggaagccgtcaaggttcagctgaagccttgcgagcactccaggaaggtttatggctagatagaggaacaagagtagtcttcatcgacttctcggtctacaatgctaatatcaatttgttttgtgtattaaggctggtcgttgagttcccagcaacaggcggtgctatcccctcctggcagattagaaccgtgaagttaatccgttacgtatccaactgggacttctttattgtcggctgtgaggtcatcttctgtgtgtttatcttttattacgttgtggaggagatcctcgaactccatatccacagacttcgctatttgagcagtatatggaacattcttgacttggttgtgatccttctgtccatcgttgccgttggctttcacatcttccgcactctcgaggtgaacaggctgatgggcaagctgctccagcaacccaatacctatgccgactttgaattcttggccttttggcagacccaatataacaacatgaatgctgttaatctgtttttcgcctggattaagatctttaagtatatttcctttaataagactatgacccagctctcttccactctggccaggtgtgccaaagacatactcggattcgccgttatgttttttatcgtcttcttcgcatatgcccagttaggctatcttctgttcggcacacaggtagaaaatttttcaaccttcataaagtgcatatttacccagtttcggattatcctgggagattttgattacaatgcaattgataatgctaatcgaatccttgggccggcttacttcgtgacctacgtgttttttgtgttctttgtgttgctgaacatgtttctagccatcatcaatgacacctactccgaggtgaaagaggaactggccggacaaaaggacgagcttcaactctccgacctgctgaagcaggggtacaataagacccttcttagactgagactgcggaaggaacgcgtgtctgacgtgcagaaagttctacagggcggtgaacaggaaatacaattcgaggattttacaaatacactcagggagttaggacacgctgaacatgaaatcaccgagctgaccgcaacatttactaagtttgacagagacgggaacaggattctggatgaaaaggagcaggagaaaatgcggcaagatctcgaagaggaaagggtagcactgaataccgaaatcgagaagctgggtcggagtatcgttagctccccacaggggaaatcgggcccagaagccgccagagccggaggctgggttagcggcgaggaattctacatgctgactcgccgagtgctccaactcgagacagtcctcgaaggcgtggtatctcagatcgatgccgtgggcagtaagttaaaaatgttggagagaaaaggctggctcgcaccttccccgggagtcaaagaacaggcaatctggaagcatcctcagcccgcccccgcagtcactccggatccatggggcgtacaggggggtcaggagtcagaagtgccatacaagagggaagaagaggctttggaagaacgcagactcagtcggggcgagatccccacactacagcgctcctag

SEQ ID NO: 129203 - DNA, 2193 bp, synthetic construct
  misc_feature 1..2193: note = Description of Artificial Sequence: Synthetic coding sequence
  source 1..2193: mol_type = other DNA
atgaatgctgtgggatcccctgaaggacaagaattacaaaagctcgggagcggagcttgggataatccggcctattctgggccaccatctccacacgggactcttagagtgtgcaccatcagttcaaccggtcctttgcagccccagccaaaaaagcccgaagacgaaccacaggagaccgcatataggacgcaggttagttcctgctgcctgcacatttgccagggcattaggggcctctgggggactaccttgactgaaaacacggcggagaatcgagagctctacatcaaaaccacgcttcgagagcttttggtttacatcgtgtttctcgttgatatctgtttgttgacctatggcatgacttccagtagcgcctactactatactaaggttatgagcgagttgttcttgcacacacccagtgacaccggagtctcattccaggccatcagtagtatggcggacttttgggactttgcccagggtccgctgttggactcactgtattggacaaagtggtacaacaatcaatccctgggccacgggagccatagtttcatttattatgaaaacatgttacttggagtgccccgcctgcgccagctcaaagtgcgcaatgatagttgcgtagtacatgaggattttcgagaagatatcctgagctgttatgatgtgtactcacctgataaggaggagcagctgcctttcggcccattcaacgggactgcgttagtcgtcgagtttcccgcgaccggcggcgctattcccagctggcagatccggactgtgaagctcatccggtatgtgtctaattgggacttttttatcgtgggatgcgaagttatcttctgcgtgttcatcttttattacgtcgtggaggagattctggaactgcacattcacagattaaggtatttatcctcgatctggaacattctggatctggtagtgatcctactatcaatcgttgctgtgggtttccacattttcagaacgctggaggtaaacaggctgatggggaagctgctccagcagcccaacacatacgccgactttgaattcctggctttctggcagacccagtacaacaacatgaacgccgtcaacctctttttcgcatggattaaaattttcaagtacattagttttaacaagacaatgacccagctttcctcaacattggccagatgcgcaaaagatatccttggctttgcggtgatgttcttcatcgtattctttgcatacgctcagcttgggtatctactgtttggaacccaagtagaaaatttttccacattcattaaatgtatctttacccagttcaggatcattctgggggactttgattacaacgcaatcgataatgcgaatcgtattctgggcccggcctactttgtgacatatgtgtttttcgtgttttttgtgctgttgaacatgttcctggccataattaacgatacatactcagaagtcaaggaagaactggccgggcagaaagacgagctacagctctccgacctcctcaagcagggctacaacaaaaccctcctgcgccttcggctaaggaaagagagggtctctgatgtacaaaaggtgctacagggcggtgaacaggaaattcagttcgaagatttcaccaacactctgcgggagttaggccacgcagagcacgagatcacagaactgacagcaaccttcacgaaattcgaccgcgacggaaacagaatcctggacgaaaaagaacaggaaaagatgaggcaagatctagaggaagaacgcgtagctttgaatacggagatagaaaagctcggaagaagcattgtttcgtctccccaagggaaatcaggccctgaggccgcgagggccggtgggtgggtttccggcgaggagttttacatgctgacacgacgggtgctgcagttagagaccgtactcgagggagtcgtgagtcaaattgatgccgttggtagtaaactaaagatgttagagcgaaaaggttggctagcacctagcccaggcgtgaaggagcaggctatatggaagcacccccaacccgcccctgccgtcactcctgacccttggggcgttcagggcggtcaagaatccgaggtgccttataaaagggaggaggaggctctggaagagcggcggctttccagaggtgagattcctacactgcaaagatcatag

SEQ ID NO: 129204 - DNA, 2328 bp, synthetic construct
  misc_feature 1..2328: note = Description of Artificial Sequence: Synthetic coding sequence
  source 1..2328: mol_type = other DNA
atgaatgcagtcggcagtcccgagggtcaagaactccaaaagctaggttctggagcatgggataatcctgcctactctggacctcctagtcctcacgggactcttagagtttgcacaatcagcagcaccggacccctgcagcctcagccgaaaaaacctgaggatgaaccacaggagactgcctacaggacacaggttagtagctgttgccttcatatatgtcaggggatacgcggtctctggggaacgactctgaccgaaaacactgccgagaaccgagagctgtacatcaagacgacacttcgcgaactcctggtctatatcgtctttctggtggacatctgcctgttgacatacgggatgacttctagttccgcatattattatactaaggttatgagcgaattatttcttcacacgccaagtgacacaggcgtgagctttcaggcaatatcgtcaatggcggacttctgggactttgctcagggtcctctcctcgattccctctattggacaaagtggtataataaccagtcactgggccacggctcccatagcttcatttattacgaaaacatgttattgggcgtgccacgactgcgtcaattaaaggtacggaacgattcatgtgtagtgcatgaggattttcgggaggacatcctcagctgctacgacgtctattcgcctgacaaagaggagcaactgccttttggccccttcaatgggactgcatggacctatcacagccaggatgagctgggcggcttctcacactgggggcgcttgacaagttattctggcggtggttactaccttgatctcccgggcagccggcagggctccgccgaggcactacgggcactgcaggaaggactgtggctcgatagagggactcgtgtggtattcatcgacttttctgtgtataatgccaatataaacctgttttgtgttctgcgtctggtcgttgagttcccggctcgcaggtgccaccctatcctggctaatccccatagccaggcagatccactgtgccaacaattattttttatcgttggttgtgaggttatattttgcgtctttatcttttattacgttgttgaagaaatcttagagcttcatatacataggcttcgctatttaagttcaatctggaatatccttgatctggtggtgatccttctttcaatagtggccgtcggatttcatatcttcaggacattagaagtcaatagactcatgggcaagcttctccagcaaccaaacacctatgccgactttgagttcctggcattttggcagacccagtacaataatatgaacgccgtgaatttgtttttcgcctggattaaaatcttcaagtacatcagcttcaacaaaaccatgacccaactgtcatcaacgctggcccggtgcgctaaagatatcctaggctttgccgttatgtttttcatcgttttcttcgcatatgcccaattaggttatctcttgttcggcacacaggtcgagaatttcagcacgtttatcaaatgcatcttcactcaatttaggatcatcctgggggatttcgactataacgcaattgacaacgcaaataggatcctgggccccgcgtattttgtcacttacgtcttctttgttttcttcgtgctgttgaacatgtttctggcgatcatcaatgacacatattccgaggtgaaagaggagctggctgggcagaaagatgagctgcaactgtcagatctactgaaacaggggtacaataagacactgctgaggctgagactcagaaaggagcgcgtgtccgacgtgcagaaagtgctgcaagggggtgaacaggagattcaattcgaggatttcacgaacacattgcgggagctgggccacgcagaacacgagattaccgagctcaccgctacctttacaaagttcgaccgcgatggcaacagaattctcgacgagaaggaacaagaaaagatgaggcaggacctagaggaagaacgggtagccctgaacacggaaatcgagaaacttggccgatccatagtgagcagtccccaagggaagagcggccccgaggcagcccgggcgggcggctgggtctccggagaagagttctatatgctgacccgccgggtgcttcagctggagacagtcctggagggtgtcgtttctcagatagacgcggtgggcagcaaacttaaaatgttagaacggaaaggatggctggcaccttctcctggcgtgaaggagcaggcaatttggaagcacccacaacctgcaccggcagtaacccccgatccctggggccctggctgggccggggagtag

SEQ ID NO: 129205 - DNA, 2283 bp, synthetic construct
  misc_feature 1..2283: note = Description of Artificial Sequence: Synthetic coding sequence
  source 1..2283: mol_type = other DNA
atgaatgccgtgggatctcctgagggacaagagcttcagaaactaggctctggcgcctgggacaatcccgcttatagcgggccaccatctccgcacgggaccttgcgagtctgtaccatcagcagtacaggccccctgcaaccccagcctaagaagcctgaggatgagcctcaggagacagcttacagaacccaggtgtcttcctgctgcctccatatttgccaaggaattcgaggtctgtggggaactaccctgacagaaaacactgcagagaatagagagctgtatatcaagaccactctcagggaattgcttgtgtacattgtatttctggtcgatatctgcctgctgacgtacggcatgaccagttcatccgcatactattacactaaggtgatgtcagagttgtttctccacacacccagcgacactggagtgtcgttccaagcaattagcagcatggcagatttctgggattttgcccaggggcctctgctcgattcactctattggacaaagtggtacaacaatcagtctcttggccatggatcgcactcatttatttactacgaaaatatgctcttgggggtcccgcgcttgagacagttaaaagtgcgaaatgatagctgcgtcgtccacgaggacttccgggaggatatcctttcttgttacgatgtttatagcccagacaaagaagagcagttgccctttggcccgttcaatggtactgcctggacataccacagccaggatgaactgggaggtttcagtcactggggcagattgacctcttacagtggcggagggtactacctggatctgccaggatccaggcaggggagtgcggaggctcttagggctctacaggagggcctgtggctggataggggcacccgggtggtgtttattgatttcagtgtctataacgccaatatcaacctgttttgtgtgctgcgcctggtcgtggagtttcccgcaaccggcggcgcaattccttcttggcagatccgtacagtcaagcttatccgctatgtatcaaactgggattttttcattgtaggctgcgaagttatcttctgcgtgtttattttctattatgttgttgaggagatcttggagctccacattcacaggctgaggtacttatccagtatctggaatattctggatttggtggtgattttgctgtccatagtcgcagtgggattccatattttcagaacacttgaggtgaaccggctgatggggaaactgctgcaacagcccaacacatacgccgacttcgagttcttggccttctggcagactcagtacaacaacatgaatgccgttaacctttttttcgcctggatcaagatctttaagtacatctcattcaataagactatgacccagctgtcctccactctggctcgatgtgcaaaggatattctcgggttcgctgttatgtttttcatcgtcttctttgcttatgcccagctcggctacctgcttttcggcacgcaggtcgagaacttcagtacatttatcaaatgcatctttacccagttcaggattatcctcggggattttgactacaatgccatcgataacgcaaacagaatcctgggcccagcatatttcgtcacttacgttttctttgtttttttcgtcctgttgaatatgtttcttgccataatcaacgacacatattcagaagtgaaagaggagctggcagggcagaaagatgaactgcagctttctgaccttttaaaacagggctacaataaaaccctcctaagactccggttaaggaaagaaagggtgagtgatgtacagaaggtgctccagggcggagaacaagagatacagttcgaggacttcacaaatactttaagagaactcggacacgccgagcacgagattaccgagcttacagccaccttcacaaagtttgacagggatggaaatagaatcttggatgaaaaggagcaagaaaagatgaggcaggacttagaagaagagcgcgtcgccctgaacacagagatcgagaaactcgggaggtccattgtgtcttctccccagggcaagtctgggcccgaagccgcgcgtgccggcggctgggtgagcggtgaagagttctacatgttgactcggcgagtgcttcagctagagaccgtacttgagggtgtggtcagccaaatcgatgccgtgggcagcaaactgaagatgctcgagcgcaagggctggctcgccccttcgcctggagtgaggtttccaatcaaagagaagcgaaagccgtag

SEQ ID NO: 129206 - DNA, 1842 bp, synthetic construct
  misc_feature 1..1842: note = Description of Artificial Sequence: Synthetic coding sequence
  source 1..1842: mol_type = other DNA
atggctgaggcaagtcgctggcatagagggggcgcctcaaagcacaaattgcattacaggaaggaggtggagatcaccactacacttcaggaactcctgctgtacttcattttcttaatcaatctgtgtatcctcacattcggaatggtgaatccccacatgtattatctgaacaaggtgatgagcagtctgttcctggacactagtgtgcctggtgaagagcggacaaatttcaagtcaattcgcagcataaccgatttctggaagtttatggaggggccgctgttggagggactctactgggattcatggtacaataaccagcagttgtataatctgaagaactcaagccgcatctactatgaaaacatcttgctcggagtgccgcgagtgcgccagttgaaagtccgcaataacacctgtaaggtttatagctcctttcagtccctcatgagcgagtgctacggaaaatatacatccgcgaatgaagacctctcgaacttcggcctacaaattaatacagagtggaggtacagtacgtccaatacaaactcgccatggcactggggttttctgggtgtctacagaaatggaggatacatttttacactctcaaagtctaaatctgaaacaaaaaataaatttatagatcttcggcttaactcctggattacccggggcacccgtgtgatcttcatagactttagcctgtataatgctaatgttaatctcttttgtatcatccgcctcgtggcagagtttcctgctaccggaggaatcctgactagctggcagttttactcagtgaagctcctcaggtatgtgtcatattacgactattttatcgcctcctgtgaaattacattttgcattttcctgttcgttttcacaacccaagaagtgaaaaaaataaaggagttcaaaagcgcctacttcaaatccatatggaactggcttgagctcctgttactgctcctttgtttcgtggcagtttcattcaacacctactacaatgtgcaaatattcttgcttcttgggcagcttcttaagtctaccgaaaaatacagtgatttttattttcttgcctgctggcatatatactataataatataatagccatcactattttctttgcatggattaaaatatttaaattcatatctttcaataaaactatgtctcagctatcgagcacactctcgcggtgcgtcaaggatatcgtcgggttcgccattatgttctttattatcttctttgcatacgcgcagttgggcttcctggtgttcggcagccaggtcgacgacttttcaacctttcaaaattcgatcttcgcacaatttcggatcgtcctcggagactttaactttgccgggatccagcaggccaaccctatcctcggcccaatttactttataacattcatcttctttgtgttcttcgtactactgaacatgttcctggctattattaatgacacttactccgaagttaaggccgattacagcattggaaggaggctcgacttcgaactaggcaaaatgatcaagcagtcgtacaagaacgtgttggaaaagttccggctgaaaaaagcccaaaaagatgaagataagaagacaaagggctccggcgatcttgccgagcaagcacgaagagagggatttgatgagaatgagatccagaacgcagagcagatgaaaaagtggaaggagcgcttggaaaagaagtattattcgatggaaattcaagacgactaccagccagtcacacaggaggagtttagggatgggaccactaccaaatataagatgagattctcagagtgcttaacaaagcggatttag

SEQ ID NO: 129207 - DNA, 1773 bp, synthetic construct
  misc_feature 1..1773: note = Description of Artificial Sequence: Synthetic coding sequence
  source 1..1773: mol_type = other DNA
atggcagaggcaagccgttggcaccgtggggtgactttcgggatggtaaacccccatatgtattatttgaataaagtgatgtcaagcctgtttctggataccagcgtaccgggtgaggagagaactaacttcaagtccatacgatcaataacagacttttggaagtttatggaaggacctctcctggaaggcttgtactgggactcgtggtacaataatcaacagctctacaatttgaaaaattcatctcgcatctactatgagaacatccttctcggggtaccacgcgtccggcagctcaaagtgaggaacaatacttgcaaggtgtacagttccttccaaagcctgatgagtgagtgttatggcaagtatacatccgcaaatgaggatctgtcgaatttcggtctccagatcaacacagaatggcggtattctacgagtaataccaactccccttggcactggggcttcttaggcgtgtatcgaaatggaggttatatttttactctgagcaagtccaagtctgaaactaagaacaaattcatcgatctgagactcaattcctggattacacgcggcacccgcgtaatattcatagacttctcgttgtataacgccaatgtcaatttgttctgcatcatcaggctggttgccgaattcccagctaccggcggaattcttaccagctggcagttctatagcgtaaaactcctacgatatgtgtcctactatgattactttatagcatcttgcgaaatcaccttctgtatctttctgtttgtgtttacaacacaggaggtgaagaagattaaggagttcaagtccgcctattttaagtccatctggaattggctcgaactcttactgttgctactttgctttgtagcagtctcgttcaacacgtactataacgtccagatttttctattgctgggacaactgctgaagtctactgagaagtatagcgatttttacttcttagcatgttggcacatctactataataatatcatcgccatcactatcttcttcgcttggatcaagatatttaaatttatttcattcaacaaaactatgtctcagttgtctagcacactgtcgcgctgcgtcaaagacatagtgggcttcgctattatgttctttatcattttcttcgcctacgcccagttgggatttctggtgttcggaagccaggttgatgatttctcgacatttcaaaatagtatcttcgctcaattcagaatcgtgcttggggatttcaattttgccgggattcagcaggctaacccaatcttgggccccatttattttatcaccttcatcttcttcgtgtttttcgtcctactcaatatgttcttggccatcatcaatgatacctactccgaggtgaaagcagattatagcattggacggagactcgatttcgaactgggcaagatgataaaacaatcttacaagaacgtactggagaaattcaggctgaaaaaggcccagaaagacgaggacaaaaaaactaaagggagcggggaccttgcagaacaggcgagacgcgaagggtttgacgagaacgagatccagaatgctgagcaaatgaagaagtggaaagagcggctggaaaaaaaatattattccatggaaatccaggatgactaccagcccgtgacccaggaggaatttcgagagctcttcttatatgcagtagaactggaaaaggagctccattatatcaacctgaagctgaaccaggttgtgagaaaggtgagcgcactctag

SEQ ID NO: 129208 - DNA, 1875 bp, synthetic construct
  misc_feature 1..1875: note = Description of Artificial Sequence: Synthetic coding sequence
  source 1..1875: mol_type = other DNA
atggctgaggcaagtagatggcatcggggtggtgctagtaagcataaactccactataggaaagaggtcgaaatcactaccacactccaggagttactgctgtacttcattttccttatcaacttatgtattttaacttttgggatggttaatcctcatatgtactacttgaacaaggtcatgagcagtctgtttctggataccagtgttcctggggaggagcgcactaatttcaaatcgattcgaagtatcaccgacttttggaaatttatggaaggcccactgctcgagggactttattgggactcctggtacaacaaccagcagttgtacaatctgaaaaattccagtaggatctattatgagaacatcctgctaggagttccgcgcgtgaggcaactgaaggttagaaacaatacctgtaaggtgtacagctcttttcaaagcctcatgtcagagtgctatgggaagtacacaagcgccaacgaagatctgtcaaacttcggcctccagatcaacaccgagtggagatactcgacaagcaacaccaacagcccttggcactggggctttctgggggtgtatagaaatggcggttatattttcacattgagtaaatctaagtcagagacaaagaacaaattcatcgacctccggctgaatagctggattaccagggggacccgcgtcattttcatcgacttctccctatacaacgccaatgttaacctgttctgcataataagactggtcgccgaatttccggccacgggcggtatattaacctcttggcagttctacagtgtgaaactgctgaggtatgtgtcttactacgactacttcattgcctcctgtgaaatcaccttttgcatttttctgtttgtgttcaccacccaggaagttaaaaagatcaaagagttcaagtccgcctatttcaagagcatttggaactggctagaactgctgcttctgctactgtgttttgttgccgtctcgtttaacacttactacaatgttcagatctttttactcttagggcaattgctgaagtcgaccgagaaatatagtgatttctactttttagcatgctggcacatttattataacaacataatcgccatcaccatattttttgcctggatcaagatttttaagtttattagctttaataagaccatgtcccagctgagtagtactttgagccgatgcgttaaagacattgtgggcttcgcgatcatgttctttattatattcttcgcttatgctcagttgggcttcctggtgttcggctcacaggtggacgatttctcaaccttccagaattccatctttgcacagtttcggatcgtcctgggcgacttcaacttcgccggcatacagcaggccaatcctattcttggtcccatctacttcatcaccttcatcttctttgtcttcttcgtactcctgaacatgttcctggctataatcaacgacacttatagcgaggtgaaggccgactattctattggaaggcggctggactttgagcttgggaagatgataaagcagtcctacaagaatgtcttggaaaaatttcgcttaaagaaggcacagaaagatgaagacaagaagactaagggaagcggtgaccttgccgagcaggctcgcagagagggctttgatgaaaatgagattcagaacgctgaacagatgaagaagtggaaagaaagactggagaaaaaatactactccatggagatccaggacgattatcagccggtcacacaggaagaatttagggagctgttcctgtacgcagtggaattggaaaaggaacttcattatatcaacctgaagttgaatcaggttgtacggaaagtgagcgcactgtag

SEQ ID NO: 129209 - DNA, 1809 bp, synthetic construct
  misc_feature 1..1809: note = Description of Artificial Sequence: Synthetic coding sequence
  source 1..1809: mol_type = other DNA
atggccgaggcctctcgctggcatcggggtggggctagcaagcataagctgcattataggaaggaggtggaaatcacaacaaccctacaggagctgctactctattttatttttctgatcaatttgtgtattctgacgtttggcatggtcaacccacatatgtactacctcaacaaagtcatgtcatccctgtttctggacacctctgttcctggcgaagaaaggactaatttcaaatcaattcggtccattaccgatttctggaagttcatggaagggcccctgcttgaaggcctgtactgggattcctggtacaataaccagcagctgtacaatctcaaaaattcatcccgtatctattacgaaaacatcctgctgggtgtccctcgggtccgccagctaaaagtgcgcaataacacttgcaaggtgtattctagtttccagagcctgatgtctgagtgctatggaaagtatacaagcgcaaatgaggatctgtccaactttggactgcagatcaataccgagtggcgctactctacttcaaatactaacagtccttggcattggggttttctgggagtgtaccggaacgggggatacatctttacattatccaaaagcaaatcagaaactaaaaataaatttatcgatctacgcctcaacagttggatcacacgtgggacccgggtgatatttattgatttcagtctttacaacgccaacgtaaaccttttctgcattatccggttggtagccgagtttcctgctactggtggaattctcaccagctggcagttttatagcgtgaagctcttgagatacgtcagctattatgactactttatcgccagctgcgaaataaccttttgcatttttttgttcgtgttcaccacccaggaagtgaagaaaattaaggagttcaagagcgcctacttcaaaagcatctggaactggctggaattattactactgttgttgcttaaaagtacggaaaagtacagcgacttttatttcctggcttgctggcatatttattataataacattatcgccatcacgattttttttgcgtggatcaagatcttcaagtttattagcttcaataaaacaatgagccagctaagttctaccctgtcgcgatgtgtgaaggacatcgtggggtttgctatcatgttcttcatcattttttttgcctatgctcagctcgggttcctggtgtttgggagccaggtggacgacttctctaccttccagaactccatatttgcccagtttcgcatcgtgttaggggacttcaacttcgccgggatccaacaggcaaacccaatcctgggacccatctactttataacttttatctttttcgttttttttgtgctcctcaacatgttcctagcaataattaacgatacctactctgaggttaaggccgactactcaatcggccggcgcctggacttcgagctcggaaaaatgataaaacagagttacaagaacgtactggagaagtttagactcaagaaggcacaaaaggacgaagacaagaagaccaaaggcagcggggacctcgcagagcaagcgcgccgggaaggttttgatgagaatgaaattcagaacgcagaacagatgaagaagtggaaagagagactagagaaaaagtactactcaatggagattcaggatgactaccagccagtgacccaggaagaattcagagagctcttcctgtatgcagttgaattggaaaaggagctgcattacattaacctgaaactaaaccaggtcgtgagaaaggtgtctgctctatag

SEQ ID NO: 129210 - DNA, 1572 bp, synthetic construct
  misc_feature 1..1572: note = Description of Artificial Sequence: Synthetic coding sequence
  source 1..1572: mol_type = other DNA
atggctgaagcatcgcgatggcaccggggaggagcatctaaacataaactacattatcgcaaggaagtagaaattactacaacattgcaggaactgctactgtacttcatcttcctgattaacctgtgcatactaacctttggcatggtgaacccccacatgtactacttaaacaaagtcatgagtagtctgttccttgacacctcagtccccggcgaggagcgcactaacttcaaaagtattcgctccataacggatttctggaaatttatggagggcccactattggagggcctctactgggacagttggtacaataaccagcagctctataatctgaaaaacagctccaggatttactatgagaacatcctcctaggtgtgcccagagtccgccagctcaaggtgaggaataatacctgcaaggtgtacagctcattccaatcacttatgtccgagtgttatggcaaatacacatctgccaacgaggatctttccaacttcggcctgcaaatcaatactgaatggcgctactcaacttccaataccaattccccatggcactggggctttctgggtgtgtatcgtaatggaggatacattttcacacttagcaaaagtaaaagtgagacaaagaacaaattcatagacctccgactgaattcttggattaccaggggaacgcgagttatttttatcgactttagcctatataatgcaaatgtgaatctgttttgcatcatccggcttgtggcggagttccccgccactggtggaattctaaccagctggcagttttactccgtgaaattgttgaggtatgtaagctattacgattactttattgcttcgtgcgaaattaccttttgcatctttctctttgtgttcactactcaagaggtcaagaagattaaggaatttaagagcgcctactttaagagcatctggaattggttggagctgttactgctgctcctttgctttgttgccgtgagttttaatacgtactacaacgtgcagattttcctccttctgggccagctcttgaaaagtaccgagaagtactctgacttttactttctggcctgttggcatatttactacaacaacatcattgccatcaccatattctttgcttggattaagaatatgttcctagccattattaacgatacgtatagtgaagttaaggctgattatagcatcggcagacgactcgactttgagctgggcaagatgataaagcagtcttacaagaatgtattggagaagttccgccttaagaaggcccagaaggacgaggataaaaagaccaaaggctcaggagacctcgctgaacaggcccgaagagaaggatttgatgagaacgagatccagaacgcagaacaaatgaagaaatggaaagagcgcttagaaaaaaaatactattctatggaaattcaagatgactaccagccggtaacccaggaggagttccgcgaactcttcctttacgctgtggagttagagaaggagttgcactacattaatttgaaactgaatcaggtggtgagaaaagtttcagctttgtag

SEQ ID NO: 129211 - DNA, 1836 bp, synthetic construct
  misc_feature 1..1836: note = Description of Artificial Sequence: Synthetic coding sequence
  source 1..1836: mol_type = other DNA
atggaagaattagttgttgaggtgagaggcagtaacggcgccttttataaggcattcgttaaagatgttcatgaagacagtatcaccgtggcttttgagaataactggcaacccgaccgacagatccccttccacgatgtgcggttccctccacccgtgggctataacaaggacatcaacgaatccgatgaggtggaggtgtattcacgcgccaacgaaaaggagccgtgctgctggtggttagccaaggtgcgcatgatcaaaggcgagttctatgtcattgaatacgctgcgtgtgatgcaacttataatgaaatcgtaacgattgaacggctgaggagtgtgaaccccaataaaccagccacaaaggacaccttccataagatcaagctggatgtacccgaagacctccgccagatgtgcgccaaggaggcagcccacaaagactttaagaaggccgtcggagctttctcagtcacatacgatcctgagaactaccagttggttatcctgtcgatcaacgaggttacctccaaaagagcacacatgctgattgacatgcactttagatctttgaggacgaaactctcactgattatgagaaatgaagaggcctctaagcagcttgagtcgagccgccagctggcctcaagatttcacgagcagtttatagtgagggaagatctgatgggattggccatcggaacccatggggccaacattcaacaggcacggaaggtgcccggcgtgactgctatcgacctggacgaagacacgtgtactttccacatttatggcgaggaccaggatgccgttaagaaggccaggagcttcttagaattcgcagaagatgtgatccaagtgccacgcaacctggtgggaaaagtcatcggaaaaaatggaaagctaatccaggagatagtggataaatccggtgtcgtccgtgtcaggattgaggcagagaacgaaaagaacgtgccccaggaggaggaaatcatgcctccaaacagcctcccctctaataattcgcgggtcggacccaacgcccctgaagagaagaagcaccttgacatcaaggagaatagtactcattttagtcagccaaactctacaaaggtgcagaggggcatggtcccgtttgtgtttgtgggaaccaaggactccatcgccaatgccacggtgctccttgactaccacctcaactacttaaaggaggtggaccagctgcggctcgaacgcctccagatcgacgagcagctcaggcagattggggccagtagtcgccccccgcccaaccggaccgacaaagaaaagtcgtacgtcactgatgacggtcagggcatggggaggggctcacgaccttataggaatcgaggccacggccgccgaggcccaggctacacttcagggacaaacagcgaagcctctaatgcttccgaaacggaatccgaccaccgcgatgagttgtccgactggtccctggccccaacagaggaagagcgagagtcatttctgcgccgcggagacggtcggaggcgcggtggaggcggccgaggccagggggggagggggaggggcggaggatttaagggcaacgacgaccactcccggaccgataatcgccccagaaaccctcgagaggcaaaagggcgaacaactgatggctcacttcaaatacgggtagattgtaataatgagcgctctgtgcatactaagactctccagaataccagctctgagggctctcggctgcggacaggcaaagatcgtaatcagaaaaaggagaagcctgattcagtcgacggacagcagcccctagtcaacggagtcccatag

SEQ ID NO: 129212 - DNA, 513 bp, synthetic construct
  misc_feature 1..513: note = Description of Artificial Sequence: Synthetic coding sequence
  source 1..513: mol_type = other DNA
atgcctctgccagtggccttgcaaacacgcctcgcaaagcgcgggatattaaagcacctagagcccgaaccagaggaagaaatcatcgcagaggactacgacgacgatcccgttgattatgaagcaacccgcctggaaggactgccccccagctggtacaaggtctttgatccctcatgtggcttgccttactattggaacgccgacactgatctcgtcagctggttaagtccccatgatccaaactccgtggttacgaagtccgccaaaaagctaagaagcagtaacgcggctgtctccaggaaggatgaggagctggaccccatggatcccagttcatacagtgacgccccccgggggacatggagtacaggacttccgaagcggaatgaagccaaaaccggggcagatactaccgcggcaggcccactgtttcagcagcggccctatccatctccgggcgccgtgctacgcgctaacgcagaagcttcacggaccaaacagcaagactag

SEQ ID NO: 129213 - DNA, 204 bp, synthetic construct
  misc_feature 1..204: note = Description of Artificial Sequence: Synthetic coding sequence
  source 1..204: mol_type = other DNA
atgccactgcccgtcgctctgcagacgaggttagccaagagaggcatccttaagcacctggagcctgagccagaagaggaaatcattgctgaggactatgacgatgacccggtagattacgaggcaactcgcttagagggtttacccccctcatggtataaagttttcgatccatcctgcccgggttggtcagcaatggtgtag

SEQ ID NO: 129214 - DNA, 798 bp, synthetic construct
  misc_feature 1..798: note = Description of Artificial Sequence: Synthetic coding sequence
  source 1..798: mol_type = other DNA
atgccccttccagttgcgctgcagactagactcgccaaaaggggtatattaaaacacctagaacctgagcctgaagaggaaattatcgccgaggactacgacgacgacccggtagactatgaagcgacccgactggaaggcctgcccccttcatggtacaaggtttttgatcctagctgtggcctcccctattactggaacgctgacactgacctggtgtcatggcttagccctcacgaccccaactcagtcgtaactaagtctgcgaagaagctgcgctcctctaatgcagacgccgaagaaaagctggatagaagtcatgacaaatctgatcgcggtcatgacaagtccgacagatcccacgagaagctcgaccgaggacacgacaagtcagaccggggtcatgacaaatctgaccgcgatcgggagaggggatatgacaaggtggaccgcgagcgcgagcgggatcgcgagcgcgacagggataggggatacgataaagccgaccgggaagagggcaaagagcggcgccatcatcgcagagaggagctggccccgtaccctaagtcaaaaaaggcagtttctagaaaagacgaggagttagaccccatggatccttcctcttattcagatgcacctaggggcacctggtccaccggtcttccaaaaaggaatgaagctaaaactggcgccgatactaccgctgctggccccttattccagcagcggccttatccatcacccggcgccgtgttgcgggccaacgcagaagcgagcagaacaaaacagcaggactag

SEQ ID NO: 129215 - DNA, 513 bp, synthetic construct
  misc_feature 1..513: note = Description of Artificial Sequence: Synthetic coding sequence
  source 1..513: mol_type = other DNA
atgcccctgcctgttgcgctccagaccagactagcgaagcgcgggatactcaagcacctcgaacctgaaccagaagaagagataatcgccgaggactatgacgacgatccagtagattatgaagctactcgactggagggcctgcctccaagctggtataaagtgttcgaccccagctgcggccttccctactactggaatgccgacacggacctcgtgtcatggctctcccctcacgatcctaactcggttgtgactaagagtgccaaaaagttaaggagctccaacgcagcagtgtcccgcaaagatgaggaactcgacccgatggacccctctagttattcagacgctccccgaggtacttggagtactggcctccccaagcgtaatgaggccaagaccggggctgacaccaccgctgctggccccttgttccagcagcggccctacccctcccccggcgctgtgctgcgggctaatgcagaggcctcgagaacaaagcaacaggactag

SEQ ID NO: 129216 - DNA, 798 bp, synthetic construct
  misc_feature 1..798: note = Description of Artificial Sequence: Synthetic coding sequence
  source 1..798: mol_type = other DNA
atgcctctgcccgtggccttacagactcggctcgcaaagcgcggcatcctcaaacacctggaaccagaaccagaggaggagataatcgctgaggattacgacgacgatccagttgattacgaggctacccgactcgagggcctgcctccaagttggtacaaggtgttcgatccttcttgcggcctgccctactactggaatgcggataccgatctggtgagttggttgtcaccccatgatcctaatagtgtggtgactaagtctgcaaagaagctcaggagctcgaatgccgacgccgaggagaagctggaccgatcacacgacaaatctgaccggggtcacgataagagcgataggagccatgagaagttggaccgtggccatgacaagtccgacagagggcatgataagagcgacagagatcgagagaggggctatgataaggtggaccgcgagcgcgagcgcgatcgcgagagggatagggacagaggctacgataaagcagatcgcgaggaaggcaaggaaagacggcaccatcgacgagaagagctggccccataccccaagtccaaaaaagcagtgagtcggaaggacgaggagcttgaccctatggatcctagttcctatagcgacgcacctcggggaacatggtcaaccggactgccgaaaaggaacgaggccaaaactggagccgacacaaccgcagcaggtcccctttttcagcagcggccctaccccagccctggagcggtcctcagggccaacgcagaagcttctaggacaaaacagcaggactag

SEQ ID NO: 129217 - DNA, 642 bp, synthetic construct
  misc_feature 1..642: note = Description of Artificial Sequence: Synthetic coding sequence
  source 1..642: mol_type = other DNA
atgccccttcctgttgctctgcagaccaggctggcaaagcgcggaatcctaaagcatttggaacccgagcccgaggaggagatcatcgcggaagactatgatgacgacccagtcgactacgaggccactcggctagaaggattaccgcccagctggtacaaggtgttcgacccctcttgtggcttgccatattattggaacgctgatacggacctcgtctcatggctgtctccacacgacccgaatagcgttgtcacaaagagcgccaagaagcttaggtcatctaacgccgatgctgaagaaaagctggacaggtcccatgataagagcgaccgaggtcacgacaagtcggaccggagtcatgagaaactcgacagaggacacgacaagtccgacagaggccatgacaagtctgacagagatagagaaagagggtatgataaggtagaccgggagcgggagcgtgaccgggaacgggaccgggacaggggttatgataaggctgatagagaggaaggcaaggagcggcggcaccaccgccgcgaggagcttgccccttatcccaaatccaagaaagcagtgtcccgcaaagacgaagagttagacccaatggatcccagctcctactctgacgcaccatag

SEQ ID NO: 129218 - DNA, 798 bp, synthetic construct
  misc_feature 1..798: note = Description of Artificial Sequence: Synthetic coding sequence
  source 1..798: mol_type = other DNA
atgccactcccagtcgccctacagacaaggttagcaaaacgtggcatcctgaaacatttggaacctgagccggaagaagagattatagccgaggattatgatgacgatcccgttgactatgaggctacacgcttggagggtctgccccctagctggtataaggtgttcgatccctcatgtggactcccatactactggaacgcagatacagatctcgtgagttggctgagcccccacgacccaaattccgtagtaaccaaatcagctaaaaaacttaggtcctccaacgcagacgccgaggaaaaactggataggtcacatgacaaatcagatagaggtcatgacaaatcagatcggagccacgaaaaactcgatcggggtcacgacaagagtgatcgcggccatgacaagtcagatcgcgatagggaaagggggtatgacaaggtcgatcgggagagggagcgagacagggaaagagatagagatcgcgggtatgacaaagccgacagagaggaaggaaaagagcgaaggcatcatagaagggaagagctggcaccatatcccaaatccaagaaggccgtgtctaggaaggacgaggagctcgaccccatggatccaagttcttactcagacgcacctaggggaacttggtcaaccggcctccccaagcggaacgaggccaagacgggcgctgacaccacggctgctgggccactatttcaacaacggccatacccatcgcccggggctgtgctgcgagccaatgctgaggcttctaggacaaaacagcaggattag

SEQ ID NO: 129219 - DNA, 453 bp, synthetic construct
  misc_feature 1..453: note = Description of Artificial Sequence: Synthetic coding sequence
  source 1..453: mol_type = other DNA
tgaatcgctacctacctgctacacctactcgtccagcctgaagaagagatcatagccgaggattacgacgacgatccagtggactacgaagccacccgactcgaaggcctgccccccagctggtataaggtgttcgacccctcctgtgggcttccctactattggaatgccgatactgatttggtgagttggctctcaccccatgaccctaatagtgtggtcactaagtctgctaagaagttacgatcatctaacgcggccgtttcccgcaaagacgaagagctggatcctatggacccgtcatcttactcagacgctccaaggggaacctggagcacaggtctgcccaaaaggaatgaagccaagactggcgctgatacaaccgcggctgggccgctgttccagcagcgtccatacccaagccccggcgctgtgctccgcgccaacgcgtag

SEQ ID NO: 129220 - DNA, 699 bp, synthetic construct
  misc_feature 1..699: note = Description of Artificial Sequence: Synthetic coding sequence
  source 1..699: mol_type = other DNA
atgggctccgtcctctctaccgactcaggcaaatcggccccagcgtccgctacagctcgagccctggagagacgccgtgacccggaattgcctgtcacatcattcgactgtgctgtgtgtcttgaggttctgcaccagcctgtgcgcacccgatgcggtcatgtattctgcagatcctgcattgcaacatctctgaagaataacaaatggacatgcccttactgtagggcttacctgccaagcgagggggtcccagccaccgatgtggcgaagaggatgaagtcagagtataagaattgtgctgagtgtgacacgctagtgtgtctatctgagatgcgagcccacataaggacatgccagaagtacatcgataagtatggaccacttcaggagctggaagaaaccgcagcacgatgcgtgtgtcccttctgccagcgggagctgtacgaagatagcctgctggaccactgtatcacccatcaccggagcgagcgaagaccggttttctgtcctctctgtcgcctgataccggatgaaaacccaagtagtttctcaggcagcctgatcaggcatcttcaggtctctcatacattattttacgatgactttatcgatttcaatatcatcgaagaagccttgatacgccgcgtgttagatcgctcattactggaatacgtgaaccacagtaacaccacgtag

SEQ ID NO: 129221 - DNA, 1986 bp, synthetic construct
  misc_feature 1..1986: note = Description of Artificial Sequence: Synthetic coding sequence
  source 1..1986: mol_type = other DNA
atggagaaacttggcgtggagcccgaggaggaaggcggaggggacgacgacgaggaagacgccgaggcttgggctatggagcttgctgatgtgggggctgctgctagtagtcagggggtgcatgatcaggtccttccaacacccaatgcgtcttctcgggtgattgtgcacgtggacctggactgtttttatgcgcaggtggagatgattagcaacccagagctgaaagacaaaccgctgggagtacagcagaaatatttagtggtgacatgtaattacgaagcaagaaagctcggggtgaagaaattgatgaatgtcagagatgctaaggaaaagtgtcctcagctggtcctggtgaacggggaagatttgacaagataccgagagatgagctataaagtcacggaattgctggaagagttcagccccgtggtggagcggttgggtttcgacgagaattttgtggatctcacagagatggtggagaaaaggctgcaacagctgcaatcagacgagctgtcagcagtgaccgttagcggccacgtgtacaacaaccagtgcatcggctacaaaaccgccaaatgccttgaggccctcggaatcaatagcgttagagatttgcagacgttctcacctaagatcttagagaaggagttgggcatttctgtggctcaacgtattcaaaaactgtccttcggagaagacaactctcccgtgatattgtcaggtccaccccagagcttttcggaagaggattcatttaaaaagtgctccagcgaggtagaggctaagaataagattgaagagctgctggctagtttgttgaatagggtctgtcaagatggtcgcaaacctcatactgtacgactaatcattaggaggtattcctccgagaaacactatggaagagagagcaggcagtgcccaataccatcacatgtcatccaaaaactcgggacaggcaactacgacgtgatgaccccaatggtggatatcctgatgaagctgtttagaaatatggtgaacgttaagatgccatttcacctgacactgctatcagtgtgcttctgcaatctgaaggcgttgaatacggccaagaaaggattaattgactattatctgatgccttccctgtcaacaacctctagatctggtaaacactcatttaaaatgaaggacactcacatggaggactttccgaaagacaaggaaacgaaccgggactttctcccgtcaggaaggattgagagcacccgaacgcgcgagtctccccttgacaccacgaacttttccaaggaaaaggacattaacgaatttcctctgtgctccctacctgagggcgttgatcaggaagtgtttaagcaattgcctgtggacattcaagaagagatcttaagcggcaagtctagagaaaaattccagggtaaggggtctgtgtcttgtccactccacgcgtctcgaggtgttctgtccttcttttctaaaaagcagatgcaagacattccaatcaatcccagggatcacctctcctcctctaaacaggtgtcctccgttagtccatgcgagccggggacctcgggcttcaattccagcagcagtagttatatgagttcacagaaggattattcatactacttggacaacagacttaaagacgagcgaatttcacagggccccaaggaaccacaaggctttcacttcactaacagtaatcccgccgtttcagcatttcatagcttcccaaatttgcagtcagagcagttgtttagcaggaaccacaccacagacagccacaaacaaacagtggccactgacagccacgaggggctgacagagaatcgagagcctgatagtgtcgacgaaaaaataaccttcccgtctgatattgatccacaggtgttttacgaactacccgaggccgttcaaaaggagctcctcgccgagtggaagagggctggttccgattttcatatcggtcataagtag

SEQ ID NO: 129222 - DNA, 2223 bp, synthetic construct
  misc_feature 1..2223: note = Description of Artificial Sequence: Synthetic coding sequence
  source 1..2223: mol_type = other DNA
atggagaagcttggcgtggagccagaagaggaaggcggcggggacgatgacgaagaagacgctgaggcttgggccatggaactggccgacgtaggcgccgcagcttcgtctcagggggtgcacgaccaggtccttccaacgccaaacgcatcctcacgggtgattgtgcacgtcgacctggactgcttttatgcccaagtggagatgatctccaatcccgagctgaaggacaagcctcttggagtccagcaaaaatacctcgtggtgacatgcaattacgaggctaggaaattaggcgtcaaaaagctgatgaacgtgagagatgcaaaagaaaagtgtcctcagctggtcttagtgaacggtgaggacttgacccgctaccgggagatgtcatacaaagtgactgagctccttgaggaattctccccagtggtcgagaggcttgggtttgacgaaaatttcgttgatctgaccgaaatggttgaaaagaggctccagcaattgcagagcgacgagctcagcgcagtgactgtttcgggccatgtgtataataatcagtcaatcaacctccttgatgtgctgcatatcagactgctggtcggatcccagatcgcagccgagatgcgtgaagccatgtataaccagctgggccttacgggttgtgctggagtcgcaagcaataaattactggccaaattggtttctggagtgtttaaaccaaatcagcagaccgtgctcctaccagagtcgtgccaacacttaatccactcactcaatcacatcaaagagattccaggcattggctacaagacggccaagtgtctagaagcactcgggattaactccgtccgggatctgcaaaccttctcaccaaagatcctggagaaggaacttggcatcagcgtggctcaacggattcagaagcttagtttcggtgaggataattcaccggtgatcctgagcggccccccccagtccttctcagaggaagactcttttaagaaatgtagttcggaggtcgaagccaaaaacaagatcgaagagctgctcgctagcctcctaaaccgagtatgccaggacgggaggaagcctcacacagtaaggttaatcattcgccgatacagcagcgaaaaacactacggccgcgaaagccgccagtgtcctatccctagtcatgtgatccagaaactcggcactggaaactacgacgtgatgacaccaatggtggatatcctgatgaaactcttccgtaatatggtgaacgtcaagatgcccttccaccttacgttgttatccgtctgtttttgtaacctcaaggctctcaacaccgcaaaaaaggggttaatcgattattacctaatgccgtcattgtccaccacctccaggtcgggtaaacattcatttaagatgaaggatacacatatggaagattttcccaaggacaaagagacaaacagggactttcttccctctgggcgcattgaatcaaccagaacgcgggagagcccgctggacacaacgaacttcagcaaagagaaggatattaacgaatttccgctgtgcagccttcccgagggcgtggatcaagaggttttcaagcagcttcccgtagatatccaggaggaaattctctcaggcaaaagtagggaaaaatttcagggaaagggttctgtgagttgtccactgcatgcttccaggggagtgctgtctttcttctctaaaaagcagatgcaggacattccgatcaacccccgcgaccacttaagctcctctaagcaggttagctctgtcagtccttgtgagcctggaacaagcggcttcaacagttcttccagttcgtatatgtcctcacagaaagactattcatattaccttgataaccgtttaaaagatgagagaatctcacagggcccaaaggagccacaaggcttccattttactaactcaaacccagctgttagtgcattccatagtttccctaacctgcaatcagaacaacttttttcccggaaccatacaaccgacagtcacaagcagactgtagccacggacagccacgaggggctgactgaaaatcgggaaccggactccgtcgacgaaaaaatcacgttcccatcagatattgatccacaggtattttatgagctgccagaggcagtgcagaaagagctgctggctgaatggaagagagcgggcagcgattttcacattggacacaagtag

SEQ ID NO: 129223 - DNA, 2613 bp, synthetic construct
  misc_feature 1..2613: note = Description of Artificial Sequence: Synthetic coding sequence
  source 1..2613: mol_type = other DNA
atggacagcactaaagagaaatgcgattcctacaaagacgacttgttgcttagaatgggactgaatgacaacaaagccgggatggaagggctcgataaagaaaagatcaataagatcataatggaagcaaccaaggggtcaaggttctatggaaacgaacttaagaaagaaaaacaggtcaaccagcgaattgagaacatgatgcagcagaaagctcagataacaagtcagcagctcagaaaggctcaactccaggtggacagattcgcaatggagctcgagcagagcaggaacctgagcaatacaatcgttcatattgatatggacgcattctatgctgcggtcgaaatgagagataacccggagttgaaggacaaaccaatagcggttggttcgatgagtatgcttagcaccagcaattaccacgctagacgctttggtgttagagcggcgatgcccggcttcattgcgaagagattgtgccctcagcttataattgtcccgcctaatttcgacaaatacagagctgtcagcaaagaggtcaaagagatcttagcagactacgaccctaactttatggctatgagcctggatgaagcgtacctaaacatcaccaagcatttggaggagagacaaaactggccagaagacaaacgccgctattttatcaaaatgggaagctccgttgaaaatgataatccaggtaaagaggtcaataaactgtccgagcacgagcgttctattagccctctgctgttcgaagagagccccagtgacgtgcagccgccaggggatccgtttcaggtgaatttcgaagaacagaacaacccccaaatcctgcagaattccgtggtcttcggtactagtgcccaggaggtggtgaaagagatcagatttcggattgagcagaagaccacccttacagcttccgctggtatcgcacccaacaccatgctcgcaaaggtttgctcagacaagaacaagcctaatggtcagtatcaaattctcccaaacaggcaggcggtcatggatttcattaaagacctgcccatacgaaaggtgagtggcattggtaaggtgacagaaaagatgcttaaggcgctgggaattataacttgcaccgaactttatcagcagagggcattgctaagcctcttattctctgaaacatcatggcactactttctgcatattagcctgggcctgggctccactcatttgacccgagacggcgaacgaaaatcaatgtcggttgagcgaacgttctcagagatcaataaagcggaggagcaatactcgttgtgccaggaactctgtagtgagttggcccaggatctgcagaaagagcgcttgaagggtaggacagtaacaataaagttaaagaatgtcaacttcgaagtaaagaccagagccagtactgtaagctccgttgtcagcaccgccgaagagattttcgccatcgccaaagagctgctcaagactgaaatcgatgctgatttcccccacccactgcgcctgcgcctcatgggagtccggatctcgtctttccccaatgaggaagatcggaagcaccaacagcgctccatcatcggattcctccaggccggtaatcaagcccttagcgctaccgagtgtactctggagaaaaccgacaaagataagtttgttaagccgctggaaatgagccacaagaagtctttctttgataaaaagaggtccgagagaaaatggtctcaccaggatactttcaagtgtgaggcagtcaataagcagagtttccagacaagccagcccttccaggtcctgaagaagaagatgaatgaaaatcttgaaatcagtgaaaattctgatgattgtcagatcttgacttgcccagtatgcttccgcgcgcaagggtgcatttccctcgaagctctgaataaacatgttgatgagtgcctcgatgggccatctatatcagagaacttcaaaatgtttagctgcagtcatgtgagcgccacaaaggtcaataagaaggaaaatgtgcctgccagtagcttatgtgagaaacaggactacgaggctcaccctaagataaaagagatatcgtccgtagattgcattgctctggtagatacgatagataactccagcaaggcagagtcaattgatgccttgagcaataagcactcgaaggaggagtgtagctccctaccctccaagtcattcaatatcgaacattgccatcaaaactccagcagcaccgtaagtctggaaaacgaggatgtgggttcctttcgccaagagtacaggcaaccatatctttgcgaagttaagacaggtcaggcactcgtgtgtcccgtctgtaatgtggagcagaaaacttctgatctcactctcttcaatgtgcacgtggatgtgtgcctgaataaaagttttattcaggagctccggaaggacaagttcaatcctgtgaaccagcctaaagagtcatcccgcagcaccgggtcaagcagcggggtccagaaggctgtgacccggaccaaacgacccggactgatgacaaagtacagtactagtaagaagattaagcctaataatcctaagcacacactggatatttttttcaagtag

SEQ ID NO: 129224 - DNA, 2019 bp, synthetic construct
  misc_feature 1..2019: note = Description of Artificial Sequence: Synthetic coding sequence
  source 1..2019: mol_type = other DNA
atggatagtacgaaagagaagtgcgattcgtacaaggatgacttactgctgaggatgggtctaaacgataataaggcaggcatggagggactggataaagagaagattaataagattattatggaggcaacgaaggggagtaggttttatggaaatgagctgaagaaagaaaagcaagttaaccagcggattgaaaacatgatgcagcaaaaggcgcagatcacaagtcagcagcttagaaaggctcagctccaagtggaccggttcgccatggagctggagcagagtcgcaatcttagcaatacgattgttcacatcgatatggacgccttctacgcagccgtggaaatgcgggataaccctgaacttaaggataagccaatagcagtgggcagcatgagtatgctctccacctctaactaccatgctagacggttcggcgtccgggcagccatgcccggtttcatcgcaaagcgtctgtgtccacagcttatcattgtcccccctaattttgacaaatatcgagcagtctcaaaggaagtgaaggagattttggctgattatgacccaaacttcatggcaatgtctcttgatgaggcttatttaaatataacaaaacatctcgaggaacgccagaactggccagaggataaaaggcgctatttcatcaagatgggtagctccgtcgagaacgataatcctgggaaagaagtgaataagctgtcagagcacgagcggtccattagccccctgctttttgaggagtctccttcggatgttcaaccgccaggtgaccccttccaggtcaactttgaggagcagaacaatcctcagattcttcaaaacagcgtggtgtttggcacgagtgcacaagaggtcgtgaaggagatacgcttccggattgagcagaagacaaccttgaccgcgtcggcaggtgtaagaatttccagctttccaaatgaggaggataggaaacatcagcagagatctatcattggattcttacaggcggggaatcaggccctgtctgcgaccgagtgcaccctggaaaaaactgataaggacaaattcgtcaagccactggaaatgtctcacaagaagagtttcttcgacaaaaagcgttctgaaaggaaatggagtcatcaggacacatttaagtgtgaggccgtgaacaaacagagctttcagacaagccagccatttcaagttctgaagaagaaaatgaatgaaaatctcgaaattagcgaaaacagtgacgattgccagatccttacctgtcctgtgtgcttcagagcccagggctgcatttctctcgaagccctcaacaaacacgtcgacgaatgtttggacggcccaagcatcagtgagaatttcaagatgttcagctgctcacatgtctcagcaactaaagtgaataaaaaagaaaacgttcctgcgagcagcctctgcgaaaagcaggattatgaggcacacccaaaaatcaaagaaatttcgtctgtagattgtattgcccttgtcgacacaatcgataacagtagtaaggcagagagcatcgacgccttgtcaaacaagcacagtaaagaggagtgttcaagccttccctctaagagcttcaatatcgagcattgccaccagaacagctcatcaacagtttccctggaaaatgaggacgtcggaagctttcggcaggagtaccgacaaccctacctttgtgaggtcaaaactggccaggctttagtgtgtcccgtgtgcaacgttgagcagaaaacttccgacctgaccttgtttaatgtgcacgtggatgtctgcctgaataaatcctttattcaggaactgagaaaggacaaattcaaccctgtgaatcagcctaaggagagctcaagaagcactggcagcagcagtggcgtccaaaaggctgtgactagaactaaacggcccgggctgatgactaagtatagcaccagcaaaaagattaagcccaacaaccccaaacacaccctggacattttcttcaagtag

SEQ ID NO: 129225 - DNA, 2343 bp, synthetic construct
  misc_feature 1..2343: note = Description of Artificial Sequence: Synthetic coding sequence
  source 1..2343: mol_type = other DNA
atggagctcgagcagtcccggaatctgagtaatacgatcgtgcacattgacatggatgccttctatgcagcagtcgaaatgagagacaaccccgaattaaaggataagccaatcgccgtgggctctatgtcaatgctgagtacttctaattaccacgcgcgcaggtttggcgttcgggcagccatgcctggcttcatagcgaagcgtctgtgccctcaactgatcattgtgcctcccaatttcgataagtaccgcgctgtgagcaaggaggttaaagagatcttggccgactatgacccaaactttatggccatgtctctggatgaggcgtatctgaatatcacgaagcacctagaagaaagacaaaattggcctgaagacaaacgcaggtacttcattaagatggggtcttccgttgagaatgataatcccggcaaggaggttaacaaactctcggagcatgagcgcagcatttcccccttgttattcgaggagtccccctcagatgtgcagccccctggggaccccttccaggtgaacttcgaggagcagaacaacccccagatcctgcaaaatagcgttgtgtttggtaccagtgcccaggaggtggtcaaggagataagatttcgcattgagcagaagacaaccttaacggcctctgccggaatcgctcccaacaccatgctggcaaaagtatgctctgataaaaataagccgaacggtcaataccagattttgccgaacagacaggcagtgatggactttatcaaggacctgcctattcgaaaggtttctggcataggcaaggtcactgaaaaaatgctcaaagccctgggaataattacctgcacagagctgtaccagcaaagagcgctgctgtcactcttgttcagtgaaacttcttggcactatttcctccatatttctctgggacttggatccacacatctcacaagggatggcgaacggaagtccatgagcgttgaaaggacgttttccgagatcaataaggctgaggaacagtacagcctgtgccaggaactttgctccgagctcgcccaagatctccagaaggagagactgaagggacgtaccgttaccattaaattgaaaaacgttaacttcgaggtaaagactagggcatcaaccgtgagctctgtggtatctaccgccgaggagatttttgccatcgcaaaagagcttctcaagaccgaaattgacgccgactttccgcacccattacggctgagacttatgggagtgcgtatctccagcttcccaaacgaggaggatcggaagcaccagcagagatccattattggcttcttgcaggctggaaaccaggccctcagtgcaaccgagtgcacactggaaaaaactgacaaagacaaattcgtaaaacctctagaaatgtcccacaagaagtcctttttcgataaaaaacgctccgaaagaaagtggtcccatcaagatacattcaaatgcgaggccgtcaacaagcaaagctttcagacatcacagccattccaagtgctgaaaaaaaagatgaatgaaaatctagaaatatccgaaaattctgacgactgccagatccttacttgcccagtgtgtttccgtgcccaggggtgtatatcactggaagcattgaacaaacacgtcgacgagtgtctggacggaccttccatcagcgaaaacttcaaaatgttctcttgcagtcatgtttctgcaacaaaagtaaataaaaaagagaacgtgcccgctagcagtctgtgtgagaaacaggactatgaagctcaccctaagatcaaggagataagtagtgtggattgcatagcacttgtggatacgatcgacaactcatctaaagcagagtctatcgacgctctctccaataaacattccaaggaggagtgttccagcctgccatctaagagttttaacatcgagcattgtcaccagaattcatcttccaccgtctcactggaaaacgaagatgtcgggtctttccgccaggaataccgtcagccgtatctgtgtgaggttaagacaggacaggcgctggtctgtcccgtttgcaacgtggagcaaaaaacttctgacctgactctgttcaacgtgcacgttgacgtgtgccttaacaaatctttcatccaggagcttaggaaggataaattcaatcccgttaaccagcccaaggaatcatctagaagcacagggagttctagtggtgtccagaaggcggtgactagaacaaaacgccccgggctgatgacgaagtactccacatctaagaaaataaagcccaacaaccccaagcacaccctcgatatattctttaaatag

SEQ ID NO: 129226 - DNA, 1386 bp, synthetic construct
  misc_feature 1..1386: note = Description of Artificial Sequence: Synthetic coding sequence
  source 1..1386: mol_type = other DNA
atggacagtaccaaggagaagtgtgactcatacaaggatgaccttctgcttcggatgggccttaacgacaacaaagccgggatggagggtcttgataaggagaagattaacaagatcatcatggaagctactaagggctctaggttctacggaaacgagctgaagaaggagaagcaggtgaatcagcgaattgagaatatgatgcagcagaaagcccagatcacttcacagcaattacggaaggcccagctgcaagtggatcgcttcgcaatggagcttgaacagtctcggaacctgtccaacacgatcgtgcatattgacatggatgctttctatgcggctgttgaaatgcgagataatcctgagctaaaagataaacccatcgccgtgggcagcatgtccatgctttctaccagcaactatcacgcaaggcgttttggggtcagggccgcaatgccgggatttatcgctaaaaggctgtgcccccagttgatcatcgttcctcccaacttcgataaatatcgtgcagtgagcaaggaggtgaaagagatccttgccgattatgaccctaatttcatggctatgagtttagatgaagcttacttgaatattactaagcatctagaggagcggcagaattggcccgaggataaacgccgctatttcatcaaaatgggaagctccgttgagaatgataacccaggtaaagaggttaacaaattaagtgagcatgagaggtctatttcgccactgctttttgaggagagcccttctgatgtccagccgcctggggacccatttcaggttaactttgaggagcagaataacccacaaatcctgcagaactccgttgttttcggtaccagcgcacaggaggtggtgaaggaaataaggttccgtatcgagcaaaaaaccacccttaccgccagtgcgggaatcgctcccaataccatgcttgcgaaagtctgtagcgacaaaaacaagcctaatgggcagtaccagatcctgccaaacagacaggcagtcatggacttcataaaggacctccccatcagaaaggtgtccgggattggtaaggtgaccgaaaagatgctgaaggcactcggaataattacctgcacggaactctaccagcagagagccctcttatctctgctgttctccgaaacctcatggcattactttctgcatatctcacttgggctcggctctacacatctgacccgcgacggggagcgcaagtctatgtccgttgagaggaccttctctgagataaataaggccgaagaacagtacagcctgtgccaggaactgtgctccgaactcgcccaagatctgcagaaggagcgcttgaaggttgcccaagttgagtacagacgactctag

SEQ ID NO: 129227 - DNA, 2019 bp, synthetic construct
  misc_feature 1..2019: note = Description of Artificial Sequence: Synthetic coding sequence
  source 1..2019: mol_type = other DNA
atggattcgactaaagaaaaatgcgattcctataaagacgacttgttactgcgcatggggttgaatgacaacaaagcagggatggaggggctcgacaaggagaaaatcaacaagatcattatggaagcaacaaagggatctaggttttacggcaacgagctgaagaaggagaaacaggtgaaccagaggattgagaatatgatgcagcaaaaagcacagatcaccagtcagcagctgcgtaaggcccaattgcaggtggacagatttgctatggaactggagcagtcgcggaatctgtcaaacaccatcgtgcatatagacatggacgcattttatgctgcggttgagatgagggataatccagagttgaaggacaagcccatcgccgtgggtagtatgtccatgttgagcacgtctaattatcatgcccgtagatttggagtgagagccgctatgccagggtttattgctaagcgcctgtgtccgcagctgataatcgttcccccaaattttgacaagtaccgagcagtctccaaggaagtcaaggagatcctggccgactacgaccctaacttcatggcaatgagccttgacgaggcttatttgaatattaccaagcatctggaagagaggcagaactggcctgaagacaagaggcgttacttcatcaaaatgggatcaagcgtggagaatgataaccccggcaaagaagtcaacaagctttctgagcacgagaggtctatctcacctctgctctttgaggagtcaccctcagatgtgcaaccacctggagacccttttcaggtgaacttcgaggaacagaataatcctcagatcctgcagaattccgtggtgttcggtacatcagctcaggaagtggtcaaggagatcaggtttaggatcgaacaaaagactacactcacggcttctgccggggtacgtatttcgtcgtttccgaatgaagaagacagaaagcatcagcagcgatctataattggattcctgcaagctggtaatcaggccctatccgcaaccgagtgcacccttgagaagaccgacaaggacaaatttgtgaaacccctagaaatgtctcacaaaaagagttttttcgataagaaacgctccgaacgtaagtggagtcaccaggacacctttaaatgcgaggctgtgaataaacagtcattccagacctcacaaccatttcaggtgttgaagaaaaaaatgaacgaaaatctggagatctccgagaattctgacgattgtcagattctaacctgcccagtttgcttccgagcccagggctgcatctcacttgaggcacttaacaaacatgtcgatgaatgtctcgacggcccatctatctcagagaattttaaaatgtttagctgttcccatgtaagcgctactaaagttaataaaaaggagaacgtgccagcatcatctctgtgtgaaaagcaggattatgaagcccaccccaagatcaaggagatatcctctgttgattgtatcgctcttgtcgacactattgacaattctagcaaagccgaatccatcgacgcattatccaacaagcattcaaaagaagagtgttcatctctacctagcaaatccttcaacatagagcactgtcaccagaactctagcagtacagtaagtctcgagaatgaggacgtcggaagctttcggcaagagtatcggcaaccctacctctgcgaagtgaaaacaggccaggctctggtgtgtcctgtatgcaatgtcgagcagaaaacatccgatctcacgttatttaacgtacatgtggatgtatgcctaaataaatcttttatccaggagcttcgcaaagacaaatttaatcctgtaaatcaacctaaggagagctcaagatcaactgggtcttccagcggggtccagaaggccgtgacgcgcacaaaaaggcctggattaatgactaaatattccacatctaaaaaaattaaacctaacaacccaaagcacaccctggatatcttcttcaagtag

SEQ ID NO: 129228 - DNA, 1470 bp, synthetic construct
  misc_feature 1..1470: note = Description of Artificial Sequence: Synthetic coding sequence
  source 1..1470: mol_type = other DNA
atggattccacgaaagaaaaatgtgatagttataaggacgatctactgctaaggatgggtctcaatgataataaagccggaatggagggcctcgataaggaaaagattaataaaatcatcatggaagccaccaagggatctcgattttacggcaatgagttaaagaaggaaaagcaggttaaccagagaatcgagaatatgatgcaacagaaagcccaaatcacgagtcagcagctgcgcaaggcacagctgcaggttgaccgtttcgcaatggagctcgaacagagtaggaacttgtcaaatactatcgtacacattgacatggatgcgttttacgcagctgttgagatgagagataatcccgagttaaaggacaagcccatcgctgtagggtcgatgtccatgcttagcacatcaaattatcacgcgcggcggttcggggtgagggccgctatgcctgggtttattgcgaagcgtctctgtcctcagttgattattgtgccgcccaattttgataagtatagagcagtaagcaaggaagtgaaggagatactggcggattatgacccaaattttatggccatgtcactggatgaggcatatctgaatatcactaagcatttagaagagaggcagaactggcccgaggataagagaagatacttcatcaaaatgggctcatcagttgagaacgataatcctgggaaagaggtgaacaagctttcagagcacgaacgatccattagtcctcttcttttcgaagagagcccttctgacgtgcaacctccaggcgacccgttccaggtcaattttgaggagcaaaacaatcctcagatcttgcagaactcggttgtttttggtaccagtgcccaagaagttgtcaaagagattcggttccggatcgaacaaaagactacactgactgcctctgcaggtatcgccccaaatacgatgctggccaaggtgtgctccgacaaaaataagcccaacggccagtatcagatcttgcccaacaggcaagccgtgatggacttcataaaagatcttcccataagaaaagtttcagggattggtaaagtgacagaaaagatgctgaaggccttaggaatcattacttgcaccgagttatatcagcaacgcgccctcctatccctgctcttcagcgaaaccagctggcactacttcctccacatctcactgggcctgggatctactcatctgacccgagatggtgagcggaagtccatgagcgtggaacgaacattcagtgagattaacaaggccgaagaacagtattctctgtgtcaggagctctgttcagaactggcgcaagacctgcagaaggagaggttaaaggtgtttggctacctggttttccccatgaagaggaccggaaatacaaataaaggggcgctcttggcgttctacagactggagacaaagccatgtcagcccctaagcgtgcactag

SEQ ID NO: 129229 - DNA, 426 bp, synthetic construct
  misc_feature 1..426: note = Description of Artificial Sequence: Synthetic coding sequence
  source 1..426: mol_type = other DNA
atggacagtaccaaggagaaatgcgactcctacaaagacgatctgctgttacgtatgggacttaatgacaacaaggccggcatggaggggctagataaggaaaagatcaacaagattatcatggaagccaccaagggcagccggttctatgggaacgagctgaaaaaggaaaagcaggtgaaccagcgtattgagaatatgatgcaacagaaagctcagataaccagccagcagttgcgtaaggctcaactgcaggtggaccggtttgctatggaacttgaacaaagccgcaacctgtcaaacacaatcgtgcatatagatatggacgcattctacgccgccgtcgaaatgagggacaacccggaacttaaggacaagccgatagctgtgggatcaatgagtatgctgtcaacttctaactactag

SEQ ID NO: 129230 - DNA, 1419 bp, synthetic construct
  misc_feature 1..1419: note = Description of Artificial Sequence: Synthetic coding sequence
  source 1..1419: mol_type = other DNA
atggattcgaccaaggagaaatgcgattcatacaaggatgacctcttactgaggatgggtctcaatgacaacaaggctggcatggagggtctagataaggagaaaataaacaaaattattatggaggcaaccaagggaagcaggttctatggtaatgagctgaagaaagagaagcaagtgaatcaacggatagaaaatatgatgcagcagaaggcccaaataacgtcacagcagttgcggaaagctcagctccaagtggataggttcgccatggaactggagcagtctaggaacttgagcaacaccattgtccatatcgacatggatgctttctacgccgccgtggagatgagagataaccctgagctgaaagataaaccaatcgctgtgggatccatgtccatgctgagcacaagtaattatcatgccaggagatttggagtgagagcagccatgccagggtttatcgctaagcgtctctgtcctcaactgattattgtacctcctaacttcgacaagtaccgcgctgtgtccaaagaggtcaaagagatacttgctgattatgatcctaattttatggctatgtcgcttgatgaagcgtacctcaacatcaccaaacacctggaggaacgccagaattggcccgaagataaacggaggtactttattaagatgggctccagtgtcgagaatgataacccaggcaaagaggttaacaagctgagcgagcacgagcggtcaatcagtccacttctatttgaggagtccccttcggacgtccagcctcccggagatcctttccaagtgaatttcgaggaacagaataatcctcagattcttcagaattccgtagtgttcggaacttccgcacaggaggtggtgaaagaaattaggttcaggatagagcagaagactacccttacagcgtctgccgggatcgccccaaatacgatgctagctaaagtgtgtagtgacaaaaacaaaccgaatggccaataccagatcctgcctaacaggcaagcagtcatggacttcataaaagatctgcccataaggaaggtttcggggatcggcaaggtcacagaaaagatgttaaaagcactggggattatcacatgtaccgaactctaccaacagcgtgcactgttaagtcttttattttccgagacaagctggcattactttttacacattagcctggggctcgggagcacacatctgactagagacggggaaaggaagtccatgtcagtcgagaggacatttagcgagattaacaaggcagaggaacaatactccctgtgtcaagagctgtgctctgaactcgctcaagatcttcagaaggaacgcttgaaagtcctgtatttcgacatggtctctcttgttttcaagttcttcaatagcaagatgctgccctag

SEQ ID NO: 129231 - DNA, 1911 bp, synthetic construct
  misc_feature 1..1911: note = Description of Artificial Sequence: Synthetic coding sequence
  source 1..1911: mol_type = other DNA
atgaaatgtaagtgtcccgtcatttgttttaatgcaaaggactttgtgcggatcgttctgcaattcttcgggaacgacgggagctggaagcacgtcgctgatttcatagggttggacccccgaattgcagcatggctgatcgatccatccgacgccaccccatccttcgaggatcttgtggagaagtattgcgagaagtctataacagtgaaggtgaacagtacctatgggaatagctccagaaacatcgtgaaccagaatgtgcgggagaatctgaagactctgtaccggctgaccatggatctctgcagtaagctgaaggattacggcctgtggcagcttttccgaacgttagagctgcccctgattccaatcctcgcagtaatggagtcccacgctatccaagtgaacaaggaggaaatggaaaaaacttctgcattgctcggcgctcgcctgaaagagctagaacaagaggctcactttgtagccggagagaggtttctgatcaccagtaataaccaactgcgagagatcttgtttggtaaactgaagctgcatttgttaagccagagaaattccctgcccaggacgggcctgcagaaatacccttcaacctctgaggccgtgctgaatgcccttagagatttgcacccgctgccgaaaatcattcttgagtacaggcaagtccacaagataaagtcgacttttgtagatggcctactagcttgcatgaagaagggcagcatttcatccacttggaaccagaccggaaccgtcaccggaaggctgagcgccaagcaccctaacatccagggaatttctaaacaccctatccagattactacgcctaagaattttaagggtaaggaggataaaatcctaacaatctctcctcgggctatgtttgttagcagtaaaggccacacattcctcgcagctgatttctcacaaatcgaattgcgaatcctgactcacctgagtggtgacccggaacttctcaagttattccaggagtctgagcgggatgacgtgttttcgacccttacctcgcaatggaaagatgttccagtggagcaagtcactcatgcagaccgtgagcagaccaagaaggtcgtctacgctgtcgtgtacggagccgggaaggaaaggcttgcagcctgcctcggtgtaccaatacaggaagccgcacaattcttggagagctttttacagaagtataagaagatcaaggattttgctcgtgcggccattgcacagtgtcaccagacaggctgcgtggtcagtatcatgggcagacgccggccccttcctcgaatccacgctcacgatcagcaactcagggcccaggccgaaagacaggccgttaattttgtcgtgcagggatccgcggctgatctgtgtaaactggccatgatacatgtctttactgcggtagccgcctcccacaccctgactgcccggttggtcgcccagatccatgacgagctcctttttgaggtggaagatccacaaatccccgaatgcgccgctttggtcaggcgcacaatggagtccttggaacaggttccactgaaagtcagcttgtctgccgggcggagctgggggcacttagttcccttacaggaagcatggcttcgccaggctcatgttgcattaagcttgcccgcaaccgcgtggttgccactgggacctctccctgctccctctcctcatccatgcatctttcggctgcacttcgtttgcagtccacgacagcagtgggaagaacgcacaggattccagcaatcgatcgtctggccatctcccagatcccccgccttgtacgcgcctggacggatcaaccctttgggcctgggatggcccgccatcccctggtctaagtgcctgtgcaaagctctcttgattttatag

SEQ ID NO: 129232 - DNA, 936 bp, synthetic construct
  misc_feature 1..936: note = Description of Artificial Sequence: Synthetic coding sequence
  source 1..936: mol_type = other DNA
atggccgtgggatctcaagactatggtctgtggcagttgttccggacactggaactgccgctaatcccaatactcgctgtgatggagtcgcatgccattcaagtgaacaaagaagagatggagaagacgtcggcgctgttaggcgccagactcaaagagctggaacaggaagctcattttgtcgctggcgagcgcttcctcatcacatctaataatcagctgcgcgagatactgtttggtaagttgaagctgcacctgctttcccagagaaacagcctgcctcggaccggcctgcagaaatatccctccacaagtgaagcagtgaatatacagggtatatctaagcatcctattcagatcaccactccgaaaaattttaaggggaaggaggacaaaattctgacaatcagtccccgtgcaatgttcgtttcatccaagggccatactttccttgcagctgatttctctcaaattgagcttagaatccttacccatctgagcggagacccggagctgctgaaactattccaggaaagtgaacgcgatgacgtgttctctacgcttacctctcagtggaaggacgtgcccgtcgagcaggttacccatgcagaccgggagcaaactaagaaagtcgtatatgcggtagtttatggcgccggcaaagagcgcttggctgcgtgcctgggggtccccatacaagaggctgcacagttcctggaaagcttcctccagaagtacaaaaaaatcaaggatttcgccagggcagctatcgcacagtgtcatcagaccgggtgcgtggtgtcgatcatggggcgaaggcgtcctctgccccgcattcacgcccatgaccagcagctccgtgcacaggcagaaaggcaagcggtcaacttcgtggtacaggcccagtctcagcatttgtgcgtggaggttccctag

SEQ ID NO: 129233 - DNA, 2703 bp, synthetic construct
  misc_feature 1..2703: note = Description of Artificial Sequence: Synthetic coding sequence
  source 1..2703: mol_type = other DNA
atggagaactacgaggccctcgtcggattcgacttgtgcaacacacccctctccagcgtggcacagaagattatgtcggccatgcacagcggcgacttagtggatagtaagacctggggtaagagcaccgaaacaatggaagttattaataaaagtagtgtgaagtactctgtgcagctggaagacaggaaaactcagagtcctgagaagaaggacctgaagtcactacgctcacaaacaagtcgcggttctgccaaactgtctccccagtctttctccgtccggctgacagatcagctgtccgccgatcagaagcagaaaagtatttcctccctcaccttatcttcttgcctcattccccagtataaccaggaggcgtccgtcctgcagaaaaagggccataaaaggaagcatttcctgatggagaatataaacaacgagaacaaagggtctataaatttaaaacgaaagcacatcacctataataatctgtcagagaagacaagcaaacagatggccctggaagaagatacagatgacgctgaggggtacttaaatagcggcaattcgggggcacttaaaaaacatttttgtgacatcagacacttagatgattgggccaaaagccaactcatcgagatgctgaaacaagcagccgcccttgtgatcacggtaatgtatacagacggcagcacgcagctgggagctgaccagacccctgtcagcagtgtgagaggtattgtggtgcttgtaaaacgacaggctgagggtggccatggttgccccgacgcccctgcctgtggccctgtgcttgagggtttcgtgtccgacgacccgtgtatttacatccagatcgagcactccgcgatctgggaccaggagcaggaggcccaccagcagttcgcccgaaacgtcctgttccagacaatgaaatgtaaatgcccagtgatctgctttaatgcaaaagactttgtaaggattgtcctgcagttctttgggaatgacggctcctggaagcacgtggctgacttcatcggcctggatccaagaattgccgcctggctaattgacccgagtgatgccacccctagcttcgaagaccttgtagagaagtattgtgagaagtccataactgtcaaggtgaacagcacttacggaaattcttcccggaacattgttaatcagaatgtgagggaaaatttaaaaaccttgtaccgactgacaatggatctctgcagcaagctgaaggactacggcctgtggcaactgttccggactctggaattgcctttgatcccgatcctggcggtgatggaaagccacgccatccaggttaacaaagaagagatggaaaaaacttccgccctattaggggcacgcctcaaggagctggagcaggaggcacattttgtggccggtgagcgattcctgattacctccaataaccagctgagggagatcctgtttggaaagctgaaactccacctgctctcacagaggaacagcttgccacgaactggactccagaaatatcccagtaccagcgaagcagtcctgaatgctttaagggacctgcatcccctgccgaagatcatcctcgagtacaggcaggttcacaaaattaagtccaccttcgtcgacggactgctcgcctgcatgaaaaaggggtctatatcaagcacatggaaccagactggaacagtgaccggcagactgtctgctaagcatccaaatatccaggggatttccaaacatcccatccagatcacgacgccaaagaacttcaaaggcaaggaggacaagatactcactatctccccaagggcaatgttcgtttccagcaagggccatacctttctggccgcagattttagtcagattgagcttcgaattttgactcatctgtccggcgacccagagttgctgaagctttttcaggaaagcgaacgggatgacgtgttctccaccctcacctcgcaatggaaggacgtgcctgtcgaacaagtgacccacgccgaccgtgagcagacgaagaaggtggtttatgcagtggtctacggggccggcaaggagcgactcgcagcctgtctcggcgtgcctatccaggaagcagctcagttcctggagagctttctgcagaaatataagaaaattaaagattttgcgagggccgctattgcccagtgtcatcagacaggctgtgttgtgtcaattatggggcgacgaaggccacttcctcgaatacacgctcatgaccagcagctgagagcccaggccgagcggcaggcggtaaatttcgtcgtgcaaggttctgccgccgatctatgtaagttggccatgattcatgtgtttacagctgtggctgcaagccataccttgacggcccgcctggtggcacagatccacgatgaactcctgtttgaggttgaagatccgcaaattccagaatgcgccgccttagttcgtaggaccatggaaagtctggaacaggtgcaagcactggagttgcagttgcaagttcctctcaaagtcagtctctccgcgggccgttcatggggtcatctcgtaccactccaggaagcatggggcccaccgcctgggccgtgtagaactgagtcaccttctaattccctggccgctcctggttctccggcctccacccagccaccacctctacacttcagtccaagtttctgtctttag

SEQ ID NO: 129234 - DNA, 2703 bp, synthetic construct
  misc_feature 1..2703: note = Description of Artificial Sequence: Synthetic coding sequence
  source 1..2703: mol_type = other DNA
atggagaactacgaagcgctggtgggatttgatctctgcaatacccctttaagcagcgtcgcccaaaagattatgtccgctatgcatagcggcgacctcgttgattccaagacttggggaaagtcaacagagactatggaggtgatcaataagtcgagcgtgaaatatagcgtgcagctggaggatcgcaaaacacagagccctgagaaaaaggacctcaaaagtctgcgttcccagacatcgagaggatcggctaagctctctccccagagtttttccgtcagacttaccgatcaactcagcgctgatcagaagcagaagagcataagctcccttacgttatcctcctgcctcatccctcagtataaccaggaagcgtctgtgctgcagaagaagggccataaacggaaacattttctgatggagaatattaataacgagaataagggttccattaaccttaagcggaaacatatcacttataacaacctcagcgaaaaaacttctaagcagatggccctcgaggaggataccgacgacgccgagggctatctgaactccgggaacagcggagcgctgaaaaaacatttttgcgacatccggcatttagatgactgggccaagtctcaactgattgaaatgctgaagcaagccgccgccctggtgatcaccgtgatgtacacggacgggagcacccaactcggcgccgatcaaacaccagtctcttcagtaagaggcattgtcgtcctggtcaagagacaggctgaaggcggacacgggtgccccgatgctcccgcctgtggtccagtcctggaaggattcgtgtcagacgacccctgtatttatattcagattgaacacagtgctatctgggaccaggaacaagaggcgcatcagcagtttgccaggaacgtgttgtttcagacgatgaaatgcaagtgccccgttatatgcttcaatgccaaagatttcgtgcgcatcgtcctgcaattttttggaaacgatggctcctggaagcatgtcgcggatttcatcggtctggaccctagaattgccgcctggctgatcgatcccagcgacgccacacccagctttgaagacctcgtggaaaaatattgcgaaaaaagtataaccgtgaaggtgaactcgacctacggcaactcatcacggaacatcgtgaaccagaacgtgagggagaacttgaagactctctaccgcttaactatggacctttgttccaagttgaaggactacggtctttggcagctgtttagaacattggagctgccactgatccctattctggcggttatggagagtcatgcgatacaggtaaacaaagaggaaatggaaaaaacttcagctctcctgggcgcgcggctcaaagaactcgagcaggaagctcacttcgtggccggcgaacgtttcctaataacctcaaataaccagttgcgtgagattctgttcggtaaactcaagctgcacctcttaagccaacgcaactcactgcccagaaccgggctgcagaagtacccttcgacttccgaggccgtgctcaacgccctcagggatcttcacccactccccaagatcattttagagtacaggcaggtgcacaagattaaatcaacatttgtggatggtttgcttgcttgcatgaagaaagggagcatatcaagtacttggaatcagaccggtaccgtgaccggtcgcctgtccgctaaacaccccaacatacagggaatctctaagcacccgattcagataactacaccgaagaactttaagggcaaagaagacaaaatactcaccatctcccctcgcgctatgtttgttagctctaaaggccacacttttctggccgccgactttagccagattgagcttcggatccttactcacttgtctggggacccagaactccttaagttatttcaagagtccgaaagggacgatgtcttttctacactcacttcacaatggaaggatgtccctgtggagcaggtgacccacgccgatagagagcagacaaagaaggtggtttatgctgttgtctacggcgccgggaaagaaagattagcagcttgcctcggtgtacctatccaggaggcggctcagtttttagaaagcttcttacagaagtacaagaagataaaggatttcgccagagctgcgatcgcccaatgccaccagacaggctgcgtggtttcgattatgggccgacgacggccactgccccgaattcatgctcacgaccaacagctacgcgcccaggccgagcgtcaggccgttaactttgtggtgcaaggtagcgccgcagacctttgtaagttagctatgatccacgtattcacagccgtggccgcctcccatacgttgactgcgaggctagtcgcgcagatccatgatgagctgctgttcgaagtggaagacccacagattcccgaatgtgctgccctggtgagacgaacaatggagtccctggagcaagtccaggccctggagttacaattgcaggtcccactgaaggtaagtctgagcgctggtcgttcttggggtcatctcgtgccactgcaggaagcatggggcccacctcctggaccttgcaggacagaatccccctctaattccctcgctgctccgggtagtcctgcctcaactcagcctccaccattacacttttcaccaagcttctgcttatag

SEQ ID NO: 129235 - DNA, 3033 bp, synthetic construct
  misc_feature 1..3033: note = Description of Artificial Sequence: Synthetic coding sequence
  source 1..3033: mol_type = other DNA
cgcatggatggaaaacgcagacctggccccgggcccggggtccccccgaagcgcgcaaggggaggtctgtgggacgatgacgacgccccgagaccatctcaattcgaagaggatctggctctgatggaagagatggaggccgaacaccgcctgcaagagcaggaagaggaggagctccagagtgtgctcgagggagttgccgatgggcaagtaccacctagcgccatcgatcctcggtggctaaggcccaccccgcctgctctagatcctcagacagaacctctgattttccaacaattggagattgaccattatgtgggccccgcccagcccgtaccagggggacccccgccgtctcgcggtagcgtaccggttcttagggcctttggcgttactgacgagggattctccgtgtgctgtcacatccacggctttgccccttatttctatacccccgcccctccaggatttggaccagagcacatgggcgacctccagagggaactgaacctggctatttcacgcgactcccggggcgggagagagctcaccgggcccgctgtcctggcggtggaactgtgttcaagagaaagcatgttcggctaccacggccacgggccatcgccctttctacgcatcaccgtagcgctgccgagactcgtcgcgccagctagacgcttgctcgagcaggggatccgggtggctggacttgggacgccgagctttgctccctacgaggccaacgtggacttcgagatacgctttatggtagacactgatatagtaggatgtaactggctggagctgccagccggaaagtacgcactgcgccttaaagagaaagccactcagtgtcagctggaggcggacgtcctctggtctgatgttgtgtctcatcctcctgagggaccgtggcagcgcattgctccccttcgagttctctcattcgatatcgagtgcgctggtcggaagggaattttcccagagcccgaacgtgatcctgtaatccagatatgttcactaggcctgaggtggggagagccagagcccttccttagactggcactcactctgaggccttgcgcccccattctgggggcgaaagtacagagttatgaaaaagaggaagaccttcttcaggcctggtccacctttattcggatcatggatccagatgtgattactggttacaatattcaaaacttcgacttgccttacctgatcagcagggcccaaacgctgaaggtccagacattcccattcctgggacgtgtggccgggctctgttctaatattcgggactctagcttccagtctaagcagacaggtagacgggacactaaggtggtctccatggtgggaagagttcagatggacatgttgcaggtgttgttgagagaatataagctgcggagttataccctgaacgccgtatcattccacttcctcggggaacaaaaggaagatgtacagcattcgatcatcacagacctgcagaatggaaacgaccagaccagaaggaggctggcagtgtattgtctcaaggatgcgtacttaccgcttcgcctcttggagcggctgatggtgttggtcaacgctgtcgagatggcgagagtgacaggtgttccactctcctatctgctgtccagggggcagcaggttaaggtcgtatcgcagctcctgagacaggctatgcacgagggcctcctgatgcctgtggtgaagagcgaaggcggcgaagactatactggtgctaccgtcatcgagccactcaagggttattacgatgtccctattgctacactggacttcagttcattgtaccccagtatcatgatggcgcataatttgtgctatacaaccctgctacggccaggtactgcccagaaactagggctgacagaggatcagttcatcagaacacccacaggagacgaatttgtcaagacgtcggttcgaaaagggctactgcctcagatcctcgaaaatctcctcagcgcccgcaaaagagccaaggccgaactggctaaagaaaccgacccccttcgcaggcaggttctggacggcaggcagctagcactgaaagtctccgccaatagtgtctacgggttcacaggtgctcaggtgggaaaactgccctgcctagagattagccagagtgttaccggctttggccgccagatgattgaaaagacgaaacaactggtggagagcaagtacacagtcgaaaacggatactcaaccagcgccaaagtggtctatggtgataccgattctgtgatgtgcagattcggggtaagcagtgtggctgaggcaatggccctgggtagggaagcagccgactgggtgtccggccacttcccctctcctattaggttggagtttgagaaagtgtattttccatacctcctaatctctaagaagaggtatgctggtttactcttcagcagtcggcccgacgcgcacgatagaatggattgtaaggggctggaggctgtgcgacgggataactgccctctcgtcgctaatctggtcacggcttcattgcgccggctgctgatcgacagggaccctgagggggccgtcgcccacgcacaagacgtgatttccgatctcctgtgtaataggatcgacatcagccagctcgtgataacgaaagaactcaccagggctgccagcgactatgctggaaaacaggcacacgttgagttagccgagaggacgcgttgcagctgttggtccacggcatgccctctgacacgatctacgacttggagctcatcttggccctccccttcatgtgcctccagcagtccttcttgggcaagggcggtgccccgcctgtgctattgtggcgggacaaccagagctgcacggcggtgttcccgcgctcgctgggctgcttcttggccaagtccaaatgctgcaacagcggctctcgcagccgctcagtgcagtgctacacgtgaaccttgcgtatcctccgccagtcccggaagcctgtcttgtattaggagacgttacccaatttag

SEQ ID NO: 129236 - DNA, 3324 bp, synthetic construct
  misc_feature 1..3324: note = Description of Artificial Sequence: Synthetic coding sequence
  source 1..3324: mol_type = other DNA
atggatggcaaacggagacctggcccagggccaggtgtgcctccaaaaagggctcgcggaggactctgggacgatgatgatgccccacgtcctagtcaatttgaggaagacctcgctctcatggaggagatggaggctgagcaccggctgcaggagcaggaagaagaagaactccagtcagtactggaaggagttgctgacggacaggtgccacctagtgccatcgacccaaggtggctccgtccgaccccacccgccctcgacccgcagacagaaccattgatatttcagcagctcgaaatcgaccactatgtaggaccagcccagcccgtgcccggcggaccaccccctagcaggggatccgtgcccgtgctcagagcattcggcgtgaccgacgaaggttttagcgtgtgctgccacatccacggcttcgctccctacttctacacccccgcaccccctggttttggcccagaacacatgggagacctgcagcgcgagctcaacctggcaatcagcagagactccaggggtggaagggaattaactgggccggcagtcctggctgtcgagctctgctccagagaatcgatgttcggctaccatgggcatggaccatctccatttctgaggatcactgtggctctacctagactggtggcaccagccaggaggctactggagcagggcatacgagtcgccggcctgggcacacctagcttcgccccttacgaagctaacgtggacttcgagataaggttcatggtggacacggacattgtcgggtgcaactggctggagttacccgctggaaaatacgcactacggctgaaagaaaaggccactcaatgtcaactcgaagccgatgtcctttggtccgatgtggtctcgcacccaccggagggcccctggcagcgtattgccccccttcgggtcctatcatttgatattgagtgcgctggacgaaagggaatcttccctgagcccgagagagatcccgtgatacagatttgctcacttgggctccgatggggagagccagaaccgtttttacgactcgcactcaccctgcgaccctgcgccccaatcctgggcgccaaagtgcagtcctatgaaaaggaggaagacctactgcaggcctggagcacttttatcaggatcatggaccccgatgtgataacagggtacaatatccaaaactttgatctaccatacctgatttctagagcccagactttgaaagtgcagacctttccattcctcggccgggtagccggactttgctcgaatatcagagattcttcgttccagagtaagcagacgggtcgcagggacaccaaagtggtgtcaatggtagggagagtacagatggacatgctgcaggtcctcctgcgagagtataagctcaggagctatacattgaacgcagtcagcttccatttcctcggtgagcagaaggaagacgtacagcactccatcataacagacctgcagaatgggaacgaccagacccgccgacggctcgccgtatattgcctaaaggacgcctatctacccctacgacttctggaaaggctgatggtccttgttaacgcagtagaaatggctagggtcactggagtgcctctatcttatctgctgtcacggggccagcaggtgaaggttgtgtcacagctgctcagacaggctatgcacgaaggcctgctcatgccagttgtcaagagtgagggaggtgaggactacaccggcgccactgtcatcgaaccattaaaagggtactatgatgtcccgattgctaccctagatttctcttctctgtaccctagtatcatgatggcccacaatctttgttataccacactgttgcggccaggtactgctcagaagttgggtctcaccgaggatcagttcatccgtacacccaccggggacgaatttgtgaagactagcgtgagaaaagggctccttccacagatccttgagaacctcctgagtgctcggaaaagggcaaaggccgagctggctaaagagaccgacccgctgcggagacaggtgctcgatggaaggcaacttgctctgaaagtatcagccaatagtgtctatgggttcactggggcgcaagttggcaagttgccatgtctggaaatcagccagagcgtgacgggtttcggtagacagatgatcgaaaagacaaagcagcttgttgagagcaaatacactgtggaaaacgggtacagcacgtccgcgaaggttgtttatggagatactgactccgtgatgtgccgattcggcgttagttcggtagccgaggcaatggccctcggacgagaagcagcagattgggtgagtggccattttccgtcccccataagactggagttcgaaaaagtctattttccatatcttttgatttcaaagaaacgctacgcaggactgctgttcagtagccgccctgatgcccacgaccgaatggactgcaaagggctggaagccgttaggcgtgataattgccccctggtggccaatctggttaccgcctccctaaggcggctgctgatcgatagggaccccgaaggagccgtggcacatgcccaggatgttatcagcgatctgttgtgcaataggattgatataagtcaactcgtaatcacaaaggagctcacccgcgcagcatcggattatgccggtaagcaggctcatgtggaactcgcggagaggatgagaaagagggacccaggtagcgctccaagtctgggcgatagggtcccttatgtcattatctcagccgctaaaggcgttgccgcctacatgaagagtgaggaccccctcttcgtgctcgagcactcgctccctatcgatactcagtattatcttgagcagcagctggctaaaccccttctaagaatattcgagccaatcttgggggagggtagggcagaggccgtcctgcttaggggcgaccacacacgatgcaagaccgtcctgacaggcaaggtgggcggcctgctggcatttgccaaaagacgtaattgctgcataggctgtcgcacagtgcttagccaccagggggcagtttgtgaattctgccagccacgggagagtgaactgtaccaaaaggaagtgtctcatcttaatgccttggaggaacgatttagtcgcctctggactcaatgtcagcgctgccagggaagcttacacgaagacgtgatttgcaccagccgggactgccccattttctacatgaggaagaaagttcggaaggaccttgaggatcaggaacaactgctgcggcgcttcggaccccctgggccggaagcgtggtag

SEQ ID NO: 129237 - DNA, 1410 bp, synthetic construct
  misc_feature 1..1410: note = Description of Artificial Sequence: Synthetic coding sequence
  source 1..1410: mol_type = other DNA
atgtttagtgagcaggctgcccagagagcacacacgctgctttcccccccttctgctaataatgccacatttgctagggtgcctgtggcgacatacacaaactcttctcagccctttagactgggcgagcggtcattttctagacagtatgctcacatctatgccactcgcttaatccagatgaggcctttccttgagaaccgcgctcaacaacactgggggagtggcgtaggcgtgaagaagctatgcgagctgcagcctgaggagaagtgctgtgtggtggggactttatttaaggctatgccgcttcagccgtctatcttgcgggaagtgagcgaagaacacaacttactgccccagccaccgagaagcaaatacatccatcccgatgacgaactggtactcgaagatgaattgcagcggatcaagttaaaagggaccatagatgtaagtaaactagttacgggcacagttctggccgtgtttggctccgttcgggatgacggcaagtttcttgtcgaagactactgctttgccgaccttgccccgcagaaacccgcccccccacttgacaccgataggtttgtactcctggtgtcaggtctcggcctaggaggaggaggcggagaatccttgctgggaacacagctgttggtggacgtagtgacaggccagctaggggatgagggggagcaatgttctgcagcacacgtgagccgcgttatcctagctggcaatctgctgagccactccactcaaagccgtgattccataaataaggcgaagtacttgacaaagaaaacacaggctgcttccgtcgaggcagttaaaatgctcgatgaaatcttattacagttgtctgcctctgtgcctgtggatgtaatgccaggagaatttgaccccacaaactatacccttccgcagcagcccctgcatccatgcatgtttccgctggcgactgcttacagtacactgcagctggttaccaacccgtatcaggcaactattgatggcgtccggttcctgggcacgtcggggcaaaacgtgtcggatatcttcaggtattcctccatggaggaccacctggaaattttagagtggacgctccgagtacggcatataagtcccactgcccccgacactttagggtgttatcccttttacaagaccgacccctttatttttccagagtgcccccacgtgtatttctgcggcaacactccttctttcggctcaaagatcatcaggggtcccgaggaccagaccgtgctgctggttaccgttccagatttcagcgccacacagaccgcttgcctagtgaatctgaggtcccttgcctgtcagcctatttcattttccgggttcggcgctgaagatgacgatttgggtggcctgggattggggccctag

SEQ ID NO: 129238 - DNA, 447 bp, synthetic construct
  misc_feature 1..447: note = Description of Artificial Sequence: Synthetic coding sequence
  source 1..447: mol_type = other DNA
atgttctcagaacaggctgcccagagagcccatactctcctcagtcctccatcggccaataatgcaacattcgctagagtgcccgtcgcaacttacaccaactctagtcagcccttcaggctgggtgagaggagcttttcccggcaatatgcccacatttacgcaactagactcatccaaatgcggcctttcctggaaaacagagcccagcaacattggggctcaggcgttggggtcaaaaagctttgcgagctgcagcctgaggagaaatgctgtgtagtggggacccttttcaaggccatgccactgcaaccatctatcctcagagaagtgtcagaggagcacaacctcttgccacagccacctaggagcaagtatatacatccggacgatgaactagtgctggaagacgagctgcagcggatcaaactcaaagggaccatttag

SEQ ID NO: 129239 - DNA, 663 bp, synthetic construct
  misc_feature 1..663: note = Description of Artificial Sequence: Synthetic coding sequence
  source 1..663: mol_type = other DNA
atgtttagtgagcaggccgcccagagagctcacaccctgcttagccccccatcagcgaacaatgctacatttgctagagtgcccgtggccacttatacgaactcatcacagccatttaggctcggcgaacgctcattttcgcggcagtacgctcacatctacgccactcgtctgattcagatgaggccattcctggagaatcgcgcccagcagcattgggggtcaggggtcggagttaagaaattgtgcgagttgcagcctgaggagaaatgctgcgtggtcggaacgctattcaaagctatgcctctgcaaccaagcattctgcgtgaggtgtcggaagagcacaacctgctgcctcagccgccacgatctaaatatatccatccagatgacgaattagtgctcgaagatgagctacagcggattaagcttaaaggcacaatcgacgtgagcaaacttgtcacaggcaccgtcctggcagtattcggttctgtgagggatgatgggaagtttttggtggaggactactgtttcgccgaccttgcacctcaaaaaccagcccctccactggataccgatcgatttgtgctcctggtgagcggattagggctagggggcggaggcggagaaagcctccttgggacccagcttttggtggactag

SEQ ID NO: 129240 - DNA, 1410 bp, synthetic construct
  misc_feature 1..1410: note = Description of Artificial Sequence: Synthetic coding sequence
  source 1..1410: mol_type = other DNA
atgttttctgaacaggctgctcaacgggcccatacccttctttctcctccgtccgctaataacgctaccttcgctcgagtgcctgtagcaacatacaccaactcctctcagccctttagactgggtgaaagaagcttttccagacaatatgctcatatctatgcaacccgcctgattcagatgcggccgtttcttgagaatcgagcacaacagcactgggggtctggcgttggggtgaagaagctgtgtgaactccaacctgaggagaagtgctgcgtggtgggaaccctgtttaaagccatgcccctccagccctcaatcttgagagaggtgtccgaggagcacaatctcctgccacagccgcctaggagcaagtacatccaccccgacgatgaattggtcttggaagacgagttacagaggattaagctgaaaggtacaattgatgtgtccaagctggtgaccggaaccgtcttggccgtcttcggctcggttcgcgacgacgggaagttcctggtcgaggactactgcttcgccgacttggccccacagaagcctgccccgccactggataccgataggttcgttctgctcgtgagcggactgggactaggcgggggcggcggggagtcactgttgggaacccagcttctggtcgacgtggtgaccggccagctaggggatgagggcgaacaatgtagcgcagcccatgtttctcgcgttatcctggcgggtaatctcctgagccactctacccagtcaagggactccataaacaaagcgaagtatctgacaaaaaaaactcaggccgcttcagtggaagccgttaaaatgctggatgaaatactcctgcagctgagcgctagtgtcccagtagatgtgatgccaggagaatttgatcccaccaactacacattgccccaacagcccctccacccttgcatgttcccactagcaacagcctattcaaccctacagctggtcactaatccataccaggcgacaatagacggcgttagatttctgggtacaagtggccagaacgtctcggacatctttcgatactcctcaatggaagatcacctggaaattctagagtggacccttcgcgtgagacacatctctccaaccgcccccgatacattagggtgctaccccttctataagacagatcctttcatatttccggagtgtccacatgtctacttttgcggcaacacccctagcttcggatctaagataattcgcggcccagaggatcagacagtcctgcttgtaaccgttccagatttttctgctacccaaactgcttgtctggtgaaccttagatcgttagcttgccagcctatcagtttcagcggcttcggcgctgaggatgatgacctgggcggcctgggactgggcccatag

SEQ ID NO: 129241 - DNA, 468 bp, synthetic construct
  misc_feature 1..468: note = Description of Artificial Sequence: Synthetic coding sequence
  source 1..468: mol_type = other DNA
atgttctccgaacaagctgctcagagagcacatactttgttgtctccaccctcggcaaacaatgccacattcgccagagtcccagtggctacgtataccaactcttcccagcccttccgtctcggcgagcgctcatttagtaggcaatatgctcatatttatgccactaggcttatccaaatgcggccgttccttgagaatagagcacaacagcattggggatctggggttggagtaaaaaagctctgcgaactacagcccgaagaaaaatgttgcgtggtcggtaccctctttaaagccatgcctttgcagccttctatcctgcgcgaggtcagcgaagagcacaacctgttaccccaacctccacggtccaaatatatccaccccgatgacgaactggttctcgaagacgagctccagaggatcaagttaaaagggactattgatgtatccaaattagttacctag

SEQ ID NO: 129242 - DNA, 771 bp, synthetic construct
  misc_feature 1..771: note = Description of Artificial Sequence: Synthetic coding sequence
  source 1..771: mol_type = other DNA
atgttccccgtgctgcctgggagtcatttgttgttgaataatcctgccctggaattcattaaatatgtctgtaaggtcctctccctcgacacaaatatcaccaaccaggtgaacaaactcaacagagatctgctgcgcctggtcgacgttggcgagtttagcgaagaggcccagtttcgcgacccctgcagaagttacgtcttgcctgaagtcatttgcaggtcatgcaacttttgtcgtgatctcgatctgtgcaaggactcatccttctcagaagatggtgcagttctaccacaatggctatgctctaattgtcaggcaccctatgattcctcggccatagaaatgacgctggtcgaggttctgcaaaaaaaactgatggcgtttaccctgcaggatctgaaagaggccgataccccgaaatgtgaagaaaaagagcgtcgcaaacgcgagctgcatagctccgccaccggcagaagctgtaggggggcctctgaacagagactgggggacgcaccctcctgccgagtggttgtgcacggggtgcaagcctgtaggatggaaggagtgtgcttgaagtgccgcggcgttaaggagacctctatgcccgtatattgcagttgcgctggagactttgccttgactatccacacacaggtttttatggagcagatagggatcttccgtaacattgcgcagcattacggaatgtcatacctcctggagacccttgagtggttactgcagaaaaatccccagctgggccactag

SEQ ID NO: 129243 - DNA, 6861 bp, synthetic construct
  misc_feature 1..6861: note = Description of Artificial Sequence: Synthetic coding sequence
  source 1..6861: mol_type = other DNA
atgtcgttgaggtctggcggccggagacgggccgaccctggcgctgacggagaagcatctagggacgatggtgctaccagttcggtgagcgccttgaagcgcttggaacgatcccagtggaccgacaaaatggatcttaggttcggctttgaacgtcttaaggagcccggggagaagacaggatggttaatcaacatgcacccgaccgagatactggatgaagacaaacgactgggctccgccgtagactactactttatccaggatgatggcagcaggtttaaggtggcactcccttataagccctatttttatatagctaccaggaagggatgtgaacgggaggtctcgagtttcctgagcaagaaattccagggaaagatagcgaaagtggagacagtgccaaaagaggacctcgatttgccgaaccaccttgtcgggcttaagcggaattacattcgactgtctttccacactgtggaagacctcgtcaaagtccggaaggagatttcaccagccgtcaagaagaaccgcgagcaagaccacgcgtcagatgcgtatactgcactgctttcatccgtgctgcagaggggtggagtgattaccgacgaggaggagacttccaaaaaaatcgccgatcagctggataacatcgtggacatgcgggagtacgacgtgccttatcacattagactcagcatcgacctcaaaatacacgttgcacactggtataatgtcagatataggggaaatgcctttcctgtggaaattacccgccgtgacgatcttgtggagagacccgaccctgtggtcctcgcatttgatattgagaccaccaagctgcccctcaagttcccggatgcggagacggatcagattatgatgatcagttatatgatcgacgggcagggttatctgatcacaaatcgcgaaatcgtttccgaggacatcgaggacttcgaattcacccccaaacctgaatatgaagggccattctgcgtgtttaatgagcctgatgaggcacacctcattcagcggtggttcgagcacgttcaggagactaagcctacgattatggtgacgtacaacggtgactttttcgactggccatttgtggaggcccgggctgccgttcacgggctgtccatgcaacaagagatcggtttccaaaaggacagtcagggcgagtacaaggcgccacaatgtatacacatggactgcctgcgctgggtgaaaagggattcgtatctgccggttggctcccataacctgaaggcagccgctaaggcaaagctggggtacgatccggttgagctggatccagaggacatgtgtaggatggctacggagcaaccacagacacttgccacttacagcgtcagcgacgctgtcgcaacgtactacttatacatgaagtatgtgcatccatttatctttgcattatgtacaatcatacccatggaaccagacgaagtcctgcgaaagggcagtgggacactctgtgaggccctcctgatggtgcaggcatttcacgcaaacatcatcttcccaaacaaacaagaacaggaatttaacaagcttaccgatgatggccacgttctggactcagagacgtatgtcgggggccacgtcgaagcacttgagagtggagtgttccggtcagatatcccatgcaggttcaggatgaaccctgcggcgttcgactttctgcttcagagggtcgaaaagaccctgagacatgcactggaggaggaagagaaagtcccagtcgagcaggtaactaattttgaagaagtgtgcgacgaaatcaaatctaagctggcctcattaaaagatgttccttccagaatcgagtgccccctgatctatcacctagatgtcggcgccatgtacccgaatatcattcttacaaatagactacagccgtcagctatggttgacgaagccacttgtgctgcctgtgactttaacaagcccggagcaaattgccagagaaagatggcttggcagtggcgcggagagtttatgccagcatctagatctgaataccatcggattcaacaccagctggagtctgagaagtttcctccactcttcccagaagggccagctagggccttccacgagctgtcacgtgaagagcaggccaagtatgagaaacggagacttgcagattactgcagaaaagcctataagaagatccatatcaccaaagttgaggaaagactgacaactatctgtcagcgggagaactcgttctacgtcgataccgttcgtgcattccgggatcggagatatgagtttaaaggcctgcataaggtctggaaaaagaagctttcggctgccgttgaggtgggcgacgcggccgaggttaaaaggtgcaaaaatatggaagtcctgtacgactccctgcaattggcccataagtgtattttgaatagtttttatggttacgttatgcgtaagggcgcaaggtggtacagcatggaaatggctgggatcgtttgctttacaggagctaatattattacacaggcaagggagctcattgagcaaatcggccggccgctggagctcgacactgacggaatttggtgtgtcctccctaattccttcccagagaatttcgtgtttaaaacaaccaatgtcaaaaaaccaaaggtgactattagttaccccggggccatgcttaatattatggtcaaggagggctttaccaacgatcaataccaggaattagcagaaccatcatccctcacatacgtcactagaagcgagaactcaattttcttcgaggtggatggcccttatctcgccatgatcctccccgcatccaaagaagaaggaaagaagcttaagaagagatatgccgtgtttaatgaagacggttctctggcagagttaaaaggtttcgaggtgaagcgaaggggtgagctccagctgataaaaatctttcagagttccgtcttcgaggcatttctgaaagggagcacactcgaagaggtttatggtagtgtggctaaggtagcggactactggctggacgtgctgtacagcaaagccgctaacatgcctgatagcgagctttttgagctcataagcgagaaccgctccatgagccgcaagcttgaagattacggcgaacaaaaatcaacctccatttctactgctaaacgactcgccgagttcctgggcgaccagatggtgaaagatgctggcctgagctgtaggtacataattagccggaaacccgaaggaagcccagtgacagagagagctatcccacttgccatctttcaggccgaaccgacagtcagaaaacatttcttgcgaaagtggttgaagtcctcatccttgcaggactttgatataagggcaattctggactgggactactacatcgagcgcctaggttctgccatccagaagataattactatcccggccgcattacagcaggtgaagaaccctgtgccacgagttaagcatccagattggcttcacaaaaaattgttagaaaaaaatgacgtctacaaacaaaagaagatatcggagctcttcaccctggagggtcggcggcaagtgactatggccgaggcgtcagaggacagccccaggcccagcgcgcccgacatggaggactttggactcgtgaagcttccacatccagctgccccagtgactgtcaagaggaagcgtgtgctgtgggaaagtcaagaagaatcccaggacctcacgcctacggtgccttggcaggagatcctcgggcaaccaccagcactcggcacctcacaggaagaatggttagtctggctgagattccacaaaaagaagtggcagttacaggcccgtcagagattagctcgacgaaagcgccagagactagagtctgcagaaggggtattaagaccaggtgcgatccgggacggacctgccacgggcttgggttcttttctgcggcgcacagcaagatccatcttggatctaccatggcagatcgttcagatatccgaaactagccaggctggccttttcagactgtgggctctggtcggcagcgatcttcattgtatccgcctgtctatccctagagtgttttatgtgaatcagcgggtggccaaggccgaggagggtgcatcttatcgaaaagtgaaccgcgtgctcccacggtccaacatggtctacaacctgtacgaatacagtgtgccagaggacatgtatcaggagcatatcaatgaaatcaacgctgagctgagcgcccctgacatcgaaggagtgtacgagacccaagtgcccctattgttcagagctttggtacatctgggctgtgtctgcgtggtaaataagcaactggtgcgacacctttccggctgggaagccgaaacatttgcccttgaacatcttgaaatgaggagcctcgctcagttctcttatttggaacctggctcaattcgccacatatatctttaccaccacgctcaagcccacaaggcccttttcggtatcttcataccaagccagcggcgtgcttcagtgtttgtgctcgacaccgttagatccaatcagatgccatctttaggcgcactgtactccgcagagcatgggttgctgcttgagaaggtagggccggagctattgcccccacccaaacatacgttcgaggtccgtgccgagacagacctcaaaaccatttgcagagcaattcaaagattccttttggcctataaggaggaacgcaggggccccactttgattgcagtgcagtctagctgggaactcaagcggctggcctccgagatccctgtattggaagagttccccttagtacccatttgtgtggccgacaagatcaattatggggtactggactggcagcggcacggtgctcggagaatgattcgacattatctgaacttagatacgtgcttgtctcaggcatttgagatgtcccggtattttcacatacctatcggaaacctcccagaggacataagcactttcggaagcgatctctttttcgcccgccacttacaacgccacaatcacctcctttggctttcaccaaccgcacgaccagacttagggggtaaagaggccgacgacaactgcctcgtaatggagttcgacgaccaggccacagtcgaaattaatagttctggttgctactccacagtatgtgtggagctcgatctgcagaatctggctgtcaacactatccttcagtcccaccatgtgaatgacatggaaggcgcagattccatgggcattagtttcgatgtcatccagcaggctagtctcgaagacatgattactgggggccaggcagcttcagccccagcgtcatatgatgaaaccgctctgtgcagtaataccttcagaatcctgaagtcaatggttgtaggctgggtgaaggaaatcacccaatatcataacatctacgccgacaatcaggttatgcatttctacagatggctcaggagccccagcagcttacttcacgacccggccctgcacagaacccttcacaatatgatgaaaaagctgtttctccagttgatagctgagtttaagcgcctcggctcaagcgtgatttacgcaaatttcaatcgtatcatcctctgcacaaagaagagacgtgtcgaagacgctattgcctatgtggagtacatcaccagctctattcactcaaaagaaaccttccattctctgacgatttcctttagccggtgttgggagtttctgctgtggatggacccttcgaattatgggggaattaaggggaaggttagtagccggatccattgtggtcttcaggattctcagaaagcagggggagccgaggatgaacaggaaaacgaagatgacgaggaggagcgcgacggagaggaggaggaagaggccgaggagtctaacgtggaggacctcctcgaaaataactggaatattttacagttcctgccacaggccgcttcttgtcagaactatttcctcatgatcgtgtcagcctacatcgtagccgtataccactgcatgaaagacggactgaggcggtccgcccctggctccactccggtgagacgtcggggcgcatctcagctgtctcaagaggccgagggggcggtcggggccctgcctggaatgatcaccttctcccaggactacgttgccaacgaactgacccaatccttctttacaatcacgcagaagattcaaaagaaggttacaggatcaagaaactccaccgaactaagcgaaatgtttccagtgctccccggatctcatctgctactcaacaatcccgcactggaatttatcaagtacgtgtgcaaagtcctctctttggacaccaatatcaccaaccaggtaaacaagttgaacagggatctgctgaggctagtcgatgtgggcgagttttctgaggaggcgcaattccgcgacccatgccgctcgtacgttttgcccgaggtcatatgcagatcctgtaacttctgcagagatcttgatctctgtaaggactcttcctttagcgaggacggagcggtcctcccccagtggctgtgttccaactgccaggcgccatatgactctagtgctatcgagatgaccctggtggaagtactgcagaagaagttaatggcgttcacactccaggacctggtgtgcctgaagtgccggggcgtgaaggaaacatctatgccagtctattgttcatgcgctggagattttgctctgactatccatacacaagtgtttatggagcagattggcatcttccgcaatattgcccagcactacggaatgtcttatctgcttgaaaccttggaatggctgttacagaagaatccccagctcggccattag

SEQ ID NO: 129244 - DNA, 3330 bp, synthetic construct
  misc_feature 1..3330: note = Description of Artificial Sequence: Synthetic coding sequence
  source 1..3330: mol_type = other DNA
atgcaccctaccgaaattctggacgaagataaacgtttggggagtgctgtggactactatttcatacaggacgacggttccagatttaaggtagccctaccttataaaccatatttctatattgcaactcggaaaggttgcgagcgggaggtctctagctttctcagtaaaaagtttcagggaaagatcgccaaggtagaaaccgtcccaaaggaagatctggacttaccaaaccatctggttggcttaaaacgcaattacatcaggctgtctttccacacagttgaagacctcgtaaaggtaaggaaagaaatcagtcccgctgtcaaaaaaaaccgcgaacaagatcatgcaagcgacgcctatacagctctgctgtcttctgtcctccagcgcggcggggtcattaccgacgaggaggagacctccaagaaaatcgcggaccagctggacaacattgtggacatgagagagtatgacgtaccctatcacatccggttatctatcgatcttaaaatccatgtggcccactggtacaatgtgagatacaggggaaacgcatttcctgtggagatcacgcgaagagatgacctggtggaaagacctgaccccgtcgtacttgcctttgacattgagactacaaagcttccgttaaagtttcccgatgcagagacagaccagatcatgatgatctcctatatgatcgacggccaaggataccttatcactaaccgggagatagtctctgaggacatagaagactttgagttcacgcccaaaccggagtacgagggccccttttgtgtctttaatgaaccggatgaggcccacttgatccagcgctggttcgaacatgtccaggagacgaagcctaccattatggtgacgtacaatggcgacttctttgactggccatttgtggaggcccgggcggccgtgcatgggctttcaatgcaacaagagattggctttcaaaaggattcgcagggcgaatataaggcaccccagtgtatccatatggactgcctgcggtgggtaaagcgcgattcatatctgccagtgggtagccacaacctcaaggcggccgcaaaggccaagctgggttatgaccccgtggaactcgaccctgaggacatgtgtcgtatggccacggaacagccacagactctggccacttatagtgtaagcgacgcggtggcgacgtactatctgtatatgaagtatgtgcaccctttcatctttgcattgtgtacaataattccgatggaaccggatgaggtcctgaggaaaggctctggaactctgtgtgaggccctgcttatggtccaggctttccacgccaatatcatttttccgaacaagcaagagcaagaattcaataaattaaccgacgatggacacgtgctggactccgaaacatacgtgggcggccacgttgaggctttggagtccggtgtgtttcgatctgacattccctgtaggtttaggatgaaccccgcagccttcgatttccttttgcaaagagttgaaaagacactgagacatgcattagaggaagaggaaaaagtgcccgtcgagcaagttaccaacttcgaagaggtatgcgacgaaattaagtcaaagttagcaagcctcaaggacgttccttcgcgcatcgaatgtccactcatttaccatctcgatgtaggcgctatgtaccccaatatcattttgaccaataggctgcagccaagtgctatggtggacgaggcgacttgcgcagcctgcgatttcaacaagccaggggccaactgccagcggaagatggcatggcagtggcgaggagagttcatgcccgcctccaggagtgaatatcaccggatccagcaccagctggaaagcgaaaagtttccccccttgttcccagagggtcccgctagggctttccacgagttaagcagagaagaacaagccaaatacgaaaagagaagactcgctgattactgccgcaaagcatacaagaagatccatattaccaaggttgaagaacgccttaccacaatttgccagagagaaaatagtttctatgtggacaccgtgcgtgcctttagagaccgtagatacgagtttaaggggttgcacaaggtgtggaagaaaaagttatccgcagcggtggaggtgggcgacgcggcagaagttaagcgatgcaaaaatatggaggtcttatacgacagcctgcaattagctcacaagtgtatactcaattccttttacggatatgtgatgcgaaaaggggccagatggtactctatggagatggcagggattgtgtgctttacaggagccaatatcatcactcaggcacgagaattgatagaacaaatcgggcgcccgctcgaactggacacagacggaatctggtgcgtcttgccaaactcatttcctgaaaacttcgtctttaaaaccaccaacgtgaagaagcccaaggtcaccattagttatccaggcgctatgcttaatatcatggtcaaagagggtttcacaaacgaccagtatcaggaactggcagagccttcatctctcacctacgtcactagatctgagaatagcatcttcttcgaagtcgatggcccttatctggcgatgatcctgccagcatcaaaggaagagggaaagaaactgaaaaagcgttatgcagtcttcaatgaggatggcagccttgcagaattaaaagggttcgaagtaaagcgtcggggagaactgcagctgattaagatctttcaaagctcagtgttcgaggccttcctgaaaggctctaccttggaggaagtatacggctccgtggcaaaggtggctgactactggttggacgttttgtatagcaaagctgcaaacatgcccgactcagaattgttcgaactgatctctgagaatagaagtatgtcgaggaaactggaggattatggggaacagaagagtactagcatatctaccgccaagcgcttggcagaatttctgggcgaccagatggtaaaggatgctggcttatcctgcaggtacatcatctcgcgaaagccagaggggagtcctgtgactgaacgggctattcctctggctatctttcaggccgagccaacagtacgaaagcacttccttaggaagtggctgaagagctctagcctgcaggacttcgacatccgagcgattctcgactgggactactacattgagaggctggggtcagctatccagaagataataacaattcccgcggccctccagcaagtgaagaatcccgtcccccgggtaaaacaccccgattggctgcataagactgccggcgaggaatag

SEQ ID NO: 129245 - DNA, 1491 bp, synthetic construct
  misc_feature 1..1491: note = Description of Artificial Sequence: Synthetic coding sequence
  source 1..1491: mol_type = other DNA
atggagggcattctcaagagcatggtggtcggctgggtcaaagaaattacacaatatcataacatttacgccgacaatcaggtgatgcacttttacagatggctccgttcaccaagctctctgcttcacgatccagctctgcaccgaactttacacaatatgatgaagaaactgtttctgcagctgatcgccgagtttaagcggcttgggagctcagtaatctatgccaactttaatcggattatcctctgcaccaagaaacgaagagttgaagacgctatcgcttatgtggagtacattacttcaagtattcattccaaggagacattccacagcctcacaatttcttttagccgctgctgggaattcctgctttggatggaccccagcaattacggtggtattaagggtaaggtgtcgtcgcggatacactgtggacttcaggattctcaaaaagccggaggcgccgaagatgagcaggaaaatgaggatgacgaggaagagcgagacggggaggaagaggaggaagcagaagaatccaacgtagaggatctcctggaaaacaattggaacatcctgcagtttctgccccaggccgcctcctgtcagaattattttctgatgatcgtatctgcatacattgtggctgtctaccactgcatgaaggacggtctgaggcgaagcgctcccgggagcacgccagtgcgccgaaggggcgccagccaattgagtcaggaggcagagggggcagttggcgcactcccaggcatgatcactttttctcaggattacgtggccaatgagttgacacaaagttttttcactatcactcaaaagatccagaagaaggtgactggatctcggaactcaactgagctgagtgagatgttccctgtgctgcccggttctcatctgctgctaaacaatccagccttggaattcattaagtacgtgtgcaaagtgctttcactcgacaccaacatcactaatcaggtaaacaaactgaatcgtgacctgctccgtctggtcgacgttggtgagttctccgaagaggcccagttccgcgacccctgcaggtcgtatgttctgccagaggtgatatgcagatcttgtaatttctgcagggacttagacctctgcaaagatagctccttctctgaagatggcgcggtgctaccccagtggttatgttctaactgccaggctccctatgatagtagcgcaattgaaatgaccctggttgaagtcttacagaagaaactaatggccttcactctccaagacctggtgtgcctgaaatgccggggcgtgaaggagacctctatgcccgtgtactgctcgtgcgctggggacttcgcgttaactattcatacccaggtgtttatggagcagatcggaatctttaggaacatcgcccagcattacggtatgagttacttgttggagaccctggaatggctactccagaaaaatccacagttggggcactag

SEQ ID NO: 129246 - DNA, 6894 bp, synthetic construct
  misc_feature 1..6894: note = Description of Artificial Sequence: Synthetic coding sequence
  source 1..6894: mol_type = other DNA
atgtcgagacctttggggttgaagtcctttccacgacacaagcaggccccgctgccgctgtctctgacattccacggctgcctcttactaaggagagatgatggtgccactagttcggtgagtgcactgaagagactggagaggagccagtggacagataagatggacttgcggttcggtttcgagagactgaaagagccaggagagaaaacaggctggctcatcaatatgcacccaacggagattctggatgaagataagcgtctcggtagtgcagtagattattactttatacaggatgatgggagcagatttaaagtggcattgccgtacaagccctatttttacatcgcgacccgcaaaggctgtgaacgagaggtgagctcgttcttgagcaagaagttccaagggaaaatcgcaaaagttgagactgtaccaaaggaggatctggatctgcctaatcatctggtcggtttgaaacgcaattatattagactgagcttccacacggtggaggacttggtcaaggtacgtaaggagataagccctgcagtgaagaagaatagagagcaggatcacgcttccgatgcttacactgccctgctttcatctgtgctacagagaggtggcgtcatcaccgacgaagaagaaacgagtaagaagatcgcggatcagctggacaatatcgttgacatgcgggagtatgatgtgccttaccacatcagattgtctattgatctcaaaattcatgtggctcattggtacaatgtgagatatcgggggaacgcctttccagtggagatcacgaggagagacgacctcgtggagaggccagatcctgtggtgctcgcgttcgacattgaaaccacgaaactgcctcttaagttccctgacgccgaaacagatcagatcatgatgatcagctatatgatcgatggccagggatatcttattactaacagagaaatcgtgtcagaggatatcgaagactttgagttcaccccaaaaccggaatacgagggacctttctgcgtgttcaacgagcccgacgaggctcatttaattcaacggtggttcgaacacgtccaagaaactaaaccaactattatggtgacttacaatggggattttttcgactggccattcgttgaagctagagcagctgtacacggtctctctatgcaacaggagatagggtttcaaaaggattcccagggcgagtacaaggcaccgcagtgcatccatatggactgcttacgctgggtcaaacgcgactcttacctgccagtcgggtctcacaacttgaaggctgccgctaaagccaagcttggctacgatcctgtggaattggacccagaagatatgtgtagaatggcaactgagcagccccagacattggcaacctacagtgtatctgatgctgtggcaacctactacctgtatatgaagtatgtgcatcccttcatcttcgcactgtgcacgattattcccatggaacccgacgaagtcctccggaaggggagcggtactctgtgcgaggcccttctgatggtccaagcgtttcacgctaacatcattttcccaaacaagcaggagcaggagttcaataaactgaccgatgatggccatgtgctggatagcgaaacctatgtgggtggtcatgtggaggcattggaatctggcgtgtttcggtccgacataccttgccgatttaggatgaatcctgccgctttcgacttcttgctgcagagggtggagaagacactgaggcatgccttggaggaggaagaaaaagtgcccgttgagcaggtgacaaattttgaggaggtgtgcgacgaaataaaaagtaagctcgccagtcttaaggacgtaccttcccgtatcgaatgtccattgatttatcacctagatgtgggcgcgatgtatccaaatatcatcctgacaaacagactgcagccatcagctatggttgacgaggcgacttgtgcggcttgcgattttaataagccaggcgctaactgccaaaggaagatggcctggcaatggcgaggggagtttatgcctgcctccaggtccgagtaccataggatccaacatcagcttgagagcgagaaattccccccactgttccctgaagggccagcaagggcctttcacgaactctcccgagaagagcaggccaagtatgaaaaacggaggcttgccgattactgccgaaaagcatacaagaagattcacatcaccaaagtggaggaaaggcttactactatatgtcagagagagaactccttttacgtggatacggtgcgagcatttcgtgataggcgctacgagttcaagggtttgcataaggtttggaaaaaaaaacttagcgcagccgtggaggtcggagatgcagcagaagtgaaaagatgtaaaaacatggaggtcctatacgacagtctgcagctggcccacaaatgtatactgaatagcttctacggctacgtcatgagaaaaggggcgcgctggtatagcatggaaatggccggcattgtgtgctttacaggggccaacattatcacccaggcccgggagctcatcgagcagatcggtagaccccttgagctggatacagacgggatctggtgtgttttgcctaattccttcccagaaaatttcgtatttaaaaccacaaatgtaaaaaaacccaaggtcaccatcagctatcctggggccatgctgaacatcatggtcaaggaaggattcaccaacgaccagtatcaggaactggcggagccttcaagtctgacctacgtcacacgctccgagaactctatcttcttcgaggtcgacgggccttacctcgctatgattctgcctgcaagcaaggaagaagggaagaagctcaagaaacgttacgcggtgttcaatgaggacggatccctcgcagaattgaagggctttgaggtgaagaggcgcggagaattacagctgatcaagatttttcagtccagtgtgttcgaagcgtttctcaaagggagtacgctggaagaggtctatggaagtgtggcaaaggtggctgactactggttggatgttctatactctaaggctgccaatatgcctgattcagagttgttcgaactgatttctgagaatcggtcaatgtcccgcaaacttgaggattacggcgagcagaaatctacatcgatctcaactgctaagcgcttagctgagtttctaggagaccagatggtgaaagacgctggactttcctgtaggtatattatcagtagaaaacctgaggggagcccagtgaccgagagagctatcccgctcgctatcttccaggctgaacctactgtgcggaagcacttcctccggaagtggctgaagtccagctcgttgcaggattttgacattagagctattctggactgggattattacattgaacgattaggatcggccattcaaaagattatcacgatcccagcggccctgcagcaggtgaagaatccagtcccccgggtaaagcatccggactggctccataaaaaactgctggagaaaaatgacgtttataagcaaaaaaaaatctccgaactgttcacccttgaggggcgcaggcaagtgaccatggctgaggcctcagaagacagtcctaggcccagcgcgccggacatggaagatttcggtctggtcaagctgccgcacccagcagcacctgtcacggtcaaacgcaagcgggttttgtgggaatcccaggaggaaagtcaggatctgactcctaccgtcccctggcaggagatccttgggcagcctcctgcattgggtacatctcaggaggagtggcttgtgtggctccgcttccacaagaagaaatggcagctgcaggccagacagcgcttagcgcgccgaaagagacagcgactcgaaagtgctgagggtgtacttcgccctggtgccatccgcgatggcccggcaaccggactcggatcctttctccgccgaaccgcccggtcaattctcgatttgccctggcagatagtgcagatctcagaaacgagtcaagctggtctgttccgcctctgggcactcgtggggtctgatttacattgcattagactatcgattccacgggtcttttacgtcaaccagcgggtggccaaggctgaggagggagcttcatatcgtaaagtgaaccgtgtattgcccaggagcaacatggtttacaatttgtatgaatacagcgtgcccgaggatatgtaccaggagcatatcaatgagatcaacgctgagctgtccgcacccgatatagagggagtatatgagacccaggtccccctgctgttcagggcactggtccacctgggctgcgtgtgcgtggtgaacaaacagcttgtcagacacctttctgggtgggaggccgagaccttcgccctggagcacctggagatgaggtccctcgcgcaattctcttatttagagccgggctctatcagacacatctacctgtaccaccacgcacaggcccacaaggctctattcggcattttcattccaagccaaagacgcgcctcagtcttcgtgttggatactgtccggagtaatcagatgccctcactcggagctctgtactccgctgaacacgggctgctcctggaaaaggtcggaccagaactactgccaccaccaaaacataccttcgaagttagggcagagaccgacttgaagaccatctgccgggctatacagaggtttttattagcttacaaggaagagaggcgcggccccaccttgatagccgtccagtcctcctgggaactgaagagactggcctcagagatccccgtcttagaggagttccccttggtgccgatctgcgtcgcggataagatcaattacggtgttctggactggcagagacatggtgccaggcgaatgattagacattatctcaacctggacacatgtttaagtcaggcattcgagatgtctcgctattttcacatccctatcggaaacctgccagaagacatctccacatttgggagcgacctcttttttgctagacatctgcagcggcataatcacctgttatggctctcaccaactgcccgcccggatctgggcgggaaggaagccgacgataactgcctggtcatggagtttgacgaccaggctacagttgaaattaattctagcggctgttacagtaccgtgtgcgtggagctggatctccagaatctagcggtgaacaccattctgcaatcccaccacgtcaacgacatggaaggcgccgactccatgggcatctctttcgacgtgatccagcaggcaagcttagaagacatgattaccggcggtcaggccgcatctgctcccgcttcatatgatgagactgccctctgctccaacactttccgcattctgaaaagcatggtcgtcggttgggtcaaagaaattacccagtatcacaacatttacgccgacaatcaggtgatgcatttctaccgctggcttcgcagccccagttcactgcttcacgatccggcactgcacaggaccctacataacatgatgaaaaaactgttcctccagctcatcgccgagtttaagcgcctgggatcgagtgtcatatacgccaattttaatcggatcatcctttgcacaaaaaaaagaagggtcgaggacgctatcgcttacgtagagtatatcacatccagtatacattccaaagagactttccactcacttacaatttctttcagtagatgttgggagttcctactgtggatggatccttccaactatggtgggatcaaggggaaggtatcatcacgcatccattgtggattgcaagattctcagaaagctggcggcgccgaggacgagcaggagaatgaggacgacgaggaggagcgtgatggggaggaagaagaggaagctgaagagtcaaatgtagaggatctactcgagaacaattggaacatactccagtttctcccccaagcagcaagctgccagaattacttcctcatgatcgtttccgcatacatcgtggctgtgtaccactgcatgaaggacggcctccgaaggtctgcccctgggtcaacccccgtgcgccgtcgcggcgccagccagctaagccaagaggccgagggtgccgtgggggccctccccgggatgatcacgttttctcaggactatgtcgccaatgagctgacccagagtttctttacaattactcagaaaatccagaagaaagttaccggttccagaaacagcactgagttgtctgagatgttcccagtcctcccggggagtcatctcctactgaacaatcctgctcttgagttcattaagtatgtctgtaaggtcttatccttggatactaacataactaatcaggtcaataaactgaatagagatttgctgagattggtcgatgtaggagaattcagtgaagaagcacagttcagggacccttgccggagctacgtccttccggaggtgatatgcaggtcttgtaatttctgcagggatctggatttatgcaaggactcaagcttctcagaggacggcgctgtactgccacaatggctctgctctaactgccaggctccatacgactccagcgcaatagaaatgaccctggtcgaggtgctccaaaagaagctgatggcattcactctgcaagatttggtctgcctcaagtgccgtggcgttaaggagacaagcatgcccgtctattgctcgtgtgcaggagactttgctctcacgatccatactcaggttttcatggaacaaatcggtattttcaggaacatagcgcagcattatggcatgtcctacttgcttgagactctggaatggctcctgcaaaagaatccccagctaggtcattag

SEQ ID NO: 129247 - DNA, 6780 bp, synthetic construct
  misc_feature 1..6780: note = Description of Artificial Sequence: Synthetic coding sequence
  source 1..6780: mol_type = other DNA
atgagtctccgttcaggtggccggagacgggccgatccaggggccgacggcgaagcctccagggacgacggcgccacatcctccgtgtctgcactgaagcggcttgaacgttcccagtggaccgataaaatggatttgcgtttcggattcgaaagactgaaggagcccggcgaaaagactggatggttaataaacatgcaccctgtggccctcccatataagccctatttctacatcgcaacacgcaaaggctgtgaacgcgaagtatcatcatttcttagcaagaagtttcaaggtaaaatcgccaaagtcgagaccgtcccaaaagaagatttggacctgccgaaccacttggttggactcaagcgtaactacatcagattaagctttcacactgtggaagatttagtgaaagtgagaaaagaaatttctcctgccgtgaagaagaatcgggagcaagaccatgcctccgatgcttacaccgccttgctttccagcgtgcttcaacgcggcggagtgattacggacgaagaggaaactagcaagaaaattgcagatcagctggacaacatagtggatatgcgcgaatacgacgtgccttaccatattaggttatccatcgatctgaagattcatgtagcccattggtataacgtgaggtaccgcgggaacgccttccccgtggaaatcacacggcgcgatgatttggttgaacgcccagatccagtcgtactcgccttcgacatcgagaccacaaagctcccactgaaattccccgatgcagaaaccgaccagatcatgatgatttcctacatgatcgacggccaaggttatctgattactaatcgggaaattgtctctgaggatatcgaagacttcgaatttacacccaaacctgaatatgaaggtcccttttgcgttttcaatgaaccagacgaggcacacttaatccagagatggttcgaacacgtgcaagaaacaaagcccactattatggtcacttacaacggcgatttttttgattggccgtttgtcgaagcccgtgccgctgtgcacgggctgagtatgcagcaggagattgggtttcagaaggacagtcaaggtgagtacaaggctccacagtgtattcatatggactgtctccgctgggtcaagagggacagctacctgcccgtaggctctcataacttgaaggccgctgcaaaagccaaactgggatatgaccccgtcgagctggaccccgaggatatgtgcaggatggctaccgagcagcctcagaccctggcaacttatagcgtaagtgatgctgtggctacgtattatctgtatatgaagtacgtgcatccctttatatttgctctgtgcaccataattcctatggagccggatgaagtcttacgcaaaggatccgggacactttgtgaggccctgctgatggtgcaggcttttcacgctaatatcatcttcccaaacaagcaagaacaagaattcaacaaactgacagatgatggccacgtcctggacagtgaaacctatgtgggtggccatgttgaggccttggagagtggggtgtttcggtccgacattccatgccggttcaggatgaacccagctgcttttgacttcctgctacagagagtggagaagactcttaggcatgctcttgaggaagaggagaaggtacccgtagaacaagtgactaatttcgaggaagtgtgcgacgaaataaagtccaagcttgcatcgttaaaagatgtaccctcacgcatcgagtgccccctcatctaccatctcgatgtaggggctatgtatccaaacattatcttgacaaaccggctgcagccgtctgccatggtggacgaagccacctgcgctgcttgtgacttcaacaaaccgggggccaactgtcagaggaagatggcatggcagtggaggggtgagttcatgcctgctagcagatcggagtatcaccgcattcagcatcagcttgagtccgagaagttcccacccttattccccgaggggcccgcccgggcctttcatgagctatcccgagaggagcaggcgaagtacgagaagaggaggctggcggactactgccgcaaggcctacaagaagatccatatcaccaaggtcgaagagcggcttacaactatctgtcaaagggaaaactcattctatgttgacaccgtgagagcatttcgggaccggaggtacgaattcaagggactgcacaaggtttggaaaaaaaaactcagcgctgcggtagaagtgggcgatgcagctgaagtaaagcgctgtaaaaatatggaggttctgtatgactctctccagctggcacataagtgcatcctgaacagcttctacgggtatgtcatgcgtaagggagcccggtggtacagcatggaaatggccggaattgtctgttttaccggagctaatattataactcaggcccgcgaactcattgaacagatcggaagacccctcgagttagataccgatggtatctggtgtgttttgcctaactcattccccgagaacttcgtattcaagaccacaaacgtgaaaaagcccaaagttaccatatcctatcccggcgccatgctgaatattatggtcaaggagggattcaccaacgatcagtaccaggagctggcggagccatcctcactgacctacgtgacacgatccgaaaactccatcttttttgaggtggatggaccgtacctggcaatgattctaccggcctccaaagaggaagggaagaagctgaaaaagcgctatgccgtcttcaatgaagatggctctctggctgagctgaagggattcgaggtgaagcgccggggtgaacttcagctgatcaagatcttccagagttctgtcttcgaggctttcctgaaaggatctacactcgaagaggtgtatgggtctgtcgcgaaagtggccgattattggttagacgtgttgtattccaaggcagccaatatgcccgacagcgagctttttgaactgatcagcgaaaaccgctcaatgagtaggaagctggaggattacggcgagcagaagagtacttctatctccaccgccaaacgcctggccgagtttttgggcgaccagatggtgaaagacgccgggttaagttgcaggtacattatttctcgcaaacccgaaggatcgcctgtgactgagcgggcaatacccttagccatctttcaggcagagccgaccgtcagaaagcacttcctgcgcaagtggcttaagtcttcatctctccaagatttcgacattagggctatactcgactgggattattacattgagcgcctgggttccgcgattcagaagatcattacaatccctgcagcactgcagcaagttaagaatccagtccccagggtgaaacatcctgattggctccacaagaaactgctagaaaagaatgacgtgtataagcagaaaaaaatcagtgagctgtttacgttggaaggaaggagacaggtgaccatggccgaggcaagcgaggacagccctcgtccctcagccccagatatggaagactttggccttgtcaagcttccgcaccctgcggcacccgttaccgtcaaacggaagagagtgctttgggagtcgcaggaagagagtcaggatctgactccgactgttccgtggcaggaaatattgggtcagcctcctgctctaggcacctcccaggaggagtggctcgtctggcttaggtttcataagaaaaagtggcagttacaggccagacaaagacttgctaggaggaaaaggcaacgtttggagtcagcagagggagtgctcaggcctggcgccatcagggatggtccggccacaggtttagggtccttcctgcgaaggaccgctcgttcgattctggatctcccctggcagattgtgcagattagcgagacctctcaggcggggctgtttaggctctgggccctggtcggttcagacttacactgtataagactgagtattcctagggtattttacgtgaaccaacgcgtcgctaaagcggaagagggtgcatcctatagaaaggtgaatagggtgctgcccaggagtaatatggtctataacctgtacgaatacagtgtacctgaagacatgtaccaggaacacatcaatgagatcaatgcagagcttagtgctcctgacattgagggggtgtatgagacccaggttcccctgctgtttcgggccttagtccacttaggatgcgtgtgcgtggtaaacaagcagctggtcaggcatttgagtggctgggaggcagaaaccttcgctcttgagcatttagagatgcggtctcttgcccaattttcctatcttgagcccggtagtatccgacacatctatctttaccaccatgcccaggcacacaaggcgcttttcggtatcttcattccgagccaacgcagagcatctgtattcgtgcttgatacagtgcggtctaaccaaatgccgtctctcggagcactgtacagcgctgagcatggactgctgttagagaaagtaggacctgaattgctgccgccacccaagcataccttcgaagtccgggcggagactgacctgaaaacaatttgtcgtgccatccaacgatttctcttggcctataaggaggagcgaagggggcccactctgattgctgtgcagtctagttgggagttaaagaggctggcaagcgagatcccagtgctggaggagtttcccctggtaccgatttgtgttgctgacaaaatcaattatggcgtcctggattggcaacgccacggtgcgcgtcggatgatacggcattatctgaatctagacacatgcctgtcccaggcattcgagatgtccagatacttccacatacccatcggcaaccttcccgaggatatctctacgttcggctcggatctgttctttgccaggcatctgcaaagacataaccaccttttgtggctgagcccgacggcacggcctgacttgggaggaaaggaggcagacgacaattgtctcgtgatggaatttgacgatcaggctacagttgagattaatagcagcggctgctacagcacagtgtgcgttgagctagatcttcagaacctggccgtgaacaccatccttcagtctcaccacgtcaatgacatggagggagccgactctatgggtatcagctttgatgtcatccaacaggcctctctggaggacatgatcactggaggacaagccgcttccgcccctgcctcgtatgatgaaactgctttgtgcagcaacacctttagaatactgaaatctatggttgtgggatgggtgaaagagatcactcagtaccacaatatttacgccgacaaccaagtgatgcatttctatcggtggcttcgcagtccaagctccctgctgcatgatcccgccctgcatcgaactctacacaatatgatgaaaaagctgttcctgcagcttatcgctgagtttaagcgtttagggtccagtgtgatttacgctaattttaatcgaattatcttgtgtacgaagaagaggagagtggaagatgctattgcctatgtggagtatattacatcctcaattcattctaaggagacctttcacagcctgactatctcattcagccggtgttgggagttcttgctgtggatggatccgagtaactatgggggaatcaaaggaaaagttagctctcggatccactgcgggctacaagacagccaaaaggcagggggcgccgaagacgaacaagaaaatgaggacgacgaggaagaacgcgatggagaagaagaagaggaggctgaagagagcaatgtcgaagatcttttggaaaacaactggaacatcctgcagtttcttccccaggccgcttcctgtcaaaactacttcctgatgatagtatccgcttacattgtggccgtctaccattgtatgaaagacggattgagaagaagcgcgccagggagtactccagtgcgcaggcgcggagcatctcagctatcccaggaagctgagggcgccgtgggcgctctgccgggaatgattacattctcccaagactatgtggctaacgagcttacgcaatcattttttaccatcacacagaaaattcaaaaaaaggttaccggatcgcgtaattcgacagagctgtcagagatgtttcctgtcttgccaggcagccacctgctacttaacaaccctgcgctagagttcatcaagtacgtctgcaaagtgttgtcactggatactaacatcacaaaccaggtaaacaagttgaaccgggatctgcttaggctggttgatgttggagaattcagtgaagaagcccaatttcgcgatccatgccggagctatgtgctgccagaggttatttgccgcagctgtaacttctgccgcgatctggatttgtgcaaagactcaagctttagtgaagacggggctgtgctgcctcaatggctgtgttcaaactgtcaggcgccatacgatagttcggcaattgagatgactctggtggaggtgctccagaaaaaactgatggcttttactctgcaggatctcgtgtgtctgaagtgcagaggtgttaaggaaactagcatgcctgtttactgctcctgtgccggagatttcgcactgaccatccatacacaggtctttatggagcagatcggcatctttagaaacattgcccagcactacggtatgtcctacctgcttgagaccctggagtggctgctgcagaaaaacccccagcttggacattag

SEQ ID NO: 129248 - DNA, 480 bp, synthetic construct
  misc_feature 1..480: note = Description of Artificial Sequence: Synthetic coding sequence
  source 1..480: mol_type = other DNA
atgattaaatttttcttaatggtgaataaacagggccagactcgtctcagcaagtactatgagcatgtggatattaataaaaggactctgctggaaactgaagtgatcaaaagctgcctcagtcgctccaatgaacagtgtagtttcatcgagtataaggattttaagctcatttatcgtcagtacgccgctctgtttattgtagtcggcgtgaatgatacagaaaatgaaatggccatctacgaattcatccacaactttgtagaggtgctggacgaatacttcagcagggtgagtgaactggacgtctctttcttcaataccgtgttccactccacctggcagatgcattcaggaccgtatcaggagcctatagacgaactcccaaaaatctgctctgctctcgagccacagcaaacatgtttctcacctgacagttcctcttttaaaggtgcagcatctacaacccccatctattag

SEQ ID NO: 129249 - DNA, 1506 bp, synthetic construct
  misc_feature 1..1506: note = Description of Artificial Sequence: Synthetic coding sequence
  source 1..1506: mol_type = other DNA
atggccccagagcgccttcgttctagggccctttccgccttcaagcttaggggactgctgcttaggggtgaagctattaagtatctaaccgaagcgctccagagcatcagcgagctggagcttgaggacaaactcgagaaaatcatcaatgccgtggagaagcaaccattgtcatcgaacatgattgaaaggtcagttgtcgaggccgccgtccaggagtgctcccagtccgtggacgagactattctgcttatgacaaaccacccagcccccaatctctttggtaccccacgggataaagccgaaatgttcagagagcgctatacaattctgcatcagcgaacccaccgccatgagcttttcaccccacctgtgattgggagccacccagatgagagcgggtctaagttccagctgaaaacgatcgaaactctgctgggatcaaccacaaagattggggacgccatcgtgctcggtatgatcacccaactgaaagagggcaagttcttcctggaggaccctactggaacagtacagctggatctcagcaaagcgcagtttcactccggcctctacaccgaggcctgttttgttctcgccgaaggctggttcgaggaccaggtgttccatgtgaacgccttcggttttcctcctaccgagccatcctccacaacaagagcatattatgggaacatcaatttctttggagggccgtctaacacgtcagtcaagaccagtgccaagctgaaacagctcgaggaggaaaataaggacgctatgttcgtattcctctctgacgtttggctcgaccaggtcgaggtccttgagaagttgcgtattatgttcgctgggtacagccccgcaccacccacgtgcttcatcctgtgcggcaatttttcctccgccccttacggaaagaatcaggtgcaggccctaaaagacagcctcaagacactggccgacatcatctgcgaataccccgacatacatcaatcgtcaagattcgtgtttgtgccgggaccagaggatcccggattcgggagcatccttccaaggcctccactggccgaaagtattaccaacgagtttcgtcagcgcgtcccgttcagcgttttcaccacgaatccctgcaggatccagtactgcacccaggagatcacagtgtttcgagaagacttagtcaataagatgtgtcgcaattgtgtgcgctttcccagcagcaatctcgcaatccctaatcattttgttaaaacaattctgtctcagggccacctgacccctctgcccttgtatgtctgtcccgtctattgggcctatgactatgcccttcgtgtgtaccctgtgccagacttgctggtgatcgcggataagtacgacccgttcaccacgaccaataccgaatgtctctgcatcaatcccggctctttcccacgttcaggattctcctttaaggtattttatccctccaataagacggtggaggactccaaactgcaggggttctag

SEQ ID NO: 129250 - DNA, 1509 bp, synthetic construct
  misc_feature 1..1509: note = Description of Artificial Sequence: Synthetic coding sequence
  source 1..1509: mol_type = other DNA
atggcccctgagcggctgcggtcccgggctctgagcgccttcaaactgcgtggtctgctgctgagaggagaggcaattaagtacctgaccgaagccctgcagagtatcagtgagctggaactggaggataagctagagaagattatcaacgccgtggagaagcagcctttgagctcgaacatgatcgaaaggtcagtggttgaggctgcagtgcaagagtgctcccagtccgttgacgaaaccattgagcatgtgtttaatattatcggagctttcgacatcccccgtttcgtttacaattccgaaaggaagaagtttctgccactgttgatgaccaaccatcctgcccctaacctgttcggcacacctagagacaaggccgagatgttcagagaacgatatacgatcctccaccagcgcactcatcgccacgaattattcaccccccctgtaatcggcagccaccccgacgaatccggtagcaagttccagctcaaaactattgagacactgctggggagcacaacgaaaataggggatgctattgtgctgggcatgattactcaacttaaggaaggcaagttctttctggaagatcccacaggaacagtgcagctggatctctctaaggctcagttccacagcggtctgtacaccgaagcctgcttcgttctggcggaaggatggttcgaggatcaggtattccacgtgaacgcatttggcttcccccccacagagccctcatctaccacccgtgcatactacggcaacataaatttcttcggcggaccttcgaatacatccgtaaagacttctgccaagctgaagcagttggaagaggagaacaaagacgccatgtttgtgttcctctccgacgtctggctggaccaggttgaagtccttgagaagttgagaatcatgtttgctggttacagtcccgcccctccaacatgttttatcctttgtggcaacttcagctcagcaccctacggaaaaaatcaggtacaagcactgaaggactctttgaagacgcttgccgacatcatctgtgaatacccagacatacaccagtccagccggtttgtgttcgttcccggccccgaggatcccggcttcggttcaatccttcctcggcctcccctggcagaatccatcacgaacgaattccgccagcgcgtgcccttctcagtctttaccactaacccatgcaggatccagtattgtacacaagagattaccgtctttagagaagaccttgttaataaaatgtgcaggaactgtgttcggtttcctagctccaatttagccattccaaaccacttcgtgaaaacaattctgagtcaaggccacctgacccccttgccgctatacgtttgtcccgtgtactgggcatatgattacgccctgagagtttatcctgtgcccgatctgctggtgatcgccgataagtacgatccatttacgaccactaataccgagtgcctctgtataaaccctgttcggatgtag

SEQ ID NO: 129251 - DNA, 444 bp, synthetic construct
  misc_feature 1..444: note = Description of Artificial Sequence: Synthetic coding sequence
  source 1..444: mol_type = other DNA
atggcagagaggccagaggatctgaacctccccaatgccgttatcacccgcattataaaagaagcccttcccgacggggtcaatataagcaaggaagctcggtctgccatatctagggccgcttcagtctttgtgttgtatgctacctcatgcgcaaataactttgcgatgaaagggaagcggaagacattgaacgccagcgatgttctttctgcgatggaggagatggagttccaaaggttcgtgacgcctctcaaggaggcactggaagcctacagacgggagcagaagggtaagaaggaagctagcgagcagaagaaaaaggataaggacaaaaaaacagatagtgaagaacaggacaagagccgggacgaggataatgacgaagatgaggaacgcttggaggaagaggagcagaacgaagaagaagaagtcgataactag

SEQ ID NO: 129252 - DNA, 444 bp, synthetic construct
  misc_feature 1..444: note = Description of Artificial Sequence: Synthetic coding sequence
  source 1..444: mol_type = other DNA
atggcagagagaccagaggacttaaacctgcccaatgccgtgattacccgtatcataaaagaagccctcccagacggggttaacatatctaaggaggctaggagcgctatctctagggcagcgagtgtcttcgtgctctacgccacgtcttgcgcgaataatttcgccatgaaaggaaagagaaaaacactgaatgcttctgacgtacttagcgccatggaggagatggagttccagcggtttgtcactccactcaaagaagccctagaggcgtatagacgggaacagaaggggaagaaagaagcgtcagagcagaagaaaaaggacaaagataagaagaccgattcggaggagcaggacaaatcgagggacgaagataacgatgaagacgaggaacgactggaagaagaagagcagaacgaggaagaagaggtagacaactag

SEQ ID NO: 129253 - DNA, 1245 bp, synthetic construct
  misc_feature 1..1245: note = Description of Artificial Sequence: Synthetic coding sequence
  source 1..1245: mol_type = other DNA
atggccactggccaggaccgcgtcgtggctcttgtagacatggactgcttcttcgtccaggtcgagcaaaggcagaaccctcatctgcggaacaagccatgcgctgtggtccagtacaaaagctggaaaggcgggggcatcatcgcggtcagttatgaagctcgggcgttcggggttacaaggtccatgtgggcagatgacgccaagaagttatgcccagacctgctcttggcccaagtgcgcgagtcccgtggaaaggcaaaccttaccaaataccgagaggcaagcgtggaagtgatggagatcatgagccgctttgcggtaatcgagcgcgcctctatcgatgaagcatacgtggacctgacatccgcggttcaagagaggttacaaaaactccagggccaaccaataagcgctgatctgctccctagcacatatattgaaggactgccgcaagggcctacaactgctgaagaaactgtccagaaggaaggaatgagaaagcaggggctgttccagtggctcgacagtttacagatcgacaacctaacctcccccgacctccaactgaccgtcggagccgtcatcgtggaggaaatgagagctgctattgaacgagaaactgggtttcagtgcagtgctggcatcagtcataataaggtgctggcgaagttggcctgcggtctgaataagccaaatagacaaaccctcgtttcccatggatcagttccacaactcttcagccaaatgccaattcgcaagatccggagtttaggaggaaagttgggcgccagcgtgatcgagatcctgggtatcgagtatatgggggaattgacacagtttaccgaaagccaactacagtcccactttggcgaaaaaaacggctcttggctgtacgcaatgtgccgtggcatcgagcacgacccggttaagcctcgacagctacctaagactatcggatgctctaagaacttccctgggaagacagctctggccactcgggagcaggtgcaatggtggttgttgcagttagcacaggaacttgaggagcggctcacgaaggaccgcaatgataatgacagggtggccactcagttggtggtctcgataagagtgcagggtgataagcgactgagttcactcaggagatgctgcgctctgactcgctacgatgctcataagatgtctcacgatgctttcaccgtgatcaagaactgtaacacatctggcattcagacagagtag

SEQ ID NO: 129254 - DNA, 2142 bp, synthetic construct
  misc_feature 1..2142: note = Description of Artificial Sequence: Synthetic coding sequence
  source 1..2142: mol_type = other DNA
atggccacaggccaggacagggtggtcgcgctcgtggatatggattgtttttttgttcaggtagagcagaggcagaatccgcacctgagaaacaagccctgtgccgtggtgcagtacaaaagctggaaaggtgggggcatcatcgcggtgagttatgaggcccgcgcctttggagtcacccggtcgatgtgggctgatgacgcaaagaagttatgccccgatctcctgctagcacaggtgcgggaaagtcgagggaaagccaacctgacaaaatatcgcgaagcctctgttgaggttatggagattatgtctcgctttgccgtcatcgagagagcttcaatagacgaggcgtacgtggacctgacctcagcagttcaggaaaggctccaaaaactacagggccagcctatctccgcagatctgttgccatcgacctacattgaggggctccctcaaggtcccaccaccgcagaagaaactgtgcagaaagagggcatgagaaaacaaggcctatttcagtggctggactccctgcagatcgacaaccttacgtcaccagatttgcagctcactgttggcgcggtgattgtggaggagatgcgggccgcaattgaaagggagacgggctttcaatgctccgcagggatttcgcataacaaagtgctcgccaaacttgcatgtggattaaacaaaccaaaccgacagaccctggtgtcacatggcagcgtacctcagcttttttcccaaatgccaattcgtaagatccggtccctggggggaaagctaggcgcctctgtaatcgagattttgggaattgaatacatgggtgagttaactcagtttaccgaatctcagcttcagtctcacttcggagagaagaatggcagttggttgtatgccatgtgcagaggcatcgaacacgatcccgtgaagcctagacaactgcctaaaaccattggctgttcaaagaacttccctggcaaaaccgccctggcgactagggagcaagtccagtggtggttactccagctcgcccaagagctcgaggaaagactgacaaaggatcgtaatgacaatgatcgcgtagctacccagctggttgtcagtatccgagttcagggagataagcgattaagctcactgcgcaggtgttgtgcgctgacaagatacgatgcgcacaaaatgagccacgacgcatttacagtaatcaagaactgcaacaccagcggtatccagacagaatggtcgccacctctaactatgctgttcctatgcgctactaaattctccgccagtgctccttcttcctctacggacataacttccttcctttcctccgatccttctagccttcccaaagttcctgttacatcgtcagaggctaagactcaggggtcaggtcccgcagtgaccgctactaagaaggcgaccacctccctggagagtttcttccaaaaagccgccgagagacagaaggtaaaagaagcctccctgagtagcctcacagcccccacccaagctccaatgagtaattctcctagtaagccatctctcccattccagacctcccagagcacgggcacagagccgtttttcaagcagaaaagcctcctgctgaaacagaagcagcttaataacagcagcgtttcatcgcctcaacagaatccttggagcaactgtaaggccttacctaatagcctccctacagagtatccagggtgcgtaccagtttgcgagggagttagcaagctggaagaatcttcaaaagccacccccgccgaaatggatctagcccacaattcccagtccatgcacgcctcttcagcgtcaaaatcagtactcgaggtgactcagaaggccacgcccaatccctcccttttggctgccgaagaccaagttccttgtgaaaagtgtgggtccttggtaccggtgtgggatatgcccgagcatatggactatcatttcgctcttgagcttcagaaatccttcctccagccgcattctagtaacccacaggttgtgtctgcagtgagtcaccagggcaagcggaacccgaagtccccgctggcctgcactaacaaacgcccgcggccagagggaatgcagacactggaaagcttctttaagcctctcacccactag

SEQ ID NO: 129255 - DNA, 219 bp, synthetic construct
  misc_feature 1..219: note = Description of Artificial Sequence: Synthetic coding sequence
  source 1..219: mol_type = other DNA
atgtgggcagatgacgcaaaaaagctgtgcccagatttgcttctagctcaggtaagagaatccaggggtaaagcaaaccttacaaagtacagggaagcaagcgtggaggttatggagattatgtccagatttgccgtcatagagagagccagtattgacgaggcctatgtggacctgacttcggctgtgcaggaacgactccagaagttgcaggggtag

SEQ ID NO: 129256 - DNA, 1956 bp, synthetic construct
  misc_feature 1..1956: note = Description of Artificial Sequence: Synthetic coding sequence
  source 1..1956: mol_type = other DNA
atgtgggctgacgatgcgaagaagttatgccctgacctgctcttggcccaggtacgggagagcagggggaaagcaaatctgactaagtatcgtgaagccagtgtagaagtcatggaaatcatgtcacgttttgctgtgattgagagagcatcaatcgatgaagcttacgtcgatcttacaagcgcagtgcaggagcggcttcagaaactccaggggcaacccatctccgcagatctcctgcctagcacatatatcgaaggattgcctcagggccctaccaccgccgaggagacagtgcagaaagaaggcatgcgcaagcaaggtctttttcaatggctggattccttgcagattgacaatctgacctcgccggatctacagctcaccgtgggcgcagtgatcgttgaggagatgagggccgcaattgaacgcgagacaggcttccaatgttccgccggcatttcacataacaaagtcctcgcaaagctggcgtgtgggctaaacaaacccaaccgccagaccctggtgtcccatggatcagtgccacagctgttttcacaaatgcctatcaggaaaattagatccttagggggcaagcttggcgcatctgtcatcgaaatactcggaattgaatatatgggggaactgacacagtttaccgaatcccagctacagtcacatttcggcgagaagaatggctcttggctatatgcaatgtgcagaggcatcgagcacgacccagttaagccaagacaactcccgaagacaattggctgctctaagaactttcctggcaagaccgccctggctactagggagcaggtgcagtggtggctcttgcagctcgcgcaggaattggaggagagactgaccaaagaccgtaacgacaacgacagggttgctactcaactggtggttagtatccgcgttcagggagacaaacgacttagttcactcagaagatgctgtgccctgacccgatacgacgctcacaagatgtctcatgacgcgttcacagttattaaaaattgtaatactagcggcattcagaccgaatggagcccacctctgacgatgttgtttctgtgtgccaccaagttttctgcatcagccccttcttcttcaactgatatcacgtcatttctctcctcagacccctctagtctgcccaaggtcccggtcacaagcagtgaagcaaagacccaggggtctggacccgcggttactgcaaccaagaaagcgaccaccagtctggaatctttcttccaaaaagccgccgagagacagaaagttaaggaggcctccctgtcatctttgacagctccaactcaagcccctatgagcaactcccccagtaagccgagtctgcctttccaaacatcccaatccacgggtaccgagcctttctttaaacagaagagtcttctcttgaagcagaagcagttaaacaattctagcgtctcaagtcctcagcagaacccctggtctaattgcaaggccctccccaattcccttcctactgagtaccctggatgcgtgccggtgtgtgaaggagtgtcaaagctggaggaaagctccaaggcaactcccgctgaaatggaccttgcccataactcccaaagcatgcatgcctccagcgccagtaaatctgtcctggaggttacacaaaaagccacaccaaacccatcactgctcgccgcggaagaccaggttccttgtgagaaatgtgggagtctggttccggtgtgggacatgcccgagcacatggattaccattttgccctggagcttcagaaaagtttcctccagccacactctagcaatcctcaggtggtgtctgcagtgtcccaccaggggaagcggaatccaaaatcccctctagcctgtacaaataaaaggccccgccctgaggggatgcagactctggagtctttctttaaaccactgacccactag

SEQ ID NO: 129257 - DNA, 3720 bp, synthetic construct
  misc_feature 1..3720: note = Description of Artificial Sequence: Synthetic coding sequence
  source 1..3720: mol_type = other DNA
atgtcacgtctgctctggcgtaaggtagcgggggcaactgtgggacccggccccgttcccgcacccggccgttgggtctcctcctcagtgccggcctctgacccctcagatggccagcggagaaggcaacagcagcagcagcaacagcagcagcagcagcagcagccacagcagccacaggtcctgagcagcgaaggaggccagctgcgacacaacccgttagacatacaaatgctttcgagaggcctccacgaacagattttcggtcagggcggagaaatgcctggcgaggctgccgtaaggcgcagcgtggagcacctacagaaacatggcctttggggacagccagccgtccccctgcccgatgtcgagcttcgccttccccccttatacggcgataatctcgaccagcacttccggctgctggcccagaagcagtcattgccttacctggaagcagcaaatttgcttttgcaggcccaactgccacccaaacccccagcttgggcatgggctgagggatggacgagatatgggcccgagggtgaggccgtgcccgtggctatcccagaggagagagcgctggtttttgacgtagaggtgtgtctggccgagggtacctgtccgacattagcggtggctatatctccgtctgcttggtacagctggtgttctcagcggctggtggaggagaggtattcctggacatctcaactctctcccgccgacctgatccccctggaggtgccaaccggggcctcatcccccactcagcgggattggcaggagcaactggttgtggggcataatgtttccttcgaccgtgctcacatacgggagcagtacctcattcagggaagcaggatgcggttcttagacacaatgtccatgcatatggcgatatctggattgtcttcctttcagcggagcctgtggattgctgccaagcagggaaagcacaaggtgcagcctcctaccaagcagggccagaaatcacagcgcaaagctagaagggggcccgctattagtagctgggattggctggacatttctagcgtgaacagccttgcagaagtccaccgattgtacgtgggcggccctccactcgaaaaagagccacgcgaactgttcgtgaaaggaaccatgaaagatatcagagagaattttcaggatctcatgcagtattgcgctcaggacgtttgggcaactcatgaagttttccagcaacaactcccactgttcctggagagatgccctcacccagtaaccctggctggtatgctagaaatgggagtcagctatctgcccgtgaatcagaattgggagcgctatttggctgaggcccaggggacgtacgaagagctgcagcgcgagatgaagaaatccctgatggatcttgcaaatgacgcatgtcagttactcagtggcgagagatacaaagaggatccgtggctgtgggatttagaatgggatctccaggagttcaaacaaaagaaggctaagaaggtgaagaaagagcccgctaccgccagcaagctccctattgagggcgccggcgctccaggggatccgatggatcaagaagatctgggaccgtgttccgaggaagaggaatttcagcaggatgtcatggcccgagcctgcttacaaaaattgaaaggaacaaccgagctgttacccaagcgaccccaacacctccccggccaccctggatggtatcggaagctgtgccctaggctagatgatcccgcgtggacgcctggaccatctctgctttctctgcaaatgagagtaacccccaagcttatggccctgacctgggacggtttccccctgcactattctgaaagacacggttggggctacttggtgcctggcaggagagacaatttggctaaattgccaactgggaccacccttgagtctgcaggggtcgtttgtccttatcgagccatcgagagcctgtacagaaagcactgtctggagcaggggaagcagcaactgatgccgcaggaagccgggctggccgaagagttcctgctgacagacaatagcgcaatttggcaaaccgtggaagaactggattatctcgaggtggaagccgaggcaaaaatggagaatcttcgtgcagccgttccaggacagcccctcgccctgacggcccggggcggtcccaaagacacccagccaagttaccaccacggaaatgggccctataacgacgtggatattcccggttgctggttctttaagttaccccacaaggacgggaacagctgcaatgttggttcgccttttgccaaggacttcctaccaaagatggaagatgggacattgcaagcggggcccgggggggccagcggaccccgtgcactggaaatcaacaagatgatctctttttggcggaatgcgcataagcgaatatcctctcaaatggtcgtgtggcttccccggagcgcactccctcgggcagtaatacgacaccccgactacgatgaggaagggctgtatggagccatactgccccaagttgtgaccgcaggcaccatcacaagacgagctgttgaacctacttggttgacagcctctaatgccaggccagacagagtcggctctgaactgaaagcaatggttcaggcacccccgggctacaccctggtgggggcagacgttgatagccaggagctctggatcgctgctgttttgggcgacgcgcacttcgcgggcatgcacgggtgtactgccttcgggtggatgactttacagggaaggaaaagccgagggactgatttacacagcaaaactgccacaaccgtgggtatcagccgtgagcatgctaagatcttcaattatggtcggatctacggggcgggtcagccctttgccgagcgtcttttgatgcagtttaatcatcgactgacgcagcaggaggcggccgagaaagctcagcaaatgtacgccgcaacaaagggcctcaggtggtacaggttatctgatgaaggggagtggttagtgcgcgagttaaatctgccggttgatcgcactgaagggggatggatctccctgcaggatctgcgtaaggttcaacgcgagacggcccgaaagagtcagtggaagaagtgggaggtggtcgccgagagggcgtggaaaggtggcaccgagagcgaaatgtttaataagctggagagtatcgcaaccagtgacatcccacgaacaccggtccttggctgctgcattagtcgcgcgctagaaccaagcgctgtgcaggaagagttcatgacaagccgggtgaattgggtagtacaaagcagtgctgtagactatctgcacctgatgctggtagcgatgaaatggctattcgaagagtttgctatcgacggaagattttgcatctccatccacgatgaggtgaggtacctcgtgagagaagaggacagatatagggcagccctggctttacagataaccaatttgctgactcgctgcatgtttgcatataagttgggtttgaacgacctcccccagtctgtggcgtttttctcagccgtcgatatagaccggtgtcttaggaaggaggtgaccatggattgcaagaccccctcaaatcccacaggcatggagaggaggtacgggatcccgcagggtgaagccctcgatatctaccaaattatcgagctgacaaagggttcactcgagaaacggtcccaacctggcccctag

SEQ ID NO: 129258 - DNA, 3720 bp, synthetic construct
  misc_feature 1..3720: note = Description of Artificial Sequence: Synthetic coding sequence
  source 1..3720: mol_type = other DNA
atgtccaggcttctctggcgtaaggtggccggcgccaccgtggggcccggtcccgtcccggctcctggcaggtgggtttcatcatcagtgcctgccagtgatccatccgacggccaaagaagacgccagcagcagcagcaacaacaacagcagcagcagcagcaaccacaacagccccaggttttatcttccgaaggggggcagcttcggcacaaccctctggacattcagatgctcagccgcggattgcatgaacaaatctttggccaaggaggggaaatgccaggggaagcagctgttagacggtcagtcgaacaccttcagaaacatggcctgtggggccagcctgctgttccccttcccgacgtggaactgaggcttcctcccctttacggcgacaatctggatcagcacttccgactgttggcacagaaacagagccttccatacctggaagccgctaaccttcttttgcaggcacagctgccacccaaaccaccggcctgggcgtgggccgagggatggacaaggtacggccccgagggggaggccgttcccgtcgctatcccagaagagagagcactggtgttcgatgtggaggtgtgtttggccgaaggcacctgcccaacgcttgctgtggcaataagcccgtcagcctggtatagctggtgtagtcagaggctggtagaggagcggtacagctggacctctcaactaagtcctgctgatctaataccactcgaggtccctacaggggcaagcagcccaacccaacgggattggcaggaacagcttgtggtgggacacaatgtgtcttttgacagggcccacatcagagagcagtacctcattcagggatcccggatgaggttcctggataccatgtccatgcacatggccatctctggcttatcttctttccaacgcagcctgtggatagccgcgaagcaggggaaacacaaagtgcaaccccccactaagcagggacagaagtcccagcggaaggctcgccgcggaccggcgatctccagctgggactggctggacatctcatccgtcaactcactggctgaagtgcatcgcctgtatgtgggcggtcctcctctcgaaaaggaaccccgagagttgtttgtcaagggtaccatgaaagatattagagagaacttccaggacctcatgcagtactgtgcacaagatgtttgggccactcatgaggttttccagcagcagctccccctgttccttgagaggtgtccacatccggtgacactagcgggaatgctcgagatgggtgtctcatacttgcctgtaaatcagaactgggagcggtacctggctgaagcccaggggacatacgaagagctccagcgggagatgaaaaaatccttgatggatctcgccaacgatgcatgccagctgctgtccggagaacgttacaaggaggatccttggctgtgggatctggaatgggatctgcaagagttcaagcagaaaaaagccaaaaaagtcaagaaagagcctgcaaccgcatccaagcttcccattgaaggcgccggcgccccgggcgacccaatggaccaagaggatttaggcccctgcagtgaggaggaagaattccagcaggacgtcatggcgcgggcttgcttacagaagctgaaaggcacaaccgagttattgcctaagcggccccagcaccttcccggacatccagggtggtaccgcaagctctgcccccgtcttgatgatcccgcctggaccccagggccctcactgttatctctgcagatgcgggttaccccaaaacttatggccttgacctgggacgggttccccctccactacagtgagaggcatggatgggggtatctcgtgccagggcgtagggacaatctagcgaaacttcctaccggtaccacactggaaagtgccggagttgtttgtccttaccgggccatcgagagcctatacaggaaacattgtttggaacagggcaaacagcagttaatgccccaggaagccggtctcgctgaagagttcctactcactgataattcggctatttggcaaactgtagaggagcttgattacttagaagtggaggcagaagcaaaaatggaaaatctgcgggccgccgtgcccggacaacccctggctttaacagccaggggtggaccaaaagatacacagccctcttatcatcatggcaacggtccctataatgacgtcgacatccctggatgttggtttttcaaattgccccataaggacggcaactcctgtaatgtgggctccccattcgccaaggactttctgccaaagatggaggacgggacactgcaggccggacccggtggggccagtggtcccagagctctggagataaataagatgattagtttctggaggaacgcccacaagcggattagctctcagatggtggtttggctcccaagaagcgccctcccgagagccgtcatcagacacccggattacgacgaggagggactatatggcgctattctgccacaagttgtaacagccggaacgatcactagacgagctgtggaacccacctggctgacagcctccaacgcgcgccccgatcgggtagggagtgaacttaaggcaatggtgcaggcacctcccggctacactctagttggggcagacgtggattcacaggagctgtggattgcggctgtgctgggtgacgctcacttcgcaggaatgcatggctgtactgcttttggatggatgactctgcaaggtcggaagagtcgcggaaccgatctgcattctaaaactgccactaccgtggggattagccgcgagcacgcaaagattttcaattacggtcgaatatacggagccggtcagcctttcgcagaacgcctccttatgcaattcaatcatcgccttacacaacaagaggccgccgaaaaggcccaacaaatgtacgctgccacaaaggggctgcgctggtaccgactgagcgacgagggggagtggctagtccgggagctaaacttgccagtggaccgaacagagggaggctggatttccttgcaagatttaagaaaggtgcagcgcgaaactgctagaaagagccagtggaagaagtgggaggttgtcgctgagcgggcttggaagggaggcaccgaaagcgaaatgttcaacaaactagagagcattgctacctctgatatccctcgaacacccgtgctaggctgttgtatctcaagagccttagaaccaagcgcagtgcaggaggagtttatgacaagccgggtgaattgggttgttcagtcctctgcagtggattatctgcacctgatgcttgtagctatgaagtggctctttgaggagtttgctatagatggccgtttttgtatttccatccatgatgaggtccgctatttagtacgggaggaggaccgctatagggccgcgctcgcattacagataaccaacttgctgacccgttgtatgttcgcctataagttggggctcaatgacctgccacagtccgtcgcattttttagcgcagtggacatcgatcggtgccttcgcaaggaggtaacgatggactgcaagacaccttctaaccctaccggtatggagcggagatacggcatcccacagggcgaagctttagacatctatcaaatcattgagctgactaaaggttccttggagaagcggtcccaacccggaccttag

SEQ ID NO: 129259 - DNA, 1458 bp, synthetic construct
  misc_feature 1..1458: note = Description of Artificial Sequence: Synthetic coding sequence
  source 1..1458: mol_type = other DNA
atgcggagtagggttgcagtaagagcctgtcataaggtctgtaggtgcctcctttcagggttcggcggccgcgtggatgcaggtcagccagagctgctgacagagcggtcttcccccaagggtgggcacgtgaagtcccatgccgaactcgaaggtaacggagagcacccagaagccccagggagcggtgagggatctgaggcacttttggagatctgtcagcgtcgccacttcctgtccgggtcaaaacaacagctcagcagagattcactgctgtcaggatgtcatccaggcttcgggccccttggcgtggagctgcgcaagaaccttgccgccgaatggtggaccagtgtcgtggtttttcgcgaacaggtgttccctgtcgacgcccttcaccataagccaggaccactacttcccggagactccgccttccgactcgtcagcgcagagacactgagggagattctgcaggataaagagttatccaaggagcagctggtagcattcctggagaacgtactcaaaaccagcggtaagctccgcgaaaatctgttacacggagccttagagcactacgtgaattgccttgatttggttaacaagcgtctcccctatgggctggctcagatcggcgtgtgttttcaccccgtgttcgacacaaagcagataaggaatggcgtcaagtcaattggggaaaagaccgaagcgagcttagtatggttcacaccaccacgaacgtccaatcaatggctggatttctggcttcggcacaggttgcagtggtggagaaaattcgctatgtcacccagtaatttcagtagttctgattgccaggacgaggaggggcggaagggtaataagctgtattacaactttccttggggcaaggaactgatcgaaacactgtggaacctcggcgaccacgaactgctacacatgtaccccggaaacgtgtccaaactccacggtagagatggtcggaaaaatgtcgtcccttgcgtgctctctgtcaatggagacctggaccgaggcatgctggcttacctgtatgactctttccagttaacagagaattcctttactaggaaaaaaaatctacatcggaaagttttgaagctccacccctgtctggctccaataaaggtggcgctggacgtgggccgtggtccaactttggagctgaggcaagtgtgtcagggtctatttaatgagttgctggagaacgggatttctgtgtggcctgggtatctcgagacgatgcagtcgagtctcgaacaattgtacagcaaatatgatgaaatgtccatactgttcacggtgttggtgaccgaaaccacactagagaacggactcattcacctgcgtagccgtgacactaccatgaaagagatgatgcatatcagcaagctgaaagactttctcataaagtatatctctagcgctaagaacgtctag

SEQ ID NO: 129260 - DNA, 7773 bp, synthetic construct
  misc_feature 1..7773: note = Description of Artificial Sequence: Synthetic coding sequence
  source 1..7773: mol_type = other DNA
atgaacctcctccggcggtccggaaagagaaggcggagcgaaagcggatcggactcattcagcggaagcgggggcgactcttccgcttctccccagttcctgtccggaagtgtgctgtctcctcccccaggactcggccgttgtctgaaagctgctgccgctggagaatgtaagccaactgtgcctgactatgagcgcgataagctcctgttggccaattggggtctccctaaggcggtccttgaaaagtatcatagctttggtgtgaaaaagatgtttgagtggcaagcagaatgcctgctgctgggccaggtcctcgaagggaagaacttggtgtactctgcacccacttctgcgggtaaaactttagtggcagaattgctgatactgaaacgtgtgctagaaatgcggaagaaagccttgttcatcctcccgtttgtgtctgtggcgaaagaaaaaaaatactacctccagtcgctcttccaggaagtcgggataaaagttgacggctatatggggtcaaccagcccctctcgtcacttctcctcgttggacattgccgtgtgcaccattgagcgcgcgaatggtttgatcaacaggctaattgaggagaacaagatggatcttctgggcatggtcgtggtcgacgagctacacatgctgggtgactcccaccgaggctatctcctggagctcctactcacaaagatctgttacatcacaagaaaaagcgcaagttgtcaagcagatctggcaagcagcctgtccaacgctgttcagatcgttggcatgtccgccacattacctaacttggagctggttgcttcgtggctgaatgctgaactttaccacaccgattttaggcccgtaccactcttagaaagcgtaaaagttggcaattcaatctacgacagcagcatgaagcttgtccgcgaattcgaacccatgcttcaggttaaaggcgatgaggaccatgtcgtctcactctgttacgagacgatctgcgacaaccactcagtgttactattctgcccctcaaagaaatggtgtgagaagctggctgacatcatcgcgcgagaattctacaacctgcatcaccaggctgagggactggtcaagccgagcgaatgccctccagtgatcttggagcagaaagagttgttagaggtaatggatcagctgcggcgcttgccaagcgggcttgactctgtgttgcagaaaaccgtcccgtggggcgttgcctttcatcacgccgggctcacttttgaggagagggacatcattgagggagcttttcggcagggcctaatccgggttctagctgccacaagtaccctcagttcaggcgtcaacctgcctgccaggagggttatcatccgcactcccatcttcggcggacgtccattggatatcctcacctacaagcagatggtcggaagggctggtaggaaaggagttgacaccgttggtgagagtatcctgatttgcaagaattccgagaaatctaagggcattgcactgttgcagggcagtctgaaaccggttcgctcgtgtctgcagagacgagaaggggaggaggtgaccggatctatgatcagggccattttggagataattgtgggcggggttgccagtaccagccaggacatgcacacttacgctgcctgcacgttcctcgcagcctctatgaaagagggaaaacagggtatccaacggaatcaagaatcagtacaactcggcgccattgaagcatgtgtgatgtggctcctcgagaacgaattcattcagagcactgaggcaagtgatggcaccgaaggtaaggtttaccaccctactcacctggggagcgccaccctgtcatcgagtctgtcaccggccgacacccttgatatcttcgccgatttgcagagggccatgaagggtttcgttctggagaacgaccttcatatactgtacctcgtgacccctatgttcgaggattggaccacgatcgactggtatcgttttttctgcctgtgggagaagctgccgacctcgatgaaaagagtggctgagttggtaggggtggaggaggggttcctggcccggtgtgtaaagggtaaggtggtggcaagaacagagcggcagcatcgccaaatggctatccataagaggttcttcacatctctggtgttgctggatctgattagcgaagtcccacttcgcgagattaatcagaaatatgggtgcaaccgggggcaaattcagagtcttcagcagagtgccgcagtgtacgctggaatgattaccgtcttttcaaacagactgggatggcataacatggagctcctgctgtcacagtttcagaagcgattgacttttggcatccagagggaactgtgtgatcttgtgcgcgtctcccttcttaatgcccagcgggcccgggtcctttatgcctccggtttccacactgtcgcggatctggccagggctaacatcgttgaagtcgaagttatcttgaagaatgccgtgccatttaaaagcgctaggaaagcggtggacgaagaggaagaggctgttgaggagagacggaacatgaggactatttgggtgaccgggagaaaaggtctcactgaaagagaggccgcagctctgattgtggaggaagctagaatgatcttgcagcaggacctggtagaaatgggggtgcaatggaacccatgcgctctcttgcactccagcacatgtagcttgactcattctgaaagcgaggtgaaagagcatactttcattagccagacaaagagcagctataagaagttgacctcaaagaataaatccaacaccatcttttctgacagctatatcaagcactctccaaacattgtgcaggatttgaataagagtcgggagcacacaagctctttcaattgcaattttcaaaatggtaaccaggagcatcagacttgctcaatctttagggcgcgaaagagggcctctctggacatcaataaagaaaagcccggcgcatctcagaacgagggaaagacaagcgacaagaaggtggtgcaaacgttcagccagaaaactaagaaggcaccgttaaactttaattctgagaaaatgtcgaggtcctttagaagttggaagaggagaaaacatctgaagagatcacgcgattcatcacctctgaaagattcaggcgcttgcagaatccacttacagggacaaacactgagcaatccatcgctgtgcgaggacccgttcacccttgatgaaaagaaaacggaatttcgcaactcgggtccattcgcgaagaacgtaagcttatctggtaaggagaaagataacaaaacaagttttccactccagataaaacagaattgctcgtggaacattaccctcaccaacgacaacttcgtggagcacattgtgaccgggtctcagtctaaaaatgtgacatgtcaggccacctccgttgtgagtgagaaaggacgcggagtcgcagttgaagcagaaaagattaacgaggtattgattcagaatgggtctaaaaaccagaacgtgtatatgaagcaccacgacatccatcccatcaatcagtacctgagaaaacaatcccacgaacagaccagtacaatcacaaagcagaaaaatatcattgaaaggcaaatgccatgcgaagcggtctctagctacatcaaccgcgacagcaacgtgactattaactgcgagagaatcaaattgaacaccgaagaaaataagccttcacattttcaagctctgggtgacgatatatctaggaccgtgatcccttccgaagtgctccccagcgccggcgctttctccaagtcagagggccaacacgagaattttcttaatatttcgcgattacaggagaagacgggcacttacaccactaataaaacgaagaacaaccacgttagcgatctcgggctcgttctttgtgattttgaggattcattttatttggacacccagtccgaaaaaatcatccagcaaatggctacagagaacgccaaactcggagctaaagataccaatttggcagctggtatcatgcagaaatcactcgttcaacagaactcaatgaatagtttccaaaaagagtgtcacatcccttttcccgccgaacaacacccattgggagccacaaagattgaccatctagatctcaagacagtgggcaccatgaagcagagctctgattcccacggtgtcgacatcctcacccctgaatctcctatcttccacagtccaattctgctggaggaaaacgggcttttcctgaaaaaaaatgaggtgagcgtgacggactcccagctgaactccttcctccagggatatcaaactcaagaaaccgtgaagccagtcattcttctgattccccaaaaaagaaccccaacaggagtcgaaggggaatgcctccctgtgcctgagacaagcctgaatatgtccgactcattgttgtttgacagctttagtgatgattatttagtgaaagagcaactgcccgatatgcagatgaaggagcccctccctagcgaggtcacctccaaccatttttccgactccctgtgcctccaagaagatctcattaaaaagtcaaacgtcaatgaaaaccaggatacccatcagcaattaacttgttccaatgacgagagtattattttctccgagatggactctgtccagatggtggaagccctggacaatgtggatatctttccagtgcaggagaaaaaccacacagtcgtgagcccacgagccttagaactgtctgatcccgtccttgacgaacaccaccagggagaccaggacgggggggatcaagacgagcgtgccgagaagtccaagttgacaggaacccgccaaaatcacagctttatctggtccggcgccagtttcgatttaagccctggcctgcagcgcatactcgataaggtatcatctcctcttgaaaatgagaagttgaaaagcatgactattaatttctccagccttaaccggaaaaatacggaactgaacgaggagcaggaagtgatctccaatttggaaaccaagcaggtccagggtatttccttttcaagcaacaatgaagtcaaatccaaaatcgagatgttggagaacaatgccaatcacgatgaaactagctctctgctgccccggaaagaatccaacattgtggacgacaacggtcttatcccacccacccctatccccacatcagcctcaaaattaacctttcctggcattctggagactccagttaatccatggaagaccaataatgtgttgcagccgggcgagagctatttgttcgggagccccagtgacatcaagaaccatgatttatcaccggggtcaaggaatggctttaaggacaactccccaatctctgatacaagcttctcactccagttgagccaagatggactacaattaactcccgccagcagctcatcggaaagcctcagtatcattgacgtagcgagcgaccaaaacctgtttcagaccttcatcaaagagtggcgctgtaagaagcggtttagcatcagtttagcatgcgaaaagattcgaagcctaacgagtagcaaaacggcgactatagggtccagatttaagcaggcctcctctccacaggagataccaatacgtgacgacggctttcccattaagggatgcgatgacaccttagtcgttggtttagcagtctgttgggggggccgcgacgcctactacttttctctacagaaggaacagaagcactccgaaatcagtgcttccctggttcctccatccttagatccgtccctgaccttgaaagacaggatgtggtatctgcaaagctgccttagaaaggagagtgataaagagtgctctgtggtgatttacgacttcattcagagctacaagatactactcctctcttgcgggatctccctcgagcagagctatgaagatccgaaagtggcctgttggttgctagatcctgattctcaggaaccaacactccactctatcgtcacctcattccttccgcatgagctgcccctattggaaggcatggagacctcacagggcatccagagcttgggcctcaacgcaggatctgagcactccggtcgctacagagccagtgtagagagcattctgatcttcaacagtatgaaccaattaaattctctgctccagaaagagaatctgcaggatgtttttcgcaaggtggaaatgccttctcagtattgcttggcgctgcttgagctgaatggcatcgggttctctactgcggaatgtgaaagccaaaagcatataatgcaggccaagttggatgcaatcgagacccaggcctatcagctggctggccacagctttagctttacatcttcagatgacatcgcggaagtgctcttcctcgagcttaagctgccacctaaccgggaaatgaagaaccaaggtagtaagaagaccttggggagtacgcggcggggaatcgataacggcaggaaactgcgccttggaaggcagttttccacctccaaagacgtgcttaacaagttgaaggccctgcaccctctgccaggcctcattctggaatggaggaggatcactaatgcaataacgaaggtggtcttccctctgcaaagagagaaatgcttgaacccgtttctcggcatggagcggatctatcccgtctctcagagtcatacagcaacaggtcggattacgttcacagagcctaatattcagaacgtgccacgtgacttcgagataaaaatgcccaccctcgtgggagagagcccaccgtctcaggctgtgggtaagggactgctccccatgggcagaggcaagtacaaaaaaggatttagcgtcaatcccaggtgccaggctcagatggaagagcgggccgccgacaggggaatgcctttctcgattagcatgagacacgcatttgtgccttttccggggggctcgatactcgcagcggactactcccagctcgaactccgcatactcgcccacctgagtcatgaccgccggctcatccaagtgttgaacacaggtgcggacgtttttcggtcaatcgcagctgaatggaagatgatcgagccggaatcagttggcgatgacctgcgacagcaggctaagcaaatctgctatggcattatttacgggatgggggccaaatcattgggcgaacagatgggaatcaaggaaaatgacgcggcttgctatatcgacagcttcaaatccaggtataccgggattaatcagtttatgactgagacggtaaaaaactgcaaacgcgacggatttgtgcagactatcctcgggcgcagacggtacttgcccggcatcaaggacaacaacccgtatcggaaagcccatgccgagcggcaagcgatcaacaccatagtccaaggaagcgctgcagatatagtgaaaattgctacagtgaatattcaaaaacagttggagacctttcatagtactttcaagagtcacgggcacagggagggcatgctgcaatcagaccagactggcctgagcaggaagcgcaagctgcagggaatgttctgtccaatacgaggaggattcttcattcttcagttgcacgacgagctgctgtacgaggtggcggaggaagatgtggtgcaggtggcgcagatcgtgaagaatgagatggagtccgctgtgaagctgtctgtcaagctcaaagtgaaggtgaaaattggggcaagttggggcgagctcaaggactttgatgtttag

SEQ ID NO: 129261 - DNA, 8181 bp, synthetic construct
  misc_feature 1..8181: note = Description of Artificial Sequence: Synthetic coding sequence
  source 1..8181: mol_type = other DNA
atgaatggccaccgttttacatttagaacccggagcctgctgcctttgcagaaaggacagcaccgctgtatcaccaaattgttggctcacaacgatccctggggaatctttcgggccccgagcagcagaagatcttacagtgtctccggagtgtgccagcctgccatccccaacagctctcttcacatccctcataacgcttgctggctgaagtggaaactgtgctcagaaatagccctgccttaccaccacatcctgggagagcgccgtaaactgtgcagcattaggaggttcgagttcgaagattggagagaggacgtccggagctgttgccaggctagggtgctaccccgcggacgaacactgggcctgtggttagccctgattgggcgagaggagttcgcaatgaatttgctgaggaggtctggtaagcgcagacgctccgagtctggaagtgactctttctccggcagcggtggcgactcaagtgccagcccgcagttcctaagcggtagcgtcttaagcccaccaccgggactcggccgatgcttgaaggccgccgcagcgggtgagtgcaagcccacagtgcccgattatgaaagagacaagctgttactggccaactggggcctgccaaaagcagttcttgaaaaataccactcctttggagtgaaaaaaatgtttgaatggcaggctgagtgtctcctgctcggtcaggtgctggaaggcaagaatcttgtttactcagccccaacaagcgccgggaaaaccttggttgccgagctgctcatcttgaagagggtcctcgagatgcgcaagaaagcccttttcatccttccctttgtttccgtggccaaagaaaaaaaatattacctgcaatcccttttccaggaggtggggatcaaggtggacgggtacatggggtctacctctcctagtaggcatttctccagtctcgacatcgccgtttgtacgattgaacgcgcaaacgggctcattaatcggcttattgaagagaataagatggacctccttggcatggtagtcgtcgatgaactccacatgctgggcgattcccacagaggttacctgctagagttactcctcactaagatctgctacataactagaaagagtgcctcctgccaggcagatctggccagctcactgagcaatgccgttcagattgtgggtatgagcgcaactctgcctaatctggaacttgtggcctcttggctgaatgctgagttgtatcacacggactttaggcccgtcccccttctcgagtcagttaaggtgggcaatagcatttatgactcttcaatgaaactcgtgcgtgagtttgaaccaatgctgcaagtgaagggcgacgaagaccatgtcgtgtcactttgttacgagactatctgcgataatcattctgtcttactattttgtcctagtaaaaagtggtgtgaaaaactggccgacataatcgcacgtgaattctacaatctacaccaccaggccgaaggcgagggcctcgttaagccttcggagtgtcccccggtgattctcgagcagaaagagcttctggaggtcatggaccagttaaggaggctcccttctgggttagactctgtgctccagaaaaccgtgccttggggggtggccttccaccatgcaggacttacctttgaagagcgggatataattgagggcgcgtttcggcaggggctcattagggtcctggcagccacctccaccctgtccagtggagtgaacctgccagcaaggagagtgatcattcggacacccatctttggaggccgccccctggacattttgacatataaacagatggtgggccgggctggcagaaagggggtggacacagtagagtctattctcatttgtaagaattccgaaaaaagtaagggcatcgcccttttgcagggaagccttaagcctgtaaggtcttgcctccagagacgcgagggcgaagaagtaaccggatcgatgattagggctattctcgagattattgtaggaggcgtagcaagcacctcgcaggatatgcacacctacgctgcctgtacctttttggcggcctcgatgaaagaaggaaagcaggggattcagcgaaatcaggaaagcgttcagctcggggccattgaggcttgcgtgatgtggctgctggaaaacgagttcatccagtcaaccgaggcctccgacggaactgaggggaaagtataccatcctactcatctgggctccgctaccctgagttccagtctgagcccagcagatactttagacattttcgcagacctccagagggccatgaaaggctttgtgctcgaaaatgaccttcacattttgtaccttgtcactccaatgtttgaagactggaccactattgactggtaccggtttttctgtctctgggagaagctgcctacctccatgaagagagttgctgagttggttggggtcgaggaaggatttctcgctcggtgcgtgaagggaaaggttgtcgcgcgcaccgagagacagcaccgccagatggccattcataagcggttctttactagtttggtcctgttggaccttattagtgaagtcccccttcgtgaaatcaatcagaaatacggctgcaaccgtggacagatacaatcccttcagcagagcgcggccgtgtatgcgggaatgattactgtctttagtaatcggttaggctggcataacatggaactcctgctgtcccagtttcaaaaaagacttacgtttggaattcagcgcgagctttgcgaccttgtgagagtcagcctgttgaatgcccagcgtgcccgcgtcctgtacgcctccggctttcacaccgtggctgacctggcccgggcgaatatagtggaagtggaagtgattcttaaaaacgctgttcctttcaaaagtgctaggaaggctgtcgacgaggaagaggaagcagttgaagagcggcgcaacatgagaacaatctgggttacaggaaggaagggactgactgagcgcgaggctgctgccctgatcgtggaggaggcgagaatgatcttgcagcaagatctagtggagatgggagtccagtggaatccatgcgcactacttcactcaagtacctgttcccttacccattctgagtcagaggttaaggaacatacattcattagccagactaagtcttcctacaaaaaactgactagtaagaacaagagcaacactatcttttctgatagttacatcaaacacagccctaatattgtgcaggacctgaataaaagccgagagcacacatcttctttcaattgcaactttcagaatggtaaccaggagcatcagacatgctcgatcttcagggctcggaagagggctagcttggacattaataaggaaaagcctggcgcctctcagaatgagggaaaaaccagcgataagaaggttgttcaaacgtttagccagaagactaagaaggctccgctgaacttcaactccgagaagatgtccaggagttttcgttcatggaagcggcgtaaacacctaaagcgctcgcgcgacagcagtcccttgaaggacagtggggcgtgcagaattcacttacagggacagaccctcagtaacccttctctttgcgaagaccctttcaccctggacgagaagaagacagagtttaggaacagcggtccattcgctaagaacgtgtcactgtccggcaaagaaaaagacaacaaaacttcgttccctttacagattaagcagaattgttcgtggaacatcaccctaacaaacgataatttcgttgaacacattgtgactggatctcagagtaaaaatgtcacttgtcaggccacatccgtcgtcagtgaaaaggggagaggcgtcgcagtggaggccgagaagatcaatgaagtgctaatccagaatgggtcaaagaaccagaacgtatacatgaagcaccacgatatacaccccatcaaccagtatctgcgcaagcagtctcatgaacagacaagcacaatcaccaagcagaaaaacatcatagagagacagatgccgtgcgaagctgtcagctcctatatcaatagagattctaatgtaacaatcaactgtgaacgtatcaaactgaatacagaagagaacaagccgtcccactttcaagccttgggagacgacatctctcgaactgtgatcccctctgaggtcttaccgtcagcaggagccttctcaaaatcagagggacaacacgagaactttctgaatatcagtcgtttacaggagaaaactggaacatacacaactaataagaccaagaataaccacgtttcagaccttggactcgtcctgtgtgacttcgaggacagcttctacttagatactcaatctgaaaaaatcatacagcagatggcaactgaaaatgccaaacttggcgcaaaagacacaaatctagccgcagggatcatgcagaagagtctggtccaacagaattccatgaactcattccagaaggaatgccatattccattcccggcagagcagcatcctctcggagcaactaaaattgaccacctggacctaaagactgtcggtaccatgaaacaatcctcagactctcatggagttgacatcctgactccagagagccccatcttccacagtcctatacttctggaggaaaacggactgttcctcaagaagaatgaggtgtctgtgactgatagtcagctcaattcgtttctccaggggtaccagacccaggagacggtgaagcctgtgatactcctgatccctcagaagagaacacccaccggcgtggagggagaatgtctgccggtgcccgagaccagcctcaatatgagtgatagcttactgtttgattcattttccgacgactatctggtcaaggaacaacttcctgacatgcaaatgaaagaacccctgcccagcgaagtcacaagtaaccatttctccgactccctgtgtctccaggaggatctgatcaaaaaatctaacgtcaacgaaaatcaggacactcaccaacagctgacttgctccaatgatgagagcataatcttctctgaaatggatagtgtgcaaatggtggaagccttggacaatgttgatatatttccagtccaagaaaaaaaccacaccgttgtcagtcctagggctttagagctcagcgatccagtgctggacgagcaccatcaaggcgaccaagacggcggagaccaggatgaacgtgccgagaaaagtaagctgaccggcacccgtcagaaccacagctttatctggtcaggagcgagttttgatctcagccccggactacagaggatcttagataaagtcagctcacctctggagaacgagaaactgaagtcgatgacaataaattttagttcactgaaccggaaaaataccgaactcaatgaggaacaggaagttatctctaacttggaaaccaaacaggtccaggggatttcattttctagcaataatgaagtaaaatcgaagattgaaatgcttgaaaacaacgccaatcatgatgagacatcttctctgcttcctagaaaggagagcaatatagttgatgacaacgggctgatcccccccacaccaattcctacttccgcgagcaagctgacatttcccggaatcttggaaacccccgtcaacccgtggaagacaaacaatgtgctgcagccaggcgaaagctacctctttggcagcccctcagatattaagaaccacgacctgtcccccggcagcaggaatgggttcaaagacaattcgcctatttcagacaccagcttctcattgcagctctcccaggacggtctgcagttgacccctgctagcagcagcagtgagtccctgagcatcattgacgtagcctcagaccaaaatctgttccagacctttattaaagagtggagatgcaagaagcggtttagcattagtttggcgtgtgaaaagatacgctccttaaccagcagcaagactgccaccattgggagtcgatttaagcaggcatctagcccccaagaaatccctattagagatgatggctttcccataaaaggctgcgatgacactcttgtagttggactggccgtgtgctggggaggccgcgatgcctattacttttcactgcagaaggaacagaagcatagcgagatttcagcgagcctggttcctccttctctcgacccctctttgacgctaaaggataggatgtggtatctgcaatcttgcctccgtaaggagtctgacaaggaatgcagcgttgtgatctatgactttatccagtcctacaaaatcctcctgctgagttgtgggatttctttagagcagtcctacgaggacccaaaggtggcctgctggcttctggatccagattcccaagagcccaccttgcatagcattgtcactagtttcctgccacatgaactgccactgcttgaagggatggagaccagccagggaattcagtccctgggcctcaacgccggatctgaacatagcggaaggtacagggcctccgtggagagtatactgatctttaactctatgaaccagctgaactccctgctccagaaggagaatctgcaggacgtatttcgaaaggttgaaatgcctagccaatattgtctcgcactcttggagttgaacggcatcgggttcagcaccgccgaatgcgaatcacagaaacacatcatgcaggccaagctggacgcaattgagactcaggcctaccaactcgcaggtcactctttcagttttacatcctctgatgatatcgcagaagtgctgttccttgaactcaagctcccacctaaccgggagatgaaaaaccaggggagcaagaagacgctgggctcaaccagacgcggtatcgacaacggtaggaagctgagactgggaagacagttcagcacatcaaaggatgtgctcaataagctgaaagcacttcatcccttgcctgggttgattttggagtggcgccgcattaccaacgcgataaccaaagtcgtgttccctctccagcgggagaagtgtctgaatccattcttgggaatggagaggatttacccagtgtcccaatcacacacagccactgggagaatcacatttaccgagccaaatatccagaacgtgcctcgcgactttgaaattaagatgcccaccctcgtcggtgagtcgcccccaagccaggcagtgggaaaggggttgctgccaatggggcgcggcaaatacaaaaaaggtttttcagttaatcccaggtgtcaggcacagatggaggaacgtgctgcagaccgtggaatgcctttcagcatttcgatgaggcatgccttcgtcccatttcctggcggcagtattttagcagccgattattctcagttggaactacggatccttgcacacctatcccacgatcgacggctgatacaagtacttaacacaggagcagacgtgttccggtctatagccgccgaatggaagatgattgaacctgagtctgtcggcgacgaccttagacagcaggccaagcagatctgctacggaattatctatggcatgggagctaagtcactgggagaacagatgggcataaaagagaatgacgcggcctgctatattgatagctttaagagtcgatacaccggaattaatcagttcatgactgaaaccgtcaagaactgcaagcgcgacgggtttgttcagacaatcctcggaaggcgccgctacttgccaggcattaaggataacaatccttaccgcaaggcccacgccgagagacaggcgatcaacactatcgtccaggggtccgcagccgatattgtcaaaatcgccaccgtgaatattcagaagcaacttgagaccttccactcgacgtttaagtctcatggacaccgcgaggggatgttacagtccgatcaaaccgggttgagtcgcaaacgaaagttacagggcatgttctgtcctatccgtggcgggttctttatcttgcagttgcacgatgagcttctctacgaggtagcagaagaggacgtggttcaggtggcacagatcgttaaaaacgagatggaaagcgcggtaaaactaagcgtcaagctaaaggtgaaggtgaaaattggggcgtcatggggggagctcaaggattttgatgtatag

SEQ ID NO: 129262 - DNA, 6642 bp, synthetic construct
  misc_feature 1..6642: note = Description of Artificial Sequence: Synthetic coding sequence
  source 1..6642: mol_type = other DNA
atgcccacaagtaattcccagaaagagcttcttgaggtgatggaccagctgagacggttgccatccggactcgattcagtgctgcaaaagaccgttccgtggggcgttgcttttcaccatgccggactgacattcgaagaaagggatatcattgagggagccttccgccaaggactgattagagtcctggccgccacatctaccctaagcagcggggttaacttgcctgcccgacgcgtcataattaggacccccattttcgggggcaggcccttggatatcctcacctataagcaaatggttggtagagcagggaggaagggtgtggataccgtgggagagtctattctgatatgtaagaacagtgagaaatctaagggcattgctctcctgcaggggtcgctcaaacctgtccggtcatgcctgcagcgacgcgagggggaagaagtaactgggtccatgattagagccattctggaaatcatcgtgggtggtgtcgctagtaccagtcaggatatgcacacatacgccgcgtgtacattcctggcagcctctatgaaagaaggcaaacaaggtatccagaggaaccaagaaagcgtgcagcttggggcgattgaagcctgcgtgatgtggctgctagaaaatgaatttatccaatctacggaagcctcagacggtacagaaggcaaagtttaccatcctacccatcttggttcggcgaccctatcttcttcgctgagtcccgcagacacattagacatatttgcagatctgcaacgggctatgaaaggattcgtgttggaaaacgatttgcatatactctacctagtgactccgatgtttgaggactggaccacaatcgattggtacaggtttttttgcttgtgggaaaaacttcccacatccatgaagagagtcgccgaactggtcggtgtggaggagggattcctggctcggtgtgttaagggcaaggtggtcgcgaggacagaaaggcagcatcggcagatggccatccataaacgctttttcacttcactggtgctcttggatttaattagtgaagtccccctgagagagataaatcagaagtacggatgcaataggggacagattcagagcttgcaacaaagcgccgctgtgtacgcgggcatgatcaccgtgttcagcaacagactggggtggcacaacatggagctgctgctcagccaatttcagaagcgtctgaccttcgggatccagagggagttatgcgatttggttcgagtgtcacttctgaacgcacaacgtgcgagggttttgtatgcctctggattccacaccgtggccgatttagctcgggcaaacatcgtggaggtcgaggtgatcttgaaaaatgcagtgccttttaagtctgcacgcaaggcggtggacgaggaggaggaggctgtggaagagaggaggaacatgaggacaatttgggtcaccggccggaagggactcacggaacgagaagccgcggctctgatagttgaggaggccagaatgatcttgcagcaggacctagtcgaaatgggggtacaatggaatccatgcgcactgcttcactcgtctacctgttccttaacacacagtgaaagcgaagtgaaggagcacaccttcatttcccagaccaagtcatcatataagaagctgacatccaaaaacaagtccaacacgatcttctccgactcatacattaagcatagccctaatatcgtgcaggatttgaacaagtccagggagcacacctccagtttcaattgcaattttcaaaacggaaatcaggaacatcagacctgtagtatcttcagggcccgcaagagggcaagcctggacattaataaagaaaagcctggggcaagtcagaatgaggggaaaacctctgacaaaaaggtcgtccagacgttttcacagaagacaaaaaaggcaccgctgaactttaattcggagaaaatgagtcggagcttccggtcctggaagagaaggaaacacctgaagcgatcacgggatagttccccgctcaaggattctggtgcatgcaggattcacctgcagggacaaaccctgagcaatccaagcctgtgcgaagatcctttcacactggatgaaaagaaaaccgaattccgaaactcaggcccatttgctaaaaatgtttcgctttctggtaaagaaaaggataataaaaccagtttccctctgcagattaaacagaactgctcatggaacattacactcaccaacgacaacttcgtggagcacatcgtgaccggctctcaatcaaagaatgtaacatgccaggctaccagcgtggtgagcgagaagggccgcggggtagccgtggaggctgagaaaattaacgaagtcctgatccagaacggatccaagaaccagaacgtttatatgaaacaccatgatattcaccctatcaaccaatatctccgcaaacagagtcatgagcagacaagtacgatcacaaaacagaaaaatattatcgagagacagatgccatgtgaggccgtcagcagctacattaatagagactctaatgtcaccatcaactgcgagaggattaagctgaataccgaagagaataaaccaagtcatttccaggcattgggagacgacatttctcggaccgtgataccaagcgaggtccttccgagtgccggtgcattcagtaaatccgagggccagcatgagaatttcctgaacatttcaaggctccaggagaaaacaggaacctatacaacaaacaagacgaagaataatcacgtgagcgatctaggcctggtgctgtgtgactttgaggattctttctatctggatacgcagtccgaaaagatcatccaacagatggcaacagagaatgcaaaactcggagccaaagatacaaaccttgccgccggtatcatgcagaagtcccttgttcagcaaaacagcatgaattcatttcagaaagagtgtcacattccgtttcctgctgagcagcatcctctgggcgcaactaagatagaccacctcgatctgaagactgtgggtaccatgaaacagtcaagcgacagtcacggcgtggatattctcacgcccgagtctcccatttttcatagccctatccttctcgaagagaatggtctcttcctgaaaaagaatgaagtttcagtcacagatagccaactcaatagcttcttgcagggctatcaaactcaggaaacagtgaaacccgtgatactgttaatccctcagaaacggacaccgacaggggtggagggagaatgtcttcccgtaccagagaccagcttgaacatgtcagacagcttactgttcgactccttctcggacgattatttagtaaaggaacagctgcccgatatgcagatgaaggagccgctgcctagcgaagtcactagcaatcacttcagcgattccctgtgcctccaggaggatctcatcaaaaagagcaacgtgaatgagaatcaggatacccaccagcagttaacttgctccaacgacgagtcaatcatcttctccgagatggacagcgtgcagatggtggaggccttggacaatgtcgatatcttcccggtgcaggagaagaatcacacagtggtctccccaagagcgctagagctctctgacccggtgctggatgagcatcaccaaggcgaccaggacgggggcgaccaagatgaacgggccgagaaatctaagctcaccggcacaagacagaaccattcattcatctggagtggggcttcttttgacctatctcccggtctccagcgaatactcgacaaagtatccagcccattggagaacgaaaaattgaagagcatgaccatcaacttctcttcactcaaccgcaagaacacggagctgaatgaggagcaggaggttatctcaaacctcgaaacaaaacaggtgcaaggcatttcattctcctctaataatgaagtgaagagtaagatagagatgttggaaaataacgcaaatcacgacgagacctcttcactgctccccagaaaggagtccaacattgtggatgataacggcttaatcccgccgacgccgattccaacgtcggcgagcaagctaacctttcccggcatcctcgaaactcccgttaatccatggaaaactaacaacgtactgcagccgggcgagtcgtacctatttggatccccgagtgatatcaaaaatcacgatctgtcaccagggtccaggaacgggttcaaagacaatagccctatttccgatacgagcttctcgcttcagctgagccaggatgggctgcagttgacccctgcttcttcttctagcgagagtctgagcataatcgacgtagccagtgaccaaaacttatttcaaacattcattaaggagtggcgatgtaagaagagattctctatatccttagcatgcgagaagattcgctccctcaccagcagcaaaaccgctaccattggatctcgctttaagcaggcctcttccccacaggagatacctattcgggatgatggattcccaattaaaggctgcgacgacactctcgttgtggggctcgccgtgtgttggggcgggcgagacgcttactactttagtcttcagaaagagcagaaacatagcgagatttctgcatccctggtccctccatccttggacccgtcattgacacttaaagatcgtatgtggtacctccagagttgtcttcgaaaagaatcagataaagagtgtagtgtcgtgatctatgacttcattcaatcctataagatcctcctgctttcctgcggaattagcttggagcaatcctacgaggaccctaaagtagcatgttggctcttagatccagattctcaggaacccaccctgcactctatcgtcacatctttcctccctcacgaactgccactcctggagggaatggaaaccagccagggaatccaatcattgggccttaacgctggatcggagcattctggcaggtaccgtgcttcagtagagtcaatcttgatattcaactcgatgaatcaactcaactctcttctgcaaaaggaaaacctgcaggacgtatttcgtaaagtcgaaatgccctcccagtactgtttggccctcctggagttgaacggcattggtttcagtacagccgagtgcgaaagccagaaacatatcatgcaggccaagctcgacgccattgagacccaggcttatcagttggctggacattcatttagcttcacaagctcggacgacatcgcagaggtgctcttccttgaactgaagctacctccaaatcgcgagatgaagaaccaggggtcaaaaaaaacattgggcagcacccgccgtggtatcgataacggtcggaagctaagacttggccgccagttcagtacatcaaaggacgtgctcaacaaactcaaggccctacaccctcttcccgggctgatactagaatggagacgaatcaccaacgcgattaccaaagtcgtgttcccattgcagcgagagaagtgccttaatccgtttttggggatggagcgcatctaccccgtttctcaatcccacaccgccactggtagaatcacttttactgagcctaacatccagaacgtccctagggacttcgagattaagatgcccacacttgtgggcgagagcccaccttcccaggccgtcggcaaaggattgttgccgatgggaagaggcaagtacaaaaagggattcagtgtaaaccccaggtgccaggctcagatggaagaacgcgccgctgaccgaggaatgcccttctcgatcagtatgaggcacgccttcgtccctttcccgggcggcagtatacttgctgcggactattctcagctggagttacgcattctagctcacctctcacatgataggaggttgatacaggtactcaatactggcgctgatgtgtttcgaagtatcgctgcggagtggaaaatgattgaacccgagtctgttggggatgatctgagacaacaggctaaacagatctgttacgggataatctatgggatgggcgccaaaagcctcggtgaacagatgggcataaaagagaacgatgctgcatgttacatagactcgttcaaaagccggtatactggaatcaaccagtttatgactgaaaccgtcaagaactgtaagagagatggattcgtacagaccattttgggtcggcgcaggtatctgcctgggatcaaagataataacccctacagaaaagcccacgccgagagacaagcaataaacactattgttcaaggttccgccgcagatatcgtcaaaattgctaccgttaacatacagaaacagcttgaaacatttcactcaaccttcaaaagccatggccatagagagggaatgctccagtctgaccagaccggcttgtccaggaagaggaagcttcagggcatgttctgcccaattagaggaggcttcttcatcttgcagttgcacgatgagctcctctatgaggttgctgaggaggacgtggtccaggtagctcagatcgtgaagaatgagatggagagtgctgtgaagctgtctgttaaactcaaggtgaaagtgaagatcggagcttcatggggggagttgaaagactttgacgtgtag

SEQ ID NO: 129263 - DNA, 240 bp, synthetic construct
  misc_feature 1..240: note = Description of Artificial Sequence: Synthetic coding sequence
  source 1..240: mol_type = other DNA
atgggtcgtaagaggttaattaccgactcataccccgttgtgaagcgccgagagggacctgccggccatagtaaaggggaacttgcccccgagttgggggaagaaccccagcccagggacgaggaggaggctgagcttgaattgctcaggcagttcgacttggcatggcagtatggaccctgcactgtgtccggcataagcattccgtacgaggcacctcgcaaaacctcttgcccctag

SEQ ID NO: 129264 - DNA, 324 bp, synthetic construct
  misc_feature 1..324: note = Description of Artificial Sequence: Synthetic coding sequence
  source 1..324: mol_type = other DNA
atgggtcggaagcgattgataacggattcatacccagtggtcaaacgaagagaaggaccagcaggccacagcaaaggcgagttagcccccgaactcggggaggagccacagcctcgggatgaggaggaagcagaactggaactgttgaggcagttcgatctggcatggcaatatggcccttgtacgggcattactcgactgcagcggtggtgccgcgcaaagcagatggggcttgagcctcctcccgaagtgtggcaggtcctgaagacacatccaggggacccccgctttcaatgttcactctggcatttgtatccactgtag

SEQ ID NO: 129265 - DNA, 105 bp, synthetic construct
  misc_feature 1..105: note = Description of Artificial Sequence: Synthetic coding sequence
  source 1..105: mol_type = other DNA
atgggaagaaagcgcctcataacagattcttaccccgtagtgaagcgacgagagggccctgctgggcactccaagggcgagctggccccagaattgggactttag

SEQ ID NO: 129266 - DNA, 1266 bp, synthetic construct
  misc_feature 1..1266: note = Description of Artificial Sequence: Synthetic coding sequence
  source 1..1266: mol_type = other DNA
atggcggacatctctctcgacgaactcatccgcaagcgaggcgcggccgcaaaggggcgtctgaacgcccgcccaggcgttggaggggtgaggtctcgtgtgggcattcaacaaggtcttctgtctcagtctacacgcaccgcaacctttcagcagagattcgacgcgaggcagaagatcgggctgtccgacgcccgcttaaaactgggagtgaaagacgcaagggaaaaactcctgcagaaggacgctaggtttcgtatcaaaggcaaagtgcaggacgcccgcgagatgctgaactcaaggaaacagcagacaaccgtcccacagaaaccacgccaggttgccgatgctagagagaaaatctcactgaaacgctcatcacctgcggctttcatcaatccacctattggaacggtgacccctgctctgaagctgaccaagaccatccaggtgccccaacaaaaagccatggcaccccttcaccctcaccccgctgggatgcggataaacgtggtaaataaccaccaggcgaaacagaacctctatgacctcgacgaagacgatgacggaatcgcctcagtgcctaccaaacagatgaagttcgcagcttctggaggattcctacaccatatggctggcctctcctcctcaaagctctctatgtcaaaagctctcccactaacgaaggtggtgcaaaatgatgcctacaccgcccctgcactgccctcgagcattcgcaccaaggctttaaccaatatgtctagaaccctcgtgaacaaagaggaacctcctaaggaattgcccgcagccgaaccagtactctcacctctagagggaacgaagatgacagtcaacaatctgcatccccgagttactgaagaggatattgtggagctgttttgtgtgtgcggtgcactgaagagggctcgactggtgcacccgggggtggctgaggtggtatttgtgaagaaagacgacgcaattacggcctacaagaaatacaataaccgttgcctggacggccaaccaatgaaatgcaacttacatatgaacggtaatgtgatcaccagcgaccagccaatcctcctgcgcctgagtgattccccttcaatgaagaaggagtcagagcttcctaggagggtgaacagtgcctcttcaagtaaccccccagcagaagtggatcccgacaccatattgaaggcgctattcaaaagcagcggagcctctgtcacaacgcagcctacagagttcaagataaaattgtag

SEQ ID NO: 129267 - DNA, 558 bp, synthetic construct
  misc_feature 1..558: note = Description of Artificial Sequence: Synthetic coding sequence
  source 1..558: mol_type = other DNA
atggctgatattagtttagatgaactgattcgcaagcgtggtgctgccgctaaaggccgccttaatgcccgccccggcgtagggggcgtccgatcccgagtcggtatccagcaggggctgctctcacagagcaccagaaccgccacatttcaacagcgcttcgacgccaggcaaaaaatcggcttatccgatgcaaggctgaaattgggcgttaaagacgcccgagaaaaactcctgcagaaggacgcaagatttaggataaagggtaaggttcaggatgcaagggagatgctgaatagcagaaagcagcagaccaccgtgccccagaaacctaggcaggtagctgacgcacgggaaaaaatttctctgaagagaagttcaccagctgcctttatcaaccctcccatcggcacagtgacacccgcactgaagcttacaaagacgatacaggtgggcctacgagccgtacctttgctctgtctggtctccggtggggcttgggtgggctcacgtagtcaagcttcatgtcctctaccaagtgggtctcggccgcattag

SEQ ID NO: 129268 - DNA, 1179 bp, synthetic construct
  misc_feature 1..1179: note = Description of Artificial Sequence: Synthetic coding sequence
  source 1..1179: mol_type = other DNA
atggcagacatcagcctggacgaattgatcaggaagaggggggccgcagcaaagggacgccttaatgctaggccaggagtgggcggggttagaagtcgcgtgggcatccagcaggggctgttaagccagtctacgcgtactgctaccttccagcagcgctttgacgctcgacagaaaatcggcctaagtgatgctcggctgaagcttggggttaaggatgcgcgcgaaaaacttttacagaaggacgcacgatttcgaattaaagggaaagtgcaagatgctcgggagatgctaaattctagaaagcaacagactacagtgcctcagaagccacgtcaggtcgccgacgcccgggagaagatttccctgaaacgttcttctcctgcagcgtttataaacccgcccatcggaaccgtcactcccgccctgaagctcaccaaaacaatccagaacctgtacgacctagatgaggacgacgacggaatcgcctctgtgcctaccaaacagatgaaattcgccgccagcggggggtttctccaccacatggcaggattgagcagttccaagctgtctatgtcaaaagccctaccattaaccaaggtggttcagaatgatgcctacactgccccggccctaccaagcagcatcagaacaaaggcgctcaccaatatgagccgtaccctcgtgaacaaagaggagccccccaaggaattgccggccgcagaaccagttctctcgcctctggagggtaccaagatgacggtgaacaatttacaccctcgcgtaaccgaagaggatatcgtagagcttttctgcgtgtgcggagcactaaaacgcgcccgcctggtccaccccggcgtggcggaagtggtgttcgttaagaaagacgatgccatcacagcttacaagaaatacaacaacagatgccttgatggtcagccaatgaagtgtaatttacatatgaacgggaacgtgatcacgagcgatcagccgatactgctgcggctgtcggacagtcctagtatgaaaaaagagagtgaactacctcgtagggttaactcagcgtcctcctccaacccacccgcagaggtcgaccctgatactatcctgaaggccctgtttaaaagctccggagccagcgtgaccacacagcctacagaatttaaaattaaattatag

SEQ ID NO: 129269 - DNA, 690 bp, synthetic construct
  misc_feature 1..690: note = Description of Artificial Sequence: Synthetic coding sequence
  source 1..690: mol_type = other DNA
atggctgacatctctctcgatgagttgatcaggaagcgaggcgccgccgccaagggtagactcaacgcaagaccgggggttggaggggtccgcagcagggttggcatccagcaggggttgctgagccagagtacacgaacagctaccttccaacagcgatttgacgctcggcagaagatcggcctgtctgacgcccggctcaaattaggggtgaaagatgcgagagagaaactgctgcagaaggacgcccgctttagaataaaagggaaggttcaggacgcacgggagatgcttaattcccggaagcagcaaaccacagttcctcaaaaaccaaggcaggttgccgacgctagagagaaaatctccttgaagcggtcttctcctgctgcattcatcaacccaccgatcggcacagtgacaccagctctgaagctcacgaaaacaatccagaacctgtatgatctggatgaagatgacgacggaatcgcctcagtccccactaagcagatgaagtttgcggcctctgggggattcctgcatcacatggcgggtctgtcatcgtcaaagttatctatgtccaaagcattgcctctgacgaaggtagtgcagaatgatgcttacacagcccctgcactcccctcaagtatcaggacaaaagccctgcccgtactgacttccccaggcacttag

SEQ ID NO: 129270 - DNA, 561 bp, synthetic construct
  misc_feature 1..561: note = Description of Artificial Sequence: Synthetic coding sequence
  source 1..561: mol_type = other DNA
atggctcctcttcaccctcatcccgccggcatgaggatcaatgtcgtgaacaatcatcaggcaaagcaaaacctctatgatcttgatgaagacgacgacgggatcgccagcgttccaaccaaacagatgaagtttgcagcatcaggtggatttctccaccatatggctggattgtcatctagtaaactgtctatgtcaaaggcactgcctctgacaaaggtggtgcaaaatgatgcctataccgccccagcccttccttcatccatacgtacgaaggctttaactaatatgtcccggaccctggtcaataaggaagagccgccaaaggaacttcccgccgccgagccagtgctgtcacccctcgagggcaccaagatgacagtgaataatctacacccacgggtcacggaggaagatatcgttgagctcttttgcgtgtgcggcgctcttaaaagagcacgactagtgcaccctggtgtcgccgaggttgtttttgtcaagaaagacgacgcaattaccgcctataagaaatataataacagatgcctagatggtggatag

SEQ ID NO: 129271 - DNA, 555 bp, synthetic construct
  misc_feature 1..555: note = Description of Artificial Sequence: Synthetic coding sequence
  source 1..555: mol_type = other DNA
atggctgatatctctttggacgaacttataagaaagcggggcgccgcagcaaaagggcgattaaacgcacgccccggagtcggcggggtgcggtctagagtgggcatccagcaaggtctgctaagccagtctactcgaacagcaaccttccagcaacggttcgatgctagacagaagattggactgagcgatgcccgactgaagttgggggtgaaggacgcccgggagaaactcctgcaaaaggatgcacggttccgcatcaaaggcaaggtgcaggacgctagggagatgctcaatagccgaaagcagcaaactactgttccccagaaaccccggcaggtagccgatgcccgagagaagatatcgttgaaaagatctagtccagccgcttttataaatccccccatcggtaccgtcacgcctgcgttaaagctgactaaaacaatccaggttccctcctttccatgccctagaccatctctgagccctaagtggttccggatgatgcacactcagctcctacttagcctgccattgttcgagcaaaagccatag

SEQ ID NO: 129272 - DNA, 354 bp, synthetic construct
  misc_feature 1..354: note = Description of Artificial Sequence: Synthetic coding sequence
  source 1..354: mol_type = other DNA
atggcagctgccgctgcagcaggcagcggcacaccccgcgaggaggaaggacctgctggagaagccgcggcaagccagccccaagccccaacgtctgttcctggagcaaggctgagtcgcttaccattagctagggtgaaagccttagttaaggccgatccagacgtgaccctggccgggcaggaagctatcttcatccttgcccgtgcagcagaactgtttgtggaaaccattgctaaagacgcttactgctgcgctcagcagggtaaaagaaagacactgcagcgacgtgacctggataacgcaatcgaagccgttgatgagtttgccttcttggaaggcacacttgattag

SEQ ID NO: 129273 - DNA, 1029 bp, synthetic construct
  misc_feature 1..1029: note = Description of Artificial Sequence: Synthetic coding sequence
  source 1..1029: mol_type = other DNA
atggcagctagtcaggcggtagaggagatgcgatcaagagtggtcctgggcgagtttggtgtgaggaatgtccatacaaccgactttccagggaactacagcgggtacgatgatgcttgggaccaggatcgcttcgagaaaaattttcgggtggacgttgtacatatggatgagaattccttagagtttgacatggtgggaatcgacgcagctatagccaatgcttttagaagaatcctgctcgcggaggtcccaactatggccgttgagaaggtgctggtgtataataacaccagcattgtgcaggacgagatccttgcccatcgcctgggcctaattcctattcatgccgatcccaggttgttcgagtacagaaatcagggggatgaggagggaacagagattgacacactgcagttcagattgcaggtcagatgcacccgaaatcctcacgccgcaaaagattcttctgatcccaatgagctctatgtgaatcataaggtctacaccaggcacatgacgtggatcccgctcggcaatcaggccgacctctttccggagggtactattcggcccgttcatgacgacatcctcattgcccagctgagaccaggacaagagatcgaccttctcatgcattgcgtcaaagggattggcaaagaccacgcgaaattctcaccggtggcaacagcttcctatagactgcttcctgatataaccctccttgaacccgtggagggggaagctgccgaagagttgagcagatgcttcagccctggcgtgatagaagtgcaggaggttcaggggaagaaagtagcaagagttgcgaaccccagactagatacattctcaagggaaatttttagaaatgagaaactgaagaaggttgtgcggctggccagagtgagggaccactacatttgtaagaaggacctgctggctgccgtcgcgcacacttgcaatccaagcacattgggcggacaaggggaatggataaccggatctcgggagcgggaccatccagggtag

SEQ ID NO: 129274 - DNA, 633 bp, synthetic construct
  misc_feature 1..633: note = Description of Artificial Sequence: Synthetic coding sequence
  source 1..633: mol_type = other DNA
atggcggtcgagaaggtgttagtctacaacaatacatcaatcgtccaggatgagattctggcgcaccgcctgggtttgattcctattcacgccgaccctcgcctgttcgaatacagaaaccaaggagacgaggaaggtactgagatcgatacactgcagtttagactgcaggtgagatgcacccggaatccgcacgctgctaaagacagttctgatcctaatgaactttacgttaatcataaagtctatacgagacatatgacctggattcccttgggtaaccaggccgatctcttccctgaaggcacaattcgacctgtgcacgacgacattctcattgcccaattacggcccggccaagagatcgacctgctcatgcactgcgttaaaggaattggaaaaaaagtggctagggtggcgaacccaaggctagatacattctctagggagattttccgaaatgaaaagctcaaaaaagttgtcaggctcgcccgggttagagatcattacatcttctcagttgagtcaacgggtgttctgccgcccgatgtgctggtgagtgaggccatcaaagttctgatggggaagtgccgcagattcctggacgaactcgacgcagttcagatggactag

SEQ ID NO: 129275 - DNA, 1041 bp, synthetic construct
  misc_feature 1..1041: note = Description of Artificial Sequence: Synthetic coding sequence
  source 1..1041: mol_type = other DNA
atggccgcctcccaggccgtcgaggagatgaggagcagagtggtgctgggggagttcggagtccggaacgtacataccacagattttcccggaaactattctgggtatgacgacgcttgggaccaagatagattcgaaaagaatttccgagtggacgtggtgcacatggatgagaactccctggagttcgatatggtgggcatcgatgccgccatcgccaacgcctttcgcaggatattgctagccgaagtacccactatggctgttgagaaagtcctcgtgtacaataatactagcattgtccaggatgagattctggcccatcgtctgggcttaatccctatccacgctgacccccgtcttttcgagtaccgtaaccagggtgacgaggaagggacggagatagatacactgcagtttcgactacaggtccggtgcacacgcaatccacacgccgccaaagattcaagcgaccctaatgagttgtatgtgaaccacaaggtatacactcggcacatgacctggatcccactgggtaatcaggcagacttgttccccgaggggactattaggccagtgcatgatgacatcctcatcgctcagctccgccccggtcaggagatagatctgctaatgcactgcgttaaggggatcggcaaagatcacgccaaattttcacccgtggctactgcatcttacaggctactgcccgatataaccctccttgaacccgtcgagggagaggcggctgaagagttgtcccggtgtttttctccaggagttattgaggtgcaagaagtccagggcaaaaaagtcgctagggtggccaatccaaggttggacacctttagcagggagatttttcgaaatgagaaactaaagaaggttgtgagactcgctagggtcagagaccattacatcttcagtgttgagagtaccggcgtgctgccgcccgacgtcctggtttccgaggccattaaagtcttgatgggaaagtgtagacgtttcctggacgagctcgatgccgtacaaatggattag

SEQ ID NO: 129276 - DNA, 369 bp, synthetic construct
  misc_feature 1..369: note = Description of Artificial Sequence: Synthetic coding sequence
  source 1..369: mol_type = other DNA
atggaagaggatcaagagttggagaggaaagcaatcgaagagcttctgaaagaggctaaacgggggaaaactagagctgagacaatgggtccaatgggctggatgaagtgtccgctcgcttcaaccaacaaacgtttcctaattaacactatcaaaaatacactcccctcccacaaggaacaagatcacgaacaaaaagagggcgataaggaacccgcaaagtctcaggctcaaaaggaagaaaatccaaagaagcatcgatcgcacccctataaacacagtttccgcgcacgggggagtgccagctattcacccccaaggaagaggtcttcccaagataagtacgagaagcggtctaacagaaggtag

SEQ ID NO: 129277 - DNA, 402 bp, synthetic construct
  misc_feature 1..402: note = Description of Artificial Sequence: Synthetic coding sequence
  source 1..402: mol_type = other DNA
atggaggaggatcaggagctggaacgaaaaatctccgggttaaagacctctatggcagaaggtgaaagaaagaccgccttggagatggtgcaggccgcagggacagataggcactgcgtgaccttcgttctgcacgaagaggaccacaccctggggaactcactgaggtatatgataatgaaaaacccagaagttgagttctgcggctatactaccactcacccaagtgaatcaaagataaacttaagaatacaaacacgcggaacgctccctgccgtggaacccttccagcggggacttaatgagctgatgaatgtgtgtcagcacgtactggataaatttgaggcttccataaaagactacaaggaccagaaggcaagccgtaatgaatctaccttttag

SEQ ID NO: 129278 - DNA, 402 bp, synthetic construct
  misc_feature 1..402: note = Description of Artificial Sequence: Synthetic coding sequence
  source 1..402: mol_type = other DNA
atggaggaggatcaagagctggagcggaaaatctctgggcttaaaaccagcatggctgagggcgagcgtaagacggctcttgaaatggtgcaggcggccgggacagacaggcactgcgtgactttcgtgctccacgaagaggatcatactctgggaaattctttacggtatatgatcatgaaaaacccagaagtcgagttttgtgggtacacaacgacccacccttccgagtccaagatcaacctgaggatccagacgagaggaacattacccgctgtagaaccgtttcaacggggcctcaatgagctgatgaacgtgtgtcagcatgtgctggacaaatttgaagccagtatcaaggattataaggaccagaaagcatcacgcaacgagagtaccttctag

SEQ ID NO: 129279 - DNA, 5913 bp, synthetic construct
  misc_feature 1..5913: note = Description of Artificial Sequence: Synthetic coding sequence
  source 1..5913: mol_type = other DNA
atgcacggagggggccccccttcaggcgattccgcttgtcccctacgtaccatcaagcgcgttcagttcggtgtgttgtctcctgatgaattaaaacggatgagtgtcactgagggagggatcaagtaccctgaaacaactgaggggggccggccaaaattgggtggtctcatggaccccagacagggagttatagagcgaaccgggaggtgtcagacttgcgctggaaacatgaccgagtgccccggtcactttggacatatcgaattagcaaagccggtctttcatgtaggctttttggtgaaaactatgaaggtgctccgctgcgtgtgctttttttgcagtaagctgcttgtggacagcaataacccgaaaatcaaggacatactggcaaagtccaagggacagccgaagaagcggttgactcacgtatatgacctttgcaaggggaaaaatatctgcgaagggggcgaagagatggacaataagttcggtgtcgagcaacccgaaggggatgaggatctaacaaaagaaaagggacatgggggatgtggcagataccaaccccgaatcaggcgctcaggcttggagctttacgccgaatggaaacacgtgaacgaggacagccaggaaaagaaaatcctcctttctccagagcgggtgcacgagatcttcaaacggatctccgacgaggaatgctttgtcctcgggatggaaccacgctacgcacgccccgaatggatgatcgtgacggtgctaccagtcccacccctatccgtgcgccctgctgttgtgatgcaaggatccgctagaaatcaggacgacttaacccataagctggcagatattgtgaagataaacaatcagctgagacgcaacgaacagaacggagcagccgcccacgtgatcgcagaagacgtaaaattgcttcagttccacgtcgccacgatggtggacaatgagctcccaggcctgccaagagcgatgcagaagtccggtagacctttgaaatctctgaagcagcggctcaaaggtaaagaaggacgggttagaggcaatttgatgggaaagcgtgtggacttttctgcaagaaccgtgataactcctgatcccaacctctccatcgatcaggtaggggtgccaaggagcattgccgccaacatgacgtttgccgagatcgtgacacctttcaatatcgatcgcctgcaggaactggtgcggcgcgggaatagccaatatcccggagcgaagtacataatacgggacaacggagacagaatcgatctgcgtttccaccccaaaccttcagatctgcacttgcagactggttataaggttgagcggcatatgtgcgacggagacatcgtaatcttcaaccgccaacctacgttacataagatgtctatgatgggccatagagtacggattctgccatggagcaccttcagactaaacctgagtgtcaccacaccctataatgctgatttcgatggggatgagatgaacttgcatctaccccaaagcttggaaactcgcgcagagatccaggaactggcaatggtacccaggatgattgtgacaccccagtctaacagacccgtaatggggatcgtccaggacaccctcacggccgtcagaaagtttaccaagcgtgacgtgttccttgagcggggtgaggtcatgaatctgctcatgttcctctctacatgggatggtaaagttccacaacctgctatcctgaagccaaggcccctctggaccggaaaacagatttttagtcttatcatccctggccacataaactgtatacggacccattctacccatcccgatgacgaggactctggtccgtataagcatattagccccggcgataccaaggtcgtcgtggaaaacggagaactcatcatgggcattctgtgtaaaaagtccctgggaactagcgctggatcccttgtgcatatatcctacctggaaatggggcacgacatcacccggttgttctactcgaacatccaaaccgtgatcaataactggttgctcatcgagggacacaccatcggtatcggcgactccatagccgatagcaagacatatcaggacattcagaacactataaagaaggctaagcaagatgtgatagaggtgattgagaaggcccacaataacgagcttgagcctactccaggcaacacattacggcaaacgtttgagaaccaggtaaaccggatcctgaacgacgccagagacaaaaccggctctagtgcgcaaaagtcccttagcgaatacaacaatttcaagtcgatggttgttagtggagctaaaggttctaagataaatattagtcaggtaattgccgttgtgggccagcagaacgtcgagggtaagagaattccttttggattcaagcaccgaactctgcctcattttattaaggatgactacggaccggaatctagagggttcgtcgagaactcttacctggcagggctcaccccgactgaatttttcttccacgctatggggggccgagaaggcttgatcgacacagccgtgaaaactgctgaaacagggtacattcaacgacgcttaatcaaatcaatggaatcagtgatggtcaagtatgatgcgaccgtccggaactccattaaccaagtggtgcagttgaggtacggggaggacggactggctggtgaaagcgtggaattccagaatctcgccacactcaagcctagcaacaaagccttcgaaaaaaagttccggtttgattacacaaacgaacgggctttaaggagaaccctgcaggaggacctggtgaaggatgtcctgagcaacgcccatatacagaatgagctcgaaagggaatttgagcgcatgcgcgaagatagagaggtgttgagagtcatattcccaaccggcgactctaaggtggtacttccttgcaacctgctgagaatgatatggaacgctcagaaaatatttcatataaatcccaggctgccttccgatcttcatcctatcaaggtagtggagggggtgaaagaattgtcaaagaagctggtgatcgtgaacggagacgaccccttatctagacaagcccaggagaacgccacactcctgttcaatatccacctaaggtcgaccctgtgttcccgcagaatggccgaagagtttcggctgtctggcgaagcattcgattggctgctgggcgagatcgaatcaaagttcaaccaagctattgcccatcctggcgaaatggttggggctttagccgcccagtctttgggagagccggcaacccagatgaccctcaataccttccactacgccggcgtttcagcgaagaacgttactctgggggttcccaggcttaaagaactgattaacatttctaaaaagccaaaaaccccctctcttactgtttttctgctgggacaatcagccagagacgcagagagagccaaggacattctatgccgcctcgaacatacaacactcaggaaagtgacggccaataccgccatctactatgaccccaatccccaatctactgtcgttgcagaagatcaggagtgggttaatgtgtattatgagatgcctgatttcgatgtagccaggatctccccatggctgctgcgcgtggagctggatcgcaaacatatgaccgaccggaaacttaccatggaacagatagccgaaaaaataaatgctggcttcggggacgaccttaactgcatctttaacgatgacaacgctgaaaaactggttctgcgcattagaataatgaacagcgacgagaataaaatgcaggaagaagaggaggtggtggacaaaatggatgatgatgtattcttgaggtgcatcgagtcaaatatgttaaccgatatgactctccagggcatcgaacaaatctcaaaagtctatatgcatcttcctcagaccgataataaaaaaaagattattatcaccgaggatggggaatttaaggctctgcaggagtggatcctggagactgacggcgtcagcctgatgcgcgtgttgtctgaaaaagacgtggatccagtgcggaccactagcaatgatattgttgaaatatttactgtgctgggcattgaggccgtgcgtaaagcactggagagagagctgtaccacgtaatttcattcgacggatcctacgtgaattataggcacctggctctgctctgcgatactatgacctgccgggggcacctgatggcgatcacacgccatggcgtaaaccgacaagacaccggcccccttatgaagtgcagtttcgaagaaaccgtagacgtcctaatggaggccgccgcgcatggtgagagcgaccccatgaaaggtgtgagcgagaacattatgttgggccaacttgctcctgccgggacaggctgcttcgacttacttctggacgcagagaagtgtaagtatggcatggagatccctacaaacatccccggactcggcgccgcaggtcccaccgggatgttttttggctctgctccaagccccatgggagggatttccccagcgatgactccatggaaccagggagctactccggcgtacggagcctggagtccatccgtcggctcaggaatgacacccggggcagccggctttagtccgtcggcagcgagtgatgcctccgggttctcaccgggttattcccccgcctggtcccccacaccagggtctcccggaagtccaggtcctagctccccatacatcccctctccagggggggcaatgtccccttcatacagccccacaagtcctgcttacgaacctcggtcccccggcggatacacaccccagagccccagttattctcccacaagtccctcatactctcccaccagcccgagctatagccccacctccccgaactactcccctacctcaccctcctacagtcctaccagcccgtcgtattcccctacctccccctcatactcccctacgagccccagttatagtcccacctctccttcttacagccccactagccccagctactcacccacttcaccaagctactcccccacaagccctagttacagcccaacatcccctagttactcccccacttccccgagctactcaccgacatctccttcgtactcgcccaccagcccttcctacagtcccacttcaccgtcctacagccctaccagcccaagctatagcccaacgtctccctcatactcacctacgtcgcctaattacagccccacttctccgaactacacccccacatccccctcttacagccccacaagtccctcctactctcctacttcaccaaactacaccccgacctccccgaactactctccaaccagcccttcttacagccccacaagtcccagttactcgccgacatctcctagctatagcccctcaagcccccgttacaccccccaaagtccaacttatacccccagctctccgagctatagcccttctagccccagctattctcctgcctctccgaaatatacccccactagcccctcctactcacctagcagtccagagtatactccaacttctcctaagtactccccaaccagtccaaagtacagtcctacttctcctaagtacagtcccacctcaccaacttacagccccaccaccccgaagtactcaccgacttcccctacatattccccaacgtccccagtttatacgcctaccagcccaaaatacagtcccacttccccaacatattcgccgacctcacccaagtatagccccacaagtcccacatacagtcccacctcgcctaaaggcagcacctacagccctacctctcctgggtactctcctacctcccctacctactcgctcactagtcccgccatatccccagacgattccgacgaggagaactag

SEQ ID NO: 129280 - DNA, 1626 bp, synthetic construct
  misc_feature 1..1626: note = Description of Artificial Sequence: Synthetic coding sequence
  source 1..1626: mol_type = other DNA
atgcccggtcggtgtcaatctgacgccgctatgcgagtgaacgggcctgcttctagagcaccagcgggatggacttcaggctccctgcacacaggccctagagctggcaggcctcgagctcaggcaaggggcgtgcgtggacgtggcctccttctgagacctcggcctgcaaaggagctgcccctgcctcgtaagggtggagcctgggcccctgccggaaaccctggaccccttcaccctctgggagtcgccgtcggcatggcagggtcgggaagactagtcttgcggccttggattcgcgaactcatcctgggttccgagacacccagttctcctagggctggacagctcctcgaggatgcagaagccgcagtggcagggcccagccacgcaccggacacaagtgacgtgggagcaacactgctagtgtctgatggcacccacagtgtccgttgcctggtgaccagggaagcactcgatactagcgactgggaagaaaaagaatttggctttcgaggaacagaaggacgactgttactcctgcaggattgcggtgtccacgtgcaagtcgccgaggggggcgctccagcggaattttatttacaggtcgataggttctccctgctgcccacggagcagccccggttaagggtacctggatgcaatcaggacttggatgtgcagaaaaagttgtacgactgcctcgaagagcatttgagtgaatccacgagtagtaacgcaggactgtctctctcacagcttctggacgagatgcgagaagaccaagagcaccagggcgcgctggtttgccttgccgagtcatgccttactttggaggggccatgtacagccccaccagtgacacactgggccgcaagccggtgcaaggccaccggcgaagcggtgtatacagttccatcttctatgctgtgtatcagcgaaaacgaccagttgatcctgagctcactgggtccttgtcagcggactcaggggcccgaacttcccccccctgatccagccttgcaggacttgtcccttaccttgatagcttcaccgccctcttcaccgtcctcctctggcacaccagcactgcccggacacatgtcttccgaggagtccgggacaagcatcagcctcctgcctgctcttagcctggcagcacctgatccaggtcagcgctcaagctctcagcccagccccgccatctgctctgcacctgccacattaacccctcggagcccccacgcttcaaggactcctagctcacccctccagtcctgtaccccatccctgtcaccaaggagccatgtgccatccccccatcaagcactcgtcacccggcctcaaaaacctagtctagagtttaaggagtttgtcggcttgccctgtaaaaaccgccctccatttccacgcacaggcgcaacgcgtggcgcacaagagccctgcagtgtttgggaaccaccgaagagacatcgtgatggcagtgcctttcagtacgagtacgagccaccctgtacgtcattgtgcgccagggtgcaggcggtgagactgcccccgcagctcatggcttgggccctgcacttcctgatggatgcccagccaggttctgagcctacccccatgtag

SEQ ID NO: 129281 - DNA, 2040 bp, synthetic construct
  misc_feature 1..2040: note = Description of Artificial Sequence: Synthetic coding sequence
  source 1..2040: mol_type = other DNA
atggaccgcgtgaccagataccctatcttgggtattcctcaggcccaccgcgggaccggactggtgctggacggcgacacatcctatacttatcacctggtgtgcatgggcccagaggcctctggatgggggcaggatgaacctcagacttggcctactgaccacagggcacaacagggagttcagagacagggcgttagttatagcgtacatgcttacactggtcagccatcacctaggggcctgcacagcgaaaaccgcgaagatgagggatggcaggtgtatcgtctgggcgcccgcgacgcccaccagggacgcccaacatgggcccttagacctgaggacggggaggacaaagaaatgaaaacttatcgattagacgccggcgatgcagacccgagacgcctgtgtgatttggagcgagagagatgggcggttatccagggccaggccgtgagaaaatcctccaccgtggccaccctgcagggcacccccgaccacggcgatccccggaccccgggccccccaagatccacaccactggaagaaaatgtggtggatcgcgaacagatcgatttcttggccgctcgacagcagtttctttccttggaacaggccaataagggggccccacattcaagccctgctcgggggactcccgcaggaaccacaccgggggccagtcaggcccctaaagcatttaataaacctcacctggctaatggccacgtggtccccattaaacctcaggtgaagggagtggtccgcgaagagaataaggtacgggcagtaccaacctgggcatccgtccaggtcgtagatgacccaggttccctcgcgagcgtcgagtcacctgggactccaaaggagacgcccattgagcgggaaattagactcgcacaggagagggaggcagacttgagagagcagcgaggtctgcgtcaggctacagaccatcaggagctcgttgagatccctactcggcccttacttaccaaattgtctctgataactgccccccggagagaacggggaaggccctcactatacgtgcagcgcgatatagtgcaggaaactcagagggaggaagaccacaggagagaggggctgcacgtggggagagcttcgacccccgattgggtctcggagggcccacagcctggactgcgccgagctctgtccagtgattcaatcctttctcccgcacccgacgcaagagctgccgaccccgctccagaagtgcgcaaagtcaaccggatccctcccgatgcatatcagccatatctgtcccccggcacgccccagctggagttttcagcattcggggctttcggcaagccctctagcctgtcgacggccgaggcaaaggctgcaacctcacctaaggcaaccatgtccccgcgacatttgagcgagtcgtcaggcaaacccctcagtacaaaacaggaggccagtaagcctccgcgcgggtgtcctcaggctaatagaggagtggtgaggtgggagtacttcagattgagacctctacgtttccgggcccctgacgagcctcagcaggcacaggtgccccacgtttggggctgggaggtggccggtgccccagcgctccggctgcagaagtctcagagtagtgatctactggaacgtgagagggaatcagtactacgacgggagcaggaagtcgctgaggagaggaggaacgctctattcccagaggtcttctctccaaccccggacgagaactctgaccagaattcccggagtagctcccaggcatctggaatcaccggatcttatagcgtcagtgaatctcccttcttctccccaatacatctacactcgaatgtcgcatggactgtggaggatccagtcgacagcgcacctccgggccagcgcaagaaagagcaatggtatgccgggatcaatccatctgatggcattaactctgaagtgttggaagcaatccgcgttacaagacataagaacgctatggctgaacggtgggagtcccgcatctacgcctcagaagaggacgattag

SEQ ID NO: 129282 - DNA, 381 bp, synthetic construct
  misc_feature 1..381: note = Description of Artificial Sequence: Synthetic coding sequence
  source 1..381: mol_type = other DNA
atgagtgacaacgaggataacttcgacggtgatgactttgacgatgtggaggaggatgagggccttgacgacctggagaatgcggaagaggaagggcaagaaaacgttgaaatacttcctagcggcgagaggcctcaagccaatcagaagcgcatcactaccccttatatgacaaagtatgaacgggctagagtcctgggcacaagagccctacagatcgccatgtgcgctcctgtgatggttgagctcgaaggggagaccgatcccctgctgatcgccatgaaggagctcaagctcctgtggggccttgagtacaccgtgctgcggccctcctatgccctcgcccattcactgggcagcttcagcatttcatctcggtag

SEQ ID NO: 129283 - DNA, 477 bp, synthetic construct
  misc_feature 1..477: note = Description of Artificial Sequence: Synthetic coding sequence
  source 1..477: mol_type = other DNA
atgtctgataatgaggacaatttcgacggcgatgatttcgatgacgtggaggaggatgagggcttagacgatctcgaaaacgcggaagaagaggggcaggaaaacgtggaaattcttccctccggggaacgacctcaggccaaccagaaacgtatcacaacaccatatatgacaaagtatgagagggctagggtattgggcactagagcactccagatcgcaatgtgcgcaccagtgatggttgaacttgagggagagaccgatcccctcctgatcgctatgaaagagttgaacgcacggtccgctagtgagccgccaggtgaggaaccaccatggatggacagggggaccagggacgagcatttgccgagctgccctggttgtcctgcggtcgcatctaacactcgctgctgtccaccggccgcgtgtctgccaggaatctctctttcccgcaggcgccggttgagagaggaatag

SEQ ID NO: 129284 - DNA, 384 bp, synthetic construct
  misc_feature 1..384: note = Description of Artificial Sequence: Synthetic coding sequence
  source 1..384: mol_type = other DNA
atgagtgacaatgaggataatttcgatggagacgatttcgatgatgttgaggaagacgagggccttgacgatcttgagaacgcagaagaagagggacaggagaacgtggagattcttcccagtggggagagaccccaagccaatcagaagcggattacaactccctacatgaccaagtacgaacgggccagggtactgggaacccgggctctacagattgcaatgtgtgcccccgtgatggttgaactagaaggcgaaaccgatccactgctgatagctatgaaggagctgaaggcgcggaaaatcccaataatcattcggcggtacctcccagatggcagctacgaggattggggagtagatgaactcataattaccgactag

SEQ ID NO: 129285 - DNA, 519 bp, synthetic construct
  misc_feature 1..519: note = Description of Artificial Sequence: Synthetic coding sequence
  source 1..519: mol_type = other DNA
atgttctaccacatttctctggaacatgaaatcctcttgcatccccgatactttggcccaaacttgctcaacaccgtcaaacagaagctcttcacagaggtggaaggaacatgcacgggcaagtacggtttcgttattgctgtcaccactattgataacatcggggccggcgtgattcagcctggacggggtttcgtgctgtatccagtgaagtataaagccatcgtttttcgcccttttaagggggaagtcgtcgacgcggtagtaacacaggtcaataaagtcggcctctttaccgaaatcgggccaatgagttgttttattagccgccactccattccctcggaaatggaattcgaccccaactctaatccaccttgctacaagacaatggatgaagacattgtcatacaacaagatgatgagattcgcttaaagattgttggcaccagggtggacaagaatgatattttcgcaattgggtccctgatggatgactatttaggccttgtgagctag

SEQ ID NO: 129286 - DNA, 453 bp, synthetic construct
  misc_feature 1..453: note = Description of Artificial Sequence: Synthetic coding sequence
  source 1..453: mol_type = other DNA
atggccggtattttatttgaggatatcttcgacgtcaaggacatagatccggaggggaaaaagtttgacagagtcagccgcctgcattgcgagagtgaatctttcaaaatggacctgatcttggacgttaatattcagatttacccagttgacttaggcgacaagttcaggctggtgatcgcctctacactgtacgaggacggcacactggacgacggggaatataatcccacagatgatagaccttcgcgagccgatcagtttgagtatgttatgtatggaaaggtttacagaatagaaggtgatgaaacatccaccgaggcggctactcgattgtccgcgtacgtgagctacggtggactgctgatgaggctgcagggggacgccaataacctgcacggtttcgaagtggattctcgggtgtatctgttgatgaaaaaactagccttttag

SEQ ID NO: 129287 - DNA, 39 bp, synthetic construct
  misc_feature 1..39: note = Description of Artificial Sequence: Synthetic coding sequence
  source 1..39: mol_type = other DNA
atggctggtattcttttcgaggatatcttcgacgtgtag

SEQ ID NO: 129288 - DNA, 450 bp, synthetic construct
  misc_feature 1..450: note = Description of Artificial Sequence: Synthetic coding sequence
  source 1..450: mol_type = other DNA
atggcaggtatcctgtttgaggacattttcgatgtcaaagatatcgaccccgagggcaaaaaattcgacagagtatcacgtctacactgcgaatctgagtcttttaaaatggatctgatcctcgatgtcaatatccagatctatccggtggatctgggagataagtttcgcctagttatagcctccactttgtacgaggatggaactctagacgacggcgagtacaaccccactgacgatcgcccttcaagagctgaccagttcgaatacgtgatgtacgggaaagtttataggatagaaggagacgagactagtaccgaagccgcgaccaggctgagcgcctacgtaagctatggcggtctgttgatgcgtctgcagggcgatgcgaacaatttgcacgggttcgaggttgattcgagggtttatctgctcatgaagaagcttgcctag

SEQ ID NO: 129289 - DNA, 453 bp, synthetic construct
  misc_feature 1..453: note = Description of Artificial Sequence: Synthetic coding sequence
  source 1..453: mol_type = other DNA
atggccggcatcctgtttgaggacatctttgacgtgaaagacatcgatcccgaaggcaaaaagttcgaccgcgtatctcggttgcattgcgaatccgaatcttttaaaatggacctcattctggatgtgaatattcaaatttaccccgttgatttgggagacaagtttaggctggtgattgccagcacattgtatgaggacgggacccttgacgacggagaatacaacccgacggacgacagaccatccagagctgaccaattcgagtacgtaatgtatgggaaggtgtaccgcatagagggcgacgagaccagcaccgaggctgctactagactgagcgcgtacgtatcttatgggggccttctcatgcggctgcagggggatgccaacaaccttcatgggttcgaggtagactcgagggtatatctcctgatgaaaaaactggccttttag

SEQ ID NO: 129290 - DNA, 1491 bp, synthetic construct
  misc_feature 1..1491: note = Description of Artificial Sequence: Synthetic coding sequence
  source 1..1491: mol_type = other DNA
atggaggaacagcgtgaggcccttaggaaaattataaaaacactggcagttaagaatgaagagatccaaagtttcatctatagcctgaagcagatgctgcttaacgtcgaagctaacagcgcaaaggtgcaagaggatctcgaggccgaatttcaaagtctcttctccttgctcgaagagctgaaggaaggaatgcttatgaagattaagcaggaccgggcttctcggacttacgagctccagaatcagttggctgcatgtacgcgagccctggaatcatccgaggagctactggagacggccaatcaaaccctccaggcgatggattctgaagattttccacaggcggccaaacagatcaaagatggcgtaaccatggcaccagccttcaggctgtcgcttaaggccaaggtgagtgacaacatgagtcacctgatggtcgacttcgcccaagagcgacaaatgctccaggccttgaaatttctgccggtgccaagcgcccctgtgatcgacctggctgagagcctggtggcagacaactgcgtcaccctggtatggcggatgcctgacgaggattctaaaatcgaccactacgttctagagtaccgcagaacaaactttgaaggaccccctaggctcaaggaggatcaaccctggatggttatcgagggcatacgacaaactgagtatacactcaccggacttaaatttgacatgaagtacatgaattttagagtgaaggcttgcaacaaagctgtcgcgggcgaattcagcgagcccgtgaccctcgaaacccccgccttcatgttcagactagacgcctctacttcccaccagaacctgagggttgacgatctgagcgtggaatgggacgccatggggggaaaggtccaggacatcaaggcgcgcgagaaagacgggaaggggagaactgccagccccattaattccccagctcgaggcacaccctctccaaaaagaatgccatccggccgggggggcagagatcgctttaccgctgaatcgtatactgtgctgggcgacacactgatcgatggcggtgagcactactgggaggtaaggtacgagcccgactccaaggctttcggggtgggcgttgcctataggtccttaggccggtttgagcagttgggaaagacggccgcctcttggtgtttacatgtcaacaactggctccaagtgtcattcactgcaaagcatgccaataaagttaaggtcttggacgccccggtgcccgattgcttaggagttcactgcgacttccatcaagggttgctgtctttttacaatgcccgtacgaagcaggtcctccacacttttaaaaccagattcacccagcctctgttgcccgcttttaccgtctggtgtggaagtttccaggtgaccacaggtctccaggtaccttctgccgttagatgcctgcagaagcgggggtccgcaacatcttccagtaatacaagccttacatag

SEQ ID NO: 129291 - DNA, 354 bp, synthetic construct
  misc_feature 1..354: note = Description of Artificial Sequence: Synthetic coding sequence
  source 1..354: mol_type = other DNA
atgaacgccccaccagcattcgaatcattccttcttttcgagggtgaaaagaaaatcacaataaataaggatacaaaggtacctaatgcgtgtttgttcaccattaataaggaggaccatacgcttggaaatattatcaagagccagcttctaaaagatccccaagtgctgttcgcgggctacaaagttcctcatccactggaacataagatcattatccgagtccaaacgactcccgactattcgcctcaggaggcatttacaaacgcaatcactgacctcatatcggagcttagtctgctggaggagaggtttagagtcgcaatcaaggataaacaggagggtatcgaatag

SEQ ID NO: 129292 - DNA, 384 bp, synthetic construct
  misc_feature 1..384: note = Description of Artificial Sequence: Synthetic coding sequence
  source 1..384: mol_type = other DNA
atgaacgcaccacctgcattcgaaagcttcctgctgttcgagggtgagaagaaaatcacaattaacaaagatactaaagttcctaatgcatgtttgtttaccatcaacaaggaagaccatacactcggaaatataatcaagtctcagctgctcaaggaccctcaggtcttgtttgctggatacaaggtcccccaccccttggaacacaagattatcatacgcgtgcagactactcctgattacagccctcaggaggcttttacaaacgcaattactgatctgattagcgaactctccctcctggaagagaggttcagagtcagagcaggtcccgggggagccgatggggtcgctatcaaagacaagcaggagggtatagaatag

SEQ ID NO: 129293 - DNA, 351 bp, synthetic construct
  misc_feature 1..351: note = Description of Artificial Sequence: Synthetic coding sequence
  source 1..351: mol_type = other DNA
atgaacgctcccccggcattcgagagtttccttcttttcgagggagagaagatcacaattaataaggataccaaagtccccaaggcttgtttgttcacgatcaataaggaagaccatacacttggtaatatcattaaaagccgcgcttgctttccctttgccttttgccgcgattgtcagtttccagaggcatcacccgcaaccctccccgtgcagcccgcagaattgtgcccaagagctcaccagctctgtgctcccgccctgaaacgacatctggggggtgaagctcatccggtgcacttacacgctggcgccgcatctcgcccagttcagcaaccccaacacctgtag

SEQ ID NO: 129294 - DNA, 348 bp, synthetic construct
  misc_feature 1..348: note = Description of Artificial Sequence: Synthetic coding sequence
  source 1..348: mol_type = other DNA
atgaacgcccctcccgcctttgaatcctttctgctcttcgaaggcgagaaaatcaccatcaataaagacactaaggtgcctaaagcttgcctgttcacgattaataaggaagaccacacactgggcaatatcatcaagtcacagttgctcaaggatccccaggttctgttcgcaggctacaaagtcccccacccacttgaacacaagataatcattcgcgttcagaccaccccggattattcccctcaggaggccttcacaaatgccattacagatttgataagtgagctctcccttttagaagagcgcttccgaacatgcttgctgcctctgcgactgctgccgtag

SEQ ID NO: 129295 - DNA, 177 bp, synthetic construct
  misc_feature 1..177: note = Description of Artificial Sequence: Synthetic coding sequence
  source 1..177: mol_type = other DNA
atggacacccagaaagacgtgcagcctccaaagcagcaacctatgatatatatttgtggcgagtgccacacagaaaatgaaattaagagccgagaccctatccgctgccgggaatgtgggtataggattatgtacaagaagagaacgaagaggctcgtcgttttcgatgctaggtag

SEQ ID NO: 129296 - DNA, 204 bp, synthetic construct
  misc_feature 1..204: note = Description of Artificial Sequence: Synthetic coding sequence
  source 1..204: mol_type = other DNA
atgatcatccccgtaagatgttttacttgcggaaaaatagtcggaaataagtgggaggcgtatctaggcctgctacaggccgagtacacagaaggcgatgctctggacgcgctgggattgaaacgatattgttgccggagaatgcttctcgcccacgtagacctcatagagaaactgctgaactatgccccactagaaaagtag

SEQ ID NO: 129297 - DNA, 204 bp, synthetic construct
  misc_feature 1..204: note = Description of Artificial Sequence: Synthetic coding sequence
  source 1..204: mol_type = other DNA
atgattattcccgtcaggtgtttcacatgcggaaaaatagtgggcaataagtgggaagcgtatctggggctgctgcaggctgaatacaccgagggcgacgccctggatgccctcggactgaaacgttattgctgccggcgtatgctgctggcacatgtggacctcatcgaaaagctacttaactacgctcccctggaaaagtag

SEQ ID NO: 129298 - DNA, 4173 bp, synthetic construct
  misc_feature 1..4173: note = Description of Artificial Sequence: Synthetic coding sequence
  source 1..4173: mol_type = other DNA
atggtgaaggaacagtttcgggagactgacgtcgctaaaaaaataagccatatctgctttggaatgaagtcaccggaggagatgcgccaacaagcccacattcaagtagtttcaaagaacctgtactcccaggataaccagcatgcgccccttttatatggggttctcgaccatcgcatgggaacatccgagaaggacaggccatgcgaaacttgcggaaaaaacttggcagattgcttaggtcactacgggtatattgacctcgaactgccctgcttccatgtcggctacttccgcgcagtgatcggcatccttcagatgatctgtaagacctgctgtcacatcatgctctcccaagaagagaaaaagcagtttttagactatctcaaacgccccgggctcacttacctccaaaaaagaggtcttaaaaaaaaaatctctgacaagtgccgcaaaaagaacatctgtcaccattgcggggcctttaacggcacagtgaagaagtgcggcctgctgaaaattatccacgagaaatacaagaccaacaaaaaggtcgtcgatcccattgtaagtaactttctgcagagttttgaaaccgccatcgaacacaataaagaagtcgagcctctgcttggacgagcccaagaaaacctgaacccgcttgtcgtgttgaatttgtttaagcggattcccgccgaagatgtgccactcttattgatgaaccccgaggccggcaagcctagcgacctgatcctcactagactgctcgtgccaccactctgtatccggccgtctgttgtttccgatcttaagtctgggacaaacgaggacgacttgactatgaaattgacggagattatctttctcaacgatgtaattaagaagcatcgcatttctggcgccaaaacccaaatgattatggaggactgggacttccttcagttgcagtgcgctttgtatatcaactccgagctgtcagggattccactcaatatggcaccaaaaaagtggacccgtggattcgtccagaggctaaaggggaagcagggtcgcttccgggggaatctgtcggggaagagagtggatttctccggaagaactgtcataagtccggaccctaatcttcggatcgacgaagtggccgtgccggttcacgtggctaagatcctgacgttcccagagaaggtcaataaggccaacatcaactttctacggaagctggtccaaaacggcccagaagtacatcccggcgctaacttcatccagcagaggcatacacagatgaaacgctttctgaagtatggcaatcgggaaaagatggctcaggagttaaaatatggggacattgtggagagacacttaattgacggtgatgtcgtgcttttcaatcgtcagccttcactccacaagctttcaataatggcccatctggccagagttaagccccatcggaccttccggttcaatgaatgtgtctgcactccgtataatgcagactttgacggagatgaaatgaacctacacctgccccagaccgaggaggccaaagcggaagctctggtcctaatgggtacaaaggctaatctcgtcactcctaggaacggcgaacccctgatcgcagctattcaggacttcttgactggcgcatacttacttacactcaaggacactttttttgacagggccaaggcgtgccaaattatcgcctcaatcctcgtcggcaaggatgagaagataaaagttcgcctgccgccgcctacgatactgaagcccgtgacgttatggaccggtaagcagatcttttcagtgatcttgaggccaagcgatgataacccggtcagggccaatttacggaccaagggaaaacagtactgtggcaagggcgaggacctgtgcgccaatgactcctacgtgaccatacagaactccgagctgatgagcggctccatggacaaaggcaccctgggatccggctccaagaataacatcttctatatactgctccgggattgggggcagaatgaagcagcggatgccatgtcccggttagcaagactcgcccccgtgtatttatccaatagggggttctcaatcggaataggcgacgtgacccccggacagggactgctgaaggctaaatacgagctcctgaatgccggatacaaaaagtgtgatgagtatattgaagccctcaatacaggtaagctacagcagcagcctggctgcacggctgaggaaactcttgaagcacttatcctgaaagaactctctgtgattcgcgaccatgcaggaagcgcttgtctccgcgagttagacaagtccaattcaccccttacaatggctctttgtggcagcaagggttctttcattaatatctcccagatgatagcatgtgttggccagcaggccatcagcgggtctcgcgtacccgacggttttgagaacagatccttgcctcacttcgaaaaacactccaagctgccagccgcaaagggtttcgtggctaatagcttctactccggcctcactccaaccgagttcttcttccacactatggccggtcgagaaggtctagttgacacggcagttaagacagcagagacagggtatatgcagcgccggcttgtaaagtccctggaggacctatgttcacagtatgacctgacggttcggtctagtaccggcgatataatccagtttatctatggcggggacggtctggatccggcggccatggaaggcaaggatgaaccactggagttcaagcgagtcctcgataatataaaagctgttttcccctgcccttccgagccggctcttagcaaaaacgagctcattcttaccacagagagcattatgaagaagagcgagttcctttgctgtcaggactccttcttacaggagatcaaaaagttcattaagggagtgtcagaaaagataaaaaagaccagagataagtacggaattaacgataatggcaccactgaaccacgagtactataccagctcgatcggattacacccacacaagtggagaagttcctggagacttgccgtgacaaatacatgagagctcaaatggagccaggaagcgccgtgggagctctgtgtgcccagagtattggtgaaccaggcactcagatgacactgaagacctttcacttcgccggagtggcaagcatgaacattacccttggggttcctagaataaaagaaatcatcaacgctagcaaagcaataagcacccccattattacagcgcagttagataaagacgacgacgctgactacgccagattggtgaaaggccggatagagaaaacgctgctcggcgagatctctgagtacattgaggaagttttcctgccagatgattgctttattctggtgaaattgtcactggagagaattcggttgctcagattggaggtgaatgctgagacagtacgttactctatatgcacctctaagctgcgggtaaaaccaggagatgtggccgtccatggcgaggcggtggtgtgcgtgaccccgcgtgagaacagcaagtcatcaatgtattacgtgttgcagttcctgaaggaggacctgccaaaagtcgtcgttcagggcattccagaagtgagccgcgccgtaatacacattgacgagcaaagtggaaaagaaaagtataaactacttgtggaaggcgacaacctgcgggccgtgatggccacgcacggagttaaggggaccagaacaacttctaataatacctacgaagtggaaaagaccctaggcattgaagctgccagaacgaccatcatcaatgagatacaatacactatggtcaatcatgggatgtcgatcgatagacggcacgtgatgcttctttccgatttgatgacatacaaaggggaggttctgggtatcacccggtttggccttgccaaaatgaaagagtccgtgttgatgttagcaagcttcgagaagacagcagatcaccttttcgatgctgcttattttgggcagaaagacagcgtttgcggcgttagtgaatgtatcattatgggaatcccgatgaacattgggactgggctcttcaaactgcttcataaggctgaccgagaccctaacccacccaagcggccactgattttcgacaccaatgaattccatatacccctcgtgacctag

SEQ ID NO: 129299 - DNA, 489 bp, synthetic construct
  misc_feature 1..489: note = Description of Artificial Sequence: Synthetic coding sequence
  source 1..489: mol_type = other DNA
atgtattacgtgctacaatttcttaaagaagacctgcccaaggttgtggtgcagggcatacctgaggttagccgcgcggtaatacacattgacgaacagagtgggaaagagaagtataaattgcttgtggagggggataatctgagagcggtgatggcgacgcacggcgtgaaggggacaagaaccacttccaataatacctacgaggttgaaaagacactgggcattgaagccgcacgcaccacgatcataaatgagatacagtatacaatggtaaaccatgggatgtccatcgataggcggcacgtgatgttactgagcgatttgatgacttacaagggcgaggtgctgggtatcacaagatttggacttgcaaaaatgaaagaaagcgttctgatgctggcttcctttgagaagaccgcagaccatttattcgacgccgcctactttggacagaaggatagcgtctgcgcttggccgcagccctag

SEQ ID NO: 129300 - DNA, 4110 bp, synthetic construct
  misc_feature 1..4110: note = Description of Artificial Sequence: Synthetic coding sequence
  source 1..4110: mol_type = other DNA
atggtgaaagagcagtttcgggagaccgatgtagcaaaaaagatatcacatatctgctttgggatgaagagtcccgaagaaatgagacagcaggcccacattcaggtcgttagcaagaatctttactcacaggacaatcagcatgccccactcctgtatggagtgttggaccatcggatgggaacctcagagaaggacagaccttgtgaaacttgcgggaaaaatctcgccgattgtctgggtcactacggatatatagatctcgagctgccatgtttccacgtggggtatttccgggcagttatagggatccttcaaatgatctgtaaaacatgctgtcacataatgctctctcaagaggagaaaaagcagtttctagattatcttaaaaggcccggactgacctatctgcagaaaagaggccttaaaaaaaaaatctctgataagtgcaggaaaaaaaacatctgccaccactgcggtgcgtttaacgggactgtgaagaagtgtgggctgttaaagataatccacgaaaagtacaaaacaaataagaaggttgtcgatccaatcgtgtcaaacttcctgcagagttttgaaacagcaatcgagcataacaaagaagtggagcctctgcttggcagagcacaggagaacctgaaccctttagtggtgttgaacctcttcaagcgaatacccgcagaggacgtgcctctactccttatgaatcctgaagctgggaagcccagtgatctgatcctgactaggttgctggtccccccactgtgtatcagaccatcggtcgtgtctgatctgaagtcaggcaccaacgaagatgatcttaccatgaaattgaccgaaatcatttttctaaatgatgtgatcaagaaacacaggatatcaggtgcaaaaacacagatgataatggaagactgggatttcttgcagttgcagtgcgctctgtatatcaattctgaactgtccggaatcccgttaaacatggcaccaaagaagtggactcgcggcttcgtgcagcgactcaaaggaaagcagggtcgcttcaggggtaacctcagcggaaagcgggtggatttcagtggcagaactgtgatctctccagacccgaatctaagaatcgacgaagtcgccgtgcctgtgcacgtcgctaaaatactgactttcccggagaaggtgaataaggccaacatcaactttttgcgaaaacttgtgcaaaacgggcccgaagtgcatccgggcgccaacttcattcagcagaggcacactcaaatgaagcggttccttaagtatgggaatagggaaaaaatggcccaagagttgaagtatggcgatatagtcgagcgtcatctaatcgatggagacgttgtgctgtttaaccgccagccctctctgcataaactttctatcatggctcatctagcacgtgtcaagccacacagaactttccggttcaatgagtgtgtctgcacgccttataatgctgatttcgacggagacgagatgaacctccacctgccacagaccgaggaggcaaaggcagaagccctggtcctcatgggaactaaggccaatcttgtaacccccaggaacggcgagccactgatagccgctatccaggattttctcactggtgcatacctgcttacactcaaggacaccttcttcgatcgtgccaaggcctgccagataattgcctcaatactcgtgggaaaggacgagaaaattaaagtcaggctgccccctccgacaattctgaagcccgtgaccctgtggaccgggaagcagatcttcagcgtgattctgcgaccaagtgacgacaatcccgtgcgcgccaacctcagaacaaaggggaaacagtactgtgggaagggggaggacctttgcgcgaacgactcatacgtaacaattcaaaactccgagctgatgtccggaagtatggacaaaggaactctaggtagcggaagtaaaaataatatattctacatactgctaagagattgggggcagaacgaagccgccgatgcaatgagtaggctggctcgcctggccccagtttaccttagtaatcggggatttagcatcgggattggcgacgtgaccccgggccagggcctgctgaaggcaaagtatgaattacttaatgcaggatacaagaagtgtgacgagtatattgaggctttaaacactggtaagctccagcagcagcccgggtgcacagccgaagagactctggaggccctaattctgaaagagctgagtgtcattagggaccacgctggaagcgcctgcctgcgggagctcgataagtctaacagtcccctcactatggccctctgtgggtctaaggggagcttcatcaatatctcccagatgattgcctgtgtgggacagcaggccatttcgggctcacgggtccccgacgggtttgaaaacaggagcttaccccacttcgagaagcactcaaaactacctgccgcgaaaggtttcgtggctaactccttctactcgggattaacccccactgagttcttttttcacactatggcaggacgcgagggactcgtcgatactgctgttaagacagcagagacagggtatatgcaaaggcgcctcgtaaagagccttgaggacctttgttctcaatatgatctaaccgttagaagttccacgggggatattatccagtttatttacgggggcgatgggttagatcccgcggctatggagggcaaagacgagccacttgagttcaagagggtgcttgacaacatcaaggccgtgtttccttgccccagcgagccagctctgtctaaaaatgaactaatcctgactacagagtccataatgaaaaaaagcgaattcctgtgctgtcaggacagttttctccaggagattaaaaaattcattaaaggagttagtgaaaagataaagaagacccgtgataagtatggcatcaacgataatggcaccacggaacctcgggttctgtaccagctggacagaattacaccgacacaagtggaaaagttcttagagacttgtcgtgacaagtatatgcgggcccagatggaaccaggctcagctgtcggtgctctctgcgctcagcgaaatatcacactcggcgtacctagaattaaagaaatcattaacgctagcaaggcgatctctacaccaattattacagctcagctggataaggacgatgacgctgactacgctcgtctcgtgaaagggcgtattgaaaaaactttgttgggagaaatttcagagtacatcgaggaggtcttccttccagacgattgctttattcttgtgaagctctctttggaacggatccggctcctccggctggaagtgaacgctgagaccgtacggtattccatatgcacatccaagctgagagtcaaacctggagatgtcgccgtgcacggggaagctgtggtttgcgttacaccacgagaaaattccaagagctccatgtattacgtgttgcagtttttgaaggaggatttgccaaaggtggtggttcagggcatccctgaagtctccagggctgtcatacacatcgatgagcagagcggcaaagaaaagtataaattgctggtggaaggtgataacctccgagctgtcatggctactcacggcgtcaagggaacccggactacaagcaacaatacctatgaggtggagaaaacattggggattgaagctgcgaggacgaccattatcaacgagattcagtatacgatggtcaatcacggcatgtcaatcgacagacggcacgtgatgctgctgtctgatcttatgacttacaaaggcgaggtgctgggaataacccgattcgggctggccaaaatgaaggaatcagtcctcatgctggcttcattcgagaagacggccgaccatctttttgatgcagcctatttcggacagaaggattccgtgtgcggcgtgtctgaatgtattattatggggatccccatgaacattggcacaggattatttaagctgttacataaggctgaccgcgaccccaatcctcctaagagacccctcatcttcgatactaatgagttccatatcccactagtgacatag

SEQ ID NO: 129301 - DNA, 753 bp, synthetic construct
  misc_feature 1..753: note = Description of Artificial Sequence: Synthetic coding sequence
  source 1..753: mol_type = other DNA
atgaaagccacaatcatccttttgctgcttgcccaggtgagttgggccggcccgtttcagcaacgtggcctgtttgacttcatgctggaagatgaggccagcggaatcgggccagaagtgcctgatgatcgcgacttcgagccatccctgggtccagtttgtccgtttagatgtcaatgtcatctaagggtcgtgcagtgttcagaccttgaactgggcactaatcctctcaagtccagtggcatagagaacggagcctttcaggggatgaaaaagctaagctatatccgaatagcagatactaatataactagcattccccaggggctcccaccttctctcactgaactccacctggatggtaacaagatctctcgcgtcgatgccgcctctctgaaagggttaaataatttggccaagcttggcttaagtttcaatagcatcagcgccgtggacaacggcagcttggctaacacccctcaccttcgagaacttcatcttgacaacaacaagctgacacgggtgccagggggactagctgaacacaaatacatacaagtggtttacctgcacaataacaacatctccgtagttggatcttccgacttctgcccccccggccacaacacaaagaaggcctcttattccggggtgagtctgttcagtaacccagttcagtattgggagattcagccctctacttttcgttgtgtctacgttcgaagcgcaattcagctcgggaactacaagtag

SEQ ID NO: 129302 - DNA, 3228 bp, synthetic construct
  misc_feature 1..3228: note = Description of Artificial Sequence: Synthetic coding sequence
  source 1..3228: mol_type = other DNA
atgaaagcgaacgaaaaggtcacgtccgacgcagatccaatgtggtacctgaaatacctgaatatctacgtcggtctgcctgatgtggaggaaagctttaacgtcaccaggcctgtgagcccgcatgaatgtaggctgagagatatgacatactccgcccctattactgtcgatatcgagtatacaagagggagccaaaggattatccggaatgcacttcccatcggccgcatgcccataatgctgaggtcttcaaattgcgttcttacagggaagacccctgctgaattcgcaaagctcaacgagtgcccactcgacccgggcggctacttcattgtgaaaggcgtggagaaagttattctgattcaagaacaattgagtaaaaacaggattatcgttgaagccgacagaaaaggggctgtcggagccagtgtcacatcctcaacccatgagaagaaatcgcgcacaaatatggcagttaagcaaggcaggttttatctcagacataatactctctcagaggatattcctatcgtgataatcttcaaggcaatgggggtagagagtgaccaggaaattgtgcagatgataggaacagaagagcacgtgatggccgcttttgggccctctctcgaggagtgccagaaagcacagattttcactcaaatgcaggccctcaaatatatcggaaataaggttaggcgtcagaggatgtggggtggagggcctaagaagaccaaaattgaagaagctagggagctgcttgcctcaacaatattgacccacgtgcccgtaaaagaattcaatttccgagctaaatgcatctacactgcggtgatggtgcgacgggtgattctggcccagggcgacaacaaggtggatgatcgtgattactatggcaacaagaggttagaattggcggggcagctgctgtctcttttgttcgaggacctgtttaagaagttcaactctgagatgaaaaagatcgctgatcaagttatccctaaacagcgtgccgcacagttcgatgttgtcaaacacatgagacaggatcagatcacaaacgggatggtgaatgccatcagcacaggaaactggtctttgaaaagattcaagatggatcgccagggggtgacacaggtgctctcgcggctctcctatatttctgcgttaggaatgatgacccgcatcagctcacagttcgagaagactagaaaagtctctggcccaaggtcgttgcagccctcccagtgggggatgctgtgcccttcggacactcctgagggagaggcctgtggcctggtgaaaaacctagctttaatgacccacattacaaccgatatggaggacggtcctatagtgaaactggctagcaatttgggggtcgaggacgtcaacctactttgcggggaggagctgtcctatcccaacgtgtttttggtgtttttgaacggtaacattcttggagtgatcagagaccacaaaaaactggtgaatacttttcgcctgatgaggagggcaggctacatcaatgagttcgtgagtatctctaccaatttgactgacaggtgcgtctatattagcagtgatggcggccgcttgtgccggccttatataatagtgaagaagcaaaagcccgctgtcacaaacaagcacatggaagagctcgcacagggctacaggaactttgaagattttttgcacgagtcgttggtagagtacctcgatgtaaacgaggaaaacgattgtaatatagccctttacgagcacactatcaataaggacaccacgcacctcgagatagagcctttcacactgcttggagtgtgcgccggtctgattccctacccgcatcataatcagtctccccgcaatacgtaccagtgtgcgatggggaagcaggccatggggacgatagggtataaccagaggaacagaatcgataccttgatgtatttgctagcctacccccagaaacctatggtgaagacaaaaactatcgagctgatcgaatttgagaaactgcccgcgggacagaatgcaactgtcgccgtgatgagctacagcgggtatgatattgaagatgctctcgtcctgaataaggccagtttagatcgtggattcggtcggtgtctcgtgtataaaaacgcaaaatgtactctgaagcgctatacgaaccagaccttcgacaaagttatgggtccgatgctggacgccgctaccagaaagccgatttggcgccacgagatcttagacgccgatggaatttgtagccctggagagaaggtcgagaataagcaggtgctggtgaataaaagcatgccaaccgtcactcagatccctctcgaaggttctaacgtgcctcagcagcctcagtataaggatgtgcctatcacctacaagggcgctacagactcttacattgagaaagtcatgatctcctcaaacgccgaagacgcatttctaataaaaatgttgctgcgacaaactagacggcccgaaataggggacaagttctcctccaggcacgggcaaaaaggagtctgtgggctgattgtacctcaggaggatatgcctttttgcgacagcgggatctgccctgacattatcatgaacccacatgggttcccatcacgtatgaccgtgggaaaactgatcgagctgctggcagggaaggccggagtgcttgacggaagattccactacggcacagcattcggcggatctaaggtgaaggatgtctgcgaagacctcgtacgacacggttacaactaccttggcaaggactacgtgaccagcggaattaccggcgagccacttgaagcttacatctacttcgggccagtatactatcagaaattgaagcacatggtgctcgacaagatgcatgccagggcacgcggccctcgcgcggtattgacgcgccagcccaccgaaggccgctcccgggatgggggcctccgtctcggcgaaatggaaagagactgcctgatcgggtatggtgccagcatgcttttgctagagagactgatgattagcagcgatgcatttgaggttgatgtgtgtggtcagtgcggccttctcgggtacagtggatggtgccactactgtaaatcaagttgtcatgtgtccagcctccggataccatacgcctgcaagcttctgttccaggagctccagtccatgaatatcattccacgcctgaagctctccaaatacaacgaatag

SEQ ID NO: 129303 - DNA, 633 bp, synthetic construct
  misc_feature 1..633: note = Description of Artificial Sequence: Synthetic coding sequence
  source 1..633: mol_type = other DNA
atggacgacgaggaggagacctacaggctctggaaaatccgcaagactatcatgcagctatgccacgatcgtggctatctggtgactcaggacgagctcgatcaaacactagaagaatttaaagcccagagtggcgacaagccaagtgagggcagaccccgcagaactgatcttactgtcttggtcgctcacaacgatgacccaaccgatcaaatgtttgtatttttcccagaggaacctaaagttgggattaagactattaaggtctactgtcagcgcatgcaggaagagaatataactagggcacttatcgtggtgcaacaggggatgaccccatctgctaagcaatccctagttgacatggccccaaagtatatcttagaacaatttcttcagcaggagctactaatcaatattaccgaacacgaacttgttcctgaacatgtcgttatgacaaaagaagaggttactgaactgctggcacggtacaagctccgcgaaaatcagttgccgaggattcaggctggggacccagttgctcgttacttcggcattaagagaggccaggtggtgaagatcattcgaccaagcgagacagccggtcggtatatcacctatagactggtgcagtag

SEQ ID NO: 129304 - DNA, 1173 bp, synthetic construct
  misc_feature 1..1173: note = Description of Artificial Sequence: Synthetic coding sequence
  source 1..1173: mol_type = other DNA
atggaggacccgacgctgtatattgtggagcggccccttcccgggtatccagacgcagaagccccagaaccatctagcgccggggctcaggccgccgaagaaccgtcaggtgcaggatccgaggagctaatcaagtcagaccaggtcaacggagtgctagtcctgagcctgctggataagattatcggagctgtggaccagattcagctgacgcaggcacagttagaagaacgccaggccgagatggagggtgccgttcagtccattcagggagagttgtctaaattaggaaaagcgcatgccacaacatcaaacactgttagtaaactcctcgaaaaagtgcgaaaggtaagcgtcaatgtgaaaacagtgcgagggtctctggagcgccaagccggtcagataaagaagctcgaggtgaacgaagcggagctgctgagaaggcgcaatttcaaagttatgatctatcaggacgaggtgaaactccctgccaagctgtccatttccaagagcctgaaggagtcggaggcgctacccgagaaggagggcgaggaattaggagagggcgaacggcccgaggaggacgcggcagctttagaattgagcagcgacgaagctgtcgaggttgaggaggtcattgaagaatcacgcgccgagcgcatcaaacgcagcgggctgagaagagttgatgatttcaagaaggcctttagtaaagaaaaaatggaaaaaactaaagtccggaccagggagaacctggaaaagaccaggctcaaaaccaaagagaacctggagaaaaccagacataccttagaaaagaggatgaataaactaggcacacgtctggttcccgcagaacgcagagagaagctgaaaacttcaagggataagttacggaagtcctttactcccgatcacgtagtgtacgcgaggagcaagactgcggtgtataaggtccctccattcactttccatgtgaagaagattcgcgagggacaggtcgaagtgctgaaagctacagagatggtggaggtcggagccgatgatgatgagggaggcgcagagaggggagaggccggcgacttgcggcgaggttcatcacctgacgtgcatgccctgctggaaatcacagaagagtcagatgcggtgctggtcgataaatccgattccgattag

SEQ ID NO: 129305 - DNA, 1038 bp, synthetic construct
  misc_feature 1..1038: note = Description of Artificial Sequence: Synthetic coding sequence
  source 1..1038: mol_type = other DNA
atggaggatcccactttgtacattgtagaacgtcctctgccaggataccctgacgccgttgatcagatccaattgactcaagcacaactggaagagcgtcaggccgaaatggaaggggcagtccagagcatccagggagagctgtccaagctgggtaaagcacatgcaacgaccagcaatacagtctccaaattacttgaaaaagtccggaaagtgtcagtgaatgtgaagacagtaaggggaagtcttgagcgccaggctggacagatcaaaaaactggaggttaatgaagcagagctgttgcggcgtcgaaacttcaaggttatgatttaccaggacgaagtgaaattgccagcaaaactgtcgatatcaaagtcattaaaggaatcagaagccctaccggagaaggaaggtgaggagctgggcgagggagaaagaccagaggaagacgcggccgccttagaacttagctccgatgaggccgtggaggtcgaggaggtgatagaagagtcccgagccgaacggattaaaaggtccggcctacggcgagtcgacgattttaagaaagccttttctaaggagaagatggaaaaaaccaaagtgcggacaagagaaaacctggagaaaacacgcctcaaaacaaaggaaaatctcgagaaaacgaggcacacccttgagaagaggatgaataaactgggcactcggttggtaccggccgagaggagagagaagttgaaaacaagcagagataagctccggaagtcttttaccccggaccacgttgtttatgctcgttccaaaaccgcggtctacaaggtgccaccttttacatttcatgtgaaaaaaatacgcgaagggcaggtggaggttctgaaagccaccgaaatggtggaagtgggcgcagatgacgatgagggaggagccgagaggggcgaggccggagaccttagacggggtagctcacctgacgtgcacgcattgctcgagataaccgaagagtctgatgctgtcttagttgataaatctgactcggactag

SEQ ID NO: 129306 - DNA, 2295 bp, synthetic construct
  misc_feature 1..2295: note = Description of Artificial Sequence: Synthetic coding sequence
  source 1..2295: mol_type = other DNA
atgctgctgttcgtgctaacctgtctgctagctgtattccctgcaatctcgactaagtcccccatcttcggcccagaggaagtgaactctgtggagggcaacagcgtttccattacctgctactaccctcctacatctgttaaccggcacacccgtaaatactggtgccggcagggcgctagaggcggctgcatcacacttatttcaagcgaaggctacgtgtcatccaaatacgccggtagagccaacctaaccaatttccctgagaacggcaccttcgtggtgaatatcgctcagctttcccaagacgacagtggaaggtacaagtgtggcctggggattaacagccgtgggctgtcctttgatgtcagtttagaagtttcccaggggcctggactgctcaatgacacaaaagtctatactgttgaccttggacgtactgttactataaactgcccttttaaaacagagaatgctcagaagaggaaaagcttatataagcaaatcgggttgtatcctgtcctggtcatagattcctcaggctacgtcaaccctaactatactgggaggatacggctagatatccagggtacaggccagctgctttttagtgtcgtcataaaccaactgcgactttcagatgccgggcagtacctatgtcaggctggcgacgactctaacagtaataaaaaaaatgccgacctccaagtcctaaagccagaacccgagctggtgtatgaggacctccgcggttcagttaccttccactgcgctctcggccccgaagtcgcgaatgtggccaaattcctctgccgccaatcctcaggcgaaaactgcgacgtagtagttaataccctgggcaaaagagctccggctttcgaaggtcggatcttactcaacccacaggataaggatggctcattcagcgttgtgataacaggactgcggaaggaggatgccggcaggtatctatgtggggcgcactccgatgggcagctgcaggagggcagcccaatccaggcctggcagttgttcgttaatgaggagtcgaccatcccccggtcaccgactgtcgtgaaaggagttgcaggcggaagcgttgcagtgctctgcccctataacaggaaagaatcaaagagcatcaaatactggtgtctgtgggagggtgcccagaacgggcggtgtccactgcttgtggatagcgaaggctgggtcaaggcgcaatacgagggacgtctctccttgcttgaggagcctggaaacggcaccttcactgtgattctaaatcagcttacttcccgcgatgccggtttctactggtgtctaactaacggcgacacactttggcggaccaccgtagagattaagattatagagggggagccaaatctcaaagtgcccggtaacgtcacagccgtgctgggtgaaacgctgaaggtgccctgtcatttcccatgcaagttcagtagttatgaaaaatattggtgtaaatggaacaatacagggtgccaagcacttccctcacaagacgaggggccatcaaaagcctttgtgaattgtgacgagaactcccgactggtgtctctgactttgaatctggtcacacgggcggacgagggatggtactggtgtggtgttaagcaggggcatttctatggagagaccgccgcagtgtatgttgcggttgaagaaaggaaggctgccggctcaagggatgttagcctggccaaagcagatgcagcccccgacgagaaggtgctcgacagtggattccgagagatcgagaacaaggccatccaggacccccgactatttgcagaggaaaaagctgtcgctgacacaagagaccaggcagacggctctcgcgcgtcagtggattctggatctagcgaggagcagggtgggtccagccgagcgcttgtgagtactctggtgccgctgggcctggtgctcgcagtgggcgcagtcgcagtcggggttgcaagggcccgccaccgaaaaaacgtagatcgtgtgagcatccgatcgtatagaacggatattagcatgagcgactttgagaattcacgagagttcggtgcgaacgacaacatgggggcgagctccataactcaggagacctccctcggtggtaaggaggagtttgtggcaacaaccgagagtaccacagagacaaaggaacctaaaaaggcaaagagaagttctaaagaggaagctgaaatggcatataaagactttctgctacagtcatccactgtagccgctgaagcccaggatggtccccaggaggcttag

SEQ ID NO: 129307 - DNA, 1596 bp, synthetic construct
  misc_feature 1..1596: note = Description of Artificial Sequence: Synthetic coding sequence
  source 1..1596: mol_type = other DNA
atggacgggatagtccccgacattgcggtggggacaaaacgcggaagtgatgagctgttcagcacttgcgtaactaatggtccattcattatgtctagcaatagcgcgtcagcggctaatggcaacgactcaaaaaaatttaagggtgattctcgatcagccggtgtcccctcaagagtcatccacatccggaaattaccaatagatgttactgaaggcgaggtgattagcctgggtctgccattcgggaaggtcacaaatctgctcatgctcaagggtaaaaaccaggcatttattgagatgaacacagaagaggccgctaacaccatggtgaactattacactagtgtaacgccagtgttgcgcgggcagcctatttacatccagttctctaaccacaaagaactgaagaccgatagcagccctaatcaggcccgagcacaagccgcactgcaagccgtgaactccgtgcaaagtggcaatctggcgctggccgccagcgcagctgcagtcgacgctgggatggcaatggcaggtcaaagtcccgtgctaaggatcatagtcgaaaacttgttctatccggttacgttagatgttttgcatcagatcttcagcaagttcgggaccgtgctgaaaataataaccttcaccaagaataaccagttccaggccctgctccagtacgcagacccagtgtctgctcagcatgcaaagctgagcctggacgggcaaaatatttataatgcatgctgcacactgcgcatcgacttttctaagttgacttctctgaacgtgaagtataacaatgacaaatcaagagactacacccgcccggatctgccttctggagacagccagcccagtctggatcagaccatggccgctgctttcgggttaagtgtgccaaacgtgcatggcgctctggcgcctttggcgatcccgtctgccgcagccgcggctgctgctgcaggcagaattgcaatccccgggttggctggtgcgggaaactctgtcctactcgtgtctaacctaaatcctgaacgggttacgccacagagcctgttcattctctttggagtgtatggagatgtccaacgggtgaaaatccttttcaataaaaaggaaaatgcactcgtgcagatggccgacggcaatcaggcccaattagccatgagccatcttaacggtcataaactccatggaaaacctatcagaatcactctgagcaaacaccagaatgtgcagcttcctagggagggtcaagaagaccagggcttaacaaaagattatgggaactctccattacacaggtttaagaagccagggtcaaagaattttcagaatatctttcctccgtccgctaccctgcatttatcaaacatcccaccttccgtttccgaggaagatttgaaggtgttgttcagttcgaacggaggagtggtgaagggtttcaagttttttcagaaggatagaaagatggccctcatacagatgggctctgttgaggaggctgtacaggcactcattgaccttcataaccacgacctgggtgaaaatcaccacttgcgagttagcttttccaaatctaccatctag

SEQ ID NO: 129308 - DNA, 594 bp, synthetic construct
  misc_feature 1..594: note = Description of Artificial Sequence: Synthetic coding sequence
  source 1..594: mol_type = other DNA
atggacggaatagtacctgatattgccgtgggcacgaagagggttacaccacagtcattgttcatcctttttggggtgtacggggatgtgcagcgcgtcaaaatcctattcaataagaaagaaaacgctctcgttcaaatggccgacgggaatcaagcccagctcgccatgtctcacctcaatggtcacaagctgcacggtaaacctattagaatcacattatcaaagcatcagaatgtacagctgccaagagagggccaagaggatcagggtctcacgaaagactatgggaatagcccactccatagatttaaaaaaccgggctctaagaattttcagaacatcttccccccctctgctacccttcatctgtccaacattcccccgagtgtgtcagaggaggacctgaaagtcctcttttctagcaatggcggcgtggtcaagggttttaaattcttccagaaggatcgcaaaatggccctgattcagatggggagcgttgaagaagctgttcaggctctgatcgacttgcataaccacgacttgggcgagaatcaccacctgagagtgtcctttagtaaaagcacgatttag

SEQ ID NO: 129309 - DNA, 1674 bp, synthetic construct
  misc_feature 1..1674: note = Description of Artificial Sequence: Synthetic coding sequence
  source 1..1674: mol_type = other DNA
atggacggaatcgttccagacattgctgttggcacgaagagaggcagcgacgaactgttctccacttgtgtgaccaatgggcccttcattatgtccagtaactccgcctcggctgccaatggaaatgatagtaaaaagttcaagggggatagccgcagcgccggcgttccatctcgtgtgatccatatcagaaagcttcccatcgatgtgactgaaggtgaagtgatctctcttggcctgcccttcggaaaggtgactaatttgctcatgctgaagggtaagaaccaggccttcatagaaatgaataccgaagaggccgccaacacaatggttaattattataccagtgtgactcccgtgctgcgggggcagccaatttatatccagttttctaaccataaagaactgaaaacagatagttctcccaaccaagcacgggcgcaggccgcactgcaggccgtgaactccgttcagtcagggaatctggcgttagcagcttcagccgccgcggtagacgctggcatggccatggccggccagagccccgtcttacggataattgttgaaaatctgttttaccccgtgactctcgacgtgctgcaccagatcttctccaaatttgggacggtccttaagattattacttttactaaaaataatcagtttcaggcattactgcagtacgctgaccctgtatccgcacaacatgcaaaactgtcactcgacggccagaatatttataatgcttgttgcacgctccgtattgacttctctaaactgaccagcctcaacgtgaagtataacaatgataagtcccgcgactatacacggcccgatttgccaagtggagattcacagcccagcctggatcagacgatggcagcagccttcggagcccccggcattattagtgccagcccttacgctggggctggtttccccccaacatttgccattcctcaagctgctgggttgtctgtgccaaacgttcatggggcccttgcccccttggccatcccctccgccgccgccgctgcagccgccgctgggcgcattgccatcccaggactggccggagccggtaattccgtgctgctcgtctccaacctgaatcccgaaagagtaacaccgcaatccctgttcatcctttttggggtatacggcgacgtccagcgagttaaaatcctctttaacaaaaaagagaatgccctggtgcagatggccgatggtaatcaggcccagctcgcaatgtctcacctgaatggacacaaactgcacggcaaaccaatcaggatcaccctgagcaaacaccagaatgtgcagttgccaagggaggggcaggaggaccagggccttaccaaggactatggtaattcaccactccaccggtttaagaagccggggtctaagaactttcaaaacattttccctccttccgctacattgcatctctcgaacattccacccagcgtgtccgaggaggacttaaaagttttgttcagctctaacggaggagtggtgaagggattcaagttctttcaaaaagataggaaaatggcactgatccaaatgggtagcgtggaggaagctgtacaagcgctgatcgacctgcacaaccacgacctgggtgaaaaccaccatctaagggtttctttcagcaagtctacaatctag

SEQ ID NO: 129310 - DNA, 1653 bp, synthetic construct
  misc_feature 1..1653: note = Description of Artificial Sequence: Synthetic coding sequence
  source 1..1653: mol_type = other DNA
atggacggcatcgtgcccgacatcgcagttgggaccaagagaggttccgacgagttgtttagcacctgcgtcaccaacgggccattcattatgtctagcaatagcgcttccgcagccaatggcaatgacagtaagaagttcaaaggagactctcggagcgccggcgtaccttcgcgcgtcattcatattaggaagctcccaattgatgtcaccgaaggagaagtgatctcattgggcctgccgttcggtaaagtcacgaatctcctaatgctcaagggcaagaaccaggcgtttattgagatgaacacagaagaggcagcgaacactatggtgaactactatacgtctgtaactccagtactgcggggccagccaatctacattcagttttctaaccacaaggagctgaagactgactcgagtcctaaccaagcccgggcccaagccgcactccaagcagttaacagcgtacagtctggcaacctggctctcgccgccagtgccgctgcagttgacgccgggatggctatggcaggacagtcccccgtattacggattattgtagaaaacctcttttacccagttactttagatgtgctgcaccagatatttagtaaatttggcactgtgctgaagattataacttttacaaagaataatcaatttcaggccctgctgcagtatgctgaccccgtttcagcccagcacgcaaaactgtcgctcgacggacaaaatatctacaacgcatgctgtactctgagaattgacttcagtaaactgacctcactcaatgtcaaatataataacgacaaatctcgtgattatacccgaccagacctgccaagcggagacagccagccaagcctagaccagaccatggcagccgctttcgcctcgccttatgccggcgcaggattcccaccaaccttcgcaatccctcaggccgccggcctgtcagtgcccaacgtgcatggagcactggctcccctggccatcccctctgcagccgccgcagccgccgcggccggacgaattgccatcccaggattagctggggccgggaactccgtcctactggtttctaacctgaatcccgagagggtaaccccccagtccctcttcattttgttcggagtgtatggcgatgtccagcgggtgaaaatcttgttcaacaagaaagagaatgcccttgtgcagatggctgacggcaatcaagcacaactcgcaatgtcccacctcaacggacacaagttacacggtaaacccattcgcattacattgagcaagcatcaaaatgtccagctgccacgcgaagggcaggaggaccaggggctgacaaaggactacgggaatagccctctgcacaggtttaaaaaacccggatctaagaacttccagaatatcttccccccaagcgcaaccttgcaccttagcaacatccctcctagtgtgtctgaggaagatcttaaagtgctattctcctcaaacggcggagtggtgaaagggttcaaattttttcagaaggacagaaaaatggcactgattcagatggggagcgtcgaagaggcagtccaggctctgatcgacctgcataaccacgaccttggtgagaaccaccacttgagggtgagcttttcaaaaagtacaatctag

SEQ ID NO: 129311 - DNA, 1599 bp, synthetic construct
  misc_feature 1..1599: note = Description of Artificial Sequence: Synthetic coding sequence
  source 1..1599: mol_type = other DNA
atggatggaatcgtgacagaggtggctgtcggagtgaaaagagggtccgacgagcttctcagtgggagcgtgctgagtagccctaattccaatatgtcttccatggtggtgacggccaatggcaatgacagcaagaagtttaagggggaggacaagatggacggcgccccatcaagggtgctgcacatccggaaactgcccggtgaagtgactgagactgaagtcatagccctggggctccccttcggaaaggtgacaaacatattgatgttaaagggcaagaaccaggccttcctcgagctggctaccgaagaagctgccatcactatggtgaactactactctgccgtgactccccatctgcgaaatcagcccatatatattcaatactctaatcacaaggagcttaagacagacaataccctcaaccagagggctcaggctgtgttgcaggccgttaccgctgtgcagactgcaaacacacccttgtcaggtacaaccgtgtcggaatcagccgttactcccgcacagagtcctgtgctgagaatcattattgacaacatgtattatccggtcacactggatgtgctacatcagattttctctaagtttggggctgtgctgaaaattatcacttttacaaagaataaccaattccaggcactgctccaatacggtgatccggtaaatgcacaacaggccaaacttgctctggacggtcagaacatttacaacgcttgttgcacgctcagaatagacttttcaaagctggtgaatcttaatgtgaaatacaacaacgacaaaagccgggactacacacgtcctgacctgccctctggggacggccagccagctctagacccagccatcgcagccgcttttgcaaaggagacgagcctgctggctgttccaggtgcactgtcccctttagccatcccaaacgccgccgcagcggctgctgcggcagccgcgggcagggtaggtatgcccggggtctccgcaggtggaaataccgtcttgttagtctccaacttgaacgaggaaatggtgaccccacaatctctgttcactctgttcggcgtgtacggcgatgtgcaacgggtaaagattctctataataagaaggatagcgctctcatccagatggcagacggcaaccagagccagctcgccatgaatcacctcaatgggcagaagatgtatggcaagattattcgagtcactctgagcaagcaccagactgtgcagttacctagagaggggctggatgaccagggactgacgaaggacttcggtaattctcctttacatcggttcaagaagcccggaagtaagaatttccagaatatcttcccacccagtgccaccctgcacctgagtaacattcctccatccgttgctgaggaagacctgcgcacactattcgccaacaccggggggactgttaaagcctttaagttttttcagagagaccataaaatggccttgctgcagatggcaaccgttgaggaagctattcaagccctgatagacctgcacaactacaacctaggcgaaaaccaccacctgagagtcagctttagcaagagtaccatctag

SEQ ID NO: 129312 - DNA, 1614 bp, synthetic construct
  misc_feature 1..1614: note = Description of Artificial Sequence: Synthetic coding sequence
  source 1..1614: mol_type = other DNA
atggatggtatcgtgacggaggttgctgtcggtgtgaagcggggaagcgatgaactgttaagcgggagtgtcttgtccagtccgaactcaaacatgtcatctatggtggtaacagcaaatgggaacgacagcaaaaagtttaaaggagaagataagatggatggagccccatccagagtcctgcacatcagaaaactgccaggggaagttactgagaccgaagtcattgcactcggactgcctttcggcaaggtgacaaatatacttatgctcaaaggcaagaatcaggcattcctcgaattagcgacggaagaagctgccatcacaatggttaactattacagcgccgtgactcctcatcttcggaatcagccaatctatattcagtactccaatcacaaagagctgaaaaccgacaacacgctcaaccagcgtgcacaggctgtgctgcaggcagtgaccgcggtacagaccgcaaatacccccttgtccggcacgaccgttagtgagtctgccgtcacaccagcacagtccccggtcctgcgaattataattgacaacatgtattatcccgttactttggacgtcctccatcagatattctctaaattcggtgccgtcttgaagatcatcaccttcacgaagaacaaccagtttcaggcactgctgcagtacggagatcctgtcaacgcgcaacaggcaaagctggccctggacggccagaatatatacaatgcctgctgcacattgagaatcgacttctccaagctggtgaacctcaatgtcaagtataataatgataagtctcgcgattacacacgcccagacttgccctctggcgacggccagcccgcactcgaccccgctatcgcagctgcgtttgccaaagagacaagcctgctggggctacccgttgcagccgtgccaggtgcactgagtccattggcaattccaaatgcagcagccgcggcggccgcagctgccgccggaagggtgggcatgccaggcgtcagcgctggtggcaacacggtattactggtgtccaatctgaatgaggaaatggtcacacctcagagtctgtttacactgttcggagtttacggcgacgtccagagagttaagatactttataacaaaaaagactcggccttaatccaaatggctgatgggaaccaatcccaactggcaatgaaccatctgaacggccagaagatgtatgggaagatcattagagtcaccctgtccaaacatcagaccgtccagctccctagggaagggcttgacgaccagggactcaccaaagattttgggaattctcccttacatcgtttcaaaaagcctggctctaaaaacttccaaaatatcttcccaccttccgccactctgcacctgtccaatatccccccttctgtggctgaggaggacctgagaaccttgttcgccaacacaggtggaaccgtcaaggccttcaagttcttccagagggaccataagatggccctcctccagatggctactgttgaagaggcaatacaggctttgattgacttacataattataacctgggtgaaaatcaccatctccgggtgtcattttccaaaagcaccatatag

SEQ ID NO: 129313 - DNA, 1611 bp, synthetic construct
  misc_feature 1..1611: note = Description of Artificial Sequence: Synthetic coding sequence
  source 1..1611: mol_type = other DNA
atggatggaattgtgactgaagtggcggtgggtgtgaaacgggggtctgacgaattgctaagtggcagtgtgctatcctcacctaactccaacatgtcctctatggtcgttacagctaatggtaatgactcaaagaagtttaagggggaagacaagatggacggagccccttcccgagtcctccatatacggaagctgccaggcgaggtgaccgaaacggaggtcattgcccttggccttccctttggcaaggtgacaaacattcttatgctgaaaggcaaaaaccaggcgttcctggaactggccaccgaggaggccgctattaccatggtgaattactattctgctgtgactccacacctgagaaaccagccaatctatattcagtactccaaccacaaggagctgaagaccgacaataccctcaatcagcgggcccaggccgtgcttcaggcagtgactgcggtccaaactgctaatacgcctttgtcaggaacaaccgtcagcgaaagtgctgtgacacccgcacaaagccctgtccttcgtattatcattgacaacatgtactaccctgtgaccctagatgtgctccatcagatattctctaaatttggcgcagtattaaagatcatcacttttactaagaataaccagtttcaagccttgctgcagtatggtgatcctgttaatgcccagcaggccaagcttgccctcgatggccaaaacatttacaacgcgtgttgtacgttgaggatcgacttctccaagctggtcaatctgaacgttaaatacaacaacgacaaatcccgcgattatactaggccagacctgcccagtggtgatggacagcctgctctggacccggctatcgccgcggcgtttgctaaggaaacgagcctcctaggcctgccagtggccgcagttccaggggcactctcccctctggcgatacccaacgccgccgccgcagccgctgctgcagcggctggcagagttggaatgcccggcgtgagtgcaggaggcaacactgtgttactggtcagcaacctaaacgaagagatggtgacaccacagtcactgtttacactattcggcgtgtatggagatgttcagcgggtaaagatcttgtacaacaaaaaggactcagccctcattcagatggccgacggcaatcaatcacagttagccatgaaccacctcaatggacaaaaaatgtatggaaaaataatccgcgtcacattgagtaaacaccaaaccgttcagttgccgcgtgaaggtctggacgatcagggcctcaccaaggattttgggaattctccactgcaccggtttaaaaaacccggcagtaagaattttcagaacatctttcctccatcagccaccttgcatttgagcaatatcccgccatctgtggccgaggaggacttgaggacgctgtttgcaaatacgggcggaaccgtgaaagcattcaaattctttcaggatcacaagatggcactattgcagatggccaccgtggaggaagctatccaggcccttattgacctgcacaattacaatctgggggagaatcaccaccttagagtgtcctttagcaagagtacaatttag

SEQ ID NO: 129314 - DNA, 1056 bp, synthetic construct
  misc_feature 1..1056: note = Description of Artificial Sequence: Synthetic coding sequence
  source 1..1056: mol_type = other DNA
gggatgaagcgcggctcggatgaattactttctggttcggtgttgagctcgcccaatagcaatatgtcttctatggtagtgaccgccaacgggaatgactccaagaaattcaagggcgaggacaagatggacggcgcccccagtagggtactccatatcagaaagcttccaggtgaggtgactgaaaccgaagtgattgcactgggactacctttcggcaaggtgacaaacatcctgatgttaaaggggaaaaaccaagcgttcctggaactggctacagaagaggcagccatcaccatggtaaattactactccgccgtgacacctcacctgcgaaatcagccaatctacattcagtacagcaaccacaaggaactcaagaccgataacacgttaaaccagagggcccaagccgtgctccaggccgttacagcagtacagacagccaacacccctctctctggaacaacagtgtcggagagcgcagtaacgcccgcccagtcacccgtgctgcgcattatcatagataatatgtattaccccgtgaccctggacgtcctgcaccagatttttagtaaatttggagctgtcttgaaaataatcacattcacaaaaaacaaccaatttcaggcactcctccaatacggagatccagtgaatgctcagcaagcaaagctcgccctggacggacagaacatctataacgcctgctgtacccttcggattgactttagcaaactggtcaatctcaacgtaaagtacaacaatgacaaatccagggattatacacgacctgacctaccatctggagatggacagccagctcttgatcctgccatcgctgccgcttttgcaaaggaaactagccttttaggcctgccagtcgcagcagtgccaggggccctttcccccctcgccatcccaaacgccgcagctgccgccgctgcagcagccgctggacgcgtggggatgccaggggtgagtgcagggggaaatacggtgctattggtgagcaacctcaacgaagaggttttcatggagatgtgttctgtctag

SEQ ID NO: 129315 - DNA, 1647 bp, synthetic construct
  misc_feature 1..1647: note = Description of Artificial Sequence: Synthetic coding sequence
  source 1..1647: mol_type = other DNA
atgtggtccaatctcacatttagcttctttggcctgcggacgaaagctaaaaagtatgtcactgtgaataacagggggagcgatgaactgttgagcggctcagttttgagttcccctaatagcaatatgtcctctatggtcgttaccgcgaatgggaacgatagcaagaagtttaagggggaggacaaaatggatggcgcaccttcacgcgtgctccacattcgcaagctacccggcgaggtcacagaaacagaagtgattgcattaggtttgcccttcggcaaggtgaccaacatcctgatgctaaaaggaaagaaccaagcctttctcgaactggctaccgaggaagcagccataacaatggtgaattactattccgccgtgacgcctcacctccggaatcagccgatttatattcagtactccaaccacaaagagctgaagaccgacaataccttgaatcaacgtgctcaggctgtcctccaggccgtgaccgcggtgcagaccgccaatacaccactgagcgggactacagtgtcggaatcggccgtgaccccagcccagagcccagtcctgcgcatcattattgacaatatgtactatcccgtcactctggacgtccttcatcagatctttagcaagtttggtgctgtgcttaagatcattacgttcaccaagaataatcagttccaagccttgttacagtacggggatcccgtgaatgcacagcaagccaagctggctcttgatgggcagaatatctataatgcctgctgcactttgaggatagatttttctaagctcgtgaatctgaatgtgaaatacaataacgataaaagcagggactacaccaggcctgacctccctagcggtgacggacagcctgccctggatcccgcgatagccgcagcttttgctaaagagacaagcctgctcggtctcccggtcgctgccgtgcccggagcactgtctcccctggcaatacccaatgcagccgctgcggcggccgcagccgcggcaggtcgtgtcggcatgccgggagtgagcgcggggggaaatacagtgctgctcgtgtccaacctcaacgaggagatggttacgccacagtctcttttcacacttttcggcgtctatggtgacgtccaaagggtgaagattttgtacaataagaaagactccgccctgatccagatggctgatgggaaccagtcccagctcgccatgaaccacctaaacggacaaaaaatgtacggaaaaataatccgggtcaccctgtccaaacatcagacagtccagctccctcgcgaggggctcgacgaccagggtctgaccaaggattttgggaattcccccctgcatcggttcaaaaaaccggggtccaaaaacttccaaaatatctttccgccgagcgcaacacttcacctgtccaatatccccccctctgtcgcagaggaagacctcagaacactttttgctaataccggtggaaccgtgaaagcgttcaaatttttccaacgggatcacaagatggccctcctgcagatggcaaccgtggaggaagctatacaggcgctgatcgacctccacaactataatttgggggagaatcaccacctgcgcgtgagtttctccaaaagtactatctag

SEQ ID NO: 129316 - DNA, 1596 bp, synthetic construct
  misc_feature 1..1596: note = Description of Artificial Sequence: Synthetic coding sequence
  source 1..1596: mol_type = other DNA
atggatggaatagtgaccgaggttgcggttggcgttaagcgggggtctgatgaactgttatccgggagtgtgctgagtagcccgaacagtaacatgtcctctatggtagtcacggctaacggcaatgacagtaagaaattcaagggagaggacaagatggacggcgcgccctctagggtcttacacatccggaaactccctggagaagttacagagacagaggtcatcgccctgggactgcccttcgggaaggtcaccaacattctcatgctgaaggggaagaatcaggcatttcttgaactcgccaccgaggaagctgccatcaccatggtgaattactattcggccgtgacgcctcacctgaggaaccagccgatctacatccagtacagtaatcataaggaattaaagacagataacaccctgaaccagagggcacaagctgtcctgcaggccgtaaccgccgttcagactgccaacactcccctgtccggaaccacagttagcgaaagtgctgtcacaccagcccagtcccccgtgttacgcatcataatcgataacatgtattaccccgttaccctggatgtccttcaccaaatatttagcaagttcggggcagtgctgaagattatcactttcaccaagaacaatcaattccaagcacttctccaatatggcgaccccgtgaacgcacagcaggcaaaactggctctggatggacagaacatttataatgcatgctgcaccctaagaatagacttctcaaaactcgtgaacctcaatgttaaatacaataacgacaagtccagagactacacgcggccagacctcccttctggcgatggacagccagcactcgaccccgctatagctgccgcttttgccaaggagacatctctccttgcagtgcctggcgccctgtccccactggcgatccctaatgcggccgctgctgcggccgccgctgctgccggtagagtcggtatgcctggcgttagcgcaggaggtaatacggtcctgctggtgagcaatctgaacgaggaaatggtgactccacagtcactgtttacccttttcggagtgtatggagacgtccagagggtgaaaattctttataacaaaaaagacagcgctctcattcaaatggccgacggtaatcagtcccagctagccatgaatcatctaaacgggcagaagatgtatggcaagatcattagggtgacactaagtaaacatcagacagtgcagctgcctagggaaggcctcgacgaccaggggctgaccaaggatttcggaaatagtccgctacaccgttttaagaagcccggctccaagaatttccagaacatcttcccgccaagtgcaaccctccatctctcaaacatacccccttccgtcgccgaagaggacctgagaaccctgtttgccaacacaggcgggaccgtaaaggctttcaagttctttcaggatcataaaatggctctgcttcagatggccaccgtggaagaagcaattcaggccctgatcgatttgcacaactacaacctgggagaaaaccaccacttaagggtctccttcagcaagtctaccatttag

SEQ ID NO: 129317 - DNA, 978 bp, synthetic construct
  misc_feature 1..978: note = Description of Artificial Sequence: Synthetic coding sequence
  source 1..978: mol_type = other DNA
atgagctcaatggtcgtgaccgccaacggcaatgattccaaaaaatttaaaggggaggacaagatggatggcgctccttcccgagtgctgcacattagaaagcttccgggcgaggtaacagagactgaagtgatcgccctcggcctcccgttcggtaaagtgaccaacatccttatgctgaagggcaagaaccaggcattccttgagctagccactgaggaggccgccattaccatggtgaactactattctgccgtgactcctcacttgaggaatcaacccatttatatacaatattctaaccataaggagctcaagactgacaatactctaaaccagcgagcccaagccgtcctccaagccgttacggccgtccagaccgcaaacactccattgtctggtacaaccgtgtccgagagcgctgttacaccagcgcagtctccagttctgcgaattataatcgataatatgtactaccccgtcactctcgacgtcctgcaccagatattctccaagtttggcgccgttttaaagatcatcactttcaccaaaaacaaccagtttcaggcattgctccagtacggcgacccggtaaatgcacagcaggctaagcttgctctggacggccaaaacatctataatgcttgctgcacccttcggattgattttagtaaactggtcaatctcaacgtcaagtataataatgataagagcagggactacactagacctgatctgccctctggggatggacagccggcactggacccagcaatcgctgctgcttttgcaaaagaaactagccttctcgcagtacccggtgctctctctccactcgccatcccaaacgccgcagcagccgctgctgccgctgctgccgggcgcgtgggtatgcctggagtctcagccggcggaaatactgtccttctggtctctaacctgaacgaggaggtttttatggaaatgtgctctgtgtag

SEQ ID NO: 129318 - DNA, 615 bp, synthetic construct
  misc_feature 1..615: note = Description of Artificial Sequence: Synthetic coding sequence
  source 1..615: mol_type = other DNA
atgcctggggtttccgccggcggaaacaccgtcctccttgtatcaaatctcaatgaagaaatggtgactccccagtctttattcacgctttttggcgtctatggggacgtgcagcgcgtgaaaatcttgtacaataagaaggactcagctttgattcagatggctgacggcaatcagtcccagcttgcaatgaatcacctcaacggtcaaaagatgtacggcaaaattatcagggttactctgagcaagcaccaaaccgttcagctgccgcgtgaggggttggatgatcagggtctaaccaaggactttggcaattccccgctccatcgtttcaagaaacccggttctaaaaacttccagaacatttttccccccagcgcaactctgcatctgagtaatattcccccttccgtggcagaagaagacctccggacactgtttgcgaacacaggcgggactgttaaggcatttaaattcttccagcgcgatcacaagatggcgctattacaaatggcgaccgtcgaagaggccatccaggcgttgatcgacctgcacaactacaatctgggtgagaatcaccaccttagggtcagcttcagcaagagtaccatctag

SEQ ID NO: 129319 - DNA, 348 bp, synthetic construct
  misc_feature 1..348: note = Description of Artificial Sequence: Synthetic coding sequence
  source 1..348: mol_type = other DNA
atggtttgcagccccgtgactctgagaatcgccccccccgataggcggttctctaggtctgctatcccagagcaaatcatttcctccaccttgtcgtcgccatcttctaacgctcccgatccttgcgccaaggaaacagtgttgagtgctcttaaggagaagaagaaaaagaggaccgtggaggaagaagaccaaatattcttggatggccaagagaataagcggtcctgcctagtggacggccttacagatgcttcatctgcctttaaagtgccgagacccggacctgacaccttgcagtttactgtggatgtcttccactttgctaacgactcccggaacatgtag

SEQ ID NO: 129320 - DNA, 564 bp, synthetic construct
  misc_feature 1..564: note = Description of Artificial Sequence: Synthetic coding sequence
  source 1..564: mol_type = other DNA
atggtttgctcgcccgtcaccctgcgtatagcaccaccagaccggcggttcagtcgcagtgctattccagagcagataatttcaagcacgctctcaagccctagtagcaatgccccagatccatgcgctaaggagacagtgttaagcgcactgaaggagaagaagaaaaagagaacagtagaagaggaggaccaaatttttctagatggccaggaaaacaagagaagctgcctggtcgatggacttaccgacgcgagctccgccttcaaagtcccccgtccaggccctgataccctacagtttaccgtggacgtttttcacttcgccaatgacagccggaacatgatttacattacctgccatctgaaagtcactctagccgagcaggatcctgatgaactgaacaaggcttgtagttttagtaaacctagcaattcctggttccctgtagaaggccttgcagacatttgtcagtgttgtaacaaaggggactgcggcaccccctcacacagccggaggcagcccagggtagtcagtcagtggtcgacttctgccagcctttag

SEQ ID NO: 129321 - DNA, 1095 bp, synthetic construct
  misc_feature 1..1095: note = Description of Artificial Sequence: Synthetic coding sequence
  source 1..1095: mol_type = other DNA
atgtctgctaattcatccagagtggggcaactgctgctgcagggctccgcttgtatcagatggaaacaggacgttgagggggctgtgtatcatctcgctaattgtctgctactgctaggatttatgggaggaagcggagtgtacggatgtttctacttgtttggcttcctcagtgccggatatctttgttgcgtcctttgggggtggttttcagcatgtggactggacattgttctttggtccttcctgctcgcagtcgtatgtctccttcaattagcccacctggtgtatagactgagagaggatacgttgcctgaagagtttgatctgctttataagaccctgtgtcttcccttgcaggtcccactccagacctataaggagattgtgcattgctgtgaggaacaggtcctgactctggctaccgaacagacatacgctgttgagggagaaactcctatcaatcgacttagtctgctcctgagtggccgcgtaagggtctctcaagacggccagtttcttcattacatcttcccttatcaattcatggattcgcctgagtgggaaagcttacagccttcagaagagggtgtgttccaggtgactttaaccgccgaaacctcatgctcctacatctcttggccgcgtaaatccctgcatctcctgctgaccaaggaacgctatatttcctgcctcttttcagccctcctcggctacgatatcagcgagaaactttatactctgaatgataagcttttcgccaaatttggcctgcggttcgacatcagactgccttcactttatcacgttcttgggccaaccgccgcggacgctggtcctgagtctgaaaaaggcgatgaggaggtctgtgagccagctgtttcacctcctcaggcaaccccgacctccctgcaacagaccccgccatgcagtacccctcccgccaccaccaattttcctgctccccccactcgcgcccgcctctcacgccccgattctggcatactggccagccgaatccctctacagtcgtacagccaggtcatctcaagaggacaagcgccactcgcgcctactcataccccggagttatag

SEQ ID NO: 129322 - DNA, 1083 bp, synthetic construct
  misc_feature 1..1083: note = Description of Artificial Sequence: Synthetic coding sequence
  source 1..1083: mol_type = other DNA
atgagtgctaactcttcaagggtgggccagctgttgctgcagggcagcgcgtgcatacggtggaagcaggacgttgagggcgccgtctatcacttggctaattgccttcttctgctcggctttatgggcgggagcggggtctatggatgcttttatcttttcgggttcctgtctgccggatacctctgctgcgtgctatgggggtggttcagtgcctgtggactggacattgtgttatggagcttcctattggccgtcgtctgcctgctccagttggctcatcttgtctaccgcctccgggaggatactcttccagaggagtttgacctgctgtataaaactctgtgcctccctttgcaagtcccccttcagacctacaaagaaatcgtgcattgctgtgaggaacaggtacttactttggccactgaacaaacctacgccgtggagggtgaaacccccatcaatcggctgagcttactgctgtcgggtcgcgttcgtgtgtcccaggatggacagtttttgcactacattttcccttatcagttcatggattctccagaatgggaatccctacagccatcagaggagggcgtatttcaagtaaccttgacagcagaaacctcctgctcctacatttcctggccgcggaagagcctgcacctgttactcactaaagaacgatatattagttgtctattctctgccttgctgggctatgatattagcgagaaactgtacaccttaaatgataaactgttcgcaaaattcggtctgcggtttgacatccgtctgccatctctgtaccatgttcttggtcctacagcggccgatgcaggacccgaaagcgagaagggcgacgaagaagtttgcgaacccgctgttagccccccccaagctacccctacatcgctccagcagacacctccttgtagtactcctccggcaaccaccaatttccccgctccccccaccagggccaggctgtcaaggccggacagcggcatcctggagattgacgacttcccgagttactttcatcagtttgggtttagcggtaaagtggctgccggaagaataccttag

SEQ ID NO: 129323 - DNA, 1083 bp, synthetic construct
  misc_feature 1..1083: note = Description of Artificial Sequence: Synthetic coding sequence
  source 1..1083: mol_type = other DNA
atgagcgctaactccagtagggtgggacagctgctgttgcaggggtctgcatgtatcagatggaagcaggatgtggagggggcagtctaccaccttgccaactgcctgctgctcctcggctttatgggggggtcaggcgtgtatggatgtttttacctttttggcttcctgagcgctggctatttgtgctgtgtcctgtgggggtggttcagtgcatgtggactggatatcgttctctggagcttccttcttgcagttgtatgcctactgcagctggcgcacctcgtctacagactgcgcgaagataccttgcctgaagaattcgacctcctgtataaaacactctgcctgcccctgcaagtgccccttcaaacctataaagagatcgtacactgctgcgaggaacaagtcttaacactggcaactgagcagacctatgcagtggaaggcgaaacaccaattaaccgccttagtcttctcttgagtggacgcgtcagggtttcccaagacgggcagtttctacattatatttttccttatcagttcatggacagcccggaatgggaaagtctgcaaccgtctgaggaaggggttttccaggtaaccctgactgccgagaccagctgtagttacatttcctggccaaggaagagcttgcatctgctgctgacgaaagagagatacatcagttgcctgttcagtgccctgctgggatatgacattagcgaaaagctgtacactctaaacgataagctgtttgccaagttcggattgcggttcgatattcgcctgccttccctgtaccatgtgctaggcccgacggccgccgacgccggccccgagtcagagaagggcgacgaggaagtgtgcgagccagcggtgagtcctcctcaagctacgccaacctcgctacagcagaccccaccttgctctactccacccgcgactactaacttcccagcgcctcctacccgggcaaggctgtcccgacctgactccggaatcctagaaatcgatgatttcccttcctactttcatcagtttggctttagcgggaaggtggcagccggcaggattccatag

SEQ ID NO: 129324 - DNA, 876 bp, synthetic construct
  misc_feature 1..876: note = Description of Artificial Sequence: Synthetic coding sequence
  source 1..876: mol_type = other DNA
atggagagaaactccagcttgtggaagaatctgattgacgaacaccctgtgtgtactacttggaaacaggaagcagagggtgcgatttaccacctggccagcattctgttcgttgtaggctttatgggtggctccggcttttttggccttttatacgtcttcagcctgctcggcctcggattcctgtgctctgcggtctgggcttgggtcgacgtatgcgcggctgacatcttcagctggaatttcgtgctttttgttatatgcttcatgcagttcgtgcatattgcgtatcaggtgagatccattacttttgcgcgggagtttcaggtgttatacagctccctgtttcagccgttaggtatctccttgccagtgttccgcaccatagctctgagttctgaggtggtgaccctggaaaaggagcattgctacgccatgcagggcaagacctcgatcgataagctgtcactcctcgtatccgggcggatacgggtaacagtagatggggaattcctgcactatatctttccgttgcagtttctcgactctccagagtgggacagtctgagaccaacagaggagggcatttttcaggtgactctgaccgccgaaaccgattgcagatacgtgtcatggcgaagaaagaagctgtatttactgtttgctcagcacaggtacatctctcgccttttctccgtgttgatcggaagcgatatagcagataagctgtacgccttgaacgaccgggtgtacatagggaaaaggtaccattacgacatccgtctccctaacttctatcaaatgtcgacgcctgagattagaaggagcccattgactcagcactttcagaatagtcggcgatattgtgacaagtag

SEQ ID NO: 129325 - DNA, 306 bp, synthetic construct
  misc_feature 1..306: note = Description of Artificial Sequence: Synthetic coding sequence
  source 1..306: mol_type = other DNA
atgctcttcctatgctttgataggatccgggtaactgtagacggcgaatttctgcactatatttttcctctccagttcttggattcccctgagtgggatagcctgcgtccaactgaggaagggatttttcaggtgactctcactgcagagaccgattgccgttatgtgtcgtggagacgaaagaaactgtatctcctgtttgctcaacatcggtacattagcagactattcagcgttcttatcggatctgatatagcggataagctctatgccctgaacgaccgagtgtacatcggtaaacggtag

SEQ ID NO: 129326 - DNA, 1386 bp, synthetic construct
  misc_feature 1..1386: note = Description of Artificial Sequence: Synthetic coding sequence
  source 1..1386: mol_type = other DNA
atggccaccttttccagacaggagtttttccagcagctcctgcagggctgtctgctgccaactgcgcaacaggggctggaccagatctggttgctgctggccatctgccttgcttgccggttgctatggaggttaggcctgccttcctacctgaagcatgctagcacggtcgccggaggttttttctccctgtatcacttctttcagctccacatggtatgggtcgtgctcctctctctcctgtgttacctggtgttgttcctctgccgccactcctcacaccgcggcgtcttcctttccgtcaccattttaatctatttgttaatgggcgagatgcacatggtggacaccgtgacctggcataaaatgcgtggcgcgcaaatgatagtcgcaatgaaggctgtgtccctgggctttgacctggatcggggtgaagtcggcacagtcccttccccggtggagttcatggggtacctgtacttcgtgggtactattgtgtttggaccatggatttccttccactcatacttgcaagcggtccagggaagacctttatcttgccgttggctgcagaaagtcgctcgaagcctcgccctagctcttctatgcctggtactgtctacttgtgtcggcccttatctcttcccctacttcattccgctgaatggcgatcggttgctccgcaacaagaaacgcaaagccagggggaccatggtccggtggctacgcgcctatgagtcggctgtgagcttccatttcagcaattactttgtgggctttctttctgaagctacagcgaccctcgccggagccggattcactgaagagaaggaccaccttgaatgggatcttacagtgagcaagcctctaaatgtggaactgcctcgttcaatggtggaggttgtcacatcttggaatctgccaatgagctactggttaaacaactacgtcttcaaaaacgccttacgtcttggtactttttccgcagtactggttacgtacgctgcctctgctctgctccatggctttagtttccatctggccgcagtgcttctgtccctggcatttattacatatgtggagcacgtcttacggaagcggctagccaggatattatcagcctgcgtcctctcaaagagatgcccgccagactgtagccatcaacaccggttaggtctgggggtgagggcgctgaatctgctgttcggagcacttgccatcttccatctcgcgtatttaggctcgcttttcgatgtggacgtggacgataccaccgaggagcaaggctatggtatggcctacaccgtccacaagtggtccgagttatcttgggctagtcactgggtgaccttcggctgctggattttctatcgcctaatcgggtag

SEQ ID NO: 129327 - DNA, 1368 bp, synthetic construct
  misc_feature 1..1368: note = Description of Artificial Sequence: Synthetic coding sequence
  source 1..1368: mol_type = other DNA
atggctacattttctcggcaggagttcttccagcagctgctgcaggggtgcttgctgcctacagcccagcaggggctggaccagatctggcttttgctggccatctgtctggcctgccgccttctgtggagattaggcttgccctcttatctgaaacacgcatcgacagtggcaggcgggtttttttccctatatcacttcttccagcttcatatggtctgggtcgtcctgctgagcctgctttgctacttggtgctttttctgtgtagacatagttctcatcggggggtgtttttatcagtgactattctcatctatctgctgatgggagagatgcacatggtagacaccgttacttggcataaaatgcggggcgcccagatgatcgtggccatgaaagccgtatctctcggcttcgatctcgatcgcggcgaggtgggtacagtgccttcaccggtggagtttatgggctatctgtattttgtgggaacaatcgtattcggcccttggatctcattccacagctacctgcaggctgtgcaaggaaggcctctgtcgtgtaggtggctgcaaaaagttgcccgttcattggccctcgctttgctctgcctagtgctctcaacctgcgtcggaccttacttgttcccttacttcatccctctgaatggagatcgattgctgcggaagggcacaatggtgcggtggttgcgagcctatgaaagtgctgtcagctttcatttcagtaactacttcgtgggattcctgtccgaagcaacagccaccctcgctggggccggttttaccgaggagaaagaccacctggaatgggacctcacagtcagcaagcctcttaacgttgagctcccccgcagcatggttgaagtcgtgacatcctggaatttgcccatgtcatattggctgaacaattacgtctttaaaaatgcactacgcctcggaacgttctcagccgtgttggtaacatacgcagccagtgccctccttcacggtttttccttccacctggcggcagtcctgctaagcttggcctttattacctacgtagagcatgtcctcaggaagaggctcgccaggatcctgtccgcatgcgtcctttcaaagcggtgtccccctgactgctcccatcaacatcgtcttgggctgggagtgcgagccctaaatctgttgtttggcgccctagctatcttccatctggcctacctgggaagcctgtttgacgtggacgtcgacgataccacagaggaacagggatacggcatggcctacactgtacacaaatggtccgagctaagttgggcttcacattgggtcaccttcggctgctggatcttttacaggctgattggatag

SEQ ID NO: 129328 - DNA, 1371 bp, synthetic construct
  misc_feature 1..1371: note = Description of Artificial Sequence: Synthetic coding sequence
  source 1..1371: mol_type = other DNA
atggctacatttagccgccaggaatttttccagcaactgctgcagggctgtctactgcccactgctcagcaaggactggatcagatctggcttcttctggccatctgtcttgcttgtaggttgctttggcggctgggacttcctagctatctgaagcacgcctcgacggtggccggtggtttttttagcctttaccacttttttcaactgcacatggtgtgggtcgttctgctgtcgctgctgtgctatttggttctgtttttatgtagacatagctcccataggggcgtctttctctcagtgactatactcatctatctcttgatgggcgagatgcatatggtcgataccgttacatggcacaaaatgcggggtgcgcagatgatcgtagccatgaaggccgtgagtctcggcttcgatctggaccgcggcgaggtgggcactgtgccgtcgccagtggaatttatgggttacttgtattttgtgggcactatcgtattcggcccctggatctctttccatagttatttacaggcggtacagggacggccactgagttgtaggtggctgcagaaggtggcgaggtctctggcactcgctttactgtgtctcgtgctcagcacatgcgtcgggccttatctcttcccgtattttattccgctcaatggggacaggctactgcgcaataagaaacgcaaggcgcgctggctgagggcctacgaaagcgcagtttcgtttcacttttcaaactactttgtgggatttttatctgaggcgacagcaaccctcgccggagcaggattcaccgaagaaaaagaccacctggagtgggatctgacggtgtcaaaacccttgaacgtcgagctcccacggagtatggtcgaggtggtgaccagttggaatctgcctatgtcgtattggttgaataactacgtgtttaaaaatgctctgcgattaggcactttctctgctgtattagttacttacgctgcatcggccctattgcacggtttcagctttcatttggctgcggtgttgctcagcttagcattcatcacctacgttgaacacgtgctcaggaagcggctagcccgtatcctgtctgcatgtgtgctttcgaaaaggtgccctccagactgctcccaccagcatcggttgggtctaggggtgcgtgccctgaatttgctcttcggtgctttagctatcttccacttggcctacctaggcagtctatttgacgtagacgttgacgatactacagaggagcagggctacggcatggcgtacacagtccacaaatggagtgagctctcttgggctagtcactgggttacttttggatgctggatattctaccgactgataggttag

SEQ ID NO: 129329 - DNA, 1368 bp, synthetic construct
  misc_feature 1..1368: note = Description of Artificial Sequence: Synthetic coding sequence
  source 1..1368: mol_type = other DNA
atggccacctttagtcgccaagagtttttccagcagctcctgcaaggttgcttgctccctaccgcccagcagggactggatcagatatggttactgctcgcaatttgcctggcatgcaggctgctctggagattaggactgccaagctacctcaagcacgcatccaccgttgctggggggtttttttccttgtaccacttcttccagctccatatggtgtgggtggtgcttctgagcctgctttgttatctggtgcttttcttatgtcgtcattcatcgcatagaggagtgtttctgagtgtcaccattctaatttacctgttgatgggagaaatgcacatggtggataccgtcacctggcacaaaatgcgtggtgcccagatgatagttgcaatgaaagctgtgagcctcggcttcgatttggataggggcgaagtgggcaccgtgcctagtccagtggaattcatgggatacttgtatttcgtgggcaccatcgttttcggcccctggatctctttccattcctatctgcaggctgtgcaaggccgaccactatcctgtcggtggttgcaaaaggtggcccgctctctggccctcgctcttctgtgcctggtactctccacctgcgttggaccttacctgttcccatacttcattccactcaacggtgataggttactcaggaagggaaccatggtgcggtggttaagagcctatgaatctgctgttagcttccacttttccaactattttgtcggctttcttagtgaagcaacagccactctggctggggccgggtttaccgaagaaaaggaccaccttgagtgggatttaacggtctcaaagcccctcaacgtggaattgccgcggtctatggtagaagttgtcacttcgtggaacctcccaatgagttattggcttaataactatgtgttcaaaaacgccttaaggctcggaaccttcagcgccgtgctggtgacttacgcggcatctgccctgctgcatggattttcttttcacctcgccgcggtgctgctcagcctggcctttatcacatatgtggagcatgtgctgcgaaaacggcttgcccgcattctctcagcttgtgtgttatccaaaagatgtcctcccgattgctcccatcagcacaggctgggtctgggggttcgcgctctcaatttgctttttggggcactcgccatctttcacctggcttacctgggcagccttttcgatgtggatgtggatgatactaccgaagaacaggggtatggaatggcctacacagtgcataaatggtccgagctgagttgggcatcccattgggttacgttcggttgctggattttctatcgattgatcggctag

SEQ ID NO: 129330 - DNA, 1353 bp, synthetic construct
  misc_feature 1..1353: note = Description of Artificial Sequence: Synthetic coding sequence
  source 1..1353: mol_type = other DNA
atggcaaccttttctcggcaagagtttttccaacagttgttacagggttgcctcctgccaaccgcacagcagggactagaccagatctggttacttttggctatttgcctcgcctgccgcctcctttggcgactgggcctgccctcatatcttaaacacgctagcaccgtggccggcggcttcttttcactttatcacttttttcagctgcacatggtgtgggtggtgctgctgagtctgctatgctatctggtgctgtttctgtgcaggcattccagtcaccgcggggtgttcctgagcgttacaattctgatctacctcctcatgggggagatgcatatggttgatacagtaacctggcataaaatgcgcggagcgcaaatgatcgtcgccatgaaagcagtttctcttgggtttgatttggatcgcggcgaggtgggaacagtgccaagccccgtggagttcatgggctacctgtattttgtgggaacaattgtgttcggaccttggatctcctttcattcttatctgcaggccgtgcagggccgccccctctcatgtcggtggttacagaaagtggcccggagcctggctctggccctactctgcctggtgcttagtacctgcgtgggtccatacttattcccatattttattccgctgaacggagaccgcctactacgcaaatggttgagggcctacgaaagcgctgtcagttttcactttagcaattactttgtggggttcctctctgaagctacagccacactcgctggggctgggttcacagaggagaaggaccacttagaatgggacttgaccgtctccaagcctttaaatgttgagctgcctcgctctatggttgaggtcgtgacctcttggaatctgcccatgagctattggcttaacaactatgtgtttaaaaatgcccttcgcttaggcacttttagcgctgttctggtgacatatgcagcgagcgcactcctccatggcttcagttttcacttagctgctgttctgctctctctggcatttattacgtatgttgaacatgttttaagaaagcgactggctagaatcctctctgcgtgcgtgctgtctaaacggtgccctccggactgcagtcaccagcaccgactaggccttggggtgagggcgctgaatctcttatttggcgcccttgccatcttccacctcgcatacctgggctccctatttgacgtcgatgtggatgatacaaccgaagaacaggggtacggcatggcctatacagtccacaagtggtcggagctgtcctgggcctcccattgggtgacgttcggctgctggatcttttatcgactgattgggtag

SEQ ID NO: 129331 - DNA, 1140 bp, synthetic construct
  misc_feature 1..1140: note = Description of Artificial Sequence: Synthetic coding sequence
  source 1..1140: mol_type = other DNA
atggtgtgggtagtgcttctctctttactatgttatctggtgctctttctgtgtaggcactcttctcatcgaggcgtctttctgagcgttactattcttatctaccttctgatgggtgagatgcacatggtggacaccgtgacttggcataagatgagaggggcccaaatgattgtggccatgaaagcagtttctctaggatttgacttagacaggggagaggtcggcactgtgccctctcctgtcgagttcatggggtacctgtacttcgtggggaccattgtgttcggaccatggatctccttccactcttatctacaagctgtgcagggccgccccttgtcgtgccggtggctccaaaaggtcgcacgatccctcgcacttgccttgttatgtctggtgttatctacctgcgtgggcccatacctgttcccctacttcattcccctcaacggcgaccggttgctgcggaaatggcttcgcgcttacgagtcagctgtgtcattccatttcagcaactattttgttgggttccttagcgaggccactgctacactagccggggctggtttcacagaagaaaaagaccatctcgagtgggacctgaccgtctcgaagcctttgaatgtggaactgcctaggtctatggtagaggtcgtcacgagctggaatctccctatgtcttactggcttaacaactacgtgttcaaaaatgcattgagactgggaacgttttccgcagtgctcgtcacatatgctgccagtgcactgctccacgggtttagttttcacttggctgcagtcctcctgtctcttgcttttataacctatgtagagcacgtcttacgcaagaggctggccagaattctttccgcctgtgtcctctcaaagagatgccccccagattgtagccaccagcatagattaggcctgggtgtcagggccctgaacctcctgttcggagcactcgccattttccatctggcctacctggggtctctcttcgatgtggatgtggacgacacaacagaggaacagggctatggtatggcttatacagtgcacaaatggagcgagctcagctgggcctcccattgggttacttttggctgttggattttctaccgactgattgggtag

SEQ ID NO: 129332 - DNA, 294 bp, synthetic construct
  misc_feature 1..294: note = Description of Artificial Sequence: Synthetic coding sequence
  source 1..294: mol_type = other DNA
atggcaaccttttcccggcaggaattctttcagcaattgctccaagggtgccttctgccaaccgcacagcaagggctcgaccaaatttggctcttactcgccatctgcctagcctgccggctgctgtggagattaggtttgcctagttaccttaaacatgcctcaactgtcgccggaggatttttttcactatatcacttttttcagctgcacatggtgtgggtcgtcctgctgagcttactgtgctacctggtgctctttctgtgtaggcattcgagtcaccgaggggtgtag

SEQ ID NO: 129333 - DNA, 1386 bp, synthetic construct
  misc_feature 1..1386: note = Description of Artificial Sequence: Synthetic coding sequence
  source 1..1386: mol_type = other DNA
atggctacattcagccggcaggaattctttcagcaacttctgcagggctgcttgcttcccacggctcaacagggtttagaccagatttggttgctgctggcaatctgcctcgcatgcaggctgctctggcggctgggactaccatcttacctgaagcatgcctctaccgttgccggaggctttttttcactttaccacttcttccagctgcacatggtgtgggtcgtactgctgtccctgctgtgttacctcgtcttgtttttgtgccgccattcttcccaccgaggggtattcctgagcgtgacaatattgatctacctgctgatgggcgagatgcatatggtcgatacagtgacatggcacaagatgcggggggcccaaatgatcgtcgcaatgaaggccgtctcactgggatttgatctcgatcgtggggaggtgggtactgtgccctcacccgtggagttcatgggctacctttactttgtcggaacaatcgtgttcggcccgtggatctcgtttcacagctacctgcaggccgtgcaggggcgacctctgtcgtgccggtggctccaaaaggtcgccaggagcctggctctggccctactgtgtctggtactgtccacatgtgtcgggccgtacctgttcccctactttattccactaaacggagaccgcttgctcagaaataaaaaaaggaaagcgcgcggtacaatggtccggtggttgcgcgcatacgaatccgccgtatctttccactttagcaattacttcgtcggatttctgtctgaggcaactgcaacactggcaggagccggcttcacagaagagaaggatcacctggaatgggatctgaccgtgtcaaagccactgaacgtcgagcttcccaggagtatggttgaagtcgtgacttcatggaatctaccaatgtcttactggctgaataattacgtctttaaaaatgccctgcggctgggcacattctctgccgtgctcgtaacctacgctgcttctgctttgctgcacggcttttctttccacctcgccgcagtcctgctctctctggcattcataacttacgtggaacatgtcctccggaagcggctagctcggatcctatccgcatgcgtcctgtcgaagcggtgtccgcctgactgcagtcatcaacaccgcctcggcctcggggttcgggcgcttaatctgctgtttggggcccttgcaatttttcacttggcctacctgggttctctgtttgatgtggatgtcgatgatactaccgaggagcagggatatggcatggcttacactgttcataaatggagcgagttgagttgggcctcacactgggttacttttggctgctggatcttttatcggttaattggatag

SEQ ID NO: 129334 - DNA, 2769 bp, synthetic construct
  misc_feature 1..2769: note = Description of Artificial Sequence: Synthetic coding sequence
  source 1..2769: mol_type = other DNA
atgttcttgcactctgtgaatctgtggaacttagccttctatgtgtttatggttttcctagccacactgggactatgggacgtcttttttggtttcgaagagaacaaatgttctatgagctatatgttcgagtaccctgaataccagaagatcgagttacccaaaaagctggccaagcgctatcccgcatacgagctctacctatacggcgagggatcgtatgccgaggagcacaaaatactgcccctgaccggcatccctgtgctcttcctaccaggaaatgcggggtcttataagcaggttcgcagcatcggttctattgctcttagaaaggccgaggacatcgacttcaaataccacttcgacttcttcagtgtaaactttaacgaggaattagtcgccctttatggcggctcactgcagaagcagactaagttcgtgcatgaatgcatcaagaccatcctcaaactctataaggggcaggagtttgccccaaagagtgtcgccattattgggcactccatgggagggctggtagcacgggcactcctgactcttaagaattttaagcacgatctgatcaacttactcattacacaagctactccgcacgtggccccagtcatgcccctggatcggtttattacagacttttacactaccgtgaataattactggatcttgaatgctcgccatataaacctcacaaccctgtccgttgccgggggttttagggactatcaagtaaggtctggcctgacatttcttccaaaactaagtcaccacacttctgctctgagcgtcgttagttctgccgtccccaagacctgggtttccaccgaccacctctctatagtgtggtgtaagcaactgcagttgaccacagtgagagcttttttcgatctgatcgatgcagataccaagcaaattacacagaatagtaagaagaagctgtctgtcctatatcatcatttcatcagacatccgtccaaacacttcgaagagaacccggcaattattagtgatttgaccggtacctccatgtgggtgctggtcaaagtcagcaaatggacatacgttgcctataacgaaagtgaaaaaatttacttcacttttcccctggagaaccatcggaagatctacacacacgtatactgtcagtccaccatgctggatacaaattcatggatattcgcatgcatcaactccacatcaatgtgccttcagggcgtcgacctgagttggaaagcagagctgttgcctacaatcaagtacctgaccctcagactgcaggactacccctcactaagccacctggtcgtctatgtcccttccgtgaggggctcaaagtttgtcgtggattgcgagttcttcaagaaagagaagagatacatacagctccccgtgacccacctgttctccttcggtctctcttcaaggaaagtggtcctgaataccaatgggctttactacaacttggagctactaaatttcgggcaaatctaccaggccttcaaaatcaatgtcgtttctaaatgctctgccgtcaaggaagaaatcacaagcatctacagactccacattccctggagctacgaggatagtctaaccatcgcccaggcacccagctctacagagatatcattgaagcttcatatcgcacagccagaaaataatactcacgttgcactgtttaagatgtacacctcaagtgactgtcgatacgaagttacagtaaagacttcgttctcccaaatcctgggtcaagtggtgcggtttcatgggggcgcccttcccgcttatgtggtgtcgaatatcttactagcctacagaggtcagctatactccctcttctctaccgggtgttgtttggaatatgccaccatgttggacaaagaggccaagccctataaagtggacccctttgtgattatcatcaaattcttattaggttacaagtggttcaaggagctttgggacgtgctcctcctccctgagctggacgcggtgattctgacgtgtcagtcgatgtgttttccgctcatctctctgattctgttcctgttcggaacttgcacagcttattggagcggactgcttagttccgcctctgtgagattgcttagcagtctatggctggccctcaaaaggccctctgagttacctaaagacatcaagatgatcagtcctgacctgcccttcctgacaatcgtgcttattattgttagctggacaacctgtggggctctggcaatcctactaagttatttgtactacgtgtttaaagtggtgcacctccaggccagtcttaccacattcaagaactctcagcccgtcaaccccaagcattccagacgcagtgagaagaagagtaaccatcacaaagacagctctatccaccatcttcgactgagcgctaacgacgccgaggacagcttaaggatgcatagtacagtcatcaatttgttaacatggattgtgttgctgagcatgccgtcgttgatctattggcttaaaaatctgagatactatttcaaacttaaccccgatccttgcaagccattagcattcatattgatcccaaccatggccatcctggggaacacgtacactgttagcatcaaaagcagcaagctgttgaagactacctcacagttcccattgccccttgcagttggcgtgatcgcttttggaagtgcccacctgtatcggctgccttgcttcgtcttcattccactgttgcttcacgccctctgtaactttatgtag

SEQ ID NO: 129335 - DNA, 915 bp, synthetic construct
  misc_feature 1..915: note = Description of Artificial Sequence: Synthetic coding sequence
  source 1..915: mol_type = other DNA
atggaagtactcgagtcaaagaagattgagcttcccaagaagctggctaagcggtacccggcctatgagttatacctctatggggaaggctcatacgccgaggaacacaaaattcttcctctcaccggtatccccgtcctcttccttccaggcaacgccggcagctacaaacaggtgcggtcaatcgggtctatcgcactccgaaaggccgaggacatagacttcaagtatcattttgacttcttctcagtgaattttaacgaggaattggtcgcactatacggtggttccctccagaaacagacaaagtttgtgcatgagtgcattaagaccattctgaaattatacaaggggcaggagttcgctccaaagagtgttgctatcatcggccactcaatgggcggcctggttgctcgcgccttgcttaccttaaagaacttcaaacacgatctgatcaacttattaatcacccaagctacaccccacgtggcgcccgtgatgcctttggaccgattcatcaccgatttctacaccactgttaacaactactggatcctgaacgccagacatattaatctcacaactctgagcgtcgcagggggcttccgcgactaccaggtgcggtccggcctcaccttcctcccaaaactgtcacaccatacatctgctttaagtgtcgtgtctagcgccgtgcctaaaacatgggtctccactgaccacctttccatagtgtggtgcaagcagctgcaactgacaacggtgagagccttctttgatttgattgacgctgacactaagcaaatcactcaaaattccaagaagaaactatctgtgctataccaccatttcatccgtcaccccagcaagcacttcgaagagaaccctgctattatctccgatttgaccggcatctag

SEQ ID NO: 129336 - DNA, 1779 bp, synthetic construct
  misc_feature 1..1779: note = Description of Artificial Sequence: Synthetic coding sequence
  source 1..1779: mol_type = other DNA
atgtttcttcacagtgtcaatttatggaacttggcgttctacgtgtttatggttttcctcgcaacactcggcctgtgggatgtattctttgggtttgaggagaacaagtgttccatgtcttacatgttcgagtatccagagtaccaaaagatcgaacttcccaagaaactggctaaacggtacccagcatatgaactgtacctctacggtgaaggttcatatgccgaggaacataagatcctcccactcacaggcatcccagttctctttctgccaggaaatgcagggagctacaagcaggtcaggagtatcgggtctatcgccctgaggaaagcggaagacatcgactttaaataccatttcgactttttctccgtgaacttcaacgaagaacttgtggccttgtacgggggatccctccagaaacagaccaagttcgtccacgaatgcattaagaccatactgaagctttacaaaggccaggagtttgctcccaaaagtgtggccatcattggccattctatgggcgggctcgtagcccgcgctttgttaaccctcaagaactttaagcatgacttgattaacctactcataacacaggccaccccgcacgtcgctcctgttatgccgctggaccggtttatcactgacttctataccacagtgaataattattggattctgaatgcccgacacatcaacttgactactcttagcgtagccggcgggtttagagactatcaggtgagatcagggttaacattccttcccaaattatcacatcacactagcgcactgtcggtggtgagctccgcggtcccaaaaacatgggtgagtactgaccacctttccattgtttggtgtaagcagctccagctcaccaccgtgcgcgctttcttcgacctgatagatgctgataccaaacagattactcagaactcgaaaaaaaagcttagcgtgttgtaccatcatttcatacgccatccatccaagcatttcgaggagaacccagccataattagcgaccttactggtactagcatgtgggttcttgttaaagtgtcaaaatggacctacgtagcctacaatgagagtgagaaaatctatttcaccttcccactggagaaccatagaaaaatctacacgcacgtgtactgtcaatccactatgctagacaccaacagttggattttcgcttgtattaattcgacaagtatgtgtctgcagggggtcgatctgagttggaaagcggagttgctgcccaccattaaatatcttactctgaggctgcaggattatccaagcctttcccatctggttgtttatgttcctagtgtgaggggaagcaaattcgtggtggattgcgagttttttaagaaggagaagcggtacatccagctgcccgtaacccacttgttctcctttgggctttcatccaggaaggtggtgctgaacaccaacgggctgtactacaatctggagctgctgaacttcggacagatttaccaggcattcaagatcaacgttgtttcaaagtgttcagcagtaaaggaagaaattaccagtatttatcggctccacatcccttggtcttatgaagatagcttaactatcgcccaggctccgtcatcaaccgagattagcctgaagctgcacattgcgcagccagagaacaatacccatgtggccctttttaaaatgtatacctcgtctgattgtcggtacgaagtgactgtcaagacgagtttctcccagattctcggacaggtcgtcgcatag

SEQ ID NO: 129337 - DNA, 1293 bp, synthetic construct
  misc_feature 1..1293: note = Description of Artificial Sequence: Synthetic coding sequence
  source 1..1293: mol_type = other DNA
atgttcctccattccgtgaacctgtggaacctggctttttacgtgtttatggtgtttctggccactcttggcttatgggacgtgttcttcggtttcgaagagaacaaatgttctatgtcctacatgttcgagtatcctgagtaccagtcctcggccgttcctaaaacatgggtctcaaccgatcacttgtctatcgtgtggtgcaaacagctgcaactcactaccgtccgcgcattttttgacctgatcgacgcggacactaagcagatcacgcaaaacagtaaaaagaaactgtcggtgctctaccatcatttcatcagacatcccagcaagcatttcgaggagaatccggcgataatttcagatctgacaggcacctctatgtgggtactcgtgaaagtgagtaagtggacgtacgtggcttacaatgagagcgagaaaatttacttcacgttcccacttgaaaaccatagaaaaatttacactcatgtgtattgtcaatcaacgatgctggacacaaatagttggatttttgcctgtatcaactccacctcaatgtgtctgcagggagtggacctgtcctggaaagcagagctcctacctactatcaagtatttaactctccgtctgcaggactaccccagcctgagtcatcttgtcgtctacgttccatctgtgcgggggagcaaattcgtggtggattgtgagttctttaaaaaggagaagaggtatatccagctgcccgtgacccaccttttctcttttgggctttctagccgcaaggtggttctgaacaccaatggcctgtactataacctggaacttctcaactttggacagatatatcaggctttcaagatcaacgtggtgtcaaaatgttcagccgtaaaggaagaaataacaagcatctaccgtctacatataccatggtcatatgaagattcattgaccatagcccaagcaccatcatcaacagaaataagtctcaaactgcatatcgcacagcccgagaacaacacacatgtcgcactcttcaaaatgtacacttcctccgactgccgctatgaagtgacggttaagacctccttcagccagatattaggacaagttgtgcgcttccatggcggtgccctgccagcctatgttgtgtctaatattctcctggcttatcggggccagctttattccctctttagcaccggatgttgtttagagtacgctacaatgcttgataaggaggctaaaccttataaagtggatccgttcgtcatcattataaaattcttactgtag

SEQ ID NO: 129338 - DNA, 774 bp, synthetic construct
  misc_feature 1..774: note = Description of Artificial Sequence: Synthetic coding sequence
  source 1..774: mol_type = other DNA
atgtcacgcccactaattacccgatccccagcctcacccctcaacaatcaggggatacctacccccgctcagctcactaagtccaacgcaccagtgcacatcgatgtagggggccacatgtatacatccagtctcgcgacactgacaaagtatccagagtcacggatcggccgcctctttgacggaaccgaaccgatcgtactggactccctcaaacagcactattttatcgacagggatggtcagatgttccgctatattctcaatttcctgaggacctcgaagcttctaattccggatgactttaaggactatacacttctgtacgaggaagctaaatacttccagctccaacctatgctgctggagatggagaggtggaaacaggaccgtgagaccggccgcttttctcggccctgcgaatgtcttgtggtgagagtcgcgcccgacctgggggaacgtattaccctgagcggtgataagtctctgattgaggaagtgttcccagaaatcggggacgtgatgtgcaatagtgtgaatgccggttggaatcacgactcaacccacgtgattcgtttccccctcaatggctattgtcaccttaactctgtccaggtcctggagagactgcagcagcgcggtttcgaaatagtcggaagctgcggcggtggagttgattcctcacaattttctgaatatgtgcttcggagggagctgagaaggacccctcgggtcccctctgttatccggatcaaacaagaaccgctcgactag

SEQ ID NO: 129339 - DNA, 774 bp, synthetic construct
  misc_feature 1..774: note = Description of Artificial Sequence: Synthetic coding sequence
  source 1..774: mol_type = other DNA
atgtcgaggcccctgatcacaagaagcccagcgtcaccacttaataaccaaggtatccccacccccgcccaactgactaagtcaaacgccccggttcatatagatgtggggggacacatgtacacctccagtcttgccaccttgaccaagtaccccgaatcaaggattgggaggctgtttgatgggacagaaccaatcgtgctcgacagtctgaagcagcactatttcattgatcgcgatggccagatgttccggtatattttgaatttcctgcggacttcaaagctgttgattcctgacgactttaaggattatacactgctttacgaagaagccaagtacttccagctgcagccaatgcttctggagatggagcggtggaaacaagaccgggagactggccgtttctctcggccttgcgagtgtctggtagtccgtgtggcaccggacctcggcgagcggataacactgtcaggagataagagccttatagaagaggtatttcccgagatcggcgacgttatgtgcaattcagtcaatgctgggtggaatcatgattccactcacgttattaggttcccacttaacggatactgtcacctaaacagcgtgcaggttctggaacgccttcaacaacggggattcgaaatcgtgggtagctgtgggggcggggtcgacagttcccagttctcagagtacgtgttgcggcgggaactgagaagaacgcctcgtgtgccgtctgtgattcgtatcaaacaagaacccttggattag

SEQ ID NO: 129340 - DNA, 2598 bp, synthetic construct
  misc_feature 1..2598: note = Description of Artificial Sequence: Synthetic coding sequence
  source 1..2598: mol_type = other DNA
atggcacggatgcccggcagtggcgactgcaacacttctgcaggaggttcggcctctgctgcagcagctgccgcggaaaacaacggagagcggggagagggggagagaggcgccggcgggcgcggcaggaggcatagtcgaccacactattgcagcgcaggcgaggaagaagaagaagaagaggaagaggacgagatccaggaagtccagatcacaggagatgaggaagaggaggaggacggaggaggcggcttggaagaagatgaggaagaagaagaagaagaagagatgggcctggactgggatgagccattggagccagaggacagcgcaggggaagagctggaaccggagcctgtgcatatgatcaatatggaccaatccgcagcgctggagccagaagcaccgccacggctactggcgcctcgcgctcggggcgggccacccggagatgggagcgagctggaccctgacgtgcttcagcgacctgagcgcgcccgcctttctgagaatactaggttggctaccagatatgctgtgcgaattttcagagagtatctaagtgagaaggctcaaagtcctgattttgaaaccatggacaaaggtgccttgtgtcgcgtcctcaggtcattctacgcggaagcaagatctaaatcaggccagctatattctaagtcctccctgatctcaattaggagcagtctgaacagatacctgaacgagcctccttattgtcgcacgttggacctaactaaggacccggaattacgtagcgctaatctcacactggccgctgtaattcggaaactggaggagcagggggctggtccggtcgtgcagaaacaagctatcacaagagctgatctcagaaagctctacacctcatccgtatttagcaccaatacccccttcggactactcaataaggtttggttcgaaacatgtatgtatttctgtacaagaggccgggaaaatcagagggagttggaggaagactccttcggcctggcaatggatgaggatggaagaaagtttgtgtattttaagtctctgggtccgtatcataaaagccggagtagttcttggtccaagaagagagctgagtcatcggatgaagagaacttaccccggatgtacgaaactggcacagagttctgcccctatgctagctttgtcaagtatttgtccaagcggaacccactatgcaaagctttttttcagcgaccccgcgatcactgctctgaaggagatgtgacatggtacgaaaacaaggcgataggtaaaaacctgctgggcactcgcatgcagatgctgtccaaggcagcaaagttgtctaagacctataccaatcattgtatcggggccgtgagcatcgcaacactcaatagtatagccggtattggaaccaaacttggctcgcctgccccccagggctgctatgctgaggctttgaatggggcggcccgacatcacagccatcatcctcctacccatccatctcaccatcaccggccccagcccccctcgctcggaaatacctacattctcccaaaagactcccaggtggggccagatgtgaaatccgaggccgctcccaaacgggccctgtatgagtccgtttttgggtccggagagatctgtgggcccactagcccaaagagactgtgcatccgaccctcagagcctgtggatgcggtggtggtggtctctgtgaagcacgatcctctgccccttctgcctgaagctaacggccatcgcagcaccaacagccctactatcgtgtctcccgccattgtgtctcctacccaggacagccgccctaacatgagccggcctctaattaccaggtcccctgcttcacctctgaataaccagggcatacccacccccgcccagcttacgaaaagtaatgcgcccgtgcacatcgatgtgggcggacacatgtacacgagctctctcgcgaccttaaccaagtaccctgagtcacgtataggccgcctgtttgatggaactgaacctattgtgttggattcattgaagcagcactatttcatcgatcgtgatgggcagatgtttagatatatcttaaactttcttagaacatctaaactattgatacctgacgatttcaaagattataccttgctttatgaagaagctaaatacttccagctgcagccgatgcttctggaaatggagagatggaagcaggatcgcgagactggccggttttcgcgcccttgtgagtgtttagtcgtgcgtgtggccccagacctgggagagcgcataacacttagcggtgataagagcttaatcgaagaagtgtttccggagatcggtgatgtaatgtgtaacagtgtgaatgccgggtggaaccatgattccacccatgtgattcggtttccactgaacggctattgccacctgaatagtgtccaggtgttagagcggctgcagcagaggggatttgagattgtgggatcctgtggtggcggagtggatagctcacagtttagcgagtacgtccttaggcgcgaactgagacgcacccctagggtgcccagcgtgatacggatcaaacaagaacctctcgactag

SEQ ID NO: 129341 - DNA, 774 bp, synthetic construct
  misc_feature 1..774: note = Description of Artificial Sequence: Synthetic coding sequence
  source 1..774: mol_type = other DNA
atgagccggccccttattacaagaagtccagcatctcctcttaacaaccaagggattcccactcccgctcagctgactaagtcaaatgctcccgttcacatcgatgtggggggtcacatgtatacaagcagcctggccacgcttacaaagtaccctgagtctcggattggccggctgtttgacggcaccgagcctatcgtcttggactccctgaagcagcattattttattgacagagacggtcagatgtttcggtacattcttaactttttgcggactagcaaactgctgattcccgacgactttaaggattatacgctcctgtatgaagaagcgaagtatttccagttgcagcccatgctgctggaaatggagcgctggaaacaggaccgggaaactggacgcttcagccgcccctgtgagtgtttggtggtgcgcgtggccccagacctgggtgagcgaatcactctgtccggggacaagtctttaatcgaagaggtgttccccgagataggagatgtgatgtgtaactcagtcaatgcgggatggaatcacgacagcacgcacgtgatccggttcccactcaatgggtattgtcatctgaatagcgttcaagtgcttgaacgactgcagcagcggggatttgaaattgtcggcagttgcggcggtggagtcgactcctctcaattttccgaatatgtgctgcgcagagagctgaggagaacccccagagtgccttctgtcattcgcattaaacaggaaccactggactag

SEQ ID NO: 129342 - DNA, 1044 bp, synthetic construct
  misc_feature 1..1044: note = Description of Artificial Sequence: Synthetic coding sequence
  source 1..1044: mol_type = other DNA
atgagagtcgtggtgataggagctggagtgatcggactgagtaccgctctgtgcatccacgaaagataccactctgtactgcagccgctggatattaaggtctacgccgaccgttttactcctctgacaacgactgacgtggccgcagggctgtggcaaccctatttaagtgatcccaacaacccacaagaggccgactggagtcaacagacgtttgactacctactctcgcacgtgcactctccaaatgccgagaacctgggactgtttctgatctcggggtataacctattccatgaagccattcccgatcctagttggaaggacaccgtacttgggtttcgcaagctcacaccaagagagctcgacatgttcccagattatggatatggatggtttcacacttccttaatactggagggtaagaactatcttcagtggctgaccgaacgtctcaccgagaggggggtgaaatttttccagagaaaggtcgagtcattcgaagaagtggcgagggaaggtgctgatgtgatcgtgaattgtaccggcgtgtgggccggcgcactacaaagagatccgctccttcaacctgggcgaggacaaattatgaaggtggacgccccttggatgaaacacttcattttgacccatgacccggaaagaggtatttacaattccccgtacataatacctgggacgcagactgttacacttggcggcatcttccagttgggtaattggagcgagctgaataatatacaggaccacaacacgatctgggagggatgttgccgattggagccaaccctcaaaaacgcgcgtatcatcggcgaacgcaccggttttcgtccagtaagaccgcaaatccgcctggaacgggaacaattgagaacagggccatctaacaccgaggtgattcacaattacggacacggagggtacggccttactattcactggggatgtgccttggaagcggccaaactttttggccgtatccttgaggagaagaagctttcccggatgccaccttctcacctttag

SEQ ID NO: 129343 - DNA, 399 bp, synthetic construct
  misc_feature 1..399: note = Description of Artificial Sequence: Synthetic coding sequence
  source 1..399: mol_type = other DNA
atgctgaagaatatcgagcttttcgataagctctctcttcgcttcaatgggcgggttctctttatcaaggacgttattggcgacgagatttgctgctggagcttttacggccagggcaggaagattgccgaggtttgctgcacttccattgtgtacgcgactgagaaaaagcagacaaaggtcgagttccccgaggcacggatttacgaggagactctaaatattctcctctacgaggcccaggacggaaggggccctgacaatgccttgcttgaagcgaccggcggggctgcagggcgttcacaccacttggacgaagatgaggagcgtgaaaggatcgagcgtgtgcgtcgcattcatattaaacgccccgatgatagggctcatctgcaccagtag

SEQ ID NO: 129344 - DNA, 840 bp, synthetic construct
  misc_feature 1..840: note = Description of Artificial Sequence: Synthetic coding sequence
  source 1..840: mol_type = other DNA
tgaaggtactgtcgcagcccattttggagcggctatggaaacttctactcgctccagaaaagtggttttctgccaacgttgggcacagtacagccttttaattactgcaaaagcggctggattctgattgatcgatgtgggaagcactttggaaccattctgaattaccttagagacggagcggtccctttaccggagtctcggagggagattgaagagcttttggctgaggctaaatattatcttgttcagggtctagtggaagagtgccaagctgccttacagaataaagacacgtacgagcctttttgcaaggtccctgtgatcacttccagtaaggaagagcaaaagctgatcgctacatcaaacaagcccgccgttaagctcctttacaaccgctccaacaacaagtactcatatacttcaaactcagatgacaacatgcttaagaacatagaactcttcgataagctcagtctgaggttcaacgggcgggtacttttcatcaaggatgtcatcggcgacgaaatttgctgctggtcattttacggccagggtaggaaaatcgccgaggtgtgttgcacttctattgtgtatgctacagaaaagaagcagactaaggtggagttccccgaggcaaggatttatgaggagaccctcaacattctgctgtatgaggcccaggacggaagaggccccgacaatgcccttctggaagccacagggggtgccgctggcaggagtcatcacctggacgaggatgaggaaagagagaggatcgagagggtccggaggattcacattaagagaccggatgatagggctcacttacaccagtag

SEQ ID NO: 129345 - DNA, 864 bp, synthetic construct
  misc_feature 1..864: note = Description of Artificial Sequence: Synthetic coding sequence
  source 1..864: mol_type = other DNA
atgtcaggtgagtctgttgtttcctccgcggtccccgccgctgcaacaaggactacgtcattcaaggggacatcaccatccagcaagtacgtcaaactcaatgttggaggcgccctgtactacacaactatgcagacactgaccaagcaggacacaatgctaaaagccatgttctctggccgcatggaggttttgacagattccgaaggatggattctgatcgaccgctgtggcaagcactttggaaccatcctgaattaccttagggatggcgcagtgccactgcctgaatccaggcgggagatcgaggaactgcttgccgaagcaaagtattacctcgttcagggcctcgttgaggaatgtcaggctgctttacaaaacaaggacacctacgaacccttctgcaaagtgcctgtcatcacatcatctaaggaggaacagaagcttatcgcaaccagcaacaaaccggccgtcaaactgctgtacaacaggagcaacaataaatattcatatacgcgcgttctgttcattaaggatgtcattggcgatgagatttgttgctggtccttttacggccaggggcgcaagatcgccgaagtctgctgcacaagcatcgtgtacgccacagagaaaaaacagacaaaagtagaattccctgaagccaggatatacgaggagaccctaaacatcctgctgtatgaggcacaagatgggcgcgggccggataacgccctgttagaggcgaccgggggcgcagcgggccggtctcaccacctggatgaagacgaggagcgggagcgaattgaaagagtgaggagaatccacatcaaacggccagacgatcgtgcgcacctgcaccagtag

SEQ ID NO: 129346 - DNA, 468 bp, synthetic construct
  misc_feature 1..468: note = Description of Artificial Sequence: Synthetic coding sequence
  source 1..468: mol_type = other DNA
atgatggctgtgttcacctccctctggagtccctaccagatgttattctgcagcaacagcgatgacaacatgttgaaaaatatcgagctattcgataagcttagcctgaggtttaatggtcgtgtgctcttcattaaggacgtaatcggcgacgaaatttgctgttggtctttctatggccagggccggaagattgccgaagtttgctgcacctccattgtgtacgccactgagaagaaacagacaaaggtagagttccctgaggctagaatctatgaagagacactgaatatcctgttatatgaggcgcaggatgggagagggccggataacgcgctgctcgaagctactggaggcgccgctgggcggtctcaccacctggacgaagatgaggaacgagagagaatcgaacgcgtcagacgtatacacatcaagagacctgatgatcgcgctcatttgcaccagtag

SEQ ID NO: 129347 - DNA, 990 bp, synthetic construct
  misc_feature 1..990: note = Description of Artificial Sequence: Synthetic coding sequence
  source 1..990: mol_type = other DNA
atgtccgctgaggcttctggaccagccgctgccgcagcccccagcttagaggccccgaaaccctcgggtttggagcccggccctgctgcatacggactcaagccactgacccccaacagcaaatacgtgaaattgaatgtgggcgggtccctccactataccaccctgaggacgttgactggacaggatacaatgctgaaagccatgtttagtggaagagttgaagtgctcaccgacgctggaggttgggttcttattgaccgtagtggccggcatttcggtacaattctgaactacttgcgggacggatctgtccccctacctgagtccacacgcgagttaggtgaactgcttggcgaggcaagatactacctggtgcagggcctgatcgaagactgccagttagcacttcagcagaaacgggagactctctcccccctttgtctcattcccatggtaacctcccctagagaggagcagcagctgctagcctctacatccaaacctgttgtgaagctgctccacaaccgctcaaataacaagtactcgtacacttctacctctgatgataacctgcttaagaatatcgaactattcgacaaacttgcactccggttccatgggagattactctttcttaaagatgttttaggtgatgagatctgttgttggtccttctacggacaggggcggaagattgcagaagtgtgctgcacaagtatcgtgtacgctaccgagaagaagcagacaaaagttgagttccctgaggccaggatcttcgaggagaccctgaatatactgatttacgaaacaccacggggcccagatcctgcgttgctcgaggctaccggcggcgcagccggcgccggaggggccggcaggggtgaggacgaggagaatagagaacatcgggtgcgacgcatccacgtgcggaggcatataactcatgacgaaaggcctcatggccagcaaatcgtatttaaagactag

SEQ ID NO: 129348 - DNA, 990 bp, synthetic construct
  misc_feature 1..990: note = Description of Artificial Sequence: Synthetic coding sequence
  source 1..990: mol_type = other DNA
atgagcgccgaggccagcggcccagcggctgctgctgccccaagcctcgaagcccccaagcctagcggcttggagcccggccccgcagcttacggacttaaacccctgactcccaatagcaagtatgtgaagctgaacgtaggcgggtctttgcactatactaccctgaggacattgaccggccaggacactatgctgaaggcaatgttttccggcagagtggaggttcttacggacgccggggggtgggtcctgattgatcgctccggcaggcacttcggcaccattctcaactacctccgcgatggaagcgtgccactgcccgaatcgactcgcgaactgggggagttgctaggagaggcccggtattatctcgttcaaggtctgatcgaggactgccaattggcacttcagcagaaacgggaaactctttctcctctgtgtctgattcctatggtgacctcaccccgggaagaacagcaacttctagccagcacatcaaagccagtggtcaagctgctgcataatagatcaaacaacaaatactcttacacctcaacttccgatgacaacctactcaagaacatcgaacttttcgacaagcttgccttgcgatttcatggccggctcctttttctcaaagatgtgttaggcgacgagatatgctgctggtccttctacgggcagggtcgcaagatcgcagaggtttgttgtacatccatcgtgtacgctacagagaagaagcaaacgaaagtagaatttccggaagcaagaatttttgaggaaaccctgaacatcctgatttacgagacaccacggggtcctgaccctgccttactggaggcaactgggggcgccgccggagctgggggggccggtaggggcgaagatgaagagaaccgggaacatcgggtgagaagaatacacgtcagacggcacatcacccatgacgaaaggcctcacggacagcaaattgtcttcaaggactag

SEQ ID NO: 129349 - DNA, 1287 bp, synthetic construct
  misc_feature 1..1287: note = Description of Artificial Sequence: Synthetic coding sequence
  source 1..1287: mol_type = other DNA
atggccttatcggggaactgttcacgttactacccacgggagcagggctctgccgttccaaatagtttccccgaagtggtagaactgaatgttggcggccaggtctacttcactagacacagcacattaatctcaatccctcattcactcctgtggaaaatgttctccccgaagagagacaccgctaatgatttagccaaagactcaaaaggtaggttttttatagatcgtgatggcttccttttccgctatatcctcgattatttacgagaccgacaggtcgtgctgccggatcattttcccgagaaaggtcgcttgaagcgagaggctgagtacttccagcttccagacctggtcaagctgctgactcctgatgagataaaacagtcccccgatgagttttgccatagcgacttcgaggacgcatctcagggatcagataccaggatctgccctccatcttcactgttgccagccgatcggaaatggggattcattaccgtgggatacaggggctcttgcaccctagggagggagggacaggccgacgcaaaattcagacgcgtaccgcggatcctggtatgtggccgaatttctctggctaaagaagtgtttggcgagacactcaacgaatctagagacccagaccgcgctcccgagaggtatacctctcggttctacctgaagtttaaacaccttgaaagagcctttgatatgctgtccgagtgcggctttcatatggtggcatgcaacagtagtgtcactgcttcatttataaatcaatacactgacgataagatctggtcgtcttatacagaatacgttttctaccgggagcctagcaggtggtccccttctcactgcgactgctgttgtaaaaacggtaaaggggacaaagagggggaatcaggcaccagctgcaatgacctctccacttcttcatgtgactcccagtctgaggcctccagcccccaagagacagtgatttgcggacccgttaccaggcagactaacatccagacgctggatcgcccgatcaagaaaggcccggttcagttgattcaacagagtgagatgagacgaaagtcggacctcctgcgaacactgaccagcgggagccgggagtctaacatgagcagtaaaaagaaagccgtcaaggaaaaacttagcattgaagaggaactggagaaatgcattcaggactttctgaagatcaagattcctgatcgattccccgagaggaaacatccctggcaatcagagctgctccgaaaatatcatctgtag

SEQ ID NO: 129350 - DNA, 1287 bp, synthetic construct
  misc_feature 1..1287: note = Description of Artificial Sequence: Synthetic coding sequence
  source 1..1287: mol_type = other DNA
atggcactcagtggaaactgctcaagatattatcccagagaacaggggtcagcagtgcccaacagcttcccggaggtagtcgagctaaacgttggagggcaagtctacttcactcgacactcgacccttatttccattcctcacagcttgctttggaagatgttttcgcccaagcgggatacagccaatgatttagccaaagacagtaagggccggttcttcattgatagagatggctttctgttccggtatatcctggattatctgcgcgaccgccaagtcgtactgcctgatcacttccccgagaaagggcgccttaagcgggaggctgagtattttcagctcccggatctggtaaagctcctgacgcccgacgaaattaaacagagcccggacgaattttgtcacagcgacttcgaagacgcctcccagggctctgatacaaggatctgtccaccctcttctcttctgcctgcagaccgtaagtgggggttcatcactgtgggctacaggggctcttgcaccctggggcgcgagggccaagctgatgcaaaattcagaagagttccacgcatcctggtctgcgggcgcatatcgttggccaaggaggtattcggagaaactctgaacgagtcccgtgaccctgaccgtgcccctgagagatatacaagcaggttttacttaaaattcaaacaccttgaacgcgcctttgatatgctatcagaatgcggcttccacatggtggcgtgtaattctagcgtgaccgcttcattcatcaaccaatacactgatgataagatctggtcaagctacactgaatatgtattctaccgtgaaccctcccggtggagcccatctcattgtgattgttgctgcaagaacggcaaaggcgacaaagagggcgaatctgggacctcatgcaatgatctgtccacgagctcctgcgatagtcagtctgaggcttccagtccccaggagacagtgatctgcggccccgtcacccgtcagaccaatattcagaccttggaccggccaattaagaagggccctgtacagcttattcagcagtccgagatgcgaaggaagtcagatctgttgcgtaccctcacatcaggctccagggagtcgaacatgagctccaaaaagaaagcagtgaaagagaaactgtctattgaggaagaacttgagaagtgtatacaggacttccttaagattaaaatacccgacagattccccgaacgcaaacacccatggcagagcgagctgcttcgcaagtaccatctgtag

SEQ ID NO: 129351 - DNA, 792 bp, synthetic construct
  misc_feature 1..792: note = Description of Artificial Sequence: Synthetic coding sequence
  source 1..792: mol_type = other DNA
atggccgaactacagctggacccagccatggccggactcggaggaggaggggggagcggcgtgggggacggagggggccctgtgcgaggcccacctagccctaggcctgccggccccactccacgaggccatggccgtcctgccgcagccgtggcccagcccctcgagcccggcccagggccacccgaaagggccggagggggtggtgcggcgcgctgggttagactgaacgtcggcgggacatattttgtaactactcgccagacactggggcgggaacccaaatcgttcctgtgccgcctctgctgccaggaggacccggagctggactctgataaggatgaaacgggagcctacctgatcgatcgcgacccaacatattttgggccaatcctgaactacctcagacacggaaagctcatcattacaaaggagctcgcggaagagggggtcctcgaagaggccgaattttataatatcgcatctctcgtgaggctcgtgaaggaaagaattagagacaatgaaaaccggacatctcaaggcccagtcaagcatgtgtatagggtcctgcaatgtcaggaggaagagctcactcagatggttagcactatgagcgatggatggaaatttgaacagctcatttccataggcagttcctataactacggtaatgaagaccaggccgaattcctgtgcgtggtgtcaagggagcttaataattccactaacggaattgtgattgaaccaagcgagaaagctaagatcctgcaggagcgcgggtctaggatgtag

SEQ ID NO: 129352 - DNA, 738 bp, synthetic construct
  misc_feature 1..738: note = Description of Artificial Sequence: Synthetic coding sequence
  source 1..738: mol_type = other DNA
agcttgccacgtaatgggcctgctaggttgcgagctggctcatcaggcggtggcggcgggcctagatggcggaactgcagctggacaaggaggtggcgagggtgggaaggcgctccaggtcccggccctccagagcgcgccgggggaggaggcgctgccaggtgggtgcgcctcaatgttggtggcacctacttcgtcacaacacgtcagaccctaggtcgggagcccaagtcatttctgtgcaggctctgttgtcaggaagaccctgaattggatagcgacaaggacgagacaggcgcatatctcatcgacagagaccctacgtatttcggaccaatcctcaactaccttagacacggaaagctgatcatcactaaggagctggcagaggagggcgttctagaggaggccgagttctacaacatcgcttcattggtacgcctggtcaaagaacgaatcagggataacgaaaaccgaacatctcagggacctgtcaaacatgtatacagggtgctgcagtgtcaggaggaggaactcacacaaatggtgtcgacaatgtccgacggatggaaatttgagcagctgatttcaataggatcatcttacaactacgggaacgaagatcaggctgaattcctgtgtgtggtgtcaagagaactcaacaactcaactaatggtatcgtaatcgagccttccgagaaagcaaagatcttacaggaacgaggtagtaggatgtag

SEQ ID NO: 129353 - DNA, 2448 bp, synthetic construct
  misc_feature 1..2448: note = Description of Artificial Sequence: Synthetic coding sequence
  source 1..2448: mol_type = other DNA
atggccggcggacactgcggatcctttcccgcagccgcagctggaagcggcgaaatagtgcagctgaacgtgggtggtactcgtttctctaccagccgtcagactcttatgtggatccctgattcgtttttctcctcacttctgtctggtaggatctcaaccttgagggacgaaactggtgccatttttatcgatcgggatcccgccgcattcgcccccatactcaactttctgcgaacaaaagagttagatctgcggggcgtctctataaacgtgctgaggcatgaggcagagttttatggcattactcccctggtccggcgtctgcttctatgcgaagagctcgaacgaagttcatgcggttccgttctttttcacgggtacctccctccccccggcattccgtcacgcaaaatcaacaataccgtgcgatccgccgattctaggaacggtcttaacagcactgaaggagaggccagggggaacggcacacaacctgtgctgtccggcaccggtgaagagactgtgagactgggcttccccgttgaccccaggaaggtcttgatcgtagccgggcatcacaactggatcgtggccgcctatgcccattttgccgtgtgttatcgcatcaaagagagcagcgggtggcagcaggtgttcacctcgccttaccttgactggacaatcgagagggtcgccctcaacgccaaggtggtgggcggacctcacggtgataaagataaaatggttgccgtggccagcgagagcagcataatactctggtcggtacaggacgggggatctgggtctgagatcggggtgttctccctgggagtgccagtggatgctctgttctttatcggtaaccagcttgtggctacaagtcatacggggaaagtcggagtttggaacgccgtcactcagcactggcaggtgcaagacgtcgtgccgattacatcctacgacaccgccggatccttcctgcttcttgggtgtaacaacggtagcatttattacattgacatgcagaagtttcctcttcgcatgaaagataacgatcttctggtgacggagctgtatcatgatcctagcaacgatgccattacagccctgtccgtgtacctgacccccaagacatccgtcagcggaaattggattgaaatagcatatggaacctcatccggcgcagtccgggtgatagtgcagcaccccgaaaccgtcggttccggcccccagcttttccagactttcactgtccaccgttcccctgtaaccaagatcatgctgtctgagaagcatctggtgagcgtttgcgccgacaataatcacgttagaacctggaccgtgaccaggtttagagggatgattagcactcaacccggatccacccccctagcctcgtttaagatactctccctagaggagactgagtcacatggctcatattcatctggcaacgacattggtccttttggggagagggacgatcagcaggtattcatccagaaagttgtgcctataacgaacaagctctttgtgcggctcagttcaaccggcaagagaatctgtgaaatccaagccgtagattgcactaccatatcatccttcactgtacgggagtgcgaaggctctagcagaatggggtcccggccccggcgttacctcttcacagggcacactaacggctccatacagatgtgggatctcacaaccgccatggacatggtgaacaaaagcgaggacaaggacgttggagggcctaccgaggaggagctactgaaactccttgaccagtgcgatctaagcacatctcgctgcgccacgccgaatatctcaccagccaccagtgtggtccagcactcacacctccgggaatctaatagttccctgcagctacagcaccatgatacaacacacgaggctgccacctacggaagcatgaggccctaccgagagagtcctttattagcacgcgcaagaagaacagagtcgttccactcctaccgcgacttccaaacaatcaatctaaaccggaatgtagaacgggccgtgcccgagaatgggaacctgggcccgatccaggccgaagttaaaggagctacaggggaatgtaacatttctgaaagaaagtcgccgggggtggaaattaagagcttgcgggagttagattctggcctggaggtccataaaattgccgaaggattctccgagtctaagaagcggagtagtgaagacgaaaacgaaaataagatcgaattcaggaaaaagggagggtttgaagggggcggtttcctcggtaggaaaaaggttccttatctcgccagcagcccaagcacctcagacggtggcacagactcccccggcaccgccagtccatcacccaccaagacaaccccatctccaagacataaaaaaagtgactcgtctggtcaggagtattccctgtag

SEQ ID NO: 129354 - DNA, 723 bp, synthetic construct
  misc_feature 1..723: note = Description of Artificial Sequence: Synthetic coding sequence
  source 1..723: mol_type = other DNA
atggcgggcggtcactgtggaagttttccggccgcagcggcagggtccggggaaatcgtacaactcaatgtaggaggaacccgcttctctacatcgcgtcagaccttaatgtggattcctgactcattcttcagttccctgctgtccggtcgaatcagcactctgcgggacgagacgggggccatatttatcgaccgggatcccgccgcttttgcccccatcttgaatttcctcagaaccaaggagctggaccttagaggggtttcgatcaatgtgttgcgacacgaagctgaattctacggcattacccccctggtcaggcgactactactgtgtgaggaactggagcgaagctcttgtggatcagtgttgttccacggttatctgcccccccccggaatccctagtcggaagatcaataacactgtccgttctgccgactctcgcaatggtctgaattccacagaaggcgaagctagaggaaacggcacacaaccagtgctgtccgggaccggggaggaaaccgtgagactggggttcccggtggaccctagaaaggttcttatcgtcgcaggccatcacaattggattgttgctgcctatgctcacttcgctgtgtgttacagagtgttttggttgggaaccgttgggcatgcctgcaatcccagtacattgggtggaagggatggttggtcatcaaggtcagctcgccctacttggtag

SEQ ID NO: 129355 - DNA, 567 bp, synthetic construct
  misc_feature 1..567: note = Description of Artificial Sequence: Synthetic coding sequence
  source 1..567: mol_type = other DNA
atgaaagacaacgacttacttgtgaccgaattgtaccatgaccccagtaacgatgcaattacagccctctcagtatatctgaccccaaagacctccgtcagtggcaactggatcgaaattgcttatggcacctcaagcggcgcggtcagggttattgtgcagcatcctgaaaccgtggggtctggacctcaacttttccagacatttacagtccaccggtctcccgtgacaaagattatgctgtccgagaaacatctagtgtctgtctgcgccgacaacaaccatgtgcgcacatggacagtcacccgttttcggggtatgatttccactcagccagggtctaccccacttgcatctttcaagatcctttcattggaggagacggaatcccacggatcatatagcagcggcaacgatattgggccatttggggagagagacgatcagcaggtctttatccaaaaggtggttcctatcacaaacaaattgttcgtccgcctgagttctactggaaaatccctttgcggcgtgagtctggtcagtcggtctagtcaggaacctacttag

SEQ ID NO: 129356 - DNA, 642 bp, synthetic construct
  misc_feature 1..642: note = Description of Artificial Sequence: Synthetic coding sequence
  source 1..642: mol_type = other DNA
tgattttccacatcacgccagacacttatgtggattccagacagcttcttctcgtccctcctgtccggacggatctctaccctgcgggatgaaaccggggctatattcatcgacagggaccccgccgcatttgcaccgatattgaattttcttcgcacaaaggaactggacctccggggcgtctcgataaacgtgctacggcatgaggcggagttttacggaattacgccattggtccgacgtcttctgctgtgcgaggaactggaaagatccagttgtggctccgttctgtttcacgggtacttgccaccaccgggcataccaagtcgtaagatcaataacacggttcgatcagccgattcacggaacgggcttaactctacagaaggggaggcccgcgggaacggcactcagcctgtccttagtggcaccggtgaggaaactgtgcgcttgggctttccagtcgacccgaggaaggtgctcattgtagctgggcatcacaattggattgtcgctgcctatgcacatttcgcagtatgttatagagtattttggctcggtactgtaggccatgcatgcaatccgagtactctggggggaagggatgggtggtccagcaggagcgcccgccctacctggtag

SEQ ID NO: 129357 - DNA, 507 bp, synthetic construct
  misc_feature 1..507: note = Description of Artificial Sequence: Synthetic coding sequence
  source 1..507: mol_type = other DNA
taagctctttccgtgtatctgactccaaagacctcagtgtccggaaattggatcgagatcgcctatgggacctccagcggtgcagtaagagtgattgtgcagcatccagaaaccgttggctccgggccccagctcttccagacatttactgttcacaggtctcctgtcaccaagattatgcttagcgagaagcaccttgtgtccgtgtgtgctgataataatcatgtacgtacttggaccgttaccagatttagggggatgatctcaacgcaaccaggaagtacgccgctcgcgtctttcaagatcctgtccctggaggaaacagaatcccacggtagctacagctcgggcaacgacattggaccctttggcgaacgcgacgaccagcaggtgttcattcaaaaagtggtgccaatcacaaataagttgttcgtgcggctgtcctccaccggaaagagcttgtgtggtgtttctctggtatctagatcttcccaggaaccgacttag

SEQ ID NO: 129358 - DNA, 870 bp, synthetic construct
  misc_feature 1..870: note = Description of Artificial Sequence: Synthetic coding sequence
  source 1..870: mol_type = other DNA
atggtcgtcgttactggtcgtgaaccagactcaagaagacaggatggggctatgtcctcctcagatgccgaggacgatttcctggagccagccacaccaacagccacccaggcaggtcacgcactacccctgcttccccaggaatttccggaggtcgttccactgaacattggaggtgcacacttcacaacccgcttgtcaaccctccgctgttatgaagacaccatgttggctgctatgttctccgggcgacattacatacccacagatagcgaggggaggtattttattgatagggacggaacccatttcggagatgtgctgaatttcctgcggtcaggcgatcttccaccccgggagcgcgtgcgcgccgtctataaggaagcccaatactacgctattggtccactgttggaacagctggaaaacatgcagcctctgaagggcgaaaaagtgcgccaggcgtttttgggtttaatgccttattacaaggatcacctggaaaggatagtggagattgctcgcttacgtgcagtgcaacgtaaagccagatttgccaagttgaaggtatgtgtgtttaaggaagaaatgccaatcaccccctacgagtgcccccttcttaacagtctccgctttgagcgcagcgagtccgatggccaactgtttgagcaccactgcgaggttgacgtgtcctttgggccttgggaggcagtagccgatgtttacgatctgctgcactgcttagtgaccgatctgagcgcccaggggctcacggtggaccaccagtgtatcggcgtgtgcgacaaacatctggtgaaccattactactgtaaaaggcccatctacgagtttaagatcacttggtggtag

SEQ ID NO: 129359 - DNA, 1728 bp, synthetic construct
  misc_feature 1..1728: note = Description of Artificial Sequence: Synthetic coding sequence
  source 1..1728: mol_type = other DNA
gtgtcccgaaagaagatgagtctgaaatctgagagaaggggcatacacgttgatcagagtgatctgctatgcaagaagggttgtgggtactacgggaaccctgcatggcagggattctgctccaagtgttggcgcgaggagtaccacaaagctagacagaaacagatccaggaagactgggagctggccgaacgagtgttactctgttacccgggttggtcagccatggtacagttccagctcaccgccacttctgcatcatgggcgcaggtcatactgctcctgcagccacccaacgtgttgggtctgcaggctctacagagagaggaagaggaggctttcgcctctagtcaaagtagccaaggagcccagagcttgacgttttcaaagttcgaggagaagaagacaaatgagaaaacccggaaagtcacaaccgtgaagaagttcttcagtgccagtagccgggtggggtctaagaaagagattcaggaggctaaagccccaagtcccagtataaatcgtcagactagcattgaaacagacagggtatctaaagagtttatagagtttctgaaaacatttcataaaactggacaagagatatataaacagaccaaactgtttttggagggaatgcactacaaacgcgatctgagtatcgaggagcagtccgagtgtgcccaggatttttaccataatgtggctgagcgaatgcagacacgtggtaaagagcgaaggttccaccacgtggggcaggctggtttggaactcttaacttccggcgatccacccgcctccgcctctcaatccgccgggaacactggagtcgaaccgcctcaccctgctgtccctccagagagagtggagaagataatggaccagattgagaaatatataatgactaggctgtataagtatgtgttttgtccagagaccacagatgatgaaaaaaaagacctggcaattcaaaagagaatccgggctctgcggtgggttactccccagatgctttgcgtgccagtcaacgaggatattcctgaggtgagtgacatggtagttaaggccatcaccgacatcattgaaatggattccaagagagtcccccgcgataagctcgcttgcatcacaaagtgctctaagcatatcttcaacgccatcaaaattaccaagaacgagccagcgtcagctgatgactttcttcctactctgatctatatcgttctgaaaggcaaccccccaaggcttcagagtaacattcagtacatcactagattctgcaatccaagcaggctgatgactggagaagacggttactactttaccaatctgtgctgtgccgttgcctttatcgaaaaactggacgcccagagcttaaatctctcacaggaggactttgatcgctacatgtccggacagacaagtccacgcaagcaggaggcagagtcttggtcaccagatgcatgtcttggagtgaagcaaatgtacaagaatctagatttgctgtcccaactaaacgagaggcaagagaggatcatgaacgaagctaagaaactggaaaaggacttaatcgattggaccgacggaatcgcacgggaggtgcaagacattgtggaaaaataccctttggaaatcaaaccaccaaatcagccactggcggccattgactctgagaatgttgaaaatgacaagttgccgcctcctctacagccgcaggtatatgcaggatag

SEQ ID NO: 129360 - DNA, 1596 bp, synthetic construct
  misc_feature 1..1596: note = Description of Artificial Sequence: Synthetic coding sequence
  source 1..1596: mol_type = other DNA
atgagcttgaagtctgagagacggggcattcacgtggaccagtcggacctgctctgcaaaaaaggctgtgggtattacggcaatcctgcgtggcaagggttctgcagcaaatgttggcgagaggaataccacaaggctcggcaaaaacaaatccaggaagattgggagctggccgaaagagtactcctgtgctacccaggatggtcagcaatggtccaatttcagctgaccgcgactagcgctagctgggctcaggttatcttactccttcagccacccaacgtacttggcctccaagctctccagcgggaggaggaagaagcctttgctagttcgcagtcgtcccagggagcccagtctctgacattctcaaagttcgaggagaaaaagactaatgaaaagaccaggaaggtcacaaccgtcaagaaattctttagcgcgtcttctagagtgggtagcaaaaaagaaattcaggaagcgaaggctccaagcccaagcattaacaggcagacctcaattgagactgatcgggtgtccaaggagttcattgagttcttgaaaaccttccacaaaacagggcaggagatttacaagcaaacgaagttgttcctcgaaggaatgcattataagcgcgacctgtctatcgaggaacagtcagagtgcgcccaggatttctaccacaatgtggctgagaggatgcagactaggggcaaagtgccccccgagcgggtagaaaaaataatggaccagattgagaagtacatcatgacacgactgtacaagtatgtcttctgccccgaaaccactgatgatgagaagaaggatttagccattcagaagagaatcagggcactaagatgggtgactcctcagatgctctgtgtgcctgtgaatgaagacattcctgaggtatcagatatggtggtgaaagcaatcaccgacataattgagatggatagcaagagagtgccccgtgacaaattagcttgcatcaccaaatgtagcaagcatatcttcaatgccattaaaattacaaagaatgaacctgcatctgccgacgatttcctacctacgcttatctacatcgttctgaaagggaacccccctagactgcaaagcaacatacaatatattacaaggttttgtaacccatcacggctgatgacaggagaggatgggtattacttcactaatctgtgctgtgccgtggctttcatcgaaaagctagatgctcaatccctaaacctcagccaggaagacttcgacagatacatgagcggccagacctccccccgtaaacaagaggccgagtcatggtcccctgacgcatgtcttggcgtaaagcaaatgtataagaatcttgatctattgagccaattaaacgaacgtcaggaaaggatcatgaacgaagccaagaagctcgagaaagatttaatagattggaccgatggtatcgctagagaagtgcaagacatcgtggagaaatacccactggagatcaagcctcccaaccaacccttggcagctatcgacagcgagaatgtggaaaatgacaagctacctcctcccctgcaacctcaggtctatgcgggatag

SEQ ID NO: 129361 - DNA, 1476 bp, synthetic construct
  misc_feature 1..1476: note = Description of Artificial Sequence: Synthetic coding sequence
  source 1..1476: mol_type = other DNA
atgtctctgaaaagtgagcgacgcggcatccacgttgatcagtctgacctgctgtgcaagaagggctgtggatattacgggaatccagcatggcagggattttgttccaagtgctggcgagaagagtaccacaaagccagacagaagcagatccaagaagattgggagttagcagagcgactgcagcgtgaagaggaggaggccttcgcctcaagccagagcagtcagggtgcacagtcactaaccttttccaaatttgaggaaaaaaagaccaatgaaaaaacacggaaggtcaccaccgtcaagaagttcttctctgcctcttccagggtaggatctaaaaaggaaattcaggaagcaaaagccccttcaccatcaatcaaccggcagaccagcatcgaaaccgacagagtgagtaaagagttcatagaatttctcaagacatttcacaagactggacaggagatctacaaacagacgaaattgtttctcgaaggtatgcattataagcgggacttgtcaatcgaggagcaatccgaatgcgcccaggacttttatcacaatgtggctgagcgtatgcagacccggggcaaggtcccccccgaaagagtcgagaagataatggatcagattgagaaatatatcatgacacgtttgtataaatacgtgttctgtcccgagacgaccgacgatgaaaagaaggatctggctatccagaagaggattcgcgcgctcaggtgggtgacgccacagatgctgtgtgtgcccgtgaacgaggatataccagaggtgtctgatatggtggtaaaagctataaccgatatcattgaaatggactccaagagggtgccacgtgacaaacttgcgtgcatcacaaaatgcagcaaacacatctttaatgccatcaagatcacaaaaaacgagccagcttccgctgacgattttctgcctacgctgatctatatcgtgctcaaaggaaatccccctcgccttcagagcaatatacagtatatcacacgcttctgtaatccctctagacttatgacaggagaggatgggtattattttactaatttgtgttgcgcggtcgctttcatcgagaaactggacgcccagtccctgaacctctcccaagaggactttgacaggtatatgagtggccagacttccccgaggaaacaggaggcagagagctggagtcccgatgcatgccttggggtcaaacagatgtacaaaaatctggacctgctgtcacagctgaatgagagacaagagaggattatgaacgaagctaaaaaactggagaaagatctcatagactggactgatggtatcgcccgcgaggtgcaggacatcgtggagaaataccctctggagatcaagcccccaaatcaaccacttgctgctattgacagcgaaaatgttgagaatgataagcttcccccccctctccagcctcaggtctacgctggatag

SEQ ID NO: 129362 - DNA, 1476 bp, synthetic construct
  misc_feature 1..1476: note = Description of Artificial Sequence: Synthetic coding sequence
  source 1..1476: mol_type = other DNA
atgagtctaaaatcagagcgccgcggcattcacgttgaccagtctgatctgctctgtaagaaggggtgtggctattacgggaacccggcttggcagggcttctgttcaaagtgttggcgagaagagtaccataaggcaaggcagaagcagattcaggaagactgggaacttgcagagaggctacagcgcgaggaagaggaagccttcgcatccagtcagtcaagccagggggcacagtctcttacattctccaaatttgaagagaagaagacgaacgagaaaactcggaaagtcacgactgttaaaaaattcttcagcgcctctagtcgagtgggcagcaagaaagaaatccaagaagcaaaagccccttcacctagcattaacagacagacctctatcgaaaccgacagggtaagtaaggagtttattgaatttctgaaaactttccataagaccggccaagaaatctataaacaaaccaaactctttctggaaggcatgcactacaagagagacttgtccatagaggagcagtccgagtgcgcccaggacttttatcataacgttgccgagcggatgcaaacacggggaaaggtcccaccagagagagtcgagaaaataatggatcagatcgagaagtatattatgactcgactctacaagtatgttttctgtccagagacaacggatgatgagaaaaaggacctcgccatacagaagcgaatcagagctctgcgatgggtgaccccccagatgctgtgtgtgcccgttaacgaagacatacccgaggtctctgacatggtggttaaggctataaccgatatcatcgagatggactcaaaaagggtgcctagggacaaattggcttgtataactaaatgctccaagcacattttcaatgcaattaaaatcaccaaaaacgaacctgccagtgccgacgacttcctgcccactctgatatatattgtcctcaaaggaaatcctccgcgtcttcagagtaacattcagtacattactaggttttgcaacccatcccgattaatgacaggggaagatggctactacttcacaaacctttgttgcgccgtggccttcattgagaagctggacgcccagtctctaaatctgagccaagaggatttcgatagatatatgtccgggcagacatcccccagaaagcaggaggccgagtcctggagccctgatgcttgtttaggtgtgaagcaaatgtataagaatcttgaccttttaagtcagttaaatgagcgccaagaaagaatcatgaatgaggctaagaagctggaaaaagacctgattgactggacagatggtattgccagggaggtgcaggacatcgtggaaaaatacccacttgagattaagccacccaatcagccactagcagccatcgattctgagaacgtggagaacgacaaactgcctcccccgttgcaacctcaggtatatgcaggatag

SEQ ID NO: 129363 - DNA, 1224 bp, synthetic construct
  misc_feature 1..1224: note = Description of Artificial Sequence: Synthetic coding sequence
  source 1..1224: mol_type = other DNA
atgtcgctaaaatcggaacggagggggatacacgttgaccagtctgacctcctctgtaagaaagggtgtggttactatggaaaccctgcttggcagggattttgcagtaaatgctggagagaggagtatcataaagctcgccagaaacagatccaggaagattgggaattggccgaaaggctgcagagagaagaagaagaggcgttcgcttccagtcagtcaagccagggtgcgcagtctctgacattctccaaatttgaggagaaaaagactaatgagaagacaagaaaggtgacaacggtgaaaaaatttttctccgcatccagtagagtaggctcaaagaagcctccggagagggttgaaaaaattatggaccagatcgagaagtacattatgactcgactatacaaatacgtgttttgtcctgaaaccactgacgacgaaaagaaagacctggccatacagaagcgcatccgggctcttagatgggtcacgccacagatgctttgcgtgccagtcaacgaagatatccccgaggtcagtgatatggtggtgaaggccattaccgacattattgagatggattccaaacgggtacctagagacaagttagcgtgtatcacaaagtgcagcaagcacatcttcaacgctatcaagataacaaagaacgagcctgccagcgcagatgattttctcccgaccttgatctatatcgtattgaagggaaacccccccaggcttcaaagtaacattcagtatatcacgagattttgcaacccatctcgtctaatgacgggtgaggatggttactacttcaccaatttatgctgtgccgtggcttttatcgagaaactagacgcccaatctctgaatctaagccaggaagattttgaccgctatatgagcgggcagacgagccctcgcaaacaggaggcagagtcctggtctcctgatgcctgtcttggcgtgaaacagatgtacaagaatttggatctgctcagccagctcaatgaaagacaggagaggatcatgaacgaggctaaaaagctcgaaaaggacctgattgattggaccgatggcatcgccagggaggtccaggacattgtggagaagtaccctttggagattaagccgccaaaccaacccctagccgcgattgattctgagaatgtcgagaacgacaagctgccccctccccttcaaccacaagtgtacgcagggtag

SEQ ID NO: 129364 - DNA, 867 bp, synthetic construct
  misc_feature 1..867: note = Description of Artificial Sequence: Synthetic coding sequence
  source 1..867: mol_type = other DNA
atggtcgtggttaccgggcgcgaacctgactctaggcgccaagacggcgcgatgtcatcctctgatgctgaagacgattttctggagcccgccactccaacagcgactcaggccggacacgccctgccccttctgccccaggagtttcctgaggtggtccctttaaatatcggcggggcccacttcaccacgaggctttccacgttgaggtgttacgaagatacaatgctggccgccatgtttagtggtaggcactacattcctactgactctgaaggacggtacttcatagatcgcgacggaactcacttcggcgatgtgctgaatttcctccggtctggtgacctgcccccccgagagagggtgagagcggtgtataaagaggctcagtactacgccattggacctctgctggagcagctcgagaacatgcagcctttaaagggggagaaggtgcggcaggcattcctgggtctcatgccctactacaaggatcacctggagagaatagttgaaattgcacgtctgcgggccgttcagcgtaaagctagattcgcaaagctcaaggtgtgcgtgtttaaagaagaaatgcccatcacaccctacgaatgtcctctgctaaactcccttcggtttgaacgttcagaaagcgacggacagctttttgagcaccattgtgaagtggacgttagttttgggccatgggaggctgtggctgatgtgtatgacctcctgcattgcctagtaacggacctgagcgctcagggtctgaccgtggatcatcagtgtataggcgtgtgcgataaacacttagtgaatcattattactgtaagcgacctatctatgagttcaagatcacctggtag

SEQ ID NO: 129365 - DNA, 663 bp, synthetic construct
  misc_feature 1..663: note = Description of Artificial Sequence: Synthetic coding sequence
  source 1..663: mol_type = other DNA
atgaaaggctacggtcatacagtgcctctctcagatggcgggaaagctttttgtattatctactccgttatcggcatcccattcacacttctgttcttgactgctgtggtccaacggatcaccgtccatgtgacgaggcggcctgtactgtatttccacattcgctggggattttcaaagcaagtcgtcgctatagtgcatgccgtcttgctgggctttgttaccgtctcatgcttctttttcatccccgcggccgtcttctccgtgttagaagatgactggaactttctggagagtttctacttttgtttcatttctttatctaccattggcttgggtgactacgtccctggtgaaggttataatcagaagtttcgggaactgtacaaaatcgggatcacctgttacctgctcctgggattgatcgcaatgcttgtggttttggaaaccttttgcgagctgcacgagctgaaaaaatttcgcaagatgttctatgtcaaaaaggacaaggatgaagaccaggtccacataatagagcacgaccagttgtccttttctagcatcactgaccaagcagcgggtatgaaggaggatcagaagcagaatgagccatttgtggccactcaaagctctgcctgcgtagacgggccagccaaccactag

SEQ ID NO: 129366 - DNA, 1011 bp, synthetic construct
  misc_feature 1..1011: note = Description of Artificial Sequence: Synthetic coding sequence
  source 1..1011: mol_type = other DNA
atgctccaatcactggctggctcctcttgcgtcaggctggttgagcggcatagaagcgcgtggtgttttggtttcttggtgcttgggtacctgctatacctcgtgttcggcgcagtggtgttctccagtgtggaactcccctatgaagacctgttgcgtcaagagttacgcaaacttaagaggcggtttctcgaagagcacgagtgtctttccgaacagcagctcgagcagtttctggggagggtgcttgaagcatctaactacggagtctccgtcctgagcaatgcctccggaaactggaattgggatttcacatctgccttgttcttcgccagcaccgtgctgtcaactaccggatatggacatacagtccccctaagcgatgggggtaaggctttttgcattatttactcggtgatcggcatcccgttcaccctgctgttcttgacagccgtcgttcaaaggataaccgtgcacgtcactaggagacccgtcttgtacttccacatcaggtggggatttagcaagcaggtagtcgcgatcgttcacgctgtactcttgggctttgtcactgtgagctgcttttttttcatccccgccgccgtgttcagtgtcttggaagatgattggaactttctggaaagcttttatttctgcttcatcagcctttcaaccatcggtttgggtgattatgtacccggcgaggggtacaatcagaaattccgcgaactatacaagatagggataacctgctaccttctgctcggcctgatagctatgctcgtagtattggagacgttctgcgagctgcacgaattgaaaaaattcagaaagatgttttatgtcaagaaggacaaggacgaggaccaggtgcatataattgaacatgaccaactcagcttctctagcataacagaccaagcggctggaatgaaggaagaccagaagcagaatgagccgttcgtggccacccagtctagtgcctgcgtggacggtccagcaaaccactag

SEQ ID NO: 129367 - DNA, 729 bp, synthetic construct
  misc_feature 1..729: note = Description of Artificial Sequence: Synthetic coding sequence
  source 1..729: mol_type = other DNA
gtgctgagagtgttaagtcctgacctggtgagacgccttctcaaccttgcggtcagagccttccaagtccccaagggcgagagtcttaattttcctgaaagcactccaggctacggccacactgtgcctttgagtgacggaggaaaggctttttgtatcatctactccgtgattggaattccttttacactgttatttctcacagctgtcgtccaaagaatcaccgtccatgtcaccagaaggcctgtgttatactttcatatcagatggggcttcagtaagcaggttgtggcaatcgtccacgcagtcctgctaggatttgtgaccgtttcatgtttcttttttattccagccgcagtattctccgtgctcgaagatgactggaacttcctggagtccttctacttctgcttcattagtctttctacaatcgggctgggcgactatgttcctggtgaagggtataaccagaaatttagggaattgtataaaattgggattacttgttacctgcttctaggattgatagccatgctggtggttctcgagacgttctgcgagctgcacgaactgaaaaagtttcggaagatgttctacgtcaaaaaagacaaagacgaggatcaagtgcacataatcgagcacgatcagctgtctttctcgtcaatcacggaccaagccgccggaatgaaggaggaccagaagcagaatgagccttttgttgcaacgtag

SEQ ID NO: 129368 - DNA, 1632 bp, synthetic construct
  misc_feature 1..1632: note = Description of Artificial Sequence: Synthetic coding sequence
  source 1..1632: mol_type = other DNA
atggaggatggctttaagggcgaccgaactgaaggctgccgtagcgattctgtggccgtgccagccgctgctcccgtctgtcaacctaaaagcgccacaaacggacagcctcctgccccagcgcccaccccgactccacgacttagcattagttcgcgggctaccgtagtggctcgtatggagggtacatcacagggggggctccagaccgtgatgaaatggaaaacagtggtggctatcttcgtcgttgttgtggtctacttagtgactggcggcttagtttttagagccctagagcagcccttcgaatcttctcagaagaatacaattgccttagaaaaagcagaatttctcagagaccatgtgtgcgtaagcccacaggagctggaaaccttgattcagcacgccctagacgccgacaacgccggcgtttcacctattggcaactctagcaacaattcttcccactgggacctgggcagcgctttcttttttgctggaactgttatcaccaccatcggttacggcaatatcgccccgtcaacagaaggtggaaaaattttctgtattctctatgccatcttcggcatccctcttttcggatttctcctcgctggcataggggatcaactcggaactatttttgggaagtctattgcccgcgttgagaaggtgttccgcaagaagcaggtatcgcagacgaaaattagggtcataagcaccatattattcatcttggccggatgtatcgtattcgttaccattccagccgtcatcttcaagtacatcgaagggtggacagcattggagtctatttacttcgtggtggtgacactgaccaccgtggggttcggtgacttcgtggccgggggtaacgcaggtatcaattacagagagtggtataagccactggtgtggttctggattttggtcgggcttgcctactttgccgccgtgctcagtatgatcggcgactggttgagggttctgagtaagaaaactaaggaggaggtcggagagataaaagcccacgcagcagagtggaaggccaacgtaacggcagaatttagagaaacaaggcgcagactcagcgtagagattcacgataaattgcagagagcagctacaattcggtccatggagcggcggcgcctcggactggaccagcgagcccatagcttagacatgctttcgcctgagaagagatcagtgtttgccgctctcgacacgggtagatttaaagcaagctcacaggaatctattaataacagaccaaataacctgagactgaagggcccggagcaacttaacaagcatggacaaggagcaagcgaagataatataatcaacaagtttggcagcacttctagacttactaaaaggaaaaataaagacctcaagaagaccctgccagaggatgtgcagaagatctataaaacgttcaggaattacagccttgacgaggagaaaaaagaggaggagacagaaaaaatgtgcaattccgacaactctagcacagcaatgctcactgattgcattcagcagcacgccgagcttgagaatgggatgatcccaacggatacaaaggacagggagccagaaaataactccttgttggaggaccggaattag

SEQ ID NO: 129369 - DNA, 1632 bp, synthetic construct
  misc_feature 1..1632: note = Description of Artificial Sequence: Synthetic coding sequence
  source 1..1632: mol_type = other DNA
atgaagtttcctatcgagacaccccgaaaacaggtaaactgggatcccaaggttgctgtccccgcagccgcacctgtgtgccagccaaagagcgcaactaacggacagcctcctgccccggctcccacaccaacccctagactatctatctcctctcgggccactgtcgtagcaagaatggagggcactagtcagggcggcttacagaccgtcatgaagtggaagaccgtggtggcaatttttgtagttgtcgttgtgtacttggtaaccgggggtttggtctttcgagctttagagcaaccgtttgagtcttcccaaaagaataccatcgcattggagaaggccgaattccttagagatcatgtgtgcgttagtccccaggagctggagactctgatccagcacgcattagatgccgacaatgcaggcgttagcccaatcgggaattctagcaacaatagttcccattgggatctgggctctgccttcttcttcgccgggactgtcataacaactatcgggtacggcaatatcgcaccaagtacagagggcggcaagattttttgtatcttatacgccatattcgggatcccactgtttggatttctgctagctggtattggcgatcaactgggcactatatttgggaaaagcatcgctagggtcgaaaaggtgttcaggaaaaagcaggtaagccagaccaagatccgagtgattagcactatactgttcatcttagccggttgcattgtcttcgtcactatccccgccgtgatcttcaagtatattgagggctggaccgctctggagtccatctatttcgtggtggtgactcttacaacagtgggatttggtgactttgtggccggtggcaacgcgggaatcaattacagggagtggtataaacctctggtttggttctggatcctcgtgggactggcctattttgctgccgtcttatctatgataggggattggctccgggtgctgagtaagaagactaaggaggaggttggggagattaaggcccacgcagcggaatggaaggccaacgtaacagccgagttcagagagacacgccgtcggctgtccgttgaaatccatgataaacttcagcgagccgccactatccggagtatggaacgtcggcgcctaggccttgaccagcgggctcactccctggatatgctctctcccgaaaaaaggtcggttttcgccgcgctggataccggaagattcaaggcgtcgtcccaggagtccatcaataaccgccctaataatctgcgcctgaaaggccccgagcagctcaacaaacatggacagggtgcctcagaggacaatattattaacaaatttgggtcaacgtccagactgactaagcgtaaaaacaaggacctgaaaaagacgctccccgaagacgtccagaaaatctacaagacgtttcgcaactattcacttgacgaagagaaaaaagaagaagagacagaaaaaatgtgcaattctgacaattcttcaaccgctatgttgactgactgtattcagcagcacgctgaactggaaaatggcatgataccaactgataccaaggacagagagccagaaaataacagcctactcgaggatagaaattag

SEQ ID NO: 129370 - DNA, 1617 bp, synthetic construct
  misc_feature 1..1617: note = Description of Artificial Sequence: Synthetic coding sequence
  source 1..1617: mol_type = other DNA
atgtttttcctgtatactgatttttttttgtcccttgtggccgttcctgcagcagccccggtatgccagccaaaatcagccactaatgggcagcctcccgctcccgcccctaccccaaccccccgcttgtctatttctagcagggcgacggtggttgccagaatggaaggaaccagccaagggggtctgcagactgtgatgaagtggaagactgtggtagccatttttgtggtcgtggtggtgtatctggtcacgggaggccttgtgttccgtgccctcgaacagccgttcgaatcctcccaaaaaaacaccatagctctagagaaggcagaattcctgagagatcatgtctgtgtttccccacaggaattggagacactgattcagcacgcactggacgccgataatgctggggtcagtcccattggcaacagttccaacaatagttcacactgggacctggggtccgccttcttctttgcggggacagtgatcacaaccatcggttatggaaatatcgccccgtctaccgagggaggcaagattttctgtattctatacgccatatttggtattcccctgtttgggttcctcctggcgggcattggggatcagctaggcacgatcttcggcaagtctatcgcacgagttgagaaggtgtttagaaaaaagcaggtgagccagaccaagattcgcgtgatctccaccattctgtttatcctggcaggctgcatcgtattcgtgactattcccgccgtgatctttaaatatattgaaggctggacagcgctcgagtcaatctacttcgtcgttgtgaccctaaccaccgtgggctttggggacttcgtagcggggggcaatgcaggcatcaattatagggagtggtacaaaccactcgtttggttttggattctagtagggctggcatacttcgcagccgtactatctatgatcggcgactggttgagagtcctgtccaaaaaaacaaaggaggaagttggtgagataaaggcccacgccgccgaatggaaagctaatgttactgctgagtttagagagacacggaggcgcctctcagtcgaaatccacgacaaactgcagcgcgctgccacaatcaggtcaatggaacgcagaaggctggggcttgatcagcgggctcactcgctggacatgttgtctccggagaagcggtcagttttcgcagctctggacaccgggaggttcaaagcttccagtcaagagtcgataaacaataggccgaataacctgcgcctgaagggtccagaacagctgaataaacacggccagggggcatctgaggataatatcataaataaatttgggagcacgagtcgcctcacgaaacggaagaacaaggatttgaagaagacactgcccgaggacgtgcagaagatttacaagaccttccggaattactctctcgatgaagaaaagaaggaagaggagacagagaaaatgtgtaactccgataacagttccaccgccatgttgaccgactgcatccagcagcatgctgagcttgaaaatggcatgatcccaactgatactaaggaccgtgaacccgagaataattcactgctggaggataggaactag

SEQ ID NO: 129371 - DNA, 1293 bp, synthetic construct
  misc_feature 1..1293: note = Description of Artificial Sequence: Synthetic coding sequence
  source 1..1293: mol_type = other DNA
atgtcttcgaggtccccaagacctccccctagacgctccaggaggaggctgccacggccgagttgctgctgttgctgttgtcgccgcagccacctaaacgaagatacagggcgttttgtgctgctggccgccttgatcggcctgtatctggtcgccggagctacagtattttcagctctcgaatctcccggcgaagccgaggccagagcacgctggggagcaaccctcagaaatttcagcgccgcgcacggcgttgccgaacccgagttgcgcgcattcctccgtcattacgaggccgctctcgctgccggcgtgcgtgcagatgccctgaggccccggtgggattttcctggtgccttttacttcgtcggcacggttgtctcaaccatagggtttggtatgacaactcccgcaaccgtcggtggaaaggctttcctcatcgcctacggtctatttggctgcgccggcaccatcctttttttcaacctgtttttggaacgcataatatccctactcgcatttattatgagggcttgtagagagcggcagctcaggaggtcaggcctattgcctgcaaccttccgccggggcagcgcgctgtccgaggcagactccctggcgggctggaagccctccgtttaccatgtgctcctcattcttggtttatttgcggtgctgctttcttgctgcgcctcagctatgtatacaagcgtagagggctgggattatgtggactctttatatttttgcttcgtgactttctccaccatcggcttcggggatcttgtctcttcccagcacgccgcatacagaaaccaggggttatatcggctgggcaactttctattcattctgctgggggtttgctgcatttattccctgtttaacgttatctcaatacttataaagcaggtgctgaactggatgctccggaaattaagttgtcgctgctgcgcgcgatgctgtccagcgcccggggcccctctcgccagaaggaatgccattacacctggctcacgtctccggcgtaggctcgcagcactgggcgctgatccagctgccagagattccgacgccgaagggcggcgactgtctggagagttaattagtatgagggacctgactgcgtccaacaaagttagcctcgcactgctgcagaaacagctgtccgagacggccaatggctacccaagatccgtatgcgtgaacacacgtcaaaacggttttagcggcggtgtcggagctctgggaatcatgaacaataggctagctgagacaagcgccagtagatag

SEQ ID NO: 129372 - DNA, 1227 bp, synthetic construct
  misc_feature 1..1227: note = Description of Artificial Sequence: Synthetic coding sequence
  source 1..1227: mol_type = other DNA
atggccgggcgaggcttctcatgggggccaggacatttgaatgaagataatgcacgcttcctgctgctcgcggcactgatagtcctgtatcttcttggaggcgccgcggtgttttcagccctcgaactagcgcacgaaagacaggcaaagcaaaggtgggaggagcggctcgccaatttcagtcgaggacataatctcagccgggatgagcttaggggcttcctgaggcactacgaggaggctacaagagcaggtatccgcgtagacaatgtgcgaccccggtgggactttacaggggctttttactttgtgggtacagtggtttccacaataggctttggcatgactacgccagctacggtgggtgggaagatctttctaatcttttacggacttgtgggttgcagctcaactattctgttttttaatctgtttctagaaaggctgatcacaattatcgcctacattatgaagagttgtcaccagagacagctccgtcgtagaggagccctccctcaggaatccctaaaagacgctggtcagtgcgaagtggactcactcgcgggctggaagccttcagtgtactacgtgatgctcatactatgcacagcatctatattaattagttgctgtgcctcagcaatgtatacccctatagaaggttggagttactttgactcgttatacttttgtttcgttgcttttagtactattgggtttggagacctagtgtcttctcagaatgcgcactacgaaagccaagggctatacaggttcgccaacttcgtgttcatcctgatgggcgtgtgctgtatctattccctatttaacgtaatttccattctcattaagcaatcattaaattggattctgaggaaaatggattctggatgctgtcctcagtgtcagaggggtttgctgaggagcagacggaacgtggtgatgccaggcagcgtgcgtaacagatgcaacatctccatcgaaaccgatggtgtcgctgagagtgacacagatggccggcggctgtcaggcgaaatgatcagtatgaaagacctactggctgcgaataaagcatcattagccatactgcagaaacaattgtccgaaatggccaacggctgccctcaccagacttccaccctggcccgtgacaatgaatttagtggaggcgttggtgccttcgcaatcatgaacaatcgactggcggaaaccagcggcgacaggtag

SEQ ID NO: 129373 - DNA, 993 bp, synthetic construct
  misc_feature 1..993: note = Description of Artificial Sequence: Synthetic coding sequence
  source 1..993: mol_type = other DNA
atgcgacggccctcggttcgcgccgccggcctggtactttgcacactgtgttacctgctggtgggagctgcagtctttgacgctctcgagtccgaggcggaatccgggcggcagcgccttctcgtgcagaagcgaggcgctttgaggcggaaattcggattttccgccgaagattaccgcgagctggaacgtctggccctgcaggccgaaccgcatagggcagggaggcaatggaagtttcctggcagcttttactttgcaatcactgtcattaccacaatcgagtacggacatgcagcccccggtacagacagtggcaaggtattctgtatgttctatgcgctgctgggcatccctttgactcttgtgacttttcagtctctaggggagagactcaacgcagtggttcgccgtctgcttcttgccgcaaagtgttgtcttgggctacgatggacatgcgtttccacagaaaatcttgtcgtggcagggcttctcgcctgtgcggccaccctagccctcggggcagtggctttctcccattttgaagggtggaccttttttcatgcatactactactgcttcattacgctcaccaccatcggctttggagactttgtggctctacagagcggggaagcattgcaacggaaactaccatacgtggcattctccttcctgtatatcctcctgggcctgaccgttatcggcgctttcctgaatctggtggtgctgcgttttttggtggctagcgcagattggcctgagagagcagcacgcacacctagccctaggcctcccggagccccagagtcaaggggcttgtggctgccccgtaggccagctcgcagcgtcggctcggcaagtgtattctgccacgttcataaattggaaagatgcgccagggacaacctgggtttttcccctccaagtagcccaggggtcgtacgcggcggacaggccccccggttaggggctcgatggaagagcatatag

SEQ ID NO: 129374 - DNA, 789 bp, synthetic construct
  misc_feature 1..789: note = Description of Artificial Sequence: Synthetic coding sequence
  source 1..789: mol_type = other DNA
atgccatcggccggactgtgcagttgttggggcgggcgtgttctccccctcctgctggcctacgtctgttacctcctcctgggtgcaactatcttccagctcttagagcgccaggccgaggcccagagccgcgaccagtttcaattggaaaaactacggttcctggagaactacacttgtttagaccagtgggcgatggaacagtttgtacaggtaattatggaggcctgggtgaagggggtcaatccaaaagggaattctactaatccctcgaactgggattttggttcaagtttcttttttgcaggtaccgtggtaaccacaatcgggtacggtaacctggctccctctactgaagccggccaggttttttgtgtgttctacgcacttcttggaatacccctgaatgtcatattcctcaatcacctcggaacaggactccgggcccacctagcggcaattgaacgatgggaggaccggccacgtaggagtcaggtcctccaggtgctgggcctggcccttttcctgaccttaggtaccctggttatcttgatcttcccaccaatggtcttttcacatgttgaagggtggtcattcagcgagggattctattttgccttcattactttgagcacaatcggcttcggagactacgtggtgggtctgaggcaggggtgcggcgccaaagccgcccctggccgtcggccacgcaggggcagcactgcagcacgaggggtccaggtcaccccccaggactttcccatctcgaagaagggtctgggatcatag

SEQ ID NO: 129375 - DNA, 930 bp, synthetic construct
  misc_feature 1..930: note = Description of Artificial Sequence: Synthetic coding sequence
  source 1..930: mol_type = other DNA
atgcctagcgccggattatgtagctgttggggcggcagggtacttcccctgctccttgcttacgtatgttacctgctgttgggcgccaccatctttcagctgctcgaacgccaggccgaggcccagtctcgagatcagtttcagctagagaaactgaggttcctggagaattacacatgcctggaccagtgggctatggagcagttcgtacaagttatcatggaagcttgggtaaaaggggttaatccaaaaggcaacagtaccaacccatctaattgggatttcggatccagtttcttcttcgccggaacagtggtcactactattggttacggaaacttagcacccagcaccgaggcaggacaggtgttttgcgtgttctatgccctactagggatacccctgaacgtcatttttctgaatcatttgggtacaggtcttcgggcacatctggccgcaatcgagagatgggaagatagaccccgtcggtctcaggtcctccaagtgctgggactggctctttttcttacactcggcacgttagtgatcctgatttttccaccaatggtattctcccatgtggaggggtggtcttttagcgagggcttttacttcgctttcattacgctgtccactattggcttcggtgactacgtggttgggacggatccgtccaagcactacatcagcgtgtaccgttcactcgccgccatatggattctgttgggcctggcatggctggctttgatcttgccactcggccctctgctccttcatcggtgctgtcagctttggctgctttctctgaggcagggatgtggggctaaggcagcacctggacggaggccacgaagggggagtacagccgccaggggggtgcaggtgacaccacaagactttccaatctcgaaaaagggtctggggagctag

SEQ ID NO: 129376 - DNA, 969 bp, synthetic construct
  misc_feature 1..969: note = Description of Artificial Sequence: Synthetic coding sequence
  source 1..969: mol_type = other DNA
atgccctccgctggcttatgctcatgctgggggggcagggtgctaccactcctcctagcttacgtatgctaccttctccttggtgcaaccatatttcaactcctggagcgacaggctgaggcacaatcacgcgatcagtttcagctggagaaattacggttcttggagaactatacctgtttggaccaatgggctatggagcaattcgtgcaggttatcatggaagcctgggtcaaaggggtgaaccccaaggggaactccacaaacccatcaaactgggactttggaagctcctttttctttgcgggtactgtcgtgactactatcggctacggaaacttggcccccagcacggaggctggacaggtattctgtgtattttacgccttgctgggaattcctctgaacgtcatattcctgaatcacctgggtaccgggttacgagcccacctcgctgctatcgagcgttgggaggatcggcctaggaggagtcaggtcctacaggtgctgggcctcgccctgttccttacccttggaacactagttatactaatcttcccacccatggtttttagccacgtagaaggttggagtttctcagagggtttctattttgcttttatcaccctgagtacgattggatttggcgactacgttgtgggacaccctctgaactttattactccaagcggcctcctgccctcacaggagccgtttcagacacctcacggaaagcctgaatcccaacagattcccggtagcttccagaaggttagctcgatgaacgtttggcctctgtccggcatgcatagtcctggcctcgcgttcccattgccggactgtaacatcccagatcaggagaggttccgccccctccatcccggtgcatggaagttttggccgctgccacttccaagctcaaattcaaagtgggctcctatgtggctcgggtcatccgcccaggtctag

SEQ ID NO: 129377 - DNA, 885 bp, synthetic construct
  misc_feature 1..885: note = Description of Artificial Sequence: Synthetic coding sequence
  source 1..885: mol_type = other DNA
atgccttcagccggtctttgctcctgctggggaggccgggtcttgcctctgctgctggcttacgtgtgttacttgttgttgggtgcaacgattttccagctgctggagcgacaggccgaagcacagtcccgggatcagtttcaactggagaagctccggtttttggaaaactatacttgcctcgaccagtgggcaatggagcagtttgtgcaagtaataatggaggcctgggtgaagggagtgaatccaaaaggaaattctaccaacccaagcaattgggattttggaagctcctttttctttgccggaactgttgtgacgactatcggttatggaaatttagcaccatcaactgaggcaggccaggttttctgtgttttttatgccctgctggggataccactgaacgtcatattcttaaaccatttaggcacaggcctgcgcgcccacctggctgccatcgaacgctgggaagatcgccccagaaggtcacaggtacttcaagtcctcgggctggcgctctttctcaccctggggaccctcgtaattctcatctttccccctatggtgttctcacacgtggaggggtggagtttctctgaggggttctactttgctttcattaccctcagcactatcgggtttggggattacgtggtgggcactgaccctagtaaacactatatttcggtgtacaggtctctagcagctatttggatcttattgggattggcatggttggcgttaatcctccccctgggccctttactcctgcaccggtgctgccagctgtggctcctctcgagaggccttggagttaaggatggcgcggcttcagacccgagcggcctgccccggccacagaaaattcccatctccgcatag

SEQ ID NO: 129378 - DNA, 594 bp, synthetic construct
  misc_feature 1..594: note = Description of Artificial Sequence: Synthetic coding sequence
  source 1..594: mol_type = other DNA
atggaacagttcgttcaagtgattatggaggcctgggttaagggggtaaacccaaagggaaacagtacaaatccttccaactgggattttggcagctccttttttttcgctggtacagtcgtgactaccatcggctatggcaacttagcgccctcaactgaggccggccaggtgttttgcgtgttttacgcactgctgggcataccactcaatgttattttcctgaaccacctagggactggcctgcgggcacaccttgccgccatcgaacgttgggaggacagaccgagacgctcacaggtcctgcaggtcctcggcctggcactgtttctgactttgggcactctggttattctcattttcccccccatggtgttcagccacgtggagggctggtcctttagcgagggcttctatttcgccttcatcacgctgtccacaatcggattcggagattacgtggtgggtctgagacagggctgtggtgccaaggccgcccctgggcgcagacccagaaggggatccactgccgctcgcggggtgcaggtgacccctcaagattttcctatctccaagaaagggttgggatcctag

SEQ ID NO: 129379 - DNA, 999 bp, synthetic construct
  misc_feature 1..999: note = Description of Artificial Sequence: Synthetic coding sequence
  source 1..999: mol_type = other DNA
atgtaccgccctcgagccagagctgccccggagggcagggtgcgtggctgtgctgtgccgtccacggtcctgttgctgctcgcgtacctggcctatttagccctggggacaggagttttctggaccctcgaagggagagccgcccaggatagtagccgatcttttcagagagacaagtgggagttgctacaaaatttcacctgcctcgaccgtccagcgctggattccttgatacgggacgtggtccaagcttacaaaaacggagcttccctactatccaataccacaagcatggggcgctgggaactagtgggaagtttcttcttttccgtaagtacaatcactaccatcgggtatggcaaccttagccccaacaccatggccgctcgtctcttttgtatttttttcgctctggtgggaattccccttaatctggtggtgttaaacagactcggccacctcatgcagcagggggtgaaccattgggcttctaggctgggtggcacctggcaggatcccgataaggctcgatggttggccggctccggggccctgctcagcggattgttgttgttcctcctccttcctcccctactcttttcccacatggagggctggtcctatactgagggtttttattttgcattcatcaccctcagcacggtcggattcggcgattatgttatcgggatgaatccgagccaacgatacccgctgtggtataagaacatggtctccctgtggattctctttggcatggcctggttagcactaatcattaaattaatcctgagccaactggagacgcctggtcgcgtgtgttcttgctgtcatcacagctctaaggaggattttaaatcccagagctggagacagggccccgatcgagaaccagagtcccactcccctcaacaggggtgttaccctgaagggccaatggggatcattcagcaccttgagccctccgcccatgctgctggctgcgggaaagacagttag

SEQ ID NO: 129380 - DNA, 816 bp, synthetic construct
  misc_feature 1..816: note = Description of Artificial Sequence: Synthetic coding sequence
  source 1..816: mol_type = other DNA
atgtaccgccctagggcgcgggcagccccagaaggccgggtacggggctgcgccgtgccctccactgttttgctgctgctggcataccttgcttatcttgccctgggcaccggagtgttctggaccttggaaggcagagccgcccaagactcttccaggagctttcagcgggacaagtgggaactcttgcagaacttcacgtgtctggatagacccgctttagacagcttgatccgcgacgtggtgcaggcctacaaaaatggtgcgagcctgctatctaacaccacatcaatgggtcgttgggagctggtgggttcgttcttcttctcagtatctacgatcaccactatcggatacggaaacctctccccaaatactatggcagccaggctgttctgcatttttttcgcccttgttggcatccccctcaatttggtggtccttaatcgcctcggccatctgatgcagcagggcgttaaccactgggcctcaaggctgggcggcacttggcaggaccctgataaagctcggtggctcgcaggctccggagcccttctgtccggccttctcctgttcttgctgctgcctcctctgttgtttagccatatggaggggtggagctacactgaaggcttttactttgcattcatcaccctgtcgaccgtggggttcggagattatgtcattgcctcatgtctgattagtgacactagaaagccaaaccgcgattggcagacactagaaagaacatctaaatctagcggcggattgctgaagtatagatttttggctggtcatggtggctctcacctgtag

SEQ ID NO: 129381 - DNA, 1155 bp, synthetic construct
  misc_feature 1..1155: note = Description of Artificial Sequence: Synthetic coding sequence
  source 1..1155: mol_type = other DNA
atggaggtcagtggacacccacaagcccgcaggtgttgcccggaagccctcggcaagttatttccaggactctgtttcctgtgctttctcgtcacttatgcactggtcggcgcagttgtcttttccgccatagaagatggccaggttctcgttgctgcagacgacggagagtttgagaagttcctggaggaactgtgccggatcctcaattgttctgagactgtcgtcgaggatagaaagcaggatctccaggggcacctccagaaggtgaaaccacagtggtttaatcggacgactcactggtccttccttagcagcctgtttttctgttgcaccgtgttttctaccgtggggtatgggtatatataccctgtgaccaggctgggaaaatacctgtgcatgctgtatgctctttttggaattcctctcatgtttttagtgttgacggacactggagacatcctggccacgatcctctccacttcctacaaccggtttcggaaatttcccttttttacacgccccctcctgtcaaagtggtgtccaaaatccctttttaaaaagaagcctgatccaaagccagctgatgaagccgttcctcagatcatcatttccgccgaagaactccctggaccaaagttgggaacttgcccctcccggccaagctgttccatggagctgtttgagcggagtcatgctttagagaagcagaatacactgcagctgcctccgcaagctatggaacgctcaaacagttgcccagagctggttctgggacgcttgtcttatagcatcattagtaacctcgacgaagtgggccagcaagtggaaagattggatatcccgctgccaattattgcacttatcgtgttcgcctacatctcctgcgccgcagccattctgcctttctgggaaacgcaactcgattttgaaaacgctttttatttctgcttcgtaaccttaactacaattggctttggggacactgtgttggaacatccaaatttcttcttgttcttttccatctacatcattgtggggatggagatcgtctttatcgccttcaagctggtccagaacaggcttattgacatttataagaacgtgatgctattcttcgcaaaggggaagttctaccacctcgtcaaaaagtag

SEQ ID NO: 129382 - DNA, 459 bp, synthetic construct
  misc_feature 1..459: note = Description of Artificial Sequence: Synthetic coding sequence
  source 1..459: mol_type = other DNA
atgatgaacccccgggcaaaacgtgacttttacctggcagcccccgacctgctcgatcctaaaagcgccgctcaaaatagcaaacctcggctcagcttctctacaaagcctaccgtgttggcctcaagagtggagtccgataccacaattaatgtgatgaagtggaagactgtaagtacaatcttcttagtagtagttctgtatcttattattggagcgaccgtgtttaaggctctggagcagccgcacgaaatttcgcagagaacaactatagtaatccaaaagcagacattcattagtcaacattcatgtgttaatagcacagagctggacgaactaatccaggacctcgagacgagtcaccacgcacagaaagcagctaaatactcagtgtcctcaatgccctactgggaatttccttctctggttttcagttggttggaactcgagatcagttag

SEQ ID NO: 129383 - DNA, 1236 bp, synthetic construct
  misc_feature 1..1236: note = Description of Artificial Sequence: Synthetic coding sequence
  source 1..1236: mol_type = other DNA
atggcagcgcctgatcttctagatccaaaatctgccgcccagaatagcaagcctaggctctcatttagcacaaagcctaccgtgctggcgtccagagtggagagtgacaccactattaacgtcatgaagtggaaaacagtgtctacaatattcctggtggtggtgttgtacctaattatcggcgcaacagtcttcaaggccctcgagcaacctcatgagataagccagagaaccacgatagtaatacagaagcagacctttatctctcaacacagctgtgtcaacagtacggagctcgatgagttaattcagcagatagtggctgctattaatgctggaatcatcccgctaggcaacacctctaatcagatatcccattgggatttaggcagctcattctttttcgccggcaccgtcataactactattggtttcggtaatatcagccctagaaccgagggcgggaaaatattctgcattatctacgcactgctcggaatacccctgtttggcttcctcctcgcgggggttggagaccagttggggacgatctttggaaaaggcattgccaaggttgaggacacctttatcaagtggaacgtgtctcagactaaaatcagaatcatttcaactattatctttatcctgttcggctgtgtcttgtttgtggcgctccctgccatcatctttaagcacattgagggatggtcagcactcgacgcaatttacttcgtggtgattacactgacaacgataggctttggggactacgtcgcaggtgggtccgacatcgaatatttggacttctataagcccgtggtctggttttggatactggtgggtctcgcctatttcgccgccgttctgtccatgattggcgattggctgcgtgttatttctaagaagacaaaagaggaggtaggggagtttcgggcacatgcagcagagtggacggcgaacgtgactgctgagttcaaggaaacaaggcgccggctttctgtggaaatttacgacaagttccaacgagctacctctataaaaaggaagctgtccgccgagctggctggaaatcacaatcaggagctgacaccgtgcagaaggactttgtcagttaatcacttaacatctgaacgggacgttctccctcctttgctgaagacagagagcatttatctgaatgggctgaccccacactgcgccggcgaggagatagcagtcatagagaatatcaaatag

SEQ ID NO: 129384 - DNA, 1269 bp, synthetic construct
  misc_feature 1..1269: note = Description of Artificial Sequence: Synthetic coding sequence
  source 1..1269: mol_type = other DNA
atgatgaatcccagagccaaacgggacttctatctggccgcgccagacctcctggatcccaagagtgccgctcagaatagtaaacccaggctgtccttcagcacaaaaccgacagtcctggcctcaagagttgagtccgatacaaccattaacgtgatgaagtggaaaaccgtgagcacaatattcttggtggtggtgctgtacttgatcataggggctacagtcttcaaggccctcgaacaacctcacgagatctcgcagaggacaaccatcgtgatccagaagcaaaccttcataagtcagcatagttgcgttaattccacagaactcgacgaacttattcaacagattgtcgctgcgataaacgccggcataattccgttgggcaataccagcaatcagatctcacattgggacctgggcagttcattcttctttgctggaacagtgataacaacaattggcttcggaaatatatctccccggaccgaaggagggaaaatattttgcattatctatgctctgctgggaattcccctatttggattcctgcttgccggagttggagatcagctcggaactatatttggtaaggggatcgccaaggttgaggatacgttcataaagtggaatgtgagccagaccaagatcaggatcatatcgacaatcattttcattttgttcggttgtgtgttgtttgttgccctccccgccattatatttaagcatattgagggatggagtgctctggatgccatctattttgtggtgattacccttacaactattggctttggcgactatgtagccgggggctccgatatcgaatatttggacttctataagccagtggtatggttctggattttggtcggactagcctactttgctgctgtgctgagcatgatcggcgattggcttagagttatcagcaagaaaacaaaggaagaggtaggtgagtttagagcacacgctgctgagtggaccgccaatgtgaccgcggagttcaaggaaacccgtaggagactgtctgtcgaaatctatgataagttccagagggccacttcaattaaacggaaactaagtgctgagctagccggcaatcacaaccaggagcttaccccctgccgaagaacgctgtcagtgaaccatctcaccagtgagagagacgttctgccacccctcctaaagacagagtccatttacttgaatggattgactccccactgcgcgggagaggagatcgcagtgatcgagaacatcaaatag

SEQ ID NO: 129385 - DNA, 1281 bp, synthetic construct
  misc_feature 1..1281: note = Description of Artificial Sequence: Synthetic coding sequence
  source 1..1281: mol_type = other DNA
atgcttccatccgccagtagagagcggcctggctatcgagcgggcgtggcggctcccgacctgctagaccctaagtccgcagctcaaaatagcaagccccggctctcattttccactaaaccaactgtgctggcgagtagagtggaatcagataccaccatcaacgtgatgaaatggaagacggtctccacaatatttctcgtggtggtgttatatctaatcataggggccacagtgttcaaagctctggagcaaccacatgaaataagccagagaactactattgtgatacagaaacagactttcatatcacagcacagttgtgtgaatagtacagagctggacgaactgatccagcaaattgttgcagctattaacgccggcattatcccactcgggaatacttctaatcaaatctcccattgggatttaggttcttcatttttttttgcgggcactgttataaccacaatcggatttggcaatattagccctaggactgaaggtgggaaaatcttctgtatcatttacgctttacttgggataccactattcggcttcctcctggcaggtgtgggggaccaattgggtaccatcttcggaaaaggcattgccaaggtggaagatactttcattaaatggaacgtgtctcagaccaaaatccggattatcagtacaattatatttatcctgttcggctgcgtgctgttcgtagcgctgcctgctattatcttcaagcatatcgagggctggtctgctctcgatgcaatctacttcgtggtgatcaccctgacgaccattgggttcggtgattacgtggccggtggcagcgatatagaatatctagatttctacaaaccggtggtttggttctggattctcgtggggctggcgtattttgctgccgtgctgagcatgattggcgattggctcagggtaatcagcaagaagacgaaagaggaggtcggtgaatttcgcgctcatgccgccgaatggacggccaatgttaccgctgagtttaaggaaactagacgccggttgtcagtcgagatctacgacaagttccagcgggccacttcaatcaaacggaagttatcggcagaacttgcaggaaaccataaccaggaattaactccttgcaggaggacactgtccgttaaccatctgacaagtgagagagacgttctgccacctctactcaagaccgagtctatttatctgaacgggctgacccctcactgtgccggggaggaaatcgccgtgatcgaaaacataaagtag

SEQ ID NO: 129386 - DNA, 687 bp, synthetic construct
  misc_feature 1..687: note = Description of Artificial Sequence: Synthetic coding sequence
  source 1..687: mol_type = other DNA
atgatgaacccaagggcaaagagagacttttatctggccgcacctgacctgctggatccaaaaagcgcagcacaaaatagcaagccgagattaagcttctccacaaagcccacagtcctggccagcagagttgagagtgatacaaccataaacgttatgaaatggaaaacagtttccacgattttcctggtcgtggttctctatttaattataggtgctaccgtctttaaagccctggagcagccccatgaaatttcccagagaacgactattgtgatacaaaaacagacatttatctctcaacactcctgtgtcaatagcaccgaactggacgaactgatccagcaaatcgtggcagcgatcaatgccggtatcataccccttggtaatacctctaaccagattagtcactgggatctgggtagcagctttttcttcgccggaaccgtcatcactactattggcttcggaaatatttcgccgaggacagagggcggaaaaattttttgtatcatttatgctctgctgggaataccgctctttggcttcctgttagctggcgtgggtgaccagctggggacgatattcgggaaaggtattgcaaaggtggaggacactttcattgtggaccccatcctcaatatctggacatccatatctctatcctgcggatcaggctcactctag

SEQ ID NO: 129387 - DNA, 471 bp, synthetic construct
  misc_feature 1..471: note = Description of Artificial Sequence: Synthetic coding sequence
  source 1..471: mol_type = other DNA
atgctgccatcagcctcccgcgaacggcctggttaccgagccggagtggctgctcctgatctcctcgacccaaagtctgctgcacagaattccaagcctcgcctcagcttcagtaccaagcccacggttctggcatcaagagtcgaatccgatacgacaataaacgtgatgaagtggaagaccgtgtcgacaatcttcttggtcgtggtcctataccttatcattggggcaacagtttttaaggccttagaacagccccacgaaatcagccagcggaccaccattgtgatccagaaacagacgtttatctctcagcattcgtgcgtgaactctaccgagctggacgaactgatacaggacctggagacgtcccatcacgcgcaaaaggccgctaagtattccgtctccagtatgccctattgggagttcccttcgctggtgttctcatggctcgagctagaaatctcctag

SEQ ID NO: 129388 - DNA, 459 bp, synthetic construct
  misc_feature 1..459: note = Description of Artificial Sequence: Synthetic coding sequence
  source 1..459: mol_type = other DNA
atgatgaacccccgggctaagagggacttctatctcgccgctccagacttgttggacccgaagagcgcggctcagaatagtaaaccaaggctgtcattcagcaccaaaccgactgttttggcatcgagggtggagtcggacacaacaatcaacgtgatgaagtggaagactgtgtccacaatcttcctggtggtcgtgctctatcttattatcggagctactgtttttaaggccctggaacagccccacgaaatatctcagagaactacaatcgtcatccaaaaacagactttcatttcccagcactcctgtgtgaattctaccgagctcgatgagcttatccaggatctggagaccagccaccacgcccagaaggctgcaaaatatagcgtctctagtatgccctactgggaattcccttcactcgttttcagctggctggagctggagataagctag

SEQ ID NO: 129389 - DNA, 1185 bp, synthetic construct
  misc_feature 1..1185: note = Description of Artificial Sequence: Synthetic coding sequence
  source 1..1185: mol_type = other DNA
atgaaaagacagaacgttaggaccctggctctcatcgtgtgcacctttacctatctgttggtcggggctgcagtgttcgatgctctggagtcagagcctgagctgatcgaaaggcagcggctggagctcaggcagcaagagttgagggctcggtataatctgagtcagggcgggtacgaagagttggagagagtggtcctccgattgaagccccataaagccggcgttcagtggcgattcgccgggtccttctacttcgccatcactgtcatcactactatcgggtatggacacgcagctccctcaaccgacggaggtaaggtgttttgcatgttttatgccttgctggggatccccctcacccttgtcatgttccagtcccttggtgagcgcatcaacaccctcgttaggtatctgcttcatagggctaagaagggtcttgggatgcgaagggcagatgttagtatggctaacatggttctgattggcttcttttcatgcattagtaccctgtgcatcggcgccgccgctttttcacactacgaacactggacattcttccaagcgtactactattgctttattactctgacgaccattggatttggtgattacgtggccttgcagaaggatcaggccctccagacacagcctcagtacgtggcgttttcatttgtctacattctgacaggccttaccgtcattggagcgttccttaacctagttgtgcttcgctttatgacaatgaacgcagaggatgagaaaagagacgccgagcatagagcgctcctgaccagaaatggccaggctggcggcggtggcggagggggcagtgcccatactacagacaccgccagcagtactgctgccgcaggtggcgggggattcagaaacgtctacgccgaggtattgcattttcagtcgatgtgttcctgcctgtggtataagtcaagggaaaagctacagtattccatcccaatgataatcccaagagacctttccacttctgatacttgcgtggagcagagccactctagcccaggcggcggaggccggtacagcgatacaccctccaggaggtgtctgtgctcgggcgccccaagaagcgcgattagttcggtgagtactggactccacagcctttcaacctttcggggactgatgaaacggaggtcttcagtctag

SEQ ID NO: 129390 - DNA, 816 bp, synthetic construct
  misc_feature 1..816: note = Description of Artificial Sequence: Synthetic coding sequence
  source 1..816: mol_type = other DNA
atgttccaatccctgggcgagcgtataaacactctcgtgaggtatcttctgcacagagctaagaagggcctagggatgcgccgggcagatgtctccatggctaatatggtgttgatcgggttcttttcttgcatttcaactctgtgcatcggcgcggcagcattcagccattatgaacactggacctttttccaggcctattattattgctttatcaccctgactaccataggcttcggtgattacgtggcacttcagaaggatcaggccctgcaaacccagcctcaatatgtagcattcagttttgtttacatactgacaggactaacagtcatcggggccttcctcaacttagtcgttctgagattcatgactatgaatgccgaggatgaaaagcgtgatgccgagcacagagccctcttaaccaggaacggacaggccggcggtggcggcggtggtgggagtgcccacacaaccgatacggcttcatccaccgccgcggctgggggtggtggatttcgaaatgtttacgctgaggtcttgcatttccagtcaatgtgttcatgtctctggtataaaagtagggaaaaactccagtactctatccctatgataatcccaagggacctctccacttcggacacttgtgtggaacagagtcatagctcacccgggggggggggcagatacagtgacaccccctcgaggcgatgcttgtgctcgggcgcgcccagatccgcaatttcatcagtgtcaaccgggctccactctctgtcaaccttcagagggttgatgaagcgacgttcaagcgtctag

SEQ ID NO: 129391 - DNA, 1182 bp, synthetic construct
  misc_feature 1..1182: note = Description of Artificial Sequence: Synthetic coding sequence
  source 1..1182: mol_type = other DNA
atgagatctaccacccttctggccttgctggctttagtactactgtatctggtgtccggcgccctcgtttttcgggccctggaacagccccatgagcagcaggcgcaacgggagctcggcgaggtgcgggaaaagtttctcagagcgcacccttgtgtctctgaccaagaactgggactgcttattaaggaggttgcagatgccctcgggggcggcgctgaccccgagactaactccacctccaatagctcccattcggcctgggatctgggctctgctttctttttttccggaacgataattacaaccattggttacggtaatgtagcgttaaggaccgatgctggaaggctgttctgcatcttctatgccctagtcgggattcccctgtttggcatacttctggcaggtgtgggcgaccgacttggatcgtccctgcgccacgggattggccacattgaggccatcttcctcaaatggcacgtgccccccgagctcgtcagagttttgagcgctatgctgttcctgctgatcggatgcctgttatttgtcctcacccctacttttgtgttttgctacatggaggactggtctaagctcgaggcaatttactttgtgattgtgactctcaccaccgtagggtttggagactacgtggctggcgccgaccctcgacaggatagtcccgcctaccagccactggtctggttctggattctgctgggcctggcctactttgccagtgtgctaacaacgatagggaactggctgagagtcgtctctcggagaactagggctgaaatgggcggccttacagcgcaggccgcctcatggactgggacagtgactgctcgagttacccagagggccggtccggccgctccccctcccgagaaggagcaacccttattgcccccacctccgtgccccgcccaaccactgggaagaccacgctccccttcacctccagagaaggctcagcctccttcgcctcccaccgcatccgccctcgactacccttccgagaatcttgctttcattgatgagtccagcgacactcagtctgaaagaggctgtccccttcctcgagcgcctagaggcaggcgcaggcctaacccccctagaaaacccgtccggccacgggggccaggccgtccaagagacaagggcgtgcctgtctag

SEQ ID NO: 129392 - DNA, 1182 bp, synthetic construct
  misc_feature 1..1182: note = Description of Artificial Sequence: Synthetic coding sequence
  source 1..1182: mol_type = other DNA
atgagatccaccacgttgctggcgcttctcgctctggtgctcctgtatctggttagtggggctttggtttttagggcgttagagcaaccccacgagcaacaggcacagcgtgaactcggcgaggtgcgcgagaagtttttgcgcgcccatccatgcgtcagcgatcaggagctaggattactcataaaggaggttgctgatgcactgggagggggcgctgatcccgagacaaatagtacctctaattcaagccactcagcgtgggatctaggctccgccttctttttttctggaaccatcattacaaccatcggctatggtaacgttgccctgcggacggacgctggccggctgttttgcattttctacgcattggtgggaattcccctgttcggcattttgctcgctggcgttggagaccggctagggagctcactacggcacggcatcgggcacattgaggcaatcttcttgaagtggcatgtgcctcctgaactggtccgcgtgctttccgcgatgctgtttttactgatcggctgtctgctctttgtccttaccccaacatttgtgttctgttatatggaggattggagtaaactcgaggcaatttatttcgtcattgtgaccctgactactgtcgggtttggtgactatgtagccggcgctgaccctcgacaggacagtccggcttatcagcccctcgtatggttctggatcctgctgggtttggcgtatttcgcatcagtactcacgactattgggaactggcttagagtggtgtctcggcgcactcgcgctgagatgggggggcttaccgcccaggccgcttcttggaccgggaccgttaccgcccgcgtcacccaaagggctgggccggcagcacccccgcctgaaaaggagcagccgctgctcccacccccgccgtgtcccgcgcaaccactgggccgtcccaggtctcctagcccacctgagaaagctcaacccccatcacctccgactgcctctgccctcgactacccgagcgaaaacctcgcttttatcgatgagagctcagacacacagtccgagcgtggttgcccccttccccgcgcaccaaggggacgaaggcgccctaatccccctaggaagcccgtgaggcccagaggccctggtagacctcgcgataagggagtgccagtgtag

SEQ ID NO: 129393 - DNA, 1182 bp, synthetic construct
  misc_feature 1..1182: note = Description of Artificial Sequence: Synthetic coding sequence
  source 1..1182: mol_type = other DNA
atgagaagtacaaccctgcttgcgctcctggcattagtgctgctgtatttagtcagtggtgcccttgtcttccgagccctggagcagccgcatgaacagcaggcccagagggagctgggtgaggtgcgcgaaaaatttctacgagctcatccatgtgtgagcgaccaggagctcggtctgctgatcaaggaagtcgccgacgccctaggcggaggtgccgatcccgaaacaaactcaacctccaatagttcacactctgcctgggaccttggttcggccttcttttttagcgggaccattattacgacaattggatacggcaatgtcgccctcaggacagatgccgggcggctgttctgcattttctatgccttggtaggaatcccactatttgggatccttttggctggggttggcgatcgcttgggttcttctctgagacatggcatcggccacattgaggcaattttcctcaagtggcacgtgccacctgaactggtcagagttctttccgcaatgctgttcttactgataggatgcctcctgtttgtgctaacacccacatttgtgttctgttatatggaagattggtcaaagcttgaagccatttactttgtgatcgtgacgcttactacagtcggatttggcgactacgttgcaggggcagatcccagacaggattcccccgcgtaccagccactggtctggttctggatcctgcttggcctcgcgtattttgctagtgtgctaactacaattggtaactggttgagggtggtctcccgtagaactcgggcagagatgggcggactaacggcacaagccgcctcctggactggaacagtcaccgcacgcgtgactcagagagccggacccgccgcacccccccctgagaaagaacaacccctcctcccacccccaccttgcccggcccagccactaggccgcccacgtagcccctctccacccgaaaaagcacagcccccgtccccaccgaccgcctctgccttagattacccgagtgaaaaccttgcattcatagacgagagctctgacactcagagtgagaggggctgtccccttccacgggctccacgtggaagacgaaggcccaaccccccgcgaaagcctgtgcgccctagaggccctgggcgtccccgggataagggcgtccccgtgtag

SEQ ID NO: 129394 - DNA, 1257 bp, synthetic construct
  misc_feature 1..1257: note = Description of Artificial Sequence: Synthetic coding sequence
  source 1..1257: mol_type = other DNA
accacggctccccaggaacctccagccagacccctgcaagcgggctccggcgccggaccagccccgggcagagccatgagatccacaactctgctcgccctgctcgccctggtcctgctgtatctcgtctcaggggcactcgtgttcagagctcttgaacagccacatgagcagcaagcccagcgggagttgggcgaagttagagaaaagtttctgcgggcgcacccttgtgtgtctgaccaggagctggggctgctcataaaagaagtggcagacgctttaggaggcggcgctgatcctgagaccaatagtacaagcaactcttcacacagcgcctgggacctgggtagtgcttttttctttagcggcaccataatcacaacaatcgggtatggaaatgttgcgctaaggacggacgccggtcgcctgttctgtatcttttacgccctggttggcatccctttgttcggcatccttttagccggtgtgggtgatcggttaggctcatcgctacgacatggaatcggccatatcgaggccatctttctgaagtggcatgttccccccgaattagtgagggtactgtctgcaatgctttttctactcatcggctgtctgctgttcgtgctgactcctacctttgtgttttgttatatggaggactggagtaagctggaggctatctacttcgtgatagtgacacttactaccgtggggtttggagactatgtcgcgggggccgatccaagacaggacagcccagcgtaccagccgctcgtttggttctggatccttctgggcctggcctattttgcatcagtgcttaccaccatcggcaactggttaagggtggtcagccggaggacacgtgccgagatggggggcttaactgctcaggcagcctcctggaccggaaccgtgaccgctcgcgttactcaaagagctgggcccgccgcccctcctccagagaaagaacagccactcctgccccctccaccctgcccagcacagccattaggacgtccaaggtctccatctcctcctgagaaggctcagccaccatcaccacccaccgcgtccgctctggactacccctctgaaaatcttgcatttatcgatgaatcctctgacacccagtcagagcggggatgccctctgcctcgggcaccccgcggtcgccgaagacctaatcccccccgcaagcctgtgagacctagaggaccaggcagaccccgcgacaaaggggtccccgtgtag

SEQ ID NO: 129395 - DNA, 1368 bp, synthetic construct
  misc_feature 1..1368: note = Description of Artificial Sequence: Synthetic coding sequence
  source 1..1368: mol_type = other DNA
gtgcatgcttcagtgcacacccgagtccggggcctttgggtcccttggcggggtcgtcatgcccatggtgggaggggttgtagaggagtatgcggggagtgccggtgggtgacgaccgcccctcaggaaccaccagcgcgacctctgcaggctggatcgggagccggtcccgcaccagggcgggccatgaggtctactacattactcgccctattagccttggtgctattgtacctggtgagcggcgcactagtattcagagcccttgagcaacctcatgagcaacaggcacagagggagctgggagaggtcagggagaagtttctgcgggcacacccttgcgtgtccgatcaggaattaggcttgttaataaaagaagttgcagacgctttaggcggaggagcggaccctgagaccaactccacatctaactcaagccattctgcctgggatctgggaagcgccttttttttttccggcactatcatcaccacaattgggtacgggaatgtggcactcaggacagatgctgggcggctattctgcatcttctatgctctagttgggatccccctgtttggcattcttttggctggcgtgggggacaggctgggtagctccttaagacacgggatcggccatattgaggcgatctttctgaagtggcacgtgccaccagaactggtacgagtgctctctgcaatgctgttcctgctaatcggatgcctgctctttgtactcactccaactttcgtgttttgttatatggaggactggagtaaacttgaggccatctactttgttatcgtgacactaaccacggtgggctttggagattatgttgcaggcgccgacccaaggcaggatagcccggcatatcagcccttagtgtggttttggattctgctgggcctcgcatactttgcctccgtgctgaccactatagggaattggttgagggtggtctcacggaggacgcgggccgagatggggggattaacggcccaggctgccagttggaccgggactgtgacggctagggtcacccagagagccgggcctgcggcccctcctccagaaaaggaacagccactcctgccaccgccgccttgtccagcccagcctctcggccgaccccgctccccttctccgcctgaaaaagcccaaccaccatctcctcccacagcatccgccctggactatcccagcgaaaacctggcttttatagatgagagctcagatacccagtcggagaggggatgcccgttaccgcgggcaccccgagggcgcaggcgtcctaatccaccgcgcaagccagtgaggcccaggggcccaggccgccctcgtgataagggggtgcctgtgtag

SEQ ID NO: 129396 - DNA, 1500 bp, synthetic construct
  misc_feature 1..1500: note = Description of Artificial Sequence: Synthetic coding sequence
  source 1..1500: mol_type = other DNA
atggtggatagaggtcccctgctgacctctgcaatcattttctacctggccattggagccgctattttcgaggtgcttgaggaacctcactggaaagaagccaaaaagaattactatactcagaagctgcatctactgaaggagtttccttgtctcggacaggaggggttggataaaatcttagaagtagtgtctgacgccgccgggcaaggtgttgctattacaggtaatcagacttttaataactggaattggcctaacgcgatgatattcgccgcaaccgtcattactactattgggtatggcaacgtggcacccaagaccccggccggacggctcttctgcgtcttctacggtcttttcggggttcccttatgcctcacttggatttctgctctgggaaaattctttggggggcgagcaaaaagactaggccagttcctcacaaagcgaggcgttagtctcaggaaagcacagattacatgcacagtaatttttatagtgtggggggttcttgtgcacttagtgatcccaccattcgtgtttatggttactgagggatggaattacatcgaagggctttattacagcttcattacaatctctaccatcggatttggcgactttgtggctggcgtgaacccatccgcgaattaccatgcactttaccgctattttgtggagctctggatatatttaggactggcgtggctgagtcttttcgtgaactggaaggtgagcatgttcgtggaggtgcataaggctatcaagaagcggcgcaggcgacgtaaagagagtttcgagtcttcgcctcacagcaggaaagcactgcaggtcaaaggctcgacagccagtaaggacgtgaacatcttttcgttcctgtctaaaaaggaggaaacgtacaacgacctgattaagcaaatcggtaagaaggccatgaagactagcggcggcggcgagactggacctggccctggactgggaccacagggaggcggcttgccagcactccctccatcgctggtgccacttgtagtatactccaaaaaccgggttcctactcttgaagaggtctcacagacactccgttcaaagggacatgttagcaggagcccagatgaggaggccgttgctcgcgctcccgaggattcctcacccgctcctgaagtttttatgaaccagcttgatcggataagcgaggaatgcgagccgtgggatgcacaggactaccacccgctcatatttcaggatgctagtataacttttgtaaacactgaagctggtctttctgatgaggagacttcaaagtcaagtcttgaggataacctggcaggcgaagaatcccctcagcagggcgccgaggctaaagcacccctgaatatgggcgagttccctagctcctccgagagcacgttcacaagcactgaaagcgaactgagcgtcccttatgaacagctgatgaacgagtataacaaggcaaacagccctaagggaacctag

SEQ ID NO: 129397 - DNA, 942 bp, synthetic construct
  misc_feature 1..942: note = Description of Artificial Sequence: Synthetic coding sequence
  source 1..942: mol_type = other DNA
atgagacggggcgcgctgttggcaggtgccctagcagcctacgccgcctacttggtgctcggagctctgttagtggccaggctggaggggccccatgaggcaaggctgcgcgccgaattagagaccctgcgagcccaacttctccaaagatccccttgtgtcgccgcaccggccctcgatgcttttgtcgagagggtgctggctgccggccgcctgggtcgcgtagtcctggcgaatgctagcggatctgcaaacgccagcgaccctgcttgggactttgcttctgctctgtttttcgcctccaccctgattaccacagtagggtatgggtacaccactccactgaccgatgcaggaaaggccttctcaattgcattcgcattgcttggagtccctactactatgttgctgctgactgccagtgcacagagactgagtctcctgctgacgcatgtgcctctgtcctggctcagcatgaggtggggttgggatccaaggagagcggcctgctggcatctggtggcgcttttaggcgtggtcgtgactgtgtgtttcctggtgcctgccgtgattttcgcacatctggaagaggcatggtcttttttagacgcattttacttttgtttcatttccctgagcacaatcggcctgggcgattatgtgcctggcgaagccccaggccagccttaccgcgctctttataaggtactcgttaccgtgtatctatttcttgggttagtcgcaatggtgttggtcctgcagaccttcagacatgtgagcgatctgcacggccttacagagttgatattactccctcctccatgccccgcgtcctttaacgccgatgaagacgatcgtgtcgacattctgggtcctcaacctgagtcacaccagcaactctctgccagcagccacactgattacgctagcataccgcgttag

SEQ ID NO: 129398 - DNA, 924 bp, synthetic construct
  misc_feature 1..924: note = Description of Artificial Sequence: Synthetic coding sequence
  source 1..924: mol_type = other DNA
atgggagggttgaggccctggtctcgttacggcctcctggtggtggcccatttgttggcactgggactcggtgctgtcgtctttcaagcccttgaggggccccccgcatgccggctgcaggcagaactccgggccgaactggcagccttccaggcggagcatagggcgtgtctacctccaggggccctcgaggagcttctgggcacagctcttgcaacccaagcccacggagtttcaacactgggcaactcgagcgaggggcggacgtgggacttgccttctgccttactcttcgcagctagcatcctgaccaccactgggtatggccatatggccccactcagtcctggcgggaaagccttttgtatggtgtacgccgctctcgggctgcccgcttcactcgcattggtggccacgcttcgtcactgtctgttacctgtcttatcacgaccacgggcgtgggtcgcagtccactggcagctctcccctgcacgagcagccctattgcaggccgtggcactgggcttgctagtagcttctagctttgtcctgctaccggcacttgtgttgtgggggctccagggcgactgttccctgttaggagccgtgtatttttgcttctccagtctttccactattggtctggaggatctgctgcctgggcggggcagatcccttcacccagtgatttatcacctggggcagttggctctcctggggtacctgctgctgggactgctcgccatgcttctcgcagtggaaacgttttccgagctcccgcaggtgagagccatgggtaagttctttcgaccatcaggcccagtgaccgcagaggatcaaggcgggattcttggtcaggatgagctcgctctgtccaccctgccacctgctgctccagcgtcagggcaggctcctgcctgctag

SEQ ID NO: 129399 - DNA, 759 bp, synthetic construct
  misc_feature 1..759: note = Description of Artificial Sequence: Synthetic coding sequence
  source 1..759: mol_type = other DNA
atgggggggctgaggccctggtctcgttacggcctgctggtggtcgcccatctgctggcactgggtcttggcgctgtggtttttcaggccctggagggaccacctgcttgcagactgcaggccgagttgcgcgccgagctcgccgctttccaggcggaacacagagcctgtcttccaccaggggcactcgaagaactactcggtaccgcccttgccactcaagcccatggggtttctactctgggcaattcaagcgaagggaggacctgggacctcccctctgcactgttatttgcggcctcgatcctcacgaccactggctacggtcacatggcccccttaagccctggggggaaggccttctgtatggtttacgccgctctgggtttgccagcatctttagcactggtggcaaccctgcgccactgcctattgcccgtcttgagccgcccacgagcctgggtcgccgtccactggcagctcagccccgctcgcgctgccctgcttcaggccgtggccctaggcttgctcgtggcttcatcgttcgttcttttgccagccttggtgctctggggcctacagggagactgttcactgctgggcgcagtttatttttgtttctcatccctctccacaatcggactcgaggatctcttacctgggcgggggcggtcactgcaccctgtgatttatcatctcggtcagctggcattactgggcgggggtacgagcttgcaaggtaccgcctgggagggttag

SEQ ID NO: 129400 - DNA, 774 bp, synthetic construct
  misc_feature 1..774: note = Description of Artificial Sequence: Synthetic coding sequence
  source 1..774: mol_type = other DNA
atggggggactgcgcccctggagccgatacggtcttctcgtcgtcgcccatttgctcgcactggggctgggcgccgtggtgtttcaggctcttgagggaccccctgcttgtagactgcaggctgaactgcgcgccgaactggcggcatttcaagcggagcatagggcttgcctgccccccggagccctggaagaattgctgggtaccgcactcgcaacgcaggcccatggcgtaagcacattgggtaactcctcagaggggcggacatgggacttgccgtcagctctactgtttgctgctagcattttgacaactacaggctatggccacatggcgccactgagcccaggcggcaaggcattctgcatggtctacgctgctctcggactcccagcatccctggctttagtcgcaacactacgccattgtctgctgcccgtcctttcccgccctagagcctgggtggccgtgcactggcaactatcccccgcacgggcggcccttcttcaggcggtggcactgggactgctggtggccagcagttttgtcttgttaccagctctggttttatggggtttacagggcgattgctcgcttctgggcgcagtctatttctgctttagttccctgagcactatcgggctggaagatctcctgcccggccgcggccgctccctgcatcctgtgatctaccatctgggacagcttgccctgttgggtaagagttcacatctcacagcgtgcggtggacgcgggaagcggagcctggactag

SEQ ID NO: 129401 - DNA, 759 bp, synthetic construct
  misc_feature 1..759: note = Description of Artificial Sequence: Synthetic coding sequence
  source 1..759: mol_type = other DNA
atgggtggcctgcgaccttggagtaggtacgggctgctcgttgtggctcatctgctggcactgggactcggcgcagtggtattccaggccctcgagggaccgcctgcctgtaggctgcaggcagagctgcgggctgagttggctgccttccaggctgagcacagggcttgcctcccaccaggggcactcgaagaactgctgggaacggcccttgccacccaggcccacggggtttccacccttgggaactcaagcgaggggcggacgtgggacttgcctagcgcactcctcttcgccgcctccatactgactacaaccggctacggacacatggccccccttagtcccggtggcaaggccttttgtatggtttatgcagccctgggcctgccagcgagtttggcgctggtcgcaaccttgcgccattgtctcctacccgtgcttagcagaccaagggcatgggtggccgtgcactggcagctgtcaccagcaagggcggctttattgcaggccgtggccctgggcttgttggtggcatcctcctttgttctgctccctgctcttgtgctctgggggttgcagggggactgttctttgctgggggctgtctacttttgcttcagttctttgagtacaataggccttgaggacctccttccgggacgcggccggagcctccatcctgtgatctatcatctgggtcaattggctctgctgggtggagggactagcctgcagggaaccgcctgggagggatag

SEQ ID NO: 129402 - DNA, 87 bp, synthetic construct
  misc_feature 1..87: note = Description of Artificial Sequence: Synthetic coding sequence
  source 1..87: mol_type = other DNA
tgactacacccggtaatctatcacctgggccaactggccttgttgggcggaggcacgagcctgcagggcaccgcttgggaggggtag

SEQ ID NO: 129403 - DNA, 1125 bp, synthetic construct
  misc_feature 1..1125: note = Description of Artificial Sequence: Synthetic coding sequence
  source 1..1125: mol_type = other DNA
atgaaacgacagaatgtgcgcactcttagcctgatagtgtgtacctttacttacctgctggtgggcgcggcagtctttgatgcgctcgagagtgaccacgaaatgagggaagaagaaaaacttaaagccgaggagattcgaatcaagggcaagtacaatatatcaagtgaggactatcgccagctggagctggtaattctgcagtctgaaccccatcgagccggagttcaatggaagtttgccggctcattctacttcgctatcaccgtgatcacaactataggctacgggcacgccgctcctggtactgatgccgggaaagcattttgcatgttctacgcagtgcttggaattcctctgaccctggtgatgttccagtccctcggggagcggatgaacacgtttgtgcgatatctgctcaagcgaataaagaagtgttgcggaatgcggaacaccgatgtttcaatggagaacatggtgaccgtcgggttcttttcatgcatgggtacgctgtgtataggcgccgccgcattcagccagtgcgaggagtggtcttttttccatgcctattattactgtttcatcacacttacaacaatcggctttggggattacgttgctctgcaaactaaaggtgctctccagaagaagccactgtacgtggctttttccttcatgtatatcctggtgggcctgacagtgattggcgcattcttgaacctcgttgtgctgcgctttctcactatgaactcggaggacgagagacgcgatgccgaggagcgagctagtctcgctggcaacaggaatagtatggtgattcacatcccagaggagcctaggccttcccggccacgctacaaggccgacgtgccagatctgcaatctgtgtgctcttgcacatgctatcgctcacaggactatggcgggcgaagcgtcgcgccacaaaactctttcagcgccaaactggctcctcattattttcattctattagctacaaaatagaggagatttctccctctacactgaagaacagcctctttccaagccccatcagctctatctcacctggactgcacagtttcacagaccatcagagactgatgaagcgacgaaaatcggtctag

SEQ ID NO: 129404 - DNA, 1125 bp, synthetic construct
  misc_feature 1..1125: note = Description of Artificial Sequence: Synthetic coding sequence
  source 1..1125: mol_type = other DNA
atgaaaaggcagaacgttcgcacgttatcattaattgtgtgcaccttcacttacctgcttgttggggccgccgtgtttgatgcactcgaaagtgaccatgaaatgcgggaggaggagaaactcaaggcagaagagatcagaataaagggaaaatataatattagctccgaggattaccgacagctcgagctggtaattctacaatctgaaccccaccgggccggtgttcagtggaagttcgccgggagtttctactttgccatcacggttatcactacaatcggttatggtcacgccgcacccgggacagacgccggcaaagctttttgtatgttttatgctgttctcggaattcctctgaccctcgtgatgttccaaagcctgggcgagcgcatgaacacttttgttaggtatctactcaagcgcatcaagaaatgttgtggcatgagaaacacagacgttagcatggagaatatggtgacagtcggctttttttcatgtatgggcacgctctgtatcggggcggctgccttctcacagtgtgaagagtggagcttcttccacgcctactattattgctttatcaccctgactaccattgggtttggcgactatgtagcgctgcaaaccaaaggagccctccagaagaaaccattgtacgtcgctttttcgtttatgtacatactggtagggctcaccgtcataggggctttccttaatttggtggtcctgaggttcctcaccatgaacagcgaggatgagagaagagacgctgaggaacgcgctagtcttgccgggaaccggaatagcatggtaattcacatcccagaggagccgaggccatcacgccccaggtacaaagcagacgtgccagacttacagtctgtctgtagttgtacttgttacaggtcacaagactacgggggcaggtccgtcgcccctcagaactccttcagtgctaaactggctcctcactactttcactcaatctcctataaaatcgaggagatttccccgtccacccttaaaaacagtctcttcccgtctcccatctcaagtatcagcccgggattgcattcctttaccgatcaccagcgactcatgaagcggcgaaagtctgtgtag

SEQ ID NO: 129405 - DNA, 1125 bp, synthetic construct
  misc_feature 1..1125: note = Description of Artificial Sequence: Synthetic coding sequence
  source 1..1125: mol_type = other DNA
atgaagcgccagaacgtcagaaccctatctctcattgtttgcaccttcacatacctacttgtcggggcggctgtttttgacgccctcgagtccgaccacgaaatgcgggaggaggagaaattgaaggccgaagaaatccgtattaagggaaaatataacattagttctgaagactaccggcagttggaactggtgatactccagtccgagcctcacagggccggcgtgcagtggaaattcgctgggtccttttactttgctatcacagtaatcaccactattgggtacgggcatgcagccccaggaacagacgcgggcaaagccttttgtatgttctacgccgttctgggaatacccctgacactcgtcatgttccagagcctgggcgagaggatgaacaccttcgttagatacctgttgaagagaatcaagaaatgttgtggaatgcgtaacactgatgtaagcatggaaaacatggtgactgttggatttttctcttgcatgggaacgctctgtatcggcgcagccgccttttcacagtgtgaagagtggtcctttttccacgcctattattattgcttcataacccttaccactattggtttcggcgattacgttgctctgcaaactaagggagctctacaaaaaaaacccctgtacgtggctttttcgtttatgtacattctggtgggactcactgtcatcggcgcatttctgaacttggtagtgttaaggttcctaacgatgaacagcgaagacgagaggagggatgcagaggagcgtgcctcccttgcgggcaatcggaatagcatggtcatccacatccccgaggagcccaggccttcccggccaaggtacaaagccgacgtacctgatctccagagtgtgtgcagttgcacttgttatagaagtcaagattacggagggaggagcgtagcgccacagaattcatttagtgctaaactggcaccccactatttccatagtattagctataagatcgaggagatctctccttccacactcaaaaactccctcttccctagccccatatcatccatttctccgggcttgcactcttttacagaccaccagagactaatgaagaggcgcaagtcagtctag

SEQ ID NO: 129406 - DNA, 3693 bp, synthetic construct
  misc_feature 1..3693: note = Description of Artificial Sequence: Synthetic coding sequence
  source 1..3693: mol_type = other DNA
atggcgagagcaaagctgcccagatcccctagcgagggcaaagccgggccgggaggagctccagccggcgctgcagcccctgaggaacctcatggtctgagtcctctccttcccgctcgtgggggagggtccgtagggtctgatgtcgggcagcgactccccgtggaggacttttcccttgactccagcctcagccaggtacaggtggaattctatgtgaacgagaatacattcaaggaacggctgaagcttttcttcataaaaaatcagcgaagctccctgcgcatcaggcttttcaatttttcgctcaaacttttaacctgtcttctgtacatcgtacgagtgctcctggatgatccagctttgggtatagggtgctggggctgtccaaagcaaaattactcctttaacgattctagctctgaaattaattgggctccaatcctatgggtagaacgaaaaatgactttgtgggccattcaagtgatcgttgctatcatttcatttttagagacaatgctcctgatctacctctcctacaaggggaatatttgggaacagatctttcgagtgagcttcgtcctcgagatgattaacaccctgccattcatcataacgatcttctggccacccctgcgaaacctgttcatccctgtattcctgaactgttggctggccaaacacgctctggagaacatgataaacgacttccacagggccatcttgcggacacaatcagccatgttcaatcaggtactaattctgttttgtaccctcctttgtctcgtgtttaccgggacttgtggaattcagcatctggagagggccggcgagaacctgtcccttctaacatctttttacttctgtattgtgactttcagcactgtgggatatggcgacgttacaccaaagatttggccttcccagcttctggttgtgattatgatttgcgtggccttagttgtgcttcctctgcaatttgaagagttagtatatctctggatggaaagacaaaagtcaggaggaaactactcccgacacagagcacagacagagaaacatgtagtgctctgcgtgtcgagtctgaaaatagatctgctaatggattttctgaacgaattttatgcgcaccccaggctgcaggactactacgttgtgatattatgccccactgagatggacgttcaggtgcgacgagtgctccaaatccccctgtggtcccaacgtgtgatctatctgcagggtagtgccctcaaagatcaggatttaatgcgagccaagatggacaatggagaggcatgctttattctgagttcccggaatgaggttgatcgtaccgcggcggatcatcagacaatcctgagggcctgggccgttaaggatttcgcccccaattgccctttatacgtacagatcctgaagccggagaacaagtttcacgtgaaatttgcagatcacgttgtgtgtgaggaagagtgcaaatacgcgatgttagcactgaactgtatatgcccagctaccagcacattgatcaccctcctagttcatacatcacgcggtcaggaaggtcaggaatcgccggagcagtggcagcgcatgtacggaagatgctccgggaatgaagtgtaccatatacgaatgggtgacagcaagtttttcagagagtatgaagggaagtcttttacatatgcggctttccatgcccataaaaaatacggagtttgcctgatcgggctcaagagggaggataataaatctatccttctcaaccccgggcctcgccacattttggccgcctcagacacatgcttttacattaatatcaccaaggaggagaactctgcttttatttttaaacaggaggagaaaaggaagaaacgggccttttcaggccaaggcctgcatgagggacctgcccggttaccggttcactcgattattgctagtatggggactgtggcaatggatttgcaagggaccgaacacaggccaacgcagtccggtggtggcgggggaggcagtaaacttgctctgccaacagagaatgggtccgggtcacgccggccctccatcgcacccgttcttgagctagccgacagcagtgcactcctgccatgtgatcttctaagtgatcagtccgaagacgaggtaaccccttccgatgacgagggactgtctgtcgtggagtatgtcaagggctacccccccaacagtccgtatattgggtccagcccgacactctgccacctgctgcctgtcaaagcccccttctgttgcttaaggttggataaaggctgcaagcataacagctacgaagatgccaaagcttacggtttcaagaacaaactcattattgtttcagctgagacagccggcaacggtctttataactttatcgtgcccctgagggcctactacagatctcgtaaggagctgaatcctatagtgttgctgctcgataataagccagatcatcatttccttgaggccatctgctgcttcccaatggtgtactatatggaagggagcgtggacaacttagattctctgctccagtgcggcatcatctacgctgataatctcgtggttgtagataaagaatctacaatgtccgctgaggaggattacatggccgatgctaaaacaattgttaatgtgcaaacaatgtttagactctttccatcactgtccataaccactgagctgactcatcccagcaacatgcgtttcatgcagtttcgggctaaagactcatacagcttggccctttccaagttggaaaaacgggaaagagaaaacggctccaacctggcctttatgttcaggctgccctttgccgccggacgggtcttttccatatcgatgttagacaccctgctctaccaatccttcgtgaaagactacatgataacaatcacaaggctactgctcgggctcgacacaacccctgggtccggctacttgtgtgcgatgaagattacagagggcgatctgtggattcggacttatggtcgcctgtttcagaaactgtgctcctcatccgcagaaattcccatcgggatctacagaaccgagtctcacgtattctcgacctcagaatctcagatctcagtcaatgtcgaagactgcgaagacactagagaagtcaagggaccctggggctcgcgggccggaacaggcggatcctcacaaggcaggcacaccgggggcggggacccggccgaacatccgctgctgcgaagaaagagcctgcagtgggctagaagactaagcaggaaagcccccaagcaagctggcagggcggccgctgctgaatggataagccagcagcgcctttccttgtatcgcagatccgaacgccaggagctttctgaactggtcaagaaccgtatgaaacatctgggcctcccgaccaccggttatgaggatgtcgccaaccttactgcatctgatgtgatgaaccgcgttaatctaggatacctgcaggacgagatgaacgaccaccagaataccctaagctacgtcctgattaaccccccacctgacactcgtctggagcccagcgacatcgtgtaccttatacgctccgatcccttggcccacgtggcctcttcaagccaatctcgaaaaagctcctgctctcacaaactcagctcgtgtaacccggagacccgtgacgagacccaactctag

SEQ ID NO: 129407 - DNA, 3771 bp, synthetic construct
  misc_feature 1..3771: note = Description of Artificial Sequence: Synthetic coding sequence
  source 1..3771: mol_type = other DNA
atgcccttacctgacggcgctcgaacacccggaggtgtgtgcagggaggctcgcgggggaggatatacaaataggacctttgagtttgacgatggacaatgcgccccccgccggccgtgtgcaggggacggagctctcctggacaccgccggtttcaagatgtcagacctggatagcgaagtcctccctctgccacctaggtatcgattccgggatcttttgctgggagaccccagctttcaaaatgacgatcgagtacaagtagaattctatgttaacgaaaacacattcaaggagaggttgaagctgttcttcattaaaaatcagagatccagcctgcgcataaggctgttcaacttcagtctcaagctgttgacttgcctcctgtacatcgtgagggtcctgctggatgaccctgcccttgggattgggtgctggggatgtcccaagcagaactattcattcaacgatagcagtagcgagatcaactgggcccctatcttgtgggtggagcgcaaaatgactctttgggccatacaagtgatagtcgccataattagtttcctggagaccatgttgctaatctacctgtcctataaggggaacatttgggagcagattttccgagtgagtttcgtgctggagatgatcaatacccttcccttcatcatcacaattttttggccacccctgaggaacctgttcatcccggtgttcctcaactgctggttggccaaacacgccctagagaatatgatcaacgatttccaccgggcaattttgcgcacccagtctgctatgttcaatcaggtgctgatcctcttttgtacgctcctgtgtttggtgtttactggcacctgcggcattcagcatcttgaaagagctggcgagaatctctcactactgacctccttttacttctgcatcgtgaccttctcaaccgtggggtacggggacgtcacccctaaaatctggccttcccagctgcttgtggtgattatgatatgtgtggcccttgtagtgctcccacttcagttcgaggaattggtttatctctggatggagagacagaagtccggcggaaactattctcgccatagggcccagacagagaagcatgtagtactctgcgtttctagcctgaaaatcgacctgctgatggactttctcaacgaattttatgcccatccccggttacaggactattacgtggtcattctttgcccaactgaaatggatgtgcaggttagaagggttctgcaaatcccgctgtggtcgcagcgagtgatctatctgcagggtagcgctctcaaggaccaggacttgatgcgcgccaaaatggacaacggggaggcctgttttatactcagttctagaaatgaggtggaccggactgccgcagatcatcagactatcctgagggcttgggcggtcaaagatttcgcccctaactgcccactctacgtccagatcctgaagcccgaaaacaagtttcatgtgaaatttgccgaccatgttgtctgtgaggaggaatgtaaatatgcaatgttggctctgaattgtatttgccccgcaaccagcactctcattactctgctcgtgcatacatccaggggccaggagggccaggaaagtcctgaacagtggcagaggatgtatggccgttgtagcggcaatgaagtgtatcacatcaggatgggggacagcaaattcttccgcgaatacgagggaaagagcttcacctacgctgcatttcacgcacataagaaatacggggtttgcctcatcggtttaaaaagggaggataataaatctatcctactgaaccctggcccccgacatattttagctgcttcagacacatgcttttatatcaatatcacaaaagaggaaaactccgcattcatctttaagcaagaggagaagagaaagaagagggcatttagtggtcaagggttgcacgaggggcccgcaagactgcccgtccattccattatagccagtatgggaactgtggccatggacctacagggcacagaacaccggccgactcagtctggaggcggtggggggggctcaaaacttgctctcccaacagaaaatggctctggctctcgccgtccctccatcgcaccagtgctagaactggccgactccagtgccttgctgccgtgtgacttgctttcagaccagtctgaggatgaagtgacgccgtctgatgatgagggactgagcgtggtggagtatgtgaaaggctacccccccaattctccctacattggcagcagccctaccctctgccacctacttcctgttaaggctcccttttgttgcttacgccttgataaaggttgtaagcataattcttatgaggacgcaaaagcatacgggttcaaaaataaactcatcatagtgagcgcggaaactgctggaaatgggctgtataattttatcgtcccactgagggcatactacaggtcgagaaaagagctgaacccaattgttctgttgctggacaacaaacccgatcatcattttcttgaagccatttgttgtttcccaatggtctactacatggaggggtctgtcgacaacttggattctcttctccagtgtggaatcatctacgccgataatcttgtggtggtggataaggagagcacaatgagtgctgaggaagactacatggccgatgcaaaaactattgtgaacgtgcagactatgttccgtctgttcccctctctctccatcaccacagagctgacccaccccagcaatatgcgcttcatgcagtttcgcgccaaagatagttacagtctggctttaagcaaacttgagaagcgcgaaagggagaacggatctaacctcgctttcatgttcaggctacccttcgccgctggtagagttttttcaatctcaatgctggacacgctgttataccagtctttcgtgaaggactacatgattaccatcactcgactgcttctgggcctggacacaacccctgggagcggttacctctgtgcgatgaagatcacggagggagatttgtggattcgaacatatggtcgtctttttcagaagctttgtagttctagcgccgagatccccatcggcatctacaggacagagagtcatgtattctctacttctgagccccacgatctgagagcgcagtctcaaatctctgttaacgtggaggactgcgaagatacccgggaagtcaaaggaccatggggaagcagggcagggaccggcggcagcagccaagggaggcataccggaggcggagatcctgcagagcacccgctcttacgcagaaaatcattacagtgggcaaggcgcctgagcaggaaagcacccaaacaggctgggcgcgctgcagccgcggaatggatctcccagcagcgattgtccttgtacaggcgcagcgagcggcaggagctcagtgagctcgtgaagaacagaatgaagcatctgggtcttccaaccacaggatatgaagacgtggccaacctcacagcatccgacgtgatgaaccgggttaacctcggatatttgcaggacgagatgaacgaccaccagaacacactgagctacgtgcttattaaccctccgcctgatacacgacttgagcctagcgacatcgtatacctaattagaagtgaccctcttgcacacgtagcttctagcagtcagtcccgcaagagttcgtgctcacacaagctttcctcgtgcaatcctgaaactcgggacgaaacacagctctag

SEQ ID NO: 129408 - DNA, 3708 bp, synthetic construct
  misc_feature 1..3708: note = Description of Artificial Sequence: Synthetic coding sequence
  source 1..3708: mol_type = other DNA
atgcctctccccgacggcgcccgcacccccggcggcgtgtgtcgagaggcgcgaggaggaggctacacaaatcgaactttcgagttcgatgacggacagtgtgctccccgccgcccgtgcgcaggggacggggcccttctcgacactgcaggatttaagatgtctgacttagattctgaggttctaccactcccgccacgctacaggttcagggatctgctgctgggtgatcctagtttccaaaatgatgatagggtgcaggtggagttttacgtgaatgagaatacattcaaagaaaggctcaagctgttctttattaagaaccagcggtccagtcttcgaatcagattattcaacttctcccttaagcttcttacttgtctgctgtacattgtgcgagttctcttggacgaccctgctctcgggattggttgctgggggtgccccaagcaaaattattccttcaatgacagctcctctgagatcaactgggcccctattttatgggtggaaagaaagatgactctttgggccatccaagttattgttgctattatcagctttttggagactatgctgttgatctacctgagctacaaaggcaacatctgggagcagatctttagggtgagtttcgtgctggagatgatcaatacactgccatttatcatcacaattttctggcccccgctacgaaacttgtttatccccgtgttcttgaactgttggctggctaagcacgctctggagaatatgatcaatgattttcaccgagctattctgcgcacccagtccgccatgttcaatcaggttttaatcctcttctgcactttgctctgtctggtgtttacaggcacatgcgggatacaacacctcgaacgcgcgggagagaatttatcactacttacaagtttctatttctgcattgtcaccttcagcaccgtgggttacggcgatgtgacacctaaaatctggccttctcagttgctcgtggtgatcatgatctgcgttgccctggttgttctgccacttcagtttgaggaacttgtttacctgtggatggagagacaaaagagtggaggtaactactctaggcacagggcgcagactgagaagcacgtcgttctgtgcgtctcatctttaaaaattgaccttctgatggacttcttgaatgagttctatgcccatcctcgcctccaggattattacgtagtcattctgtgtccgactgaaatggacgtacaggtgaggagagtcctacagattcccctctggtcacagagggttatttacctccagggctctgcactgaaagaccaggatttgatgcgcgcaaaaatggataacggagaagcttgcttcatcctgtcaagtcggaatgaagtggataggaccgccgcagaccatcaaactatcctccgcgcttgggccgtgaaagacttcgcacccaactgcccactttacgtgcaaattctaaaacccgagaacaagttccacgttaaatttgccgaccacgttgtatgtgaggaggagtgtaaatacgctatgctcgcgctcaactgcatctgtccagctacgagcactttaatcacactcctggttcatacctcccgcgggcaggagggacaagaatccccagaacaatggcagcgtatgtatggacggtgctctgggaatgaggtgtaccacataaggatgggggactcgaagttctttcgagagtatgaaggcaagagctttacttacgcagctttccacgctcacaaaaagtatggggtatgcctaataggtctgaagagggaggacaacaagtccatcctgctgaatcccggaccaaggcatatcctcgctgctagcgacacctgcttctacattaatattactaaagaggagaatagcgcgttcattttcaaacaagaggaaaaacgcaagaagcgagccttttctggacagggtcttcacgaaggtcccgcgcggcttcccgtacattcaatcatagcaagcatgggaaccgttgcaatggatctacaaggtaccgaacaccgcccaacacagtctggcggcggaggtggaggttctaagctggccttgccgactgagaatgggtcaggctcaagacggccaagcatcgcgcctgttctagaattggcagactccagtgctctgctcccttgtgacctgcttagtgatcagagcgaagatgaggtgactccgagcgatgacgagggcctctctgtggtggagtatgtcaagggatatcccccaaattcaccctatatcggatccagtccaaccctctgccacttgctccccgtgaaggcccccttctgctgccttcggctcgacaagggttgcaagcataactcttatgaagatgcgaaggcgtacggcttcaagaacaagctcattatcgtgtctgctgaaaccgcaggtaatggtctctataacttcatcgtgcctctgagggcctactacaggtctagaaaagaactcaatcctatcgtgttgctgcttgacaacaaaccagaccaccactttctagaggctatctgctgctttccaatggtatactacatggagggtagcgtcgataatctcgactctctgttacagtgcggcattatttacgcagataacctggtcgttgttgataaggagagcactatgtctgccgaggaagactatatggccgatgccaagacaatcgttaacgtccagacaatgttcagactattcccatcgctgtccatcacaactgaacttactcaccctagtaatatgagatttatgcaattcagggccaaggacagctattctctcgcgctgtctaaactggagaagagggagcgggagaacggatcaaatcttgcctttatgttcaggctgccattcgcggctggcagggttttcagtattagcatgctggatacacttctgtatcagtctttcgttaaggactatatgatcactattacacggctgcttctcggtctcgataccacgcctggaagtggatacttgtgcgcaatgaaaattacggagggcgatttatggatcagaacctacggccgactttttcaaaagctatgcagctcttccgccgaaatcccaattggcatctatagaacggaaagccacgtgttcagcacctctgagccccacgacctgagggcccagtctcagatttctgttaatgttgaagactgcgaggacaccagggaggtgaaaggaccctggggatccagagcaggcacaggagggagctcacagggaagacatacaggaggcggagacccagccgagcatcccctactgagaaggaagagcctgcagtgggccagacgcctcagcaggaaagctcctaaacaggccggaagagcagctgctgctgagtggataagccaacaacgtctgtctctgtatcgaagatcggaacggcaggaattgagcgaattagtgaaaaatagaatgaaacatttgggcctccccacgaccggatatgatgaaatgaacgaccatcagaacacactaagttacgttctcattaatccccccccagataccagactggaaccttctgacatcgtttatttgatacgttcagatcctctggcccacgttgcctcaagttcacaatctcgcaaatcctcctgttcccacaagctgtccagctgcaaccccgaaacacgtgacgaaacccaactgtag

SEQ ID NO: 129409 - DNA, 3408 bp, synthetic construct
  misc_feature 1..3408: note = Description of Artificial Sequence: Synthetic coding sequence
  source 1..3408: mol_type = other DNA
atggtggacctggaaagcgaggttccccctctgccacctaggtaccggtttcgagacctccttttgggggaccagggatggcagaacgacgaccgcgttcaggtggagttctacatgaacgaaaatacttttaaagagcggctgaaattgttcttcatcaagaaccaacgcagtagcctccggatcaggctattcaacttcagtctaaaactcctcagctgtctgctctacataatcagggttctgctggagaatccctcccagggcaacgagtggtcccatattttttgggttaaccgctctctacctctgtggggtcttcaggtcagtgtggcgctgatatctctattcgagacgatactcctcggatatctctcatacaaggggaacatctgggaacagattctgcggatcccattcatcctggaaattatcaatgccgtgcctttcattataagtattttttggcccagtctccggaatctcttcgtgccagtgttcctcaactgttggctggcaaagcatgctttagagaatatgatcaatgatctgcatcgggccatccagcgaacgcagtctgctatgtttaaccaggtgctaatactgatctcaaccctgctgtgcctgattttcacctgtatatgtgggatccagcacctggaaagaattggcaagaagctgaatctttttgactctctctatttttgcattgtgaccttctctactgtgggcttcggtgatgtgacccctgaaacctggtcgtcaaaattattcgttgtggccatgatctgcgtagctttggtagtgttgcctattcaattcgagcagctggcctatctgtggatggagagacaaaagtccggaggtaactattctagacacagggcgcagaccgagaaacacgtcgtactgtgtgtatccagcttaaagatagacctactcatggactttctgaatgaattctacgcacaccctaggctccaggactactacgtcgtaatcctgtgtcctacggaaatggacgttcaggtacggagagtcctgcagattccaatgtggtctcagagagtgatatatctccagggatccgcactgaaggaccaagatctgctgcgagcgaaaatggatgatgccgaggcttgttttatcttaagttccagatgcgaagtagatagaactagcagcgaccaccagacgattttaagggcctgggccgtgaaggattttgccccaaactgcccgctgtatgttcagatcctgaaaccagagaacaagttccacataaagttcgctgaccacgttgtgtgcgaagaggagttcaagtacgccatgctcgctctgaattgtatctgtccggccacctccactctgatcacacttctggtccatacatcccgcggccaggaggggcagcagtcccccgagcagtggcagaaaatgtatggcaggtgttctggaaatgaggtttatcacatcgtcttggaggagagtaccttcttcgctgaatatgagggcaaatcattcacttatgcgtcttttcatgcccataagaaatttggcgtttgtctgatcggagtccggcgggaggataacaagaacatcctcttgaacccgggccccagatatatcatgaactccaccgacatatgtttttacatcaacatcacaaaagaagaaaacagcgcttttaagaatcaggaccagcagcgaaagtccaatgttagcagatcgttctaccacgggccatctcggcttcctgttcattcaatcatcgcctccatgggtacagttgcgatcgatctccaggacacatcttgtagaagcgcaagtggccctacactcagccttcctaccgaaggatcaaaagagatcagaagaccctccatcgcgccagttcttgaggtcgctgatacttcaagcatccagacatgcgaccttctctcggatcagagcgaagacgaaacaacacccgacgaggagatgagctctaacctagaatacgcaaaggggtaccccccgtattctccgtatataggtagcagccctactttctgccacctgcttcacgagaaggttcctttttgttgcctccgtctggacaaaagctgtcagcacaattactacgaagatgcaaaagcctatggcttcaaaaacaaacttattatcgttgccgctgaaaccgcaggtaatggtctttacaattttatcgtgcctcttagggcctactaccggccaaaaaaagagcttaatccaatagtgctcctattggataaccccccagatatgcacttcctcgatgccatatgttggttcccgatggtgtactatatggtcggtagtattgacaacctagatgacttattacgatgtggcgtgaccttcgcagcgaacatggttgtggtcgataaagaatcaacaatgtccgcggaggaggactatatggccgacgccaagaccattgtgaacgtccagactctgtttcgcctcttttcatcactgtccatcataaccgaactgactcaccctgccaacatgaggttcatgcagttcagggcgaaggactgctattcccttgcactgtccaagctggagaagaaggaacgggagaggggtagcaatctggcatttatgtttagactcccattcgcagctggaagggtgttttccattagtatgctcgatactttgctgtaccagtctttcgtgaaagattatatgatatcaattaccagacttctactagggttggacacgactccagggtccggcttcttgtgctccatgaaaatcaccgccgacgacctgtggatcagaacctatgccagactttatcaaaagctatgctcttccactggagatgtccctatcggcatatacagaactgaaagtcagaagctgactacctccgagtcgcaaatcagtatcagcgtggaagagtgggaggacaccaaagatagcaaagagcagggtcatcataggtccaaccatcgtaatagtacatcgtccgaccaaagcgaccacccacttctgcgcaggaaaagcatgcagtgggctagacgtttgagtcggaagggacccaagcactctggcaagacagcagagaagataacccagcagcggctgaatctgtataggcggtccgaaagacaggaactggcggagctggtgaagaaccgcatgaaacacctggggctgtccacagtggggtatgacgaaatgaacgatcatcaatccacactctcttatattcttatcaatccctcccctgatacccggatagaactgaatgatgtggtgtatctcattagacccgaccccctcgcgtatctccctaattccgaaccatcccggcgcaattcaatttgtaatgtcactggccaggattcccgagaggagacacaactttag

SEQ ID NO: 129410 - DNA, 3210 bp, synthetic construct
  misc_feature 1..3210: note = Description of Artificial Sequence: Synthetic coding sequence
  source 1..3210: mol_type = other DNA
atggtagatttagagtccgaagtgccaccattgcccccacggtacagatttcgagatctccttctgggcgatcagggatggcagaatgatgatcgggttcaggttgagttctatatgaatgagaatacctttaaggagcgcctcaagctgttcttcattaaaaaccaaaggagttcactcagaatcagactgttcaacttctctttgaagctgctgtcctgccttctgtatatcatccgtgtcttactggagaacccatcacagggcaatgagtggtcccacatcttttgggtaaatcgcagcctgccgctgtggggcctgcaggtgagcgtggcactgatctcgctgttcgagaccatcctgctgggctatctgtcctataagggaaacatctgggagcagatcctccggatcccctttatcctggagatcatcaatgccgtaccttttataatttccattttctggccatctttgagaaacctgtttgttcctgtgttcttgaattgttggctcgccaagcacgcactggagaatatgataaatgacctgcatagggctatccagcgaacgcagtccgccatgtttaaccaggtgctaatcttgattagtaccttgttgtgtctgatcttcacctgtatttgcgggatccagcatctggagcgaatagggaaaaagttgaatttattcgattctctttatttctgtattgtcactttctcgacggtggggttcggggatgttacccccgagacgtggagttccaagctttttgtggtcgcaatgatctgcgtggctctcgttgtgttgcccattcaatttgagcagctcgcttatttgtggatggagaggcagaaaagtgggggaaactatagccgacatagagcacagacagaaaaacatgtggtgctgtgtgtcagttccctcaaaatcgacctgctcatggactttttaaatgagttttacgcgcacccccggttgcaggattattacgtagtgatattgtgccccacggaaatggatgtgcaggtgcggcgcgtgttacagattcccatgtggtcgcagagagtgatctacctacaggggagcgctttaaaggatcaggatttgctccgggccaaaatggatgacgccgaagcttgtttcatcttaagcagccgctgcgaggtggacagaaccagctccgaccaccaaaccattcttcgcgcctgggcggttaaggatttcgcaccaaattgtcctctctatgttcagattctgaaacccgagaacaagtttcacataaagttcgccgatcatgtggtttgtgaggaggaattcaagtacgccatgcttgccttaaattgtatctgccccgccacatccaccctcattaccctactggtgcacacgagcagaggacagttcggcgtctgccttattggggtccgcagggaagataataaaaacatcctactgaaccccgggccacggtacattatgaatagtacagatatttgtttctacataaatattaccaaagaagagaacagtgcattcaagaatcaggaccagcagcggaagagcaacgtgtctagatccttctaccacggtccatccaggctgcccgttcactctatcattgcctctatggggacagtcgcaatcgatctgcaagatacaagctgtaggagcgccagcgggccaacactttctttgcctactgagggcagtaaagaaatcagaagaccatcaatcgcccccgtgttggaggtcgcagatacctcaagcatacagacttgtgatctgctgtctgaccagtccgaagatgagaccacccctgacgaagaaatgtcaagcaaccttgagtatgctaaggggtacccaccctattcaccatatatcggaagttctcccaccttttgccatcttctacacgagaaggttcccttctgttgtctgaggctagataagtcttgtcagcataactactacgaggacgccaaagcttatggttttaaaaacaaactgattatagtcgcagccgaaaccgctggtaatggtctgtataatttcattgtgccactgcgagcttactaccgccctaagaaggagttgaaccctattgtactcctgctggacaatcccctggatgatctactgcgatgcggagtgacctttgcggctaatatggttgtggtggataaggagtctaccatgtcagctgaggaggactacatggctgacgcgaaaaccatcgttaacgtccagacactgtttcggttattttcctctttgagcatcattaccgagttgacgcatcccgctaacatgaggtttatgcagttcagagcaaaagactgctatagcctcgctctgagcaaacttgagaagaaggagcgggaacggggatccaatttagccttcatgttccgtttacctttcgcggccgggcgtgtgttctccatttctatgctcgacactctgttgtatcagagcttcgtcaaggactacatgatctctatcacccgactgctcttgggactggataccacccctggttctgggttcctgtgctcaatgaaaatcaccgcagacgatctgtggataaggacatatgctcgactgtatcagaaactgtgctctagtactggggacgtgcccatagggatatatcgtactgagagtcagaaactgacaacaagcgaggagacctacatacttatttttctgtctcagatttctatctctgtggaagaatgggaagacacaaaagatagtaaagagcagggccatcatagatctaatcatagaaactctacttccagcgatcagagcgatcacccgctgctgcgaagaaagtcaatgcagtgggcccgccgattatcaaggaaggggccaaagcactccggtaagacagcggagaagataacacaacagcggttgaatttgtaccggcgttctgaacgccaggagctcgccgagctggtcaaaaataggatgaaacaccttggcctgagcaccgtgggatatgatgaaatgaatgatcatcagtccactttgtcctacatcttgattaacccttcccctgacacaaggatcgagctgaacgacgttgtctacctgatcaggcctgatcctcttgcataccttccgaacagtgagccaagcagacgcaatagtatttgcaacgtgactggacaagacagcagggaagaaacacagctgtag

SEQ ID NO: 129411 - DNA, 3336 bp, synthetic construct
  misc_feature 1..3336: note = Description of Artificial Sequence: Synthetic coding sequence
  source 1..3336: mol_type = other DNA
atggtggatcttgagtctgaggtgcctcctctccccccacgctatcggtttagggatctgctgcttggggaccagggttggcagaatgatgatagagtgcaggtcgagttttatatgaatgagaacacattcaaagaacgactgaagttgttctttattaagaaccaaaggtctagcctgcggatccgcttattcaactttagcctcaagctgttgtcctgtttgctgtatattatcagagtactcctggaaaatccatcccagggaaacgagtggtcgcacatcttttgggtaaacaggagcctccccctctgggggttgcaagtatctgtggcgcttatcagcctattcgagacaatccttctcgggtacctgtcgtataagggaaacatctgggagcagatcctgagaatcccatttatcctggagatcattaatgctgtccccttcataatatctatattctggccttctttacgaaatctgttcgtcccagtgtttctgaactgctggttagctaaacatgcgctggagaacatgattaatgacttgcatagagcaattcagcgcactcagagcgccatgtttaatcaagttctgattctgatcagcaccctgctgtgccttattttcacctgtatatgtggaatccagcacctcgaaagaatcggcaaaaagctcaatctatttgacagcctgtacttttgcattgttactttctctacagtaggattcggagatgtgacaccagagacctggtcgagtaagcttttcgtggtggctatgatttgcgtggcacttgttgtgctaccaatccagttcgaacaactggcatacctgtggatggagagacaaaaaagcgggggtaattacagccggcatcgagcccagactgagaagcacgtggtcctgtgtgtgtcaagtctgaaaatcgatctacttatggatttcctgaatgaattctatgcccaccccaggctgcaagattactacgtcgtcatactctgcccaactgagatggatgtgcaggtgagacgggttctccagatccccatgtggtcacagagggtgatttaccttcagggcagcgccctgaaagatcaggacctgttacgtgctaaaatggatgatgccgaagcctgctttattcttagcagcaggtgcgaagttgacaggacaagttccgatcaccagactatactccgagcctgggctgtgaaagacttcgctccaaactgcccgttgtacgtgcagattctcaaacccgagaataagtttcatatcaagtttgccgatcacgtggtttgcgaggaggaatttaagtatgctatgctggctttgaattgtatctgtcccgctacaagtactctcataaccctgttagtgcatacatcacgcggacaagagggccaacagtcacctgagcagtggcagaagatgtacgggcgctgctcaggtaatgaagtgtatcatatcgttctggaggaaagtacgtttttcgcagaatacgaggggaaaagtttcacatatgcctcctttcacgcccataaaaagttcggtgtgtgtctgataggtgttaggcgggaagacaacaagaatatactgctgaaccctggtcctcgctatattatgaactcaacggacatttgtttctacattaacattacgaaagaagagaacagcgcctttaaaaaccaagaccagcagaggaagtcaaacgtaagccgcagtttctaccacggccccagcaggctgccagtccattctatcatagccagcatgggcacagtggctatcgatctccaggatactagctgtcgaagcgcctcggggcccaccctctctcttcccacagaggggagtaaggagatcagacgccccagtatcgcacctgtgttggaagtggcagacacctctagcatccagacttgtgacttgctgtccgatcagagtgaggatgagacaaccccagacgaagagatgtcttctaatttggaatatgcaaagggatacccaccctattctccgtatatcgggtcctcgcccacattttgccacctgctccacgaaaaagtcccgttttgctgcctcaggttggataagtcctgccaacataactattacgaagatgccaaggcttacgggtttaagaacaaactgattatcgtagccgccgagaccgccggaaacggcctctataactttatcgtgccacttcgggcttattatcgcccaaagaaggaattgaatccgatcgtccttctcctcgacaatcccttagacgatcttctgcgctgcggggttacattcgcagccaatatggtcgtcgtggacaaggaatccacaatgtccgctgaggaggattacatggccgatgccaaaaccatcgtgaacgtgcagacactatttcgactattttcgagcttgtctatcatcaccgagctgacgcacccagcaaatatgaggttcatgcagttcagggccaaagattgctatagcctggctcttagcaaactcgaaaagaaggagagagaacggggctcgaacctcgccttcatgtttaggctcccatttgccgccggccgtgtgtttagtatcagtatgttagataccctcctgtatcaatcttttgtcaaggattacatgatcagcataacgcggcttctgctggggttagacacaacccctggttcggggtttctgtgttccatgaagatcaccgcagacgacctttggattaggacttacgctcggctttatcagaagctgtgctcatcaaccggcgatgtgccaatcgggatttatcgaactgagtctcagaaactgactacgtccgagtcacagatctccatcagcgtggaagagtgggaggacacaaaggacagcaaggaacaaggacaccaccgcagcaaccataggaatagtacgtccagtgatcagagtgatcatccgctccttcgacggaagtccatgcagtgggctaggcggttgagcaggaaaggccccaaacatagcggtaagaccgctgagaagatcacacaacagcgacttaatctgtatagaagatccgagcgccaggagctggcagagctcgtgaagaatagaatgaaacaccttgggctatctactgtaggctacgatgaaatgaatgatcatcagtcaaccctctcatacatcttgataaacccttccccagacacacgaatcgagctcaacgatgtagtgtatctcattcgacctgatcctctagcgtacctcccaaacagcgaaccctcccgccgaaatagcatttgtaacgttaccggacaggatagcagagaggagacacagctttag

SEQ ID NO: 129412 - DNA, 1113 bp, synthetic construct
  misc_feature 1..1113: note = Description of Artificial Sequence: Synthetic coding sequence
  source 1..1113: mol_type = other DNA
atgccatatcttcacttagatcaccagacgatcctgagggcctgggccgtcaaagattttgcgcccaattgtccattgtacgtccagattcttaagccagaaaacaagttccacatcaagttcgctgaccacgtcgtgtgcgaggaggagtttaagtacgcaatgctagcgcttaattgcatatgcccagccacgtctacccttattaccctgctagtccacacgagccgcggccaggagggacagcaatcacctgaacaatggcagaagatgtatggccggtgttccggcaatgaggtgtaccacatagtcctggaggagtccaccttttttgctgagtacgaaggaaagagttttacatacgccagctttcatgctcacaagaagttcggggtctgcctgatcggcgtcaggagggaggataataagaacattttgttaaatcctggccccaggtatatcatgaatagtacggacatttgcttctatattaacataactaaggaagaaaatagcgccttcaagaatcaagaccagcaaagaaagagcaatgtgagtaggtcattttaccatggcccctcacgcctcccggtgcattcaattatcgctagcatggggaccgtggctatcgacctgcaagatacgagctgtcgaagcgccagtggacccacgcttagcctgcccacagaaggctcaaaggagattcgcaggccgtcaattgcccctgtactggaggtagctgacacctcctcgatccagacctgtgatctgctgtctgaccagtccgaggatgagaccacccctgacgaagagatgagctcaaacttggagtacgccaaaggctacccaccctattcaccctatatagggtcctctcctaccttttgccacctgcttcatgagaaagtgcctttttgctgcttgaggcttgacaagagttgtcaacacaattattacgaagacgccaaggcatacggcttcaagaacaagctcattattgttgcagcagaaactgctgggaatggcctttataacttcatagttccactacgagcctattacaggcctaagaaagagttgaatcccatcgtgttgctgcttgataatccatag

SEQ ID NO: 129413 - DNA, 1572 bp, synthetic construct
  misc_feature 1..1572: note = Description of Artificial Sequence: Synthetic coding sequence
  source 1..1572: mol_type = other DNA
attattaatgacctccaccgggcaatccagcggacacagagtgctatgtttaaccaagtgctgattcttatctctacgcttttgtgtctcattttcacctgtatctgcggtattcagcatttggagcgaatcggcaagaagctcaacctgttcgactccctctacttttgtattgtgaccttttccacagttggtttcggggacgtgactccggagacctggagttctaaactcttcgtggtagctatgatttgcgtagccctcgttgtccttccgattcagttcgaacagctggcatacctgtggatggagaggcagaaaagtggggggaactattcgcgacaccgggcacagactgagaagcatgtcgtcctgtgtgttagttctttaaaaatcgaccttctcatggattttctcaacgaattttacgcacacccacggctgcaagactattacgtggtgattctgtgccccaccgaaatggatgtgcaggtgcggcgtgtactacagatcccaatgtggagccagagggtgatctatctgcagggatctgccctgaaggatcaagacctcctcagggctaagatggatgatgccgaagcgtgctttatactcagctcaaggtgcgaagtggatcggacctccagcgaccatcagacgattctacgagcttgggcagtaaaagacttcgcacctaactgccccttatacgtccagatcctaaaaccagaaaataaattccacatcaaatttgcggaccacgtggtctgtgaggaggaattcaagtatgctatgctcgccctgaattgcatctgccccgctacgtctactctgatcacactgctggtgcatacttctagaggccaggaagggcaacagtcccctgaacaatggcagaaaatgtatggaagatgtagcggcaatgaggtatatcatattgttctggaggagtcaaccttcttcgctgagtatgagggcaaatccttcacctatgcctcttttcacgcacataaaaaatttggggtgtgtctcatcggagtacgtcgcgaggataataagaacatattgcttaacccggggccacgatatataatgaatagtactgacatttgtttctatattaacattacaaaagaggaaaatagtgcttttaagaaccaagaccagcagaggaagtcaaatgtctcccggagcttttatcatggtccatctaggctgccagtgcacagcattatcgctagtatgggaacggtagcaatcgatctccaggacacgtcctgccgctcggcttctggtcccaccctaagtctgccaaccgaaggcagtaaggaaatccgtagacctagtatagctcctgtgctcgaggtcgccgatacttcttcaatccagacctgcgacctgctttctgaccagtcggaggacgagaccacaccagacgaagaaatgagctccaatcttgaatatgcgaaagggtacccgccatacagcccctatatcggatccagccctaccttttgtcacctgctgcacgaaaaagtgccattctgctgtctgcgcctggacaaattttag

SEQ ID NO: 129414 - DNA, 1503 bp, synthetic construct
  misc_feature 1..1503: note = Description of Artificial Sequence: Synthetic coding sequence
  source 1..1503: mol_type = other DNA
atgccctcttccgggagagccctactggactcaccccttgattccggaagtctgactagcctggattcatccgtcttttgttctgaaggcgagggggagccccttgccctgggagactgtttcaccgtgaacgtggggggctcccgttttgtgctgtcccaacaggctttgagttgttttccccatacccgtctgggtaagcttgccgtggtggtggcaagttaccgcagacctggcgcgctggctgcggtgccttctcccctggaattatgtgacgatgccaacccggtcgacaatgaatatttcttcgatcgcagctcacaggctttcagatatgtactgcactactatcggactgggagacttcatgtaatggagcagctgtgcgccctcagtttcctacaggagatccagtactgggggattgatgagctgtccattgactcctgctgtagggacagatacttccggaggaaagagctctccgaaacgctcgacttcaagaaagataccgaggatcaggaaagtcaacacgagtcagagcaggatttttctcagggtccgtgccccacagtccgacaaaagctatggaacatcctagagaaacccggatcatccaccgccgcccgcatttttggcgtgatctctataatttttgtggtagtgtcaataatcaatatggcccttatgagtgccgagctgtcatggctcgatttacagctcttggagattttggaatacgtctgtatttcctggttcactggagaatttgtgctgcgattcctctgcgtcagagaccggtgccgcttcctcagaaaagtccccaatatcattgacttgctagccatcctgcctttttacattactcttctggtggagtccttatctgggagccagaccactcaggagttagaaaacgtggggagaattgtgcaggtacttcggctgcttagggcgcttcgcatgctgaagcttggccggcattcaaccgggctgcgctctctaggaatgacaatcacccagtgttatgaggaagtggggctcctgctgcttttcctcagtgtgggcattagtatcttttccacagttgaatacttcgctgagcagtctatacccgacacgacatttacaagtgtgccttgcgcctggtggtgggcaactacatcaatgacaacggtcgggtatggggacatccgtccagatactaccactggtaagattgttgcctttatgtgcatcctgagcggcattctggtcctggccctgcctatcgcgatcatcaatgatagattttccgcatgttattttaccttaaaactgaaagaagccgctgtgcgacaacgcgaagcactcaagaagctcactaagaatatcgctaccgacagctacatcagtgttaatctccgcgacgtgtacgcaaggtcaatcatggagatgctccgcctgaagggaagggagagggcttccacccggtcttctgggggtgatgatttctggttctag

SEQ ID NO: 129415 - DNA, 1503 bp, synthetic construct
  misc_feature 1..1503: note = Description of Artificial Sequence: Synthetic coding sequence
  source 1..1503: mol_type = other DNA
atgccctcgtccggaagagcgttgctggacagtccgcttgattccggctcactcactagcctggatagctcagttttctgttcagagggcgagggagagcctctggccctaggcgactgctttacagttaatgtgggcggctcacgatttgtactgtcccagcaggccctgtcatgtttcccacacacaaggcttggaaagctcgcagtcgttgtggcttcttatagacgacctggcgccctggctgccgtcccttcaccactcgaattgtgtgacgacgccaaccctgtggacaatgagtactttttcgacagatcttcacaggctttccgctatgtgctgcattactaccgcaccgggagattgcacgtgatggagcaactctgcgcactttcgtttttgcaggaaatacagtattggggcattgacgagttgagcattgacagctgctgtcgcgatcggtactttcgacggaaggaactctcggagacactggactttaagaaggacactgaagatcaggagagccagcacgagtcagagcaggatttctcacagggaccatgtcctacagtcaggcaaaagctgtggaacatcttagaaaagccaggttcaagtacagcagccagaatcttcggagttatctctatcatcttcgtcgtggtgagtatcatcaacatggcccttatgagcgccgagctctcatggctagacctgcaactgctggagatccttgaatacgtctgcatctcttggtttacgggtgagttcgtactcaggtttctttgcgttcgcgatcgctgccgctttttgcgtaaagtgcccaatataatcgacctgctggccatactgccgttttatataaccctcctcgttgagagcctgagcggctctcaaacaactcaagaacttgaaaatgtcggtaggatagttcaggttcttcgcctgttgcgcgctctgcggatgctaaagctcggcagacactctacaggcctgagaagtctcggcatgactattactcagtgttatgaagaagtggggctccttctgctttttttatctgtagggatcagcatttttagcaccgtggagtatttcgccgagcagtctatcccagatacgacattcactagcgttccctgtgcctggtggtgggcaactacatctatgacaacagttggctatggtgatatccgacctgacaccacgacagggaagatcgtggcattcatgtgcatcttaagcggaatcctcgtcttggctctgccaattgctatcataaacgataggttttctgcctgttactttacgctgaaactcaaggaggcagctgtgaggcagcgggaggccctgaagaaattgactaaaaacatcgccaccgactcttacatcagcgtgaacctgcgcgatgtctatgccaggtccatcatggagatgctccgcctaaagggacgagagagagccagcacaagatcatcgggcggtgatgacttctggttctag

SEQ ID NO: 129416 - DNA, 1131 bp, synthetic construct
  misc_feature 1..1131: note = Description of Artificial Sequence: Synthetic coding sequence
  source 1..1131: mol_type = other DNA
atggaacagctatgcgctctcagtttccttcaggagattcaatattggggcatcgatgaacttagcatcgacagctgctgcagagaccggtacttccgcagaaaggaactgtcagaaacccttgatttcaagaaggacacagaagaccaggagagtcagcatgagagcgaacaggacttctcccagggtccatgtccgacagtccgacaaaaattatggaatatcctggagaagcctggatcatctaccgcggcacgtatcttcggcgttatctctataatattcgtggtggtgtctataattaacatggcgctgatgtcagccgaactttcctggcttgatcttcagctcttggagatcctcgagtacgtctgtatatcttggtttacaggggaatttgtgctgcggtttctatgcgtgagggatcgatgtcggttcctgagaaaggtacctaatattattgacctactggccatcctgcctttctatatcaccctgctggtggagtccctgagcggcagccaaacgacccaggagctggagaatgtcggcaggatcgttcaggtgctgagacttctgagggccctgcgaatgctgaaactgggccgccattctaccggcctccggtctctggggatgaccattactcagtgctatgaggaggttggtcttctcctgctgttccttagcgttgggatctctattttctcaacagtggaatattttgcggaacaaagcatccccgacacgaccttcacctcggtgccttgtgcttggtggtgggctaccacgtcaatgaccaccgtgggctatggggacatacggccagatacaacaacaggcaagatcgtcgcctttatgtgcatactatctgggattctggttcttgctctgccaattgcgatcattaacgatagattcagtgcatgttactttactttaaaacttaaagaggcggccgtccgccagagggaagcgttgaagaaactcactaagaacatcgcgacggattcatatatcagcgtgaacctccgggacgtgtacgcaaggtccatcatggaaatgctgcggctgaagggtagagagagggcctctactcgtagcagcgggggcgatgacttctggttttag

SEQ ID NO: 129417 - DNA, 1638 bp, synthetic construct
  misc_feature 1..1638: note = Description of Artificial Sequence: Synthetic coding sequence
  source 1..1638: mol_type = other DNA
atgctgaaacagtccgagcgccggagatcatggtcatatcggccctggaacaccacagagaatgaagggtcgcagcatcggaggtcaatctgttccctaggagctcgtagtggaagccaggcctccatccacggctggacagaaggaaactacaattactacattgaggaagacgaggacggcgaagaagaagaccagtggaaggatgatctagctgaggaggaccagcaggcaggcgaagtcacaacggctaagcccgaagggcctagtgacccacctgctttgctcagcaccttgaatgtaaacgtggggggccattcctaccagctggactactgtgagttggccggctttcctaagacgagactcggtaggctggcaacctcgactagtcgaagtcggcagctaagcttatgtgatgattatgaggagcagacggacgagtacttttttgatagagaccccgccgtttttcaacttgtgtacaatttctatctgagcggcgtcctcttagttctggacggtctttgtcccaggcgcttcctggaggagctgggttattggggtgtacgactgaagtacacacctaggtgctgccggatatgcttcgaggaaagaagggacgagctgtctgaaagacttaaaatccagcatgagctgagggcacaagcccaggtggaagaggctgaggagctgttccgtgacatgcgattttatggccctcagcggcgaagactgtggaatctcatggaaaaaccctttagcagcgtcgcagccaaggccatcggcgtggctagttccacattcgtcctcgtgagcgtcgttgcgcttgctttgaacacagtcgaagaaatgcaacagcactccggacagggcgaaggcggccctgacctgcgcccgatcctcgaacatgtcgagatgctgtgtatgggattcttcaccctggaatacctcctccgtctcgcttctaccccagacttacgcaggtttgcccgctccgcacttaatcttgttgacctggtagccatcctgccgctatatctccagctgctgctggagtgttttactggggaaggtcaccaacggggccagacagtgggaagtgtgggaaaagtaggccaagtccttagagttatgaggctgatgcgaattttccgcatcctcaagctcgcacgccattccaccggactgcgggctttcggatttacccttaggcagtgttaccagcaggttgggtgccttttattgtttatcgctatgggaatttttactttttccgcagccgtctatagtgtggagcacgatgtcccctctaccaacttcacaaccattccacacagctggtggtgggcagccgtgtctattagtaccgtcggatatggcgatatgtaccccgagacccacctgggaaggttttttgcctttctgtgtatcgcctttgggatcatccttaatgggatgccaattagtatcctgtataacaaattcagcgattactattccaagctcaaggcatacgagtataccacaattcgacgagagcgaggggaggttaattttatgcagcgggccaggaagaagatagccgagtgcctcctgggttcaaacccccaactgaccccccgccaggaaaattag

SEQ ID NO: 129418 - DNA, 963 bp, synthetic construct
  misc_feature 1..963: note = Description of Artificial Sequence: Synthetic coding sequence
  source 1..963: mol_type = other DNA
atgcttaagcagtccgagcgacggcgcagttggtcttatagaccctggaatacaacagagaatgagggctcccagcaccggcggagtatctgctcactgggggccaggtcaggcagtcaggcttccatccatggttggactgaaggcaattataactactacatagaagaagacgaggacggggaggaggaagatcagtggaaggatgaccttgccgaggaggatcagcaagcgggagaggtgactaccgctaaaccggaagggccctccgatccacctgcactactctctaccttaaatgtgaatgtgggcggccactcctaccaactggattactgcgagttagccggtttccctaaaacccgtctgggtcgactcgccaccagtacttcccggagcaggcagttaagcctctgtgatgactacgaggagcagactgacgaatactttttcgaccgcgaccctgcagtctttcaattggtttataatttttatttgtctggggtcctcctcgtcctcgatgggctgtgtcctcggcgatttctggaggagctcggatattggggggtcaggctgaagtataccccaagatgctgccgcatctgttttgaagaacggagagatgagctgtccgaacgtctgaagattcagcatctgagagccagattgaggggcggggcaggggcccagcatagagggggcgacgcagctgcacttggtgccgggagaggtagacccagacccgcagcgcatccaggagcgagaggggacgctgtgcacggactgctccacgcaagagtacccgctgcccccagcctccatgcaagacccgaggcccttcgcgcccagcgtccgcagcccggcggaccaggtggacaccccgccgccttgccatccgcagcagcaagggtcctccatggccggggaccacccaccaggcccgatggggggcagagaggttag

SEQ ID NO: 129419 - DNA, 1740 bp, synthetic construct
  misc_feature 1..1740: note = Description of Artificial Sequence: Synthetic coding sequence
  source 1..1740: mol_type = other DNA
atgtcctcgtgtcgttacaatggcggggtaatgagaccactgtctaacctctcagcaagccggaggaacctccacgaaatggattccgaggcacagccccttcagccaccagcttctgtaggcggtggcggtggagcttcctccccctcggccgcagcagcagccgccgctgctgtgtcatccagtgcacccgaaattgtcgtgtctaagccggagcacaacaattctaacaatcttgcactctacggtaccggaggaggcggtagcactggcggaggggggggagggggaggtagtgggcacgggtcctcctccggaactaaaagttctaaaaagaagaaccagaatattgggtataagctcggccacagaagagccctcttcgaaaaacggaagagactgtcggattacgccctcatctttggaatgttcgggatcgtggtgatggtgattgaaacagagctgtcttggggcgcctatgataaggcttccctctatagcctagcccttaaatgcttaatctctttgtccacaattatcctgcttgggttgattattgtgtatcacgctagagagatccagctgtttatggtggacaatggtgccgatgactggcggatcgctatgacttacgaacgcatcttttttatttgcctggaaatcttggtgtgtgcaatacaccctattcccggtaattacacattcacctggacagctcggctggctttttcctatgcaccctccactacaactgctgacgtggatatcattctgagtatcccaatgtttctgaggctgtacctgattgcacgagtgatgctgctgcatagcaagctatttactgatgcttcctctagatctattggagctctgaataagatcaatttcaatacccggttcgtaatgaaaaccctgatgaccatctgtcccggaaccgtccttctcgtcttcagtatctccctgtggataatagcggcctggacagtgcgggcttgcgagcgttatcacgatcagcaggatgtgacttcaaacttcctgggcgccatgtggctcatatccatcactttcctgagtattggatacggggatatggtgcccaatacatattgcggaaagggagtctgtctgttaactggtatcatgggcgcaggttgtaccgctctcgtggtggcagttgttgctcgcaaacttgagctcaccaaagcagaaaaacacgtgcataatttcatgatggatacccagctgactaagcgagtgaaaaatgctgcagcaaatgtgctgcgtgaaacttggctgatctacaaaaataccaagctagttaagaaaattgatcacgccaaagtgcgcaaacaccaaagaaaatttttgcaagcgatacaccagttgagatcagtcaagatggagcagagaaaactcaatgaccaagctaacaccctggttgatttggcgaagacgcagaatataatgtacgacatgatcagtgatcttaatgagagatccgaggactttgagaagagaatagtcaccttagaaactaagctagagacgctgatcgggtccattcacgctctgcccgggcttatctcccaaaccattaggcagcagcagcgcgacttcatagaagcccagatggagtcctacgataaacacgtcacatacaacgcagagcgctccaggagtagcagcagaaggaggcgctctagcagtaccgcccctccaaccagctccgaaagctcctag

SEQ ID NO: 129420 - DNA, 696 bp, synthetic construct
  misc_feature 1..696: note = Description of Artificial Sequence: Synthetic coding sequence
  source 1..696: mol_type = other DNA
atgtggctaatctccattacctttctgtctatcgggtacggggacatggtgcctaatacttactgcgggaaaggggtctgtcttctgacaggcataatgggagcggggtgtaccgcgctggtcgtagccgtggttgcaaggaagctagagctgacaaaggccgagaagcatgtgcacaacttcatgatggacacgcagctgaccaagcgagtcaaaaatgctgccgctaatgtgttgcgggagacatggctgatctacaaaaacactaagctagttaaaaaaatcgatcatgccaaggtccgcaaacatcaacggaagtttctccaggctattcatcagctgcggtccgtaaaaatggaacagcgcaagctgaatgatcaggctaacaccctggtggacctggccaagacccagaacattatgtatgacatgatctcagacttaaatgagaggagtgaagacttcgagaaacgcattgtgaccctggagactaagctcgagacgctgatcgggagtattcacgcgcttcctggccttatcagccagaccataaggcaacagcagcgcgacttcatcgaggctcagatggagtcctacgataaacacgtcacttacaacgctgagcggtcacgtagttcctctcgccgacggaggtcgagctccacagcacccccaacttcctcagagagttcttag

SEQ ID NO: 129421 - DNA, 1326 bp, synthetic construct
  misc_feature 1..1326: note = Description of Artificial Sequence: Synthetic coding sequence
  source 1..1326: mol_type = other DNA
atgtcctcctgtagatacaatggtggagtaatgagacccctgagcaatcttagcgcctctcgccgcaatctgcacgagatggactcagaggcccagccgttgcaaccacccgcgtcagtgggaggcggggggggagctagctccccctccgccgcagctgctgccgccgcggcagtgagctcctctgcgcctgaaattgttgtgagcaaaccagaacacaacaattccaataatctggcgctgtatgggaccggcggaggtggaagcaccggcggtggcggtggggggggcggaagtggacacggctcttcgtccggtacgaagagtagcaaaaaaaagaaccaaaatatcggctacaaactgggacacagacgcgctttattcgaaaagaggaaaagactgtcggactatgctctgatatttggtatgttcggaattgtggtcatggtgatcgaaactgagttatcctggggggcttacgacaaggcatctctgtattccctcgcacttaaatgcctgataagcttaagcacgatcatattgttaggattgataatcgtgtaccacgcaagagaaatccagcttttcatggtggacaatggagccgacgactggcgaattgcaatgacttacgagcgcatcttcttcatatgtctcgagatactggtgtgtgccatccaccccatcccggggaactacacctttacttggaccgccagactcgcattctcatatgcacctagtacaacgaccgcagacgtggatatcatcctctcaatcccaatgttcttgcggctttacttgatcgcaagagtgatgttattgcattccaaactgttcacagatgccagcagtagatctattggcgccttaaataaaatcaacttcaataccagattcgtaatgaagaccttgatgaccatctgccccggaacggtgctgctggtgtttagtatatcactgtggatcatcgcagcctggaccgtaagggcctgcgaacgatatcatgatcagcaggacgtgacttcaaattttttgggggccatgtggttgattagtattacttttctgagcatcgggtatggtgatatggtgccaaatacatactgcgggaagggagtctgccttttaactggcatcatgggggccggctgtactgccctggtggtggccgtggttgctaggaagttggagctgacaaaagcagaaaagcacgttcacaacttcatgatggatactcagctcactaaacgggtctcatactatccctacatcttcaaagagaatatcatagtcattttcagtgtgttgggcaatatggcttag

SEQ ID NO: 129422 - DNA, 2196 bp, synthetic construct
  misc_feature 1..2196: note = Description of Artificial Sequence: Synthetic coding sequence
  source 1..2196: mol_type = other DNA
atggacacatccggccattttcacgactccggcgtgggtgatcttgacgaggatcccaagtgcccatgccccagctccggagatgaacaacagcagcagcagcagcagcaacaacaacagcagcccccaccgccggcaccaccagccgcgcctcagcaacctctgggccctagtctgcaacctcagcctccgcaacttcagcagcaacaacagcagcagcagcagcagcagcaacaacagccaccacatccactgagccagttagcccagctgcaatcacagccagtccaccccgggctgctgcatagcagtcctaccgcattcagggctcctccctcgagcaatagcacagcgatactgcacccgtcctcaaggcaggggtcacagctgaatctcaacgatcatctcctgggtcactctccaagctcaaccgccacctctggaccaggaggggggtcaagacacaggcaagcatcccctctcgtgcatcgcagagacagcaacccattcaccgagattgccatgagtagctgcaagtactcaggcggcgtgatgaagccactttctcgattgtcagctagccgtaggaaccttatcgaagccgagaccgaaggccagcccttgcagctcttttccccgtctaacccaccagaaatcgttataagttccagggaagataaccatgcccatcagactctcctccaccatcccaatgccacacacaatcaccagcatgccggcaccaccgcatcctcaacgacattcccaaaggcaaataaacgcaagaaccagaacattggatacaagctcggccatcgccgcgcgctgttcgaaaaacgtaagcgccttagtgactatgccctgatctttgggatgttcggcatagtcgtgatggttatcgagacagaattatcatggggcctatattccaaggattctatgttctcactcgctctgaaatgcctgatctcattaagtacaataatcctcctgggtctcatcattgcctatcacacgcgagaggttcaacttttcgtcatcgataacggggccgatgactggcgcatagctatgacatacgagcgcatcctttacatctccctagagatgctggtgtgcgcgattcaccccatcccaggggaatacaagttcttttggacagcacgtctagcgttttcctacactccaagccgggctgaagctgacgtagatatcatcctgagtatcccgatgtttctgaggctgtatcttatcgcccgagtcatgctactgcacagcaaattatttactgacgcatccagccgcagcatcggcgctctgaataagatcaattttaacactcgatttgtgatgaagacactcatgactatctgccccggcacagtgctcctggtattctcgatctccctgtggatcattgcagcctggaccgtcagggtctgcgagcgctaccacgaccagcaggatgtgaccagtaactttctgggcgcgatgtggctgatttccataacctttctgagtatcgggtacggggacatggttccccatacatactgcgggaaaggagtgtgcctcttgacaggaatcatgggggctggatgcaccgcgctcgtggtcgccgtggtagcccgcaaacttgagttgaccaaagccgagaagcacgttcacaatttcatgatggacacacagttgacaaaacggataaagaacgccgcagccaatgttctcagagagacctggttgatttataagcacactaagttactcaaaaagattgatcacgccaaggtcaggaaacaccaacgcaagttcctacaagctatccaccagcttcggtctgtgaaaatggaacagagaaagcttagcgatcaggctaacacactcgttgacctgagcaaaatgcagaatgtcatgtacgacttgatcaccgaattaaatgacagatctgaggatctggaaaaacagatcggctcactggagtccaaactggaacatctcaccgcttcattcaatagcctccctctccttattgccgataccttaaggcagcagcagcagcagctgttgtctgctatcattgaggccagaggcgtgagcgtagcagttggaaccacccacactcctattagcgacagccccataggggtgtcctctaccagcttccctacaccctacacaagctcaagctcgtgctag

SEQ ID NO: 129423 - DNA, 1257 bp, synthetic construct
  misc_feature 1..1257: note = Description of Artificial Sequence: Synthetic coding sequence
  source 1..1257: mol_type = other DNA
atgttctcactggctttgaagtgtctcatttctctgagcacaataattctgctcggactgattattgcttaccacactagagaagtacagctgttcgtcattgataatggcgcggacgattggcggattgctatgacgtacgagagaattctttatatctccctggagatgctcgtgtgtgccatacacccgatcccgggggagtacaagtttttttggaccgcccgacttgccttcagctatactccatcccgggcagaggcagatgtggatattatcctcagtatccctatgtttctgcggctctacctcatcgcccgagtcatgctgctgcatagcaagctctttaccgatgcttcatccaggtctataggcgcccttaataagataaatttcaacacaagattcgttatgaagaccctcatgactatatgtcctggcacagtgcttttggtcttctcgatctccctttggattattgctgcatggaccgtgcgggtctgcgagcgatatcacgatcaacaggatgtgacctccaactttctgggtgccatgtggcttatatcaatcacctttctgtcgattggctacggagacatggtgcctcacacatattgtggcaagggcgtatgtttgctgaccggcataatgggcgccggctgtacagcactggtcgtggctgtggtggcaaggaaactcgagctgacgaaagcagagaaacacgttcacaactttatgatggacacacaactgacaaagaggataaagaatgcagctgcgaatgttctgagggagacttggcttatctataaacacacaaagctgttaaagaaaatagatcacgccaaagttcgaaaacaccagaggaagtttctgcaagccattcaccagctgcggtccgtaaaaatggagcagcgcaagttaagtgatcaggccaacactctagtggaccttagcaaaatgcagaatgtcatgtatgatctcattacagagctgaatgatagatctgaagacctggaaaaacagatcggctctctggagtctaagctcgagcaccttacggcctcttttaacagtctgccattgctgattgctgatactctgagacagcagcagcagcagctcttgagcgcgatcatagaagcccggggagtcagtgttgctgtcggtacaactcatactccaataagcgacagccccattggggtctcttccacctctttcccgacaccatatacaagttcttcatcctgttag

SEQ ID NO: 129424 - DNA, 1281 bp, synthetic construct
  misc_feature 1..1281: note = Description of Artificial Sequence: Synthetic coding sequence
  source 1..1281: mol_type = other DNA
atggagcgcccaatcaaggacagcatgttctccctcgccctaaaatgtctaatttcgctttcaacaattatacttctgggtttaatcatcgcgtaccataccagagaagtccaactgtttgtgattgacaacggcgctgacgactggcggatcgcaatgacatacgagaggatcctgtatatctcattagagatgctcgtttgcgccatacatcctatcccgggcgaatacaaatttttctggacagctcggctggctttcagctatacacccagcagggcagaggccgatgttgatataatcttatccatcccaatgtttcttcgactgtacctcattgccagagtaatgttgttgcactcaaagctgttcaccgatgcatcaagtcgatcgattggtgccctcaataagatcaatttcaacacgcgtttcgttatgaaaaccctcatgaccatttgcccgggcacagttctcttggtgtttagtatatcattgtggatcattgctgcctggaccgtaagggtttgcgagagatatcatgatcaacaggacgttacaagcaacttcttgggagctatgtggctaatctcaatcactttcctgtccatcggctacggtgacatggtcccccatacatactgcgggaaaggcgtctgtttgctgaccgggatcatgggggccggttgtaccgccctggtagtggctgttgttgcacgcaaactggagctgaccaaagccgagaagcacgtgcataactttatgatggacacccagctaacaaaacgaatcaagaatgcagcagcgaacgttttaagagaaacctggctgatttacaagcacaccaagctcctgaaaaaaattgatcatgcgaaggtccgaaaacatcaacggaagtttctgcaagcgatacaccaacttagaagcgtgaaaatggaacagcggaagctgtcggaccaggccaacaccctggtcgacctttccaaaatgcagaatgtcatgtacgacctgattacagagcttaacgatcggagcgaagacctggaaaagcagattggatccctggagagtaaactggagcacttgaccgcctcattcaatagtttgccactgctgattgcggatacactcaggcagcagcagcagcagttgcttagcgccatcattgaggctcgcggggtgagcgtggcagttggaacaacacatactccgatctctgattcacccattggggtgtctagcaccagctttcctactccctacacctcctctagctcttgttag

SEQ ID NO: 129425 - DNA, 684 bp, synthetic construct
  misc_feature 1..684: note = Description of Artificial Sequence: Synthetic coding sequence
  source 1..684: mol_type = other DNA
ccgcacaccctgcttgaggatcatctcctccgggaattcttccaccccctgtttttcctacaagctcccctcctcctgtcattgcccgcgcaatacaacgcttttttatccggttccgtctggacccctggtagccccagagaaccaaagcaggcgaaagaaagaaccggagcgaaaattctagtcggagagattgggtgcctcgcattttttgaggacatcttcggcgcacgagttgctttgggatggggacttgtgctgcagggcatccagcccggacctaaaatggacacgtcaggacatttccatgattccggggtgggggatctggatgaggatcctaaatgtccgtgtccctcgagtggagacgaacagcagcagcagcagcagcagcaacagcagcagcagcctcctcctcccgccccaccagccgccccccagcagccactcgggccaagcctgcaaccacagcccccgcagctccagcagcagcaacagcagcagcagcagcaacaacaacagcaaccgccacaccccctgtcacaactggcccagcttcagagtcagcctgtgcaccccggacttctccacagttcccccacagccttcagaccaccattcgttcaattacatcgtcaccctcctcccttcttacaggcccggcaaccggcacagtcacagtag

SEQ ID NO: 129426 - DNA, 1284 bp, synthetic construct
  misc_feature 1..1284: note = Description of Artificial Sequence: Synthetic coding sequence
  source 1..1284: mol_type = other DNA
atgggcggcgatcttgtgcttggactgggcgcactgaggcgccggaaacgactactggaacaagaaaagtctctggcaggatgggcgctggtgctagctggaaccggcattggactcatggttctccacgccgaaatgctttggttcggtggttgtagctgggccctgtatttattcctggtgaagtgcaccatctccatctcgacctttctacttttgtgcctgatcgtggcttttcacgccaaggaggttcagctttttatgaccgataatgggcttagagattggcgtgtggccctaacaggccgacaggccgcccagattgtcctagagctagtggtgtgcgggcttcatcctgcacccgttcgggggcccccttgtgtgcaggatctcggggctcctctgacttctccccagccttggccgggttttttagggcagggcgaagccctgctttcactagcaatgctcttgcggttgtacctcgttcccagggccgttctcctccggagcggggtcctgctgaatgcctcttaccgctccatcggtgccctgaatcaagttagatttagacattggttcgtggcaaagctgtatatgaatacccaccctggccgcttgctcctaggtcttactctggggctttggctgacaacagcatgggtactgagcgtggccgaacggcaagctgtgaatgccaccggacatctgtcagatactctctggctgattcctattaccttcctcaccatcgggtacggggacgttgtcccgggcactatgtggggaaaaatcgtttgcctctgcaccggcgtcatgggcgtttgttgcaccgccttgcttgtcgcagtggtcgcaagaaagctggaatttaataaggcagaaaagcacgtgcacaactttatgatggatattcagtataccaaggagatgaaggaatcagcagcccgtgtccttcaagaagcgtggatgttctacaagcatacccggcgtaaggagtcgcacgccgcccgccgacatcagagaaagctgttggcggccatcaacgcattccggcaggtcagacttaagcatcggaagctccgggagcaagtgaactctatggtggatatttctaagatgcatatgattctctacgatctgcagcagaacctctcctcatcccatagagccctggagaaacagatcgacaccttagctgggaagctggatgccctgactgagctgctttctaccgcactgggtccccgacagctgccagagccttcacaacaaagcaaatag

SEQ ID NO: 129427 - DNA, 888 bp, synthetic construct
  misc_feature 1..888: note = Description of Artificial Sequence: Synthetic coding sequence
  source 1..888: mol_type = other DNA
atgcatgaccagcattttcatctcttaaccccgttgccccatagagggttatcctgccagcgcggacctgctgtccatgaccggcaaagggccgccgggctggcccgcggcgccgatagggctgctgggaacgcttcatacaggtcgataggagccctgaaccaggttagattccggcattggttcgttgcaaagctgtacatgaacacacatcccggaagattactgctgggcctgacgctcggcctgtggcttactaccgcttgggtgctcagcgtggccgaacgtcaggcggtgaatgcaacggggcatttgtctgataccttatggcttattccaataacatttctgaccatcggttacggcgacgtggtgcctggcactatgtggggcaagattgtatgtctctgcactggagtgatgggggtttgttgcaccgccctgctggttgccgtcgtcgccaggaagctggaattcaataaagcagaaaagcacgttcataactttatgatggacatccaatacacaaaagagatgaaggagtcggccgcgagagtactgcaggaagcgtggatgttttacaaacatacacgcaggaaagaatctcatgcagcacgtcgacatcagcgtaagcttctcgcagcgatcaacgctttccggcaggtgcgtttgaagcatcgcaaactgcgtgaacaggtcaactctatggtggacatctccaaaatgcacatgattctgtacgacctgcagcagaatctctcatcgagtcaccgggccctggagaagcagatcgacaccctggcagggaaactggacgccctgacagagctgctgtccactgcgctcgggccgaggcagctgcccgaaccgtcccagcagtcaaaatag

SEQ ID NO: 129428 - DNA, 1119 bp, synthetic construct
  misc_feature 1..1119: note = Description of Artificial Sequence: Synthetic coding sequence
  source 1..1119: mol_type = other DNA
atgttcaagcacctgcggaagtgggtagtgacaagattctttgggcactctcgccagagggctcgcttagtgtccaaggatgggagatgcaatattgaattcgggaatgtggaggcccagtccaggttcatattctttgtggatatctggaccacggtgctggaccttaaatggcgttataagatgacgatctttattactgcttttctcggctcttggttcttctttggtctcctctggtacgccgtcgcctacatccataaagatttaccagagtttcacccttctgctaaccacaccccatgcgttgagaacatcaatgggctcacctccgcctttcttttctcgctcgagacccaagtgacgataggttacgggttcaggtgcgttaccgagcagtgcgcaacagccatttttctccttatatttcagtcgatcctgggcgttatcataaacagttttatgtgcggagcgatcctggctaagatctctcggcccaaaaagagagccaaaactatcactttcagtaagaacgccgtcattagcaagagagggggtaagttgtgtcttctgatcagagtggccaatctgaggaagagtctgttgataggatcacatatatacggcaaactcttgaagacaaccgtcacgcccgaaggggagaccattatcctggaccagataaatatcaacttcgtagtagacgccggtaacgaaaatttgttttttatttccccactaactatttaccacgtaatcgatcacaattcacccttttttcacatggcggcggaaaccctccttcagcaagattttgagctcgtcgtgtttttagatggcacagtggaaagtacgtctgctacgtgtcaggtgcgcacaagctatgtaccagaagaggtgctgtggggctaccggttcgcacctattgtaagtaaaactaaagaaggtaagtaccgcgtcgatttccacaatttctctaaaacagttgaggttgagacccctcattgcgcaatgtgcctatataacgagaaggatgtgcgagctcggatgaagcggggttatgataacccaaactttatcttaagcgaggtgaacgagaccgatgacacgaaaatgtag

SEQ ID NO: 129429 - DNA, 1119 bp, synthetic construct
  misc_feature 1..1119: note = Description of Artificial Sequence: Synthetic coding sequence
  source 1..1119: mol_type = other DNA
atgtttaaacatctacggaaatgggtcgtgactcggtttttcggacattcacgtcaacgggcccgactcgtgagcaaggatggtagatgtaatattgaatttggaaatgtcgaggcacaatcccgcttcattttcttcgtcgacatttggacaactgtccttgacttaaagtggcgatacaaaatgacaatcttcattactgcattccttggttcatggttttttttcgggctactatggtatgcagtcgcttatattcataaggacctgcctgagttccatccatccgcgaaccatactccttgcgtggaaaatatcaacggcctgacatcagcattcttgttcagtttagaaactcaggtaactatcggatatggcttccgttgcgttaccgaacagtgtgccactgctatctttcttctgatctttcagtctatccttggtgtgatcatcaacagctttatgtgtggagctatcctggctaaaatatctagaccaaagaaacgagcgaaaactatcacctttagcaagaatgctgtgatctctaagcggggaggaaagctgtgcctgctgataagagttgcgaacctgcggaagtccctgctgatcggctctcatatatatggcaaactgttgaagaccactgtcacacccgaaggggagactatcatactcgatcagatcaacataaatttcgtggttgatgctggcaatgaaaatttgttttttatcagcccactaaccatatatcacgtaatagaccataattcgcctttcttccacatggccgctgagaccctgctccaacaggactttgaactcgtggtctttctggatggcaccgtcgaatctacctctgccacatgccaagtgcggacttcttacgttcccgaggaggtgctgtggggctacagatttgcacctatcgtgtcaaagaccaaagaaggcaagtatagggtggacttccataacttcagcaagaccgtggaggtggaaacccctcactgtgctatgtgtctgtacaacgagaaagacgtcagagctagaatgaaacgcggctatgacaacccaaattttattctgtccgaagtcaacgaaacagacgacaccaaaatgtag

SEQ ID NO: 129430 - DNA, 912 bp, synthetic construct
  misc_feature 1..912: note = Description of Artificial Sequence: Synthetic coding sequence
  source 1..912: mol_type = other DNA
atggcctggtggctgatcgcctttgcacacggggacctggcgcccagtgaaggtaccgccgagccatgcgtgactagtatacactccttctccagcgccttcctgtttagcatcgaggttcaagttaccattggttttggcggaagaatggtgacagaggaatgtccacttgcgattttgatcttgattgtgcagaacatcgttggtctcatgatcaacgccattatgttgggttgtattttcatgaaaacggctcaagcacataggagggcagagaccctaatcttctcaaagcacgccgtcattgcactcagacatggacgactgtgcttcatgctccgtgtcggcgacctgcggaaatccatgataattagcgcaaccattcatatgcaggtggtgagaaagaccacaagtccagaaggtgaggtcgtccccctacatcaggtggatatacccatggagaatggcgtgggtggcaacagcatctttctcgtcgcaccacttatcatctaccatgtgatcgatgccaacagcccgttatacgacttggcaccttcagacctgcaccatcaccaggatctggagataatcgtgattctggagggtgttgttgaaactaccggaatcacaacacaagctagaacctcatatctggccgacgagattttgtggggccagagatttgtgcccattgtggcagaggaagatggtcgttactctgtcgactacagcaaattcggcaatactgtcaaggtccccaccccactctgcacagccaggcagctcgacgaagaccattctctgctggaggctctgaccttggcttccgcaagaggtccattacggaagcggtctgtacccatggcaaaggcaaagcctaaattctctatcagcccggattctctcagctag

SEQ ID NO: 129431 - DNA, 1302 bp, synthetic construct
  misc_feature 1..1302: note = Description of Artificial Sequence: Synthetic coding sequence
  source 1..1302: mol_type = other DNA
atgacagccgcatcgcgagcgaatccatattcaatagtgagtagcgaggaagatgggcttcatctcgtaaccatgtccggggcaaatggctttggtaatggcaaagtgcatacccgtcggcgttgccgtaataggttcgtgaaaaaaaacgggcagtgcaatatcgaatttgcaaatatggacgagaagtctcaaagatacctagctgacatgttcacaacctgtgtggatatccgttggagatatatgctgctgattttctccctcgcatttttggccagttggctgctctttggcatcatcttttgggtcattgcagtagctcacggcgatttggagcctgcagagggacggggaagaaccccatgcgtgatgcaggtgcatggatttatggcagctttcctgttcagcattgagacccagacaaccataggctatgggctccgctgcgtgaccgaagaatgtccagtggccgtgtttatggtagtggcccaatccatcgtgggctgcatcatcgacagctttatgatcggcgcgattatggccaagatggcaaggccgaaaaaacgggcacagacccttcttttctcgcacaatgctgtggtcgcacttcgagacggtaaactgtgcttaatgtggcgagtcggcaatctgcgtaagtcgcatattgttgaagctcatgtacgcgctcagcttattaaaccacgcgtgacagaagaaggtgagtacatcccacttgaccagatcgacatcgatgtggggttcgacaaggggctcgaccggatcttcctcgtgagcccaatcactatactccacgagatagatgaagcttcccctctttttgggataagtcgccaggatctcgaaacagacgacttcgaaatcgtggttatcctggagggcatggtggaagctaccgcaatgacaacccaagctcgaagcagttacttggccaatgagattctgtggggccatcgatttgaaccggtgctgtttgaggagaagaaccagtacaaaatcgattattcacactttcacaagacctacgaggtaccttccacaccaaggtgttctgctaaggatctcgttgaaaacaaatttctgctgccatccgcaaactccttctgttacgagaacgaactggcattcttgagccgtgatgaagaagacgaagccgacggcgatcaggatggccgctctcgggatggactgagcccacaagctcgccatgattttgatcggcttcaggccgggggaggggttctcgagcagagaccctatcgccgggaatcagagatttag

SEQ ID NO: 129432 - DNA, 1257 bp, synthetic construct
  misc_feature 1..1257: note = Description of Artificial Sequence: Synthetic coding sequence
  source 1..1257: mol_type = other DNA
atgtcctattacgggtctagctatcatatcatcaatgctgatgctaagtatccaggctacccacccgagcatatcattgcagagaaaaggagagcccgacgcaggcttttgcacaaggacggatcctgtaacgtgtatttcaagcatatttttggagagtggggtagctatgtagtggatatttttaccaccctcgtcgatacaaagtggagacatatgttcgtgatcttttctctgagctatatcctgtcttggctcatctttggatcggtgttctggctaatcgcattccatcatggagacctgctgaacgacccagacattacgccctgtgttgacaacgtccattccttcactggagcattcctgttttccctggagactcagaccactataggctatggctacaggtgcgtaaccgaagagtgcagtgtggccgtccttatggttattcttcaatctatcctgtcgtgtataattaacaccttcatcattggagcggcccttgccaagatggctaccgctcgcaaacgggctcaaaccatccgcttcagttactttgcgctgattggcatgagggatggcaaactgtgtctcatgtggcgcattggagatttcagacctaaccatgtggtggaaggtaccgtccgagcccagttattaagatataccgaggactccgaggggagaatgacaatggcttttaaggatttgaaactggtaaacgaccagattattcttgtgacccccgtcactatcgtccatgaaatcgaccacgagagccctctgtatgctctggatagaaaagctgtggccaaggacaacttcgagattttagtgacatttatatataccggcgactcaactggcacatcacatcagagccgctcaagttatgtcccaagggaaatcctatgggggcacagatttaacgatgtgcttgaagtgaagagaaaatactacaaagtcaactgcctacagtttgagggttcagttgaagtctatgcacctttttgttccgccaagcagttagactggaaggatcagcagttgcacattgaaaaagctccgccagtgcgtgaatcttgtaccagtgacaccaaggcccggagacgaagcttctctgcagtcgctatcgtatcttcatgcgaaaatccagaggagactaccactagcgccacacatgagtaccgggagaccccttaccagaaggcattactgaccctgaatagaattagcgtcgagagccagatgtag

SEQ ID NO: 129433 - DNA, 1119 bp, synthetic construct
  misc_feature 1..1119: note = Description of Artificial Sequence: Synthetic coding sequence
  source 1..1119: mol_type = other DNA
atgttcaagcacctgagaaagtgggtcgtcacacgattcttcggtcactctcggcaacgcgctcgccttgtgagtaaagacggcagatgcaacatcgaatttggcaacgtggaagcgcagtctaggttcatctttttcgttgacatttggaccacagttctcgatctcaaatggcggtataaaatgacaatcttcatcaccgccttcctgggatcctggttcttctttggcctgttgtggtacgccgtcgcctatatccacaaagacttgccagagtttcacccctcggctaatcacacaccttgcgttgaaaacattaatgggctgacaagcgcatttctgtttagtttagagacacaagtcacgatcgggtatgggttcagatgcgtgacagaacagtgtgcaacagccatatttctcctgatcttccagtctattctcggagtgatcattaacagctttatgtgtggagccattcttgccaagatcagcagaccaaagaagcgtgcgaaaacaatcacgttttctaagaatgccgtcatcagtaaacgcggaggaaagctatgcctcctcatacgagtagccaatctgagaaagtcccttctgattggatcccacatatatggcaagctccttaagacaaccgtgacacccgaaggtgagactatcattctcgaccaaattaacatcaacttcgtggtagatgctggcaatgaaaatttgttcttcatctcccccttgacaatctatcacgttatagatcataattcgccttttttccatatggctgccgaaaccctgctgcagcaggacttcgaactcgtagtttttctggacgggacagtagaatccacctccgccacctgtcaagtaagaacaagttacgtccctgaagaagtcttatgggggtatcggttcgccccaattgtgtctaagaccaaggagggcaagtaccgggtggacttccacaatttttcaaagaccgttgaggtggaaaccccgcactgcgccatgtgtctttacaacgaaaaggacgtgagagctagaatgaagaggggatatgataacccgaactttatactgtccgaagttaatgagactgacgataccaagatgtag

SEQ ID NO: 129434 - DNA, 1176 bp, synthetic construct
  misc_feature 1..1176: note = Description of Artificial Sequence: Synthetic coding sequence
  source 1..1176: mol_type = other DNA
atgaatgcgagctctagaaatgtgttcgacactctgattcgtgttttaacagagagcatgtttaaacatctgagaaaatgggtagtcacccggttcttcggccattcacgccaacgagccagattagtctcgaaggacggacgctgcaacatagagtttggtaacgtggaggctcaatctcggtttatcttctttgtggatatttggaccacagtcttggacctaaaatggcggtacaaaatgaccattttcattacggcatttctgggctcctggtttttctttggattgctgtggtacgcagtcgcttacattcataaggacctacccgagttccatccttccgctaatcatacaccttgtgtagagaacattaatggccttaccagcgctttcctgttctctctcgagacacaggtgaccatcgggtacggatttcggtgtgtgactgagcagtgcgcgactgccatatttttgcttatttttcagagcattctgggcgtaataatcaattcattcatgtgcggtgctattcttgcaaagatcagccgcccgaagaaacgtgccaaaacaattaccttttccaaaaacgccgtcatcagcaagagaggtggaaagctatgtctgcttatccgcgtggccaacctgcgaaagtctctgctcatcggtagtcacatatatggcaaactcctcaaaaccacggtcacccccgaaggcgaaacgataatccttgaccaaattaatataaatttcgtggtagatgcgggaaatgaaaacttgttctttattagtcctctgaccatttaccacgtgatcgatcataattcacctttttttcacatggccgcagaaacactgctgcagcaggactttgagttggtggttttcctcgatgggactgtggagagtacctccgcaacatgccaggttagaacttcctatgtgcccgaggaggtactgtggggctaccgcttcgcccctatcgtgtcgaagactaaggagggcaagtatcgcgtcgactttcacaatttcagcaagacagtggaggtcgagaccccccactgtgccatgtgtctttacaacgagaaggatgtccgcgcccgcatgaaacggggctatgacaatcccaactttatcctgtctgaagttaacgaaactgacgatactaagatgtag

SEQ ID NO: 129435 - DNA, 1119 bp, synthetic construct
  misc_feature 1..1119: note = Description of Artificial Sequence: Synthetic coding sequence
  source 1..1119: mol_type = other DNA
atgttcaagcatctcagaaagtgggtcgtgacacgttttttcgggcacagccgacagagggcccggctggtctctaaagacgggcgctgtaacatcgagtttggcaacgtggaggcacaatctagattcatctttttcgtcgacatctggacaactgtgctggatttgaaatggcggtacaagatgacgatctttattaccgcttttctgggatcatggtttttctttggtttactgtggtacgctgttgcctacatacataaggaccttcctgaatttcatccctctgctaaccatacaccgtgcgtggaaaacattaacgggctcacatccgctttccttttttccctggagactcaagttactatcggctatggattcaggtgcgttactgaacagtgtgcgaccgcaatttttttgttgatatttcagagcatactgggagtcatcatcaactcttttatgtgtggggccatcctggcgaagattagcagacctaagaaacgggcaaaaacgatcactttcagcaagaacgccgttataagtaaacgtggagggaagctgtgtcttcttattcgcgtcgccaaccttcgcaaatccctgctgataggctcccacatatatggtaagttactcaagaccacggttacaccggagggggagaccataatcttggatcagataaacatcaactttgtggttgatgcaggtaatgagaaccttttttttatatccccgttgaccatttaccatgtcatcgatcataattccccgtttttccatatggccgcggagactctgctgcagcaggatttcgagctagtagtgtttttagacggaaccgtggagtctacctcagcaacctgccaggtgcggacctcctacgtgcctgaggaggtgttgtggggctatcggttcgcaccgatcgtgtccaagaccaaggaagggaaatacagggtggactttcacaatttctcaaagacagtggaagttgagaccccgcactgcgctatgtgtttatataatgagaaagacgtacgagcccggatgaagaggggatatgacaacccaaattttattctgagcgaggtaaacgaaactgacgacacgaagatgtag

SEQ ID NO: 129436 - DNA, 1140 bp, synthetic construct
  misc_feature 1..1140: note = Description of Artificial Sequence: Synthetic coding sequence
  source 1..1140: mol_type = other DNA
atgacctcagttgcaaaggtgtattattcacagactacccagaccgagtctcgtcccttaatgggcccagggatccgcagacgcagggtcttaactaaagatgggaggtccaatgtcaggatggaacacatcgctgacaagcggttcctttatctaaaagacctctggactacctttatcgatatgcaatggcgctacaaactccttctgttctcagcaacgtttgccggaacatggttcctcttcggcgtggtgtggtatctcgtcgcggtggcgcacggcgaccttctggagctggaccctcctgccaatcacacgccctgtgtggtgcaggtccacaccctcaccggagccttccttttctccttggagagtcagacgactataggctatggttttaggtacatcagcgaagagtgccccctggccattgtcttgttgatagcgcagttggtcctgacgaccattctcgagatattcattacaggaaccttccttgccaaaatcgcaaggcccaagaagcgggccgagaccattaggttttcccaacacgccgtcgtagcctcacacaatggcaagccatgtctcatgattagggtcgccaacatgcggaagtcactgttaattggctgccaggtgacagggaaactgcttcagacacatcagacaaaggagggggagaacatccgcctgaatcaggttaacgtaacatttcaggtggacactgcatctgactcacccttcctgattctcccactcacattctaccacgttgtcgatgagacctcaccactcaaagacctgcccttgcgctccggggagggtgattttgaacttgttctgattttgagtggcacagttgagtctacaagtgccacatgccaagtccggacatcgtatttgcctgaagagattctgtggggctacgagtttacacccgccatttccctgtccgcctcaggcaagtacatcgccgacttcagtttgttcgaccaggttgtgaaggtagcgagcccaagcgggttgcgggacagcactgtgcgttacggtgaccccgaaaagctgaagttggaagaaagtctgagagagcaggctgagaaagagggatcagccctcagcgtccgaatctctaacgtctag

SEQ ID NO: 129437 - DNA, 1173 bp, synthetic construct
  misc_feature 1..1173: note = Description of Artificial Sequence: Synthetic coding sequence
  source 1..1173: mol_type = other DNA
atgctgtcccggaaggggataatcccggaggagtatgtgctcacgcgtctcgccgaggacccagccaaacccaggtaccgagccaggcaacgccgggcccgctttgtttccaagaagggcaactgtaacgtggcccataagaatatccgggagcagggaaggtttctccaggatgtgtttacaaccctagtggacctgaaatggccacacactcttttgatattcacaatgtctttcctgtgcagctggcttctgtttgccatggcctggtggctgattgctttcgctcatggagacctggccccttccgaaggtaccgcagagccctgtgtcacgtcgatccattctttcagttctgcatttttgtttagcattgaggtgcaggtcacgatcggctttgggggccgaatggtgacagaggagtgtcctttggctattctcatcttgatcgtccaaaatatagtcggactcatgatcaatgcaataatgctgggttgcattttcatgaagacagctcaggctcatcgtcgagctgagacccttattttcagtaagcatgccgtgatcgccctgcggcacggccggctgtgttttatgctccgggtcggcgatctgagaaagtcaatgatcatcagcgctacaatacacatgcaggttgtgcgcaaaactacctccccagaaggcgaagttgtacctctgcaccaggtggatattcctatggagaatggcgtcggtggcaactccatcttcctggtcgcaccactgataatctaccacgttatagacgcaaacagccctctgtacgacctggctcctagcgatcttcatcatcaccaggatctggaaatcatcgtgattctagaaggggtcgtagaaactactggcattaccacacaggcccggacatcttacctcgctgatgagatcctgtggggacagaggttcgtacccatagttgccgaagaggatggccgttactctgtggactattccaagttcggtaacactgtgaaggttccaacgcccctctgcacagcacgccagctggatgaagaccatagcctgttggaggccctcactttggcatctgcccgtgggcctttgagaaagcgctccgtcccgatggccaaggccaagccaaagttttctatctctcctgacagcctgtcctag

SEQ ID NO: 129438 - DNA, 1302 bp, synthetic construct
  misc_feature 1..1302: note = Description of Artificial Sequence: Synthetic coding sequence
  source 1..1302: mol_type = other DNA
atgaccgccgccagcagagccaacccctacagcattgtgtcatcagaagaggacggactccatctggtaacaatgtctggagcaaacggatttgggaacggaaaagtgcacacacggaggcggtgcaggaataggttcgttaaaaagaacgggcagtgcaatatcgagtttgccaacatggacgagaagagtcagagatatctggctgacatgttcacaacatgcgtcgacattcggtggcgatatatgttactgattttcagcctagctttcctggcctcatggcttctgtttggtatcatcttctgggtcatcgccgttgcccacggggaccttgaaccggccgagggtaggggccgtacaccctgtgtcatgcaggttcatggatttatggctgctttcctgttctctatcgagacacaaaccactattggatatggactcaggtgcgtcacggaggagtgtcccgtggccgttttcatggtggtggctcagagcattgtgggctgtataatcgactcctttatgatcggtgcgatcatggccaagatggctaggcctaagaagcgcgctcagaccctgttgttcagccacaacgccgtggtcgccctgcgcgatgggaagttatgcctgatgtggagggttggaaaccttagaaaatcccatatcgtggaggctcatgtgcgggcccaattgattaagcccagggttaccgaggaaggagagtacatccctctggaccagatcgacatcgatgtaggtttcgataagggcctcgaccgtatcttcctggtctctccaatcacaatccttcatgagatagacgaggcctcccctctgtttggcatcagccgccaggacctggagactgatgatttcgagattgtagtaatcctcgaggggatggtggaggcaacggccatgactacacaggctagaagctcatatctagctaacgagatcctctggggccatagattcgaacccgtcctcttcgaggaaaaaaaccagtataaaattgactacagtcatttccacaagacatatgaagtcccttccacccccagatgtagtgctaaagacctggtggaaaataaatttctactgccctctgctaattccttctgctacgaaaatgagctggcattccttagtcgagatgaggaggatgaagctgacggcgaccaggatggccgcagccgggatggtctgagcccccaggccaggcatgactttgaccgcttacaagccggggggggggtgctggagcagaggccttatcgccgcgaaagtgaaatatag

SEQ ID NO: 129439 - DNA, 819 bp, synthetic construct
  misc_feature 1..819: note = Description of Artificial Sequence: Synthetic coding sequence
  source 1..819: mol_type = other DNA
atggtcttgttgaccgcagtcctcctgttgctcgcagcttacgccggcccagctcaatcactgggctcattcgtgcattgcgagccgtgtgacgaaaaagccctgagtatgtgccccccatccccactgggatgtgagttggtcaaagaacctggatgtggttgttgcatgacctgtgcactggccgagggccagtcctgcggcgtgtacaccgagagatgcgcccaggggctgcgctgcctccccagacaagacgaagaaaagccactgcacgctcttctccacggaaggggtgtatgccttaatgagaaatcctatcgggagcaagtgaaaattgaaagagatagccgtgagcacgaggagcccacaacatccgagatggccgaggagacgtactctcccaagatttttcgacccaagcacaccaggatctccgaactcaaggccgaggccgtgaagaaggacagaagaaagaagctaacacaatcaaagttcgtcggtggcgccgaaaacactgcgcaccctaggatcattagcgccccagagatgcgtcaagagtctgaacagggaccctgccgtagacatatggaggcctctctgcaggaactgaaggcaagccctcgcatggtaccgcgcgctgtttatttgcctaattgcgatcggaagggcttctacaaacgcaagcagtgcaagccgtctcggggaagaaaacgcggcatctgctggtgtgtagacaagtatggtatgaagctccctgggatggagtacgtggacggtgatttccagtgtcatacgttcgatagtagtaacgttgaatag

SEQ ID NO: 129440 - DNA, 285 bp, synthetic construct
  misc_feature 1..285: note = Description of Artificial Sequence: Synthetic coding sequence
  source 1..285: mol_type = other DNA
atggacagcagcaactgtaaggtgatagcaccgttactgtctcagcgttaccgccggatggtaacgaaagatggtcactcaactctacaaatggatggcgcgcaacggggcctcgcttacctgcgtgatgcgtggggaatcctgatggacatgcggtggcggtggatgatgctggttttcagcgccagctttgtggtccattggctggtgtttgctgtcctatggtgtttttgtggggaggattgtccagcgaaaaagtcgagcttttttaacagtctttactag

SEQ ID NO: 129441 - DNA, 1083 bp, synthetic construct
  misc_feature 1..1083: note = Description of Artificial Sequence: Synthetic coding sequence
  source 1..1083: mol_type = other DNA
atggattctagtaattgcaaagttattgccccacttcttagtcagcggtatcggaggatggtgacaaaggatggtcactcaacgctgcagatggacggggcccaacgcggtcttgcgtatttgcgcgacgcctggggtatcttgatggacatgcgatggagatggatgatgctggtgttcagcgcttcatttgtcgtgcattggctggtgtttgcagtcttgtggtatgtgctggccgagatgaatggtgatctggaactggaccatgacgctccacctgagaaccatacaatctgtgtcaaatacattacttccttcaccgctgccttttccttttccctcgaaactcaactcacaatagggtacggtacaatgttcccaagtggggactgccccagcgcaatcgctttactcgccatccagatgctgcttggtctgatgttagaggcttttattacgggagccttcgtcgcgaaaatagctagacctaagaaccgggcattttccatccgattcaccgatacagccgtcgttgcacatatggacggcaagcctaacctcatcttccaggtcgcaaatacacgaccctcaccactgacatccgtgagggttagcgccgtgttataccaggagcgcgagaacgggaagctgtaccagacttccgtggattttcatctagatggaatttccagtgatgagtgccctttctttatttttcccttaacctattaccactcaataaccccatctagcccgctggctacgcttttgcagcatgagaatccctcccacttcgagctcgttgtattcctgtcagcgatgcaggaaggtactggagagatctgccaaaggagaacatcatacctgcctagcgagattatgcttcaccattgcttcgcctctcttctgaccaggggttctaagggcgagtaccagatcaaaatggagaattttgacaagactgttccggaatttccaacaccactggtgtcaaaatcccctaacagaacagatttagacatccatattaacggccagtctatcgataatttccagatatccgaaacagggcttacagagtag

SEQ ID NO: 129442 - DNA, 1128 bp, synthetic construct
  misc_feature 1..1128: note = Description of Artificial Sequence: Synthetic coding sequence
  source 1..1128: mol_type = other DNA
atggatgccattcatattgggatgtcctcaaccccgctggtcaaacatacggccggcgcggggctgaaggccaaccgaccacgcgtgatgagtaagtctggccatagtaacgtacggatagacaaggtggatggtatatacctgctctacttgcaggatctctggaccacagtgattgacatgaagtggcgatataagcttacgttattcgccgccactttcgtcatgacgtggttcttgtttggagtgatctattacgctattgccttcattcatggcgacctagaacccggagaaccgatctctaatcacacaccctgtattatgaaggtggatagcttgacaggggcattcctgttttcactggaaagccaaacaacaatcggatacggcgtgcgctcaattactgaagagtgccctcacgctatattcctcctagttgcccagctggtgatcacgacactgattgagatatttataacagggaccttcctcgccaaaatcgctcgcccgaaaaaaagagctgaaacaattaagttctctcattgcgcggtcattacaaagcaaaacggaaaactctgcttggtgatccaagttgccaatatgcgcaagtcactcctgattcagtgtcagctctctggcaaacttttgcagacgcacgtgactaaggaaggcgagaggatcttattaaaccaggccactgtgaagtttcacgtggatagttcaagtgaatcaccttttcttatactgccgatgaccttctatcacgtgcttgacgagacctcacccttgagagatctgacccctcagaatctgaaagaaaaggagttcgagctcgtggtgctgctcaacgccactgtggagagtacgagcgctgtatgtcagtcccgcaccagctacattcctgaagaaatctactggggtttcgaattcgtcccagtagttagcttgtcaaaaaatggcaaatacgtagcggattttagccaattcgagcaaatccgcaagagtccagactgcaccttctactgcgccgatagcgagaaacagcagctagaggagaaataccgccaggaggaccagcgcgagagggaactgcggactctgttgttgcaacaaagtaatgtctag

SEQ ID NO: 129443 - DNA, 186 bp, synthetic construct
  misc_feature 1..186: note = Description of Artificial Sequence: Synthetic coding sequence
  source 1..186: mol_type = other DNA
atggatgctatacatatcggcatgagctcaacccccctagtcaaacacactgccggggccggcctgaaagccaacaggccaagggttatgagcaaatcaggccattcgaacgtcaggatcgataaggtggatggtatttatctcctctatcttcaggatctgtggacgaccgtgattgacatgtag

SEQ ID NO: 129444 - DNA, 471 bp, synthetic construct
  misc_feature 1..471: note = Description of Artificial Sequence: Synthetic coding sequence
  source 1..471: mol_type = other DNA
atggatgcgattcacatcggcatgtcctcaacccccctggtgaagcacacagccggtgcagggctgaaggctaatcgcccaagagtgatgtcaaagagcgggcactcaaacgtgagaatcgataaagttgatggtatctatctcctgtacctgcaggatctgtggaccacagtgattgatatgaaatggagatacaagctgacgctttttgccgcaaccttcgtgatgacgtggttcctattcggggttatctactatgccatcgcctttatacacggagacctcgaaccaggcgaacccatttctaaccacactccttgcatcatgaaagttgattccttgaccggtgccttcctgttttcactggagtcccagacaaccatagggtatggggttagaagcattacagaggagtgccctcatgctatttttctgctggttgcacagttagtcattactactcttatatag

SEQ ID NO: 129445 - DNA, 471 bp, synthetic construct
  misc_feature 1..471: note = Description of Artificial Sequence: Synthetic coding sequence
  source 1..471: mol_type = other DNA
atggacgccattcacatcggtatgtcgagtactccattggttaagcacacagctggcgcaggcctcaaggccaacagacctagggtcatgagtaagagtggccacagcaatgtgcgaatagacaaggtagacggaatctatctcttgtacctacaagacctttggactaccgttatagatatgaagtggcggtataagctcactctgttcgcagccacgttcgtcatgacatggtttctgtttggagtgatctactatgctatagcattcatccacggcgacctggaaccaggggagcccataagcaaccacactccttgtataatgaaagtcgattccttaactggtgccttcctcttttccttggaaagtcaaaccactattggctacggagtacgcagcatcacagaggagtgcccacacgccatttttttacttgttgctcagctcgtcatcactacgttaatctag

SEQ ID NO: 129446 - DNA, 1128 bp, synthetic construct
  misc_feature 1..1128: note = Description of Artificial Sequence: Synthetic coding sequence
  source 1..1128: mol_type = other DNA
atggatgccatccacatcggcatgtcaagcactccacttgtcaagcacactgccggagctggcttaaaagctaatcgacctcgggtcatgtcaaaatcgggacacagtaatgtccgaatcgacaaagtcgatggtatctatctcttgtatctccaggacctttggacaaccgtgattgacatgaagtggagatacaagttgactctgttcgctgccacattcgtgatgacttggtttttattcggtgtgatttactatgccattgcgttcatccacggggacctggaaccaggtgagccaatctcaaatcacacgccatgtattatgaaggtggacagtttgacaggggccttcttgttctccctagagagccagactacgattgggtacggagtgcggtcaattaccgaagaatgtccacacgcaatatttctcctcgtggcccaactggtaattacgactctgatcgagatctttatcacgggtactttcctggccaaaattgcaaggcccaaaaaacgcgcggaaactatcaaattttcacattgtgctgtaattacaaaacagaacggcaagctttgtctggtgattcaggtagctaatatgcgcaagagtctacttattcagtgccaactgtccgggaagctcctgcagactcatgtgacgaaggaaggtgaacgcatcctactcaatcaggctaccgtgaaattccacgttgacagcagtagtgagagcccttttctcattctgcctatgactttctatcacgttctcgatgaaacctcgccattgcgtgacctgactcctcagaacctcaaagaaaaagagttcgaactggttgtgctgctgaacgctaccgtagagtccacaagtgctgtctgccaaagtcggaccagttatatccccgaagaaatttattggggcttcgaattcgtgccagtggtgtccctctccaagaacgggaagtacgttgccgatttcagccaatttgagcaaattcggaagagcccggactgtaccttctactgcgccgatagcgaaaagcagcagcttgaggaaaagtacaggcaggaagatcagagggagagagagctgagaaccttattgctacagcagtcaaatgtgtag

SEQ ID NO: 129447 - DNA, 1128 bp, synthetic construct
  misc_feature 1..1128: note = Description of Artificial Sequence: Synthetic coding sequence
  source 1..1128: mol_type = other DNA
atggatgccatccacattggcatgagtagtactccccttgtgaagcatacagcaggagcaggcttgaaggccaaccgacctcgcgtcatgagcaagtccgggcactcaaacgtcagaattgataaggtcgacgggatttatttactctacctccaagatttgtggactaccgtaatcgatatgaagtggagatacaaactgaccctcttcgcagcaacatttgtcatgacctggtttctctttggcgtcatctactacgctatagcgttcattcacggggacctggagcctggcgaacctattagcaatcacaccccatgcataatgaaggtggattccttgactggagcatttttatttagtttggagagccagaccacaataggatacggggtaaggagtatcaccgaagaatgccctcatgctatttttctactcgtggcgcagctggttatcacaaccctaatcgagatcttcatcaccgggacttttttggctaaaattgcaaggcccaaaaaacgcgccgaaaccattaagttttcccattgtgctgtaattaccaaacagaatggtaagctttgtctcgttatccaggtcgcaaacatgcggaagtctttactgattcaatgtcagctaagcggaaaactcctgcaaactcatgtgactaaggagggcgagcgtattctgctcaaccaggccacagttaaatttcacgtagacagctcaagcgagtccccctttctcatcctgcccatgactttttaccacgtgctcgacgagacctctccccttagggacctaactcctcagaatttgaaggagaaagagttcgaattggttgtgctgctgaacgctacagtggagagtaccagcgcagtgtgccaatcgagaaccagttatatccccgaagaaatctactgggggtttgaatttgtccctgtagtgagcctgagtaagaatggcaagtacgtggccgacttttcccaatttgaacagatcaggaagagcccagattgtacgttttactgtgctgactctgaaaagcaacagctggaagagaagtaccgccaagaagatcaaagagagcgggaattgcgcaccctcctgctgcaacaatcaaatgtgtag

SEQ ID NO: 129448 - DNA, 1128 bp, synthetic construct
  misc_feature 1..1128: note = Description of Artificial Sequence: Synthetic coding sequence
  source 1..1128: mol_type = other DNA
atggacgccatccacatagggatgtcatctacacccctcgttaagcatacagccggcgctggccttaaggccaaccggccccgagtgatgtccaaaagcggccactccaatgtgagaattgacaaagtggacggaatctatttactttatctacaggatctctggacaacagtcattgacatgaaatggaggtataaacttaccttgttcgctgcgacgttcgtgatgacctggttcctcttcggagtgatatactatgctatcgctttcattcacggggacttggagcccggagagccaatatctaaccatacgccctgcattatgaaggtcgactccctgactggcgcttttttattctcactcgagtcccagaccacgatcggctatggagtgcggtccatcacagaggagtgcccacatgccatttttctcctggtggctcaactggtgattaccacactgattgagatatttatcacggggactttcttagctaagatcgctaggcctaaaaagcgcgctgaaacaattaagttttcacattgcgccgtcatcactaaacagaatggcaaattgtgtctggttatccaggtcgccaatatgcggaagagtctgttaatccaatgccagctgtccgggaaactgctgcagactcacgtgacgaaggagggcgaaagaatactgttaaaccaggcaaccgtgaagttccatgtagatagctcaagcgagagtccattcctcattttgccgatgaccttttaccacgtgctcgacgagacatctccactgcgagatctcactccccaaaacttgaaagagaaagaattcgagctggtggtgttactgaacgcaaccgtagaaagcacctccgccgtgtgccagagccgcacctcttacatacctgaagaaatctactggggttttgagtttgtaccagtggtctctctctctaaaaacgggaaatacgtggccgatttttcacagtttgaacagatccggaagtcacccgactgtaccttctattgcgctgactctgaaaagcagcagctcgaggaaaaatacagacaggaggaccagcgggaacgtgaattaaggaccctgctgttgcagcagtccaatgtgtag

SEQ ID NO: 129449 - DNA, 1128 bp, synthetic construct
  misc_feature 1..1128: note = Description of Artificial Sequence: Synthetic coding sequence
  source 1..1128: mol_type = other DNA
atggatgccattcatatcgggatgtcttctaccccactggtgaagcacaccgccggcgcgggccttaaagcaaatcgccctcgggtgatgtccaagtcaggtcactctaacgtacgaatcgacaaggtcgacggtatctatctcctgtacttacaagacctgtggacaaccgtgattgacatgaaatggcggtacaaactaacccttttcgctgcaacctttgttatgacatggtttttatttggtgtgatctactacgctattgccttcattcatggggacctagaaccaggcgagcccatttccaaccacacaccctgcattatgaaagtcgattcattgaccggcgcctttctctttagcctggagtcacaaaccacaattggctatggagtcaggtcgatcactgaggagtgcccacacgcgatttttctgttggtggctcagctggtgattactacactaatcgaaatctttattacggggacattcctggctaaaatcgctcggccgaaaaagcgggcagagaccattaagttctcccattgtgcagtgatcacgaaacagaacgggaagctgtgtctagtgatccaggtggcaaatatgcgcaagtccttgctgatccagtgccagctttccggcaaacttctgcaaacccatgtaaccaaagagggggagcgcattctgctgaatcaggcgacggttaagttccatgtggactcatccagcgaatcaccattcctgatcctgcctatgacattttaccacgtgctggatgaaacttctcccctccgagacctgactccacagaatctgaaggagaaagaattcgagctagttgtcctccttaacgcgactgtagagtcgacgagtgccgtgtgtcagtccaggacctcctacatccctgaagagatttactggggctttgagttcgtgcctgtagtgagcctgtctaagaacggcaagtatgtagcagacttctctcagtttgaacagatcagaaagagtccggactgtaccttttactgcgccgacagtgaaaaacaacagctggaagaaaagtaccggcaagaggatcaaagagaacgagaactgcggacactcttgctccaacaaagtaacgtgtag

SEQ ID NO: 129450 - DNA, 60 bp, synthetic construct
  misc_feature 1..60: note = Description of Artificial Sequence: Synthetic coding sequence
  source 1..60: mol_type = other DNA
atggacgccatacacattggaatgtccagcacacccctggtcaagcataccgcaggttag

SEQ ID NO: 129451 - DNA, 420 bp, synthetic construct
  misc_feature 1..420: note = Description of Artificial Sequence: Synthetic coding sequence
  source 1..420: mol_type = other DNA
atggacgccatacatataggaatgtcttccactcctctcgtgaagcacactgcaggcgctggccttaaagccaacagacctcgcgttatgtccaagtccggacattccaacgtccgcatcgataaggtcgacggtatctatctgctttatctgcaggacttatggaccactgtgatagacatgaagtggaggtacaaactgacactattcgccgctacctttgtgatgacctggttcctgtttggggtcatctactacgcgatcgcctttattcatggagatctcgagccaggcgagccgatatccaaccacactccctgcatcatgaaggtggattcactgactggagcctttttgtttagtttagagagccagacgactattggttacggagtcaggtcaatcacagaagagtgttag

SEQ ID NO: 129452 - DNA, 738 bp, synthetic construct
  misc_feature 1..738: note = Description of Artificial Sequence: Synthetic coding sequence
  source 1..738: mol_type = other DNA
atggacgctattcacattgggatgagtagtacccccctggtgaagcacaccgctggggctggtcttaaagccaaccggccacgggtgatgtcaaaatctggccattcaaacgtgcgaatagataaggtagacgggatctaccttttatacttacaggacttgtggacgaccgttattgatatgaagtggcgatacaagttaaccctctttgccgctaccttcgtcatgacttggttcctgtttggcgttatctattacgccatagcctttatccatggggatttggagcctggcgagcccatcagtaatcatacaccttgtatcatgaaggtggacagcttgactggtgcttttctcttcagccttgaatcccagaccacgatcggctacggggtacgatcgatcactgaagagtgtcctcatgctattttcctcctggttgctcaactcgtcatcactacgctgattgagatctttattactggaactttcctggccaagatagcccggccaaagaagagagccgaaaccatcaagttcagccattgcgccgtcattaccaagcagaacgggaagctctgcctggtcatccaggtagcaaatatgaggaaatcattgctcatccagtgtcaactgagtggcaagctccttcaaacccatgtcaccaaagagggagagaggattctgttaaatcaggctactgtgaaattccacgttgattcaagctccgaatcctag

SEQ ID NO: 129453 - DNA, 120 bp, synthetic construct
  misc_feature 1..120: note = Description of Artificial Sequence: Synthetic coding sequence
  source 1..120: mol_type = other DNA
atggatgctattcacataggaatgagctctacgccactggtgaagcacaccgccggcgccggcctgaaagcaaaccggccaagagtcatgagcaagagcggacacagcaatgttcgttag

SEQ ID NO: 129454 - DNA, 147 bp, synthetic construct
  misc_feature 1..147: note = Description of Artificial Sequence: Synthetic coding sequence
  source 1..147: mol_type = other DNA
atggacgccattcacataggcatgtctagtacccccctcgtgaaacacactgcaggcgcaggtctcaaagcaaacaggccacgggttatgtctaagagcggtcacagtaacgtgaggattgacaaagtcgacggaatctacctgtag

SEQ ID NO: 129455 - DNA, 147 bp, synthetic construct
  misc_feature 1..147: note = Description of Artificial Sequence: Synthetic coding sequence
  source 1..147: mol_type = other DNA
atggacgcaatccacattggcatgagctcaacccctcttgtcaagcatacagcaggtgctggcttgaaggccaatcgacctagagttatgtcaaagagcggacacagtaatgtgcgcatcgacaaagtggacggtatttacttatag

SEQ ID NO: 129456 - DNA, 147 bp, synthetic construct
  misc_feature 1..147: note = Description of Artificial Sequence: Synthetic coding sequence
  source 1..147: mol_type = other DNA
atggatgccatccacatcggaatgtcctcaacccctcttgtgaagcataccgcgggagccgggctgaaagccaatcggccccgggtcatgtcaaagagtgggcacagcaacgtgagaattgacaaggtggacggaatctacctctag

SEQ ID NO: 129457 - DNA, 78 bp, synthetic construct
  misc_feature 1..78: note = Description of Artificial Sequence: Synthetic coding sequence
  source 1..78: mol_type = other DNA
atggacgcaattcatataggcatgtcctctacccccctggtcaagcatactgcaggagccggcctgaaggccaactag

SEQ ID NO: 129458 - DNA, 147 bp, synthetic construct
  misc_feature 1..147: note = Description of Artificial Sequence: Synthetic coding sequence
  source 1..147: mol_type = other DNA
atggatgcgattcacattgggatgtcttccacccctctggtgaaacataccgccggagcaggactgaaagcaaatcgacctcgcgttatgtcgaaatctggccattccaatgtgcgaattgacaaagtagatggaatctatctgtag

SEQ ID NO: 129459 - DNA, 147 bp, synthetic construct
  misc_feature 1..147: note = Description of Artificial Sequence: Synthetic coding sequence
  source 1..147: mol_type = other DNA
atggacgccattcacattgggatgtcctcgaccccactggttaagcacactgccggagccggcctaaaggctaaccggccaagagtcatgagtaagagtgggcattccaatgtgagaattgataaagtcgacgggatatacctctag

SEQ ID NO: 129460 - DNA, 147 bp, synthetic construct
  misc_feature 1..147: note = Description of Artificial Sequence: Synthetic coding sequence
  source 1..147: mol_type = other DNA
atggacgccatccacatcggaatgtctagtactccactggtgaagcatactgccggcgcgggtcttaaggcgaatcgccccagagtaatgtccaagtccggacatagcaacgtgagaatcgacaaggtggacggcatctacctgtag

SEQ ID NO: 129461 - DNA, 1257 bp, synthetic construct
  misc_feature 1..1257: note = Description of Artificial Sequence: Synthetic coding sequence
  source 1..1257: mol_type = other DNA
atgagctactatggcagcagttaccacatcatcaatgcagacgctaagtatcctgggtaccccccggaacacattattgccgaaaagagacgggccaggcgccgcttgctacataaagatggttcttgcaacgtgtactttaagcatatctttggcgaatgggggagttacgtagtggatattttcaccactcttgtggacacgaaatggcggcatatgttcgtgatcttttctctatcctatatcctttcatggctcatatttgggtcggtgttttggctaatcgccttccatcacggcgaccttttgaacgatcccgacattaccccatgtgtggataacgttcattcatttaccggcgccttcctgttttcgctggaaacacagacgactatcgggtacggatatagatgtgttactgaggagtgcagtgtggctgtactcatggtaattcttcagtctatcctgtcctgcattatcaacacttttatcatcggagccgcattggcaaagatggctactgcaagaaagagagcccagactattcggtttagctatttcgcactcatcggaatgcgcgacggtaagttgtgcctgatgtggaggattggggacttcaggccaaatcacgtggtggagggcactgtgcgagctcaattgctcaggtacacggaagattctgaaggcaggatgacaatggctttcaaagatttaaagctggtaaacgatcagattattttggtgaccccggtaactattgtccatgagatagatcatgaaagtccgctgtacgctcttgaccgcaaagctgtggcaaaggataatttcgaaattctcgtcaccttcatttacactggcgactcaacaggcacgtcacaccagtctcggtcttcttacgtacctagagaaatcctgtggggacatcggtttaatgacgtcttggaggtaaagcggaagtactacaaggtgaattgcctacagtttgaggggtccgtcgaggtgtatgcgccattttgctctgctaaacagcttgattggaaggaccagcagctacacatcgagaaagccccacctgtgcgcgagagctgtacaagcgatactaaagctcgcagaaggtccttctccgctgtcgcaattgtgtcctcatgcgaaaatccagaagaaactaccacctcggccactcatgagtaccgggagactccttaccaaaaggcgttgctcacgctcaataggattagtgtggagtctcagatgtag

SEQ ID NO: 129462 - DNA, 1257 bp, synthetic construct
  misc_feature 1..1257: note = Description of Artificial Sequence: Synthetic coding sequence
  source 1..1257: mol_type = other DNA
atgtcatactacggctcttcttaccacataatcaacgctgatgcaaaatatcccggctacccccccgaacatatcatcgcggagaaacgccgcgccagacggaggttattgcataaagacgggtcctgcaacgtgtattttaagcatatctttggcgagtggggctcttacgtcgtcgacatcttcaccacacttgtcgacacaaagtggcgacacatgtttgtcattttcagcctgtcctacatcctctcctggctgatcttcggctccgtattttggctgatcgcctttcaccatggcgaccttctcaacgaccccgatataacaccttgcgttgacaacgtgcactcctttactggagcattcctattctctctggagactcagactactattggctatggatatagatgcgtgacagaagaatgctctgtcgcagtgttgatggtgattttgcagtcaattctgagctgcatcatcaatacattcataatcggagccgccctcgctaagatggccactgctcgcaaacgggcccaaacaatccgcttttcatatttcgctctcattggcatgcgtgacgggaagctttgcctcatgtggcggattggtgatttcagaccaaaccacgtcgtagaagggacagtcagagcccagctgctgcggtataccgaggacagcgagggtaggatgacaatggcgttcaaggaccttaaattggttaatgaccaaattattctcgttacacccgtgacaattgtccacgagattgaccacgagtcaccactgtatgccctggatagaaaggccgtggccaaagacaacttcgagatccttgtgaccttcatttacaccggggattcgacggggacatctcaccagagcagatcttcctatgtgccacgagagatattgtggggacacagattcaatgatgtgcttgaagttaaaagaaaatactataaggtcaactgtcttcagttcgaaggcagtgtggaagtatacgctccattttgctccgccaagcagctggattggaaggatcaacagctccatatcgagaaggctcctcctgtccgagagagttgtacttcggatacaaaggcgagacgcagatcgttctccgccgtagctatcgtgtctagctgtgagaatcctgaggaaaccacaactagtgcaacacatgagtatagggaaactccttaccaaaaggcgctcctgacactgaataggatatcagttgagagtcaaatgtag

SEQ ID NO: 129463 - DNA, 1257 bp, synthetic construct
  misc_feature 1..1257: note = Description of Artificial Sequence: Synthetic coding sequence
  source 1..1257: mol_type = other DNA
atgtcttattacggttcctcttatcatatcatcaacgccgacgccaagtatcccggctatccaccggaacatattatcgcagagaagcgcagggcgcggcgccgcttgctgcacaaagacggtagctgcaatgtgtatttcaagcatatctttggcgagtggggcagttacgtggtggatatcttcaccacactcgtggacacaaagtggcggcacatgtttgtgatcttcagtctgagctacattttgtcctggctaatcttcggcagtgtcttctggctgatagctttccatcacggcgacctcctcaacgaccctgatatcacaccatgcgtggacaacgtgcattcgttcacaggcgcttttctgttcagcctagagacccaaacaaccataggctacgggtaccgctgtgtgactgaagaatgcagcgtggcagtcctcatggtgatccttcagtctatattaagctgtattattaacacctttatcattggcgccgccctagcaaagatggccaccgcccgcaagagggcccagacaattcggttttcttatttcgctttgattggcatgcgagatgggaagctttgtctgatgtggcgcataggcgatttccgtccaaaccacgtggttgaaggcacggttcgagcccagcttctccggtacactgaggactctgaaggcagaatgaccatggccttcaaggacctaaagctggtcaatgatcaaattatcctcgtgactcctgtgacgattgttcatgaaatcgatcacgagtccccactgtacgccctggatcggaaggcagtcgctaaagataatttcgagatcctggtgacctttatctacaccggtgactccaccggcactagtcatcaatcaaggtcttcttatgtgcccagggagattctgtggggacatcgcttcaatgatgtcctggaggtgaaacgcaaatactataaagtgaactgcctgcaatttgaaggatctgtcgaggtgtacgcacccttttgtagcgcgaagcagctagattggaaagatcagcagctccacatcgaaaaagcgcctccagttcgagaaagttgcacctctgatacaaaggctagacggcgctctttctcagccgtcgctatagttagtagctgcgagaaccccgaagaaactacaacttcagcgacacatgaatatcgcgagacaccctaccaaaaagcacttctgacactgaatcggataagtgtcgagagccaaatgtag

SEQ ID NO: 129464 - DNA, 1284 bp, synthetic construct
  misc_feature 1..1284: note = Description of Artificial Sequence: Synthetic coding sequence
  source 1..1284: mol_type = other DNA
atgggtagtgtcaggaccaacaggtacagcatcgtttcaagtgaggaggacggaatgaagcttgctactatggctgttgccaacgggttcggcaacgggaagagtaaggtacacacacggcagcaatgcagaagcagatttgttaagaaggacgggcactgcaacgtgcagttcatcaatgtgggagagaaggggcagcgataccttgcggacatttttactacttgcgtggatatccgatggaggtggatgctggtgatattttgcctcgcatttgtcctctcttggctgtttttcggatgcgtgttttggctgattgcattgctgcacggcgacctggatgcatcaaaagagggaaaagcctgcgtttccgaggtaaattcattcaccgccgccttcctctttagcatagagacacagacgactattggatacggctttagatgtgtgacggacgagtgtccgatagccgtgttcatggtggtgttccaaagtatcgtgggttgtattatcgacgctttcatcatcggagccgtgatggcgaaaatggcaaaaccgaagaaaaggaacgagactctcgtgttcagccacaatgcagtgattgctatgagggatggaaagttatgcctgatgtggcgcgtgggaaatctacgcaaatctcacttggtggaggcccacgtcagagcccagttattaaaatcgcgcataacgagcgagggcgagtacatccctcttgatcagattgacatcaatgtcggattcgactccggtatcgatcgaatattcttagtgtcacccatcacgattgtgcacgaaattgacgaggatagccctctttatgacctcagcaaacaggacattgacaacgctgactttgaaatagttgtcatcctggaggggatggtggaggccaccgccatgaccacccagtgtaggtcttcctacctggctaatgaaatactctggggacacagatatgagcctgtgctgtttgaagaaaagcactattacaaagtggactattctcggtttcataaaacctatgaggtccccaacactcccctgtgcagtgcaagagatttggccgaaaaaaagtacattctgtcaaatgctaacagcttctgttatgagaacgaggtcgcattgacatcaaaagaggaagacgattcagaaaatggggtgcctgagtccaccagcactgatacccctcctgatatagacttgcacaaccaggcttccgtgcctctggagcctagacctctaaggagagaaagcgagatttag

SEQ ID NO: 129465 - DNA, 1284 bp, synthetic construct
  misc_feature 1..1284: note = Description of Artificial Sequence: Synthetic coding sequence
  source 1..1284: mol_type = other DNA
atgggatcagtgagaaccaaccggtactccatcgtgtcatccgaggaggacggcatgaagctggctacgatggcagtagccaacggtttcggaaacggcaaatccaaagtgcatacacggcaacaatgccgatctcggtttgtgaagaaagatggtcattgtaatgtgcagttcataaatgtcggcgaaaaaggacaaaggtacctggcggatatttttacaacgtgcgtggacatccgatggcgttggatgctggtgatcttctgtttagccttcgtgctctcttggctcttcttcggttgtgtattttggttaatcgccctgctgcacggcgatttggacgctagcaaagaagggaaggcctgtgtgagtgaggtgaacagtttcaccgcggcctttcttttctcaatcgaaacgcagaccacaatcgggtatggtttccgttgtgtgaccgatgagtgtcctatcgccgtcttcatggtggtattccagtcaatcgtcggctgcatcatcgacgcctttatcatcggagcggtgatggccaagatggctaaaccaaaaaaacgaaatgagacgctcgtgttttcccacaatgccgtcattgcaatgcgcgacggcaaactttgcctgatgtggcgggtgggcaacttgagaaaatcgcatctggtggaggcccacgtacgggctcagctgctaaagagtagaattacctcagaaggcgagtacatccctcttgatcagatagacatcaatgtgggctttgatagcggcattgacaggatatttcttgtatctccgatcactattgtccacgaaatcgacgaggactcccctctgtacgacctcagtaaacaggacattgacaatgcagactttgaaatagtagtcattctggaaggaatggtcgaggccacagccatgactacccagtgccgctctagctacctagcgaacgaaattctgtggggacatcggtacgagccagtcctcttcgaggaaaaacattactacaaggtggactactcaagattccataaaacctacgaggttccaaatacacctctgtgcagcgcccgcgacctagctgagaagaaatatatactcagtaacgccaactccttttgctacgagaacgaagtggcactgacctccaaagaagaagatgacagcgagaatggcgttccagaaagcacctctactgatacaccacctgacattgatcttcacaaccaggctagcgtcccactggagccccgccctttgagacgagaaagcgagatatag

SEQ ID NO: 129466 - DNA, 1506 bp, synthetic construct
  misc_feature 1..1506: note = Description of Artificial Sequence: Synthetic coding sequence
  source 1..1506: mol_type = other DNA
atgagtgcccttagacgcaagttcggcgatgattatcaggtggtaactacttcaagctctggaagtgggcttcagcctcaaggtccgggccaggatcctcagcaacaattggttccgaagaaaaagagacagagattcgtggacaagaacggccgatgcaacgtgcagcatggaaatttgggcagcgagactagccgctatttgagtgacctgttcaccacgttagtagatctcaaatggcgctggaatctatttattttcatacttacttacactgtagcctggctatttatggcaagcatgtggtgggtcattgcgtatactcgaggagacttgaacaaagctcatgtaggaaattacaccccctgcgtcgccaacgtgtataacttcccttcagcctttctgttctttatcgagactgaagccacaatcggctacgggtatagatacatcactgacaagtgcccggaaggtattatcctgtttctgtttcagtcaatcttggggtccattgtggacgctttcctcatcgggtgcatgtttatcaaaatgtcacagcctaagaaaagggctgagacgctgatgttctcagaacacgccgtgatctcaatgagggacgggaagttaactttaatgtttcgagtcgggaacctgagaaactctcacatggtgtccgcccaaattcggtgcaagttgttgaagtcgcgccagacgcctgagggcgaattcctgccattagatcagttggaacttgacgtaggcttctctacgggagctgatcaattatttctcgtttcccctctgacaatctgccacgtgattgatgccaagtcgcctttctacgatctctctcagagatctatgcaaacggagcagtttgaaatcgtcgttatattggagggcattgtggagacaacgggaatgacatgccaagctaggacctcatacaccgaggatgaagtcctgtgggggcatagattcttcccagttatttcactggaggagggattctttaaagtggattattcccagttccacgcaaccttcgaagtcccaacaccaccttatagtgttaaagaacaggaggagatgttgcttatgagcagcccgctgatagctcctgccatcaccaacagcaaagagcggcacaattcagtggagtgcctggacgggctggacgatatcaccacaaagttacccagtaaactgcagaagattaccgggagggaggacttccctaagaaactgcttcgtatgtcatcaacaactagcgaaaaggcatacagtctcggtgacctgcccatgaagttacaacgtatttcgtctgtgcctggcaatagtgaggagaaactcgtgagtaaaacaactaaaatgctgtctgacccaatgtctcagtccgtagcggaccttcctcccaaacttcagaagatggccggaggcgcagctcgaatggagggaaacctgcccgctaagctcaggaaaatgaattcagaccgttttacctag

SEQ ID NO: 129467 - DNA, 708 bp, synthetic construct
  misc_feature 1..708: note = Description of Artificial Sequence: Synthetic coding sequence
  source 1..708: mol_type = other DNA
atgagcgcattgcggagaaaatttggtgatgactaccaggtggtaacaacctcatcatccgggtccggcctccaaccgcaagggcccggccaagatcctcagcaacagttggtacccaagaagaaaagacagcggtttgtggataagaatggaaggtgtaatgtgcagcacgggaacctggggtctgaaacaagtagatacctgtccgatctctttaccactctggttgatctcaagtggcgctggaatttgtttattttcattttgacgtacaccgtggcctggcttttcatggcttccatgtggtgggttattgcatatacccgcggcgatctcaataaagcgcacgtgggaaactatactccctgtgtcgctaatgtttataattttccttccgcgtttctgttttttatagagactgaggctactatcggctatggttaccggtacattaccgataagtgtcctgaaggtattatacttttcctgttccaaagcattttgggatcaatcgtcgacgccttcctgatcggatgcatgttcataaaaatgtctcaacccaaaaagcgtgctgagacattaatgttcagtgagcacgccgtgatcagcatgagagatggcaagttgacactgatgttccgtgtaggaaatttacggaattctcacatggtttccgctcagatcaggtgcaaactgctcaagggttag

SEQ ID NO: 129468 - DNA, 1338 bp, synthetic construct
  misc_feature 1..1338: note = Description of Artificial Sequence: Synthetic coding sequence
  source 1..1338: mol_type = other DNA
atgcacggacactcgcgaaacggccaggcccatgtaccacgtagaaaacgccgaaaccggtttgtgaaaaagaatggacaatgcaacgtgtacttcgctaatctgtccaataagagccaaagatacatggccgacatcttcaccacctgtgtggataccaggtggcggtacatgttgatgattttcagtgccgcttttctggtttcttggctgttcttcggcctgctcttctggtgtatcgcgttcttccatggtgacttagaggcctctcctggagtgcccgcggcagggggtcccgcggcaggtggcggcggggcagcacctgtggctcccaagccctgcattatgcatgttaacggattcctgggcgcctttctgtttagcgtcgagacccaaactaccattggttatggatttaggtgcgtgacagaggaatgccctctggcagtcattgccgttgtcgttcagagtatcgtggggtgcgttattgacagcttcatgatcgggaccattatggcaaaaatggcacgccctaaaaagcgggcccaaactttgctcttctctcatcacgccgtgatttccgtgagagacggtaaattatgcttaatgtggcgggtggggaacctgcgaaaatcacacattgtcgaggcccacgtgagagctcagctgattaagccctacatgacccaagaaggtgaatacctccccctggaccaacgagatttgaacgtgggctacgatattggtctggacaggatttttctggtctcccctatcattatcgtgcacgagatcgacgaagacagccccctgtatggaatgggaaaagaagagctggagagcgaagacttcgaaatcgtcgtgatactggaggggatggtggaggccactgcaatgactacccaggctcggagctcgtacctggcctcagaaatcctctggggacacaggttcgaacctgtggttttcgaggaaaagagccactataaggtcgattacagtaggtttcacaaaacttacgaagttgccggcaccccgtgctgctctgcaagagagctgcaagaatccaagataaccgtgcttcccgcccccccacccccgccaagtgcattctgttacgagaatgaattggcacttatgtctcaagaggaggaggagatggaggaggaagccgccgccgccgccgcggtggctgctggtctaggactggaggctggaagcaaagaagaggccgggataattcgcatgttggagtttgggagtcacttggatctggagcggatgcaggcgtccctccccctggacaatatctcttataggcgtgagtcagcaatctag

SEQ ID NO: 129469 - DNA, 1260 bp, synthetic construct
  misc_feature 1..1260: note = Description of Artificial Sequence: Synthetic coding sequence
  source 1..1260: mol_type = other DNA
atggcgggcgatagccggaacgctatgaatcaggacatggaaattggcgtgacaccttgggatcccaaaaaaattcccaagcaggctcgagattacgtacctatcgccactgatagaacaagactgcttgccgaaggcaagaagccacgccagcgttacatggagaaatcaggaaagtgcaatgtccaccatgggaatgtccaggagacataccggtacctgagcgatttgttcactaccctcgtcgacctgaagtggcgcttcaatttacttgtatttacaatggtgtacaccgtcacttggctcttcttcggattcatttggtggctgatcgcatatatcaggggagacctcgaccacgtgggggaccaagagtggattccttgcgtggagaacctaagtggattcgtgagcgctttcttgttcagtattgaaaccgaaacaacaattggatacggcttcagggtgattacggagaaatgtcccgagggcattattctgctactggtgcaggccattctaggatcaatcgtcaatgcctttatggttggatgtatgttcgtgaaaattagccagcctaaaaagcgggccgaaaccctcatgttctccaataatgccgtgataagtatgcgggatgaaaaactgtgcctgatgttccgtgtgggcgacctgaggaatagtcatatcgtggaagcttctatacgggccaagctcatcaagtcccgccagacgaaggagggcgagttcattccgcttaatcaaacggatattaacgtgggttttgatacaggcgacgaccggctatttcttgtctccccccttatcatttcccacgagatcaatcagaagagccccttctgggaaatgtcccaagcgcagctgcatcaggaagaatttgaggtcgttgtgattttggaaggtatggtcgaagccaccggaatgacttgtcaggcaaggtcctcatacatggacacagaagtgctgtgggggcatagattcacaccggtgctcactcttgagaaaggtttttacgaagtcgactataacacattccatgatacctatgaaactaacaccccaagctgttgcgccaaagaactcgccgaaatgaagcgcgaaggaaggttgcttcagtatctgcccagcccgcccctgctaggaggctgtgctgaggccgggctcgacgctgaagccgagcagaatgaagaggatgaaccaaaggggctgggagggagcagagaggccagagggtccgtgtag

SEQ ID NO: 129470 - DNA, 1260 bp, synthetic construct
  misc_feature 1..1260: note = Description of Artificial Sequence: Synthetic coding sequence
  source 1..1260: mol_type = other DNA
atggctggcgatagtcggaacgctatgaaccaggacatggaaatcggcgtgaccccttgggatcctaagaaaattccaaagcaggcaagagattacgtgccaatcgccacggatcggacacgcctcttggccgaaggtaaaaaacccagacaacggtatatggaaaagagtggcaagtgtaacgtgcaccacgggaatgtgcaggagacgtaccgatatctctcagatctctttaccaccctggtagacttaaaatggcggttcaatctgctagtgtttacgatggtttataccgtaacctggctgttcttcggatttatctggtggctaatcgcgtacattagaggggacctagatcatgtgggtgatcaggaatggattccttgcgtagaaaatctatcaggctttgtgtcagcgtttctcttcagtatcgagaccgagactacaattggatatgggtttcgggtcattactgaaaagtgcccagaaggaattatccttctccttgtccaggctatattgggcagtattgtgaacgcctttatggttgggtgcatgttcgtgaagatatctcagccgaaaaaaagggccgagacactcatgttctcaaacaatgccgtgatcagtatgcgtgacgagaaattatgtctaatgttccgggtgggcgacctgaggaactcccatattgtcgaggccagcattcgggctaagctgattaaaagtaggcagacaaaagagggggagtttatcccactcaatcagactgacataaatgtgggtttcgacacaggggatgacaggctgtttttggtgagtccgctgatcatttcccatgagatcaaccagaagtctccattctgggaaatgtctcaggcgcagctacaccaggaggagttcgaagtcgtcgtgatcttggaagggatggtggaggccacagggatgacttgtcaagcgcgaagctcatacatggatacagaagtcctctggggccataggtttaccccagtccttaccctggagaaaggcttctacgaggtcgattacaacactttccacgatacttacgaaaccaatacaccttcttgttgtgccaaagaattagccgagatgaaacgtgaaggacgcctgctacagtaccttccatcccccccacttctgggcggatgcgccgaagcaggtctggacgctgaggctgagcagaacgaagaggacgaacctaaagggctgggtggctcgagggaagctaggggatcagtgtag

SEQ ID NO: 129471 - DNA, 1260 bp, synthetic construct
  misc_feature 1..1260: note = Description of Artificial Sequence: Synthetic coding sequence
  source 1..1260: mol_type = other DNA
atggcgggcgactcgaggaacgccatgaatcaggacatggagattggagtcacaccctgggaccccaaaaaaattcccaaacaggcccgggactacgttcctattgcaacagaccgcactcggctgctcgctgagggcaagaaaccccggcagaggtatatggaaaagagtgggaaatgcaatgtgcaccatggcaacgtgcaggagacgtatagatatttgtcggacctgttcacaacgctcgtggatcttaaatggcggttcaatctgttagtctttactatggtgtacacagtgacatggctcttcttcggcttcatttggtggctcattgcctatatccggggggacttagatcacgtgggagatcaggagtggatcccttgtgtggaaaatctgtctggattcgtttccgcttttctgttttcaatagaaaccgagaccaccattggttacggttttcgtgtcattactgagaaatgccccgagggaataatattattattggtccaggcaatcctcggttctatcgtgaatgcttttatggtgggttgtatgtttgtgaaaatcagtcagcctaaaaagagggcagagaccctcatgttctccaacaatgctgtgatatccatgcgggatgagaagctctgtctaatgtttagagtgggggatctgcggaatagtcacatcgtggaagcttcgatcagagctaagctgattaagagtcgccaaaccaaggaaggagagttcattcccctgaatcagactgacatcaatgtaggtttcgacaccggagatgaccgcctgttcctggtgtcaccactgattatcagccacgagattaatcagaagtcacctttttgggagatgagccaagctcagctgcatcaggaggaatttgaagtggtggtaattctcgagggaatggttgaagctaccggcatgacctgccaggctaggagttcctatatggatacagaagtcctctggggacaccgcttcacacccgttctaaccctcgagaaaggattctatgaggttgattataatactttccacgacacttacgagacaaacacgccctcctgctgtgcgaaggagctcgcggagatgaaacgcgaaggacgacttttgcagtatcttcctagccctccattacttggcggatgcgccgaagcaggactcgatgccgaggccgaacaaaacgaagaggacgagcctaaggggctcggcggatctcgagaggctagagggagcgtatag

SEQ ID NO: 129472 - DNA, 1272 bp, synthetic construct
  misc_feature 1..1272: note = Description of Artificial Sequence: Synthetic coding sequence
  source 1..1272: mol_type = other DNA
atggccaaactgaccgaatccatgaccaatgtgctcgagggcgactcaatggaccaagacgtcgaatccccagtagcaatacatcagccaaaactgcccaagcaggcgagggacgatctgcccagacatatctcccgggaccgaacaaagaggaagattcagcgctatgtgcgtaaggatggcaaatgtaacgtccatcacggtaacgtccgcgaaacctataggtacctgaccgacattttcaccaccttggtcgatctcaaatggcgctttaatctgctgattttcgtgatggtgtatacagtgacctggctgttctttggcatgatttggtggctgatcgcctatatcaggggcgacatggaccatattgaggatcccagttggaccccatgtgtcaccaacctgaatggctttgtttctgcctttctgttttcaatagagacggaaacgaccattggatacggttaccgcgtgataaccgacaaatgcccagaagggataattttattgctcattcaaagcgtccttggctctatcgtaaatgcgttcatggttgggtgcatgttcgttaagatttcgcagcctaaaaaaagagcagaaacgctggtattttcaacacatgccgtaatttctatgcgcgatggcaaactgtgcctgatgtttagagtgggggatctcaggaacagccacatcgtggaagcgagcatcagagccaaactcattaagtcaaagcaaacttctgaaggagagtttattcccttgaatcagaccgatatcaatgtcggctactacaccggtgacgatcgcctgtttctcgtgtcaccattaattatttcccatgagatcaaccaacagtctccattctgggaaatttctaaagcccaactccccaaagaggaattggagatagttgttattcttgagggcatggttgaggctaccgggatgacctgtcaggcacggagttcctatatcacctctgagatcctgtgggggtataggtttactcctgtgttaaccctggaggatggtttctatgaagtcgattacaactcttttcatgaaacttatgagacctccaccccttcattgtcggccaaggagctggctgaacttgcctccagagctgaactgccactgtcttggtccgtttctagtaaactcaaccaacatgccgagttggagactgaggaagaggagaagaacctcgaggaacagaccgaaaggaatggtgacgtggccaatttagagaatgagtccaaggtgtag

SEQ ID NO: 129473 - DNA, 1272 bp, synthetic construct
  misc_feature 1..1272: note = Description of Artificial Sequence: Synthetic coding sequence
  source 1..1272: mol_type = other DNA
atggcgaaattaaccgaatctatgacaaatgtgctcgaaggagatagtatggaccaggatgtagagtcccccgtggccattcatcaacctaagctgcccaagcaagctagggacgacttgccgcgtcatatttcccgggacaggacaaagaggaaaatccagaggtacgttagaaaagatgggaagtgcaatgtccatcacggcaatgtgcgcgagacgtaccggtatcttactgatatcttcacaactctcgtcgacctgaagtggcgctttaacttgctcatatttgttatggtgtataccgtgacttggctttttttcggtatgatctggtggttgatcgcatatatacgcggagatatggaccacattgaggatccctcttggacaccctgtgtcacaaatttaaacggcttcgtgagtgcgtttcttttttccatagaaacggagactaccatcggttacggctatcgtgttattaccgacaagtgcccagaaggaataatcctgcttttgatccagtccgtactcggaagcatcgtgaacgcctttatggtgggctgcatgtttgtaaagattagccagccgaagaagagggctgagacactggtgtttagcacccacgcagtgatatccatgagggacggcaaactgtgtctcatgtttcgggtgggagatctgcggaacagccatattgtggaagcctctattagagcaaagctgatcaagagcaaacagaccagcgagggggagttcatccccttaaaccagactgacatcaacgtgggctactataccggtgatgaccgactgtttctggttagcccattgatcattagccatgaaattaaccagcaatcaccattttgggaaatttcgaaggcccagctccccaaggaagagctagaaattgtggttatcttagaaggtatggttgaagccacaggcatgacatgtcaggcccgatctagttacatcacatcagagatcctgtggggttaccgctttactcccgtgctcacactggaagatggcttctatgaagtcgattataatagctttcatgagacatacgagacttctactcccagcctgtctgctaaggagctggccgagctcgcgtcacgtgccgagctgcctctgtcttggagtgtgtcatcgaaactcaatcagcacgctgaactggagacggaggaggaagaaaagaaccttgaggagcagacagagcgtaacggggatgttgcaaatctcgaaaatgagagcaaggtgtag

SEQ ID NO: 129474 - DNA, 1275 bp, synthetic construct
  misc_feature 1..1275: note = Description of Artificial Sequence: Synthetic coding sequence
  source 1..1275: mol_type = other DNA
atgcttgcccgcaaatccattataccggaggaatatgtgcttgcccgcattgcagcggagaaccttcgcaagccgagaatccgtgatcgactgcccaaagcccgctttattgctaaatctggggcatgcaacctggcccacaagaacatacgggaacaaggacgctttcttcaagacatctttacaacattggtggatttaaaatggaggcacacacttgtgatcttcaccatgagtttcctatgcagttggctactgtttgccataatgtggtggctcgtggcctttgcacacggcgatatctacgcctatatggaaaaatctgggatggagaagagcggcttggagtcaacagtgtgtgtgaccaacgtcagatctttcacctcagctttcctgttcagtatcgaagtgcaggtcacgattggcttcggcgggaggatgatgacggaggaatgtccgttggctatcactgtactaattctgcagaacatagtggggctgataattaacgctgtcatgttgggctgtatatttatgaagactgcccaggctcatagacgagcagaaacactcattttctccagacacgccgtcatcgccgttcgaaatggcaagttatgtttcatgttcagagttggcgacttgcgtaaatcaatgatcatcagtgcgagcgtcagaatacaggtcgtgaaaaagaccacaacaccagaaggagaggttgtgcctatccaccagcttgacatacccgtggacaatcccatcgagagtaacaacatctttttagtggctcctctgatcatatgtcacgtgatagataaacggagtccactctacgatatctccgccacagatttggccaaccaagacctggaagtgatcgtgattctcgaaggagtggtcgagacgaccggcatcaccacccaagccaggacttcgtatatcgccgaggagattcagtggggccaccgattcgtgagtatcgtaacagaggaagagggtgtgtattccgttgattattctaagttcggaaatacagtgaaggtagccgcaccccgctgttctgcccgagagctcgatgagaagccatcaatcctcattcaaactctgcagaagagcgagctgtcccaccagaatagcctgaggaaacggaatagcatgagacgaaataattctatgcgacgcaataactccatccgtagaaacaactcctccctgatggtgccgaaggtgcagtttatgacccccgaaggtaaccagaacacgtccgagtcttag

SEQ ID NO: 129475 - DNA, 345 bp, synthetic construct
  misc_feature 1..345: note = Description of Artificial Sequence: Synthetic coding sequence
  source 1..345: mol_type = other DNA
atgctggctcggaagtccattattcccgaggagtacgttctagcccggatcgccgcagaaaatctcagaaagccccggattcgggacagactccccaaagcgcgctttattgccaagtctggggcatgcaacttggcacataagaatatccgcgagcaggggcgattcctgcaggacatttttactacactggtggatctgaaatggaggcacactttggtgattttcacaatgtcctttttatgttcatggctgctgttcgccataatgtggtggctcgttgctttcgcgcacggagacatttatgcctatatggagaagagcgggatggaaaaatcaggttag

SEQ ID NO: 129476 - DNA, 1275 bp, synthetic construct
  misc_feature 1..1275: note = Description of Artificial Sequence: Synthetic coding sequence
  source 1..1275: mol_type = other DNA
atgctcgccagaaaaagcatcatccccgaggagtacgtgcttgcaaggattgctgccgaaaaccttcggaaaccacgcattcgggaccgactccctaaagcccgcttcattgctaagagtggggcctgcaatctcgcccacaaaaatatccgggagcaagggcgattcctgcaggacatcttcaccacactggttgacttgaagtggagacacaccctggtgatttttactatgagtttcctgtgttcttggctgctgtttgccatcatgtggtggctcgtcgcctttgctcacggagacatttatgcctatatggagaagtcgggaatggagaagtccgggctcgaatctaccgtctgtgtgaccaatgtacgaagtttcactagcgcatttctgttcagcatcgaagttcaagtcaccatcggcttcggaggcagaatgatgactgaggagtgtcctctcgccattacggtgctgatcctgcagaatatcgtgggcctcattataaacgcagtgatgctcggatgtatttttatgaaaacggcacaggcccacagaagggctgagacgttaatcttttccagacatgccgttattgctgtgcggaatggcaagctgtgttttatgttcagagttggcgatctgcgtaagagcatgatcatctctgcctcagtgagaatccaagtcgtaaaaaaaactaccacgccagaaggtgaagtggtgcctattcaccagctggatataccggtagacaaccctattgagagcaataacatttttctggtggcacccttaatcatctgccacgtgatcgataaaaggtcacctctgtatgacatttccgccaccgatttagcaaatcaagatctcgaggtaatcgtcatccttgaaggagtcgttgagacgactggcataactacacaggctcgcacttcttacatcgccgaggagatacagtgggggcatcgattcgtgtcaatcgtgaccgaagaagagggagtgtactccgtggactattctaagtttggaaacaccgtcaaagtcgctgctccacggtgcagtgctagggagctggatgaaaagcccagcattctgatccaaaccttacagaaatccgagctgagccaccagaatagcctgagaaaaaggaactctatgcgaagaaacaattcaatgaggcgtaacaacagtatccgaagaaataattcaagcctgatggtgccaaaagttcagttcatgactccggaaggcaaccagaatacttctgaatcttag

SEQ ID NO: 129477 - DNA, 774 bp, synthetic construct
  misc_feature 1..774: note = Description of Artificial Sequence: Synthetic coding sequence
  source 1..774: mol_type = other DNA
atgaccgcctttcctgccagcggaaaaaagcgggagactgattattccgacggagacccactggacgttcataagaggcttccttctagcgccggcgaggatcgggctgtgatgctgggattcgctatgatgggattctctgtgcttatgttttttctgctgggcacaacaattttgaagcccttcatgctctccattcagagggaggagtccacatgcactgcgattcacaccgatattatggatgactggctggattgtgcgtttacatgtggggtccactgtcatggccaaggaaaatacccatgtctccaggtttttgtgaaccttagccaccctggccaaaaggcactgctccactacaatgaggaagctgtccaaatcaatcctaagtgtttttacacaccaaagtgtcaccaggataggaacgatctgctcaacagtgccctggacatcaaagagttttttgaccacaagaatggcaccccatttagctgtttttattcgccagcctcccaatcagaagatgttattttgattaagaaatatgaccagatggccatctttcactgtctcttctggccctcgctgaccctactgggaggcgcgctgatcgtggggatggtccgcctgacacagcacctctctttactgtgtgagaagtattccactgtagtcagagatgaagtaggcgggaaggtgccttacattgaacagcatcagttcaagctatgcattatgcgccgaagcaaaggccgggccgagaaatcctag

SEQ ID NO: 129478 - DNA, 522 bp, synthetic construct
  misc_feature 1..522: note = Description of Artificial Sequence: Synthetic coding sequence
  source 1..522: mol_type = other DNA
atgcagccgttttcgatccctgtgcagatcactctccagggcagccgacggcggcaaggccggactgcattcccagcctcagggaaaaagagagaaacagactatagcgatggagacccactcgatgtccataagagactcccatccagtgctggggaggatcgcgccgtcatgctaggcttcgccatgatgggttttagcgttcttatgttcttcctcctcggaacaaccattttgaagccgttcatgttatcaatacaaagagaggaaagcacctgcacagcaatacacacagacataatggacgattggctagattgcgcctttacctgtggagtgcactgtcatggacagggaaagtacccctgcctgcaggtgttcgtgaatttgagccaccctggacagaaggcattgttacattacaatgaagaagcagtgcagattaaccccaagcgagacgtcacggattgtagagtgaaagagaagcagacattaaccgtttctgacgaacataaacagtag

SEQ ID NO: 129479 - DNA, 840 bp, synthetic construct
  misc_feature 1..840: note = Description of Artificial Sequence: Synthetic coding sequence
  source 1..840: mol_type = other DNA
atggacttcagcccatccagtgaactcggcttccacttcgtggctttcatattgctcacccggcaccgcaccgcctttccagccagtgggaagaagcgcgaaactgattactcagatggcgacccacttgatgtgcacaaacggcttcctagctccgcaggtgaggatagagccgtcatgctggggttcgctatgatgggattttcggttctgatgttttttcttctcggcactaccatattgaagccattcatgctctcaattcagagagaagaatcaacctgcactgctattcatacagatataatggacgattggcttgactgcgcattcacctgcggcgttcactgccatgggcagggtaagtatccttgtctgcaagtattcgttaaccttagtcatcctggacagaaagctctgctgcattacaatgaagaggccgtgcagattaaccccaagtgtttctatacccccaagtgccatcaggatcgaaacgacctgcttaactccgccctagacataaaggagtttttcgaccacaaaaacggaacaccgttctcttgcttctattctcccgcctcacagtccgaagatgtgattctcatcaagaagtacgatcagatggcaatctttcattgcctcttctggccatccctgacgctgctcgggggtgccctgattgtggggatggtgaggctcacccaacacttgtccctcctttgtgagaagtatagtacagtcgtacgagatgaagttggtggaaaagttccatatatagaacagcatcagtttaaactttgcataatgcggcgaagcaaaggcagagctgagaaatcctag

SEQ ID NO: 129480 - DNA, 834 bp, synthetic construct
  misc_feature 1..834: note = Description of Artificial Sequence: Synthetic coding sequence
  source 1..834: mol_type = other DNA
atgcaacctttttctattcctgtccaaattacgcttcagggatccagacggcgtcagggcagaacagcttttccagcctccggcaagaaacgggagaccgactattcagacggagacccactggatgtgcataagcggcttccctcctctgccggcgaagatcgagccgtcatgctgggctttgccatgatgggattctctgtgctgatgttcttcctgcttggaactactatcctgaaacctttcatgctctccatccagagagaagagagtacatgtaccgccattcacacggatattatggatgactggctggattgcgcgttcacgtgcggcgttcactgccacggccagggcaagtacccatgtctgcaggtttttgtgaacctgtcccacccgggccaaaaggctctcctccactacaatgaggaagccgttcagatcaatcccaagtgcttttatactcctaagtgtcaccaggatcgaaatgacctgttgaacagcgcgcttgatatcaaggaattctttgaccataaaaacgggactccctttagttgcttttactctccagcttctcagtccgaagatgtgattctcattaagaagtacgatcagatggccattttccactgcctattttggccttcattaaccttgctgggcggtgccctgatcgttggcatggtgaggttgactcagcatctctcgcttctgtgcgagaaatatagcaccgttgtcagagacgaggtcggaggaaaggtgccatatattgagcaacatcaatttaaactttgtatcatgcgccgaagcaagggcagggccgaaaaatcctag

SEQ ID NO: 129481 - DNA, 828 bp, synthetic construct
  misc_feature 1..828: note = Description of Artificial Sequence: Synthetic coding sequence
  source 1..828: mol_type = other DNA
atgtttcccctgttatacgagctgaccgccgtatctcctagcccctttcctcagagaacagccttccctgcctcaggtaaaaagcgagaaacggactactcagacggggatcccctggatgtccacaaacgattgccctcctccgccggggaggacagagcagtgatgctggggttcgccatgatgggatttagtgtgctcatgttctttcttctgggcacaaccatacttaaaccttttatgctatcgatccagagggaagagtccacatgtaccgccatccacacggacattatggacgactggcttgattgcgctttcacttgtggggtgcactgtcacggtcaaggaaagtacccttgccttcaagtgttcgtgaatctgagtcacccagggcaaaaggccctgttacactataacgaggaagccgtgcagatcaaccctaaatgcttctacacacccaagtgccaccaagacagaaatgatcttctgaattcggcccttgatatcaaagaattcttcgatcacaagaacggtacccccttttcttgtttttacagtcccgccagccaatctgaagacgtgatcctgattaagaaatacgaccagatggctatcttccattgcctcttttggccgtcattgaccttactgggaggtgctctcattgtcgggatggtgcgactaacccagcacctctccttactctgcgaaaaatattccaccgtagtccgtgatgaagtgggcggaaaggttccgtatattgagcagcaccagtttaagttgtgcattatgagacgtagtaagggtagggccgaaaaaagttag

SEQ ID NO: 129482 - DNA, 774 bp, synthetic construct
  misc_feature 1..774: note = Description of Artificial Sequence: Synthetic coding sequence
  source 1..774: mol_type = other DNA
atgaccgcctttcccgctagcgggaagaagagagagactgattattccgacggggatccacttgatgttcacaagagactaccctccagtgccggagaggaccgggcagtcatgctcggatttgccatgatggggttctctgtgttaatgttttttttgctgggcaccaccatcctgaaaccttttatgctcagtatccagcgagaggaaagtacgtgtaccgctattcacactgacatcatggatgactggctagattgcgcctttacatgcggcgttcactgtcatgggcagggcaagtacccctgtcttcaggtttttgtgaacttgtcccatcctgggcagaaagcgttactccattataacgaagaggccgtccagatcaatcccaaatgcttctacacacctaagtgtcaccaagacaggaatgatctcctgaatagcgcactagatatcaaggaatttttcgatcacaaaaacgggaccccatttagctgcttttacagcccagcctcacagtccgaggatgttatcctcatcaaaaaatatgaccagatggccattttccactgcctattctggccatcccttactttactgggaggcgcactcatcgtggggatggtgcgtctgacacagcatctttctctgctgtgcgaaaaatatagtaccgttgtgcgcgacgaggttggcgggaaagtaccttatattgagcagcatcagttcaagctgtgtatcatgaggagatcgaaaggcagggccgaaaagtcatag

SEQ ID NO: 129483 - DNA, 3537 bp, synthetic construct
  misc_feature 1..3537: note = Description of Artificial Sequence: Synthetic coding sequence
  source 1..3537: mol_type = other DNA
atggccaatggtggaggcgggggaggagggtcttctgggggcggtggcggtggcggggggtcatcactgcgaatgagtagcaatattcacgccaaccatctgagcctggatgctagtagttcttcgagcagtagcagctcttcatcttctagtagctcatcttctagctcctcttcctccgtccacgaaccaaagatggacgcccttatcattccagtgacaatggaggtaccttgtgactcgaggggccaacgcatgtggtgggccttcctcgccagttctatggtcaccttcttcggaggtttattcatcatccttttatggaggaccctcaaatacctgtggactgtgtgttgccattgcggcgggaagacaaaggaggcacagaagatcaacaatggctcttcccaagcagacgggaccctcaagccagtcgacgagaaggaggaagctgtagctgctgaagttggctggatgactagcgtgaaagactgggctggggtgatgatttccgctcagactcttacaggtcgcgttctggtcgttctggtatttgcactatccatcggtgctctcgtgatttacttcatcgatagttctaatcctatcgaatcatgccagaatttctataaggatttcaccttgcagatcgatatggcctttaacgtttttttcctgctttattttggcctgaggtttatagccgccaatgataagctgtggttctggttggaggtaaattctgtcgtcgacttcttcacggttccccccgtgtttgtcagtgtctatcttaacagaagctggctgggtctcagattcctgcgggccttgcgcctcatacagtttagcgaaatactccagtttctgaacatcctgaagacttctaacagcataaagctggtgaatttgttgtctatatttatctccacatggctgacggcagcgggattcatacatctggtcgagaattccggcgacccatgggaaaactttcagaataaccaagccctaacctattgggaatgcgtgtacttgttaatggtaaccatgtctaccgtcgggtacggtgacgtctatgctaaaacaacccttgggcggctgtttatggtcttcttcatactcggaggtctcgcgatgtttgccagttatgtccccgaaatcatagagctgataggaaaccgaaagaagtacggtggttcatattcagccgtgtccgggagaaagcatattgtggtgtgcggtcacatcactctggagagcgtcagcaatttcctcaaagatttcctacacaaggaccgtgacgacgtgaacgtcgaaatagtgtttctgcataacattagccccaacctggagcttgaggccttgtttaaacggcattttacccaggtggaattttaccagggatctgtccttaacccccacgatttagccagggtcaaaatagagtcagccgacgcgtgtttgatattggctaataagtactgcgccgaccccgatgccgaagatgcctctaacattatgagggtgatatcaatcaagaactaccatcctaaaatacgcattattacccaaatgctacagtaccataacaaggctcacctgctgaacataccatcatggaactggaaagagggagacgacgcgatctgcctggcagagctgaaactgggatttatcgcccaaagttgtctagcccagggtctctccactatgttagccaatctcttcagtatgagatcctttatcaagattgaggaggatacctggcagaaatactacttagagggggtgtctaatgagatgtatacggagtatctttcttcagcatttgtcggtctaagcttcccgactgtctgcgaactttgtttcgtgaagctgaaattgcttatgatcgccattgagtacaagagtgctaatcgggaatcacgaatactcatcaacccaggaaaccatctgaagattcaggaaggcactttagggttctttattgctagtgacgcaaaggaggtaaagagagcttttttttattgcaaagcatgtcatgatgatataactgaccccaagaggattaagaagtgcggctgtaagaggctcgaagatgagcaaccctctacactgtcccccaagaaaaagcaaagaaatggaggcatgcgtaatagtccaaacactagtcccaagcttatgaggcacgacccccttctaattcctggaaatgaccagatcgataatatggactcgaacgtgaagaagtatgattctaccggaatgtttcattggtgtgcccccaaagagatcgaaaaagtgatcctcacaaggtctgaggcggctatgacggtgttgagtggtcacgtcgttgtttgcattttcggagacgtatcctctgctctaatcggtttgaggaatttagttatgcctctgagagcctctaattttcactatcacgaattgaaacacattgtgttcgtcggaagtatcgagtacttgaagagagaatgggaaacactccataatttccctaaggtctccatcctacctggcacaccactgtcacgagcagatctacgagctgtgaatattaatctttgtgacatgtgcgtcatccttagcgccaaccaaaacaatatagatgacacgagtctacaggacaaagaatgcatcttagcctcccttaacataaagagcatgcagttcgacgatagtatcggcgttttacaagctaactcgcaggggtttacccctcccggaatggatcgaagcagccccgacaacagtcccgtccacggcatgctgcgccagcccagcatcaccactggggtgaacatcccaatcattacggagttggtaaatgacacaaatgtccagttccttgaccaggatgatgatgacgatcccgatacggaactataccttacccagccatttgcatgtggaacggcatttgccgtctccgtgctggactccttaatgtctgctacctacttcaacgataacatcctgaccctcatccgtactctcgtcaccggtggtgccacacctgaattggaagcgcttatcgctgaggagaacgcattaaggggagggtactctactccccagacactggcaaatagagacaggtgtagagtagctcaactggctttactggatggacctttcgcggatctgggggatggcgggtgctacggcgacctcttctgcaaggccctcaaaacatataacatgctgtgtttcgggatctaccggctccgagacgcacacctgtcaacaccttctcagtgcaccaagagatatgttatcaccaacccaccctatgaattcgaattggtgcctaccgatcttatcttctgtctcatgcagtttgaccacaacgctgggcagtctcgggccagcctctcacactccagtcactctagccaaagttcaagcaaaaaatcttccagtgttcacagcattcctagtactgctaaccgccaaaatcggccgaagtctcgggagagcagagacaagcagaagtatgtgcaggaagaacgtctgtag

SEQ ID NO: 129484 - DNA, 3633 bp, synthetic construct
  misc_feature 1..3633: note = Description of Artificial Sequence: Synthetic coding sequence
  source 1..3633: mol_type = other DNA
tcaaatattcatgcgaaccacctgagtctcgatgcctccagctcttccagtagttccagtagttctagttcgtcctcatcctcatcttccagctcatcatctgtccacgagcctaagatggatgcgctgatcattcctgtgacgatggaggtgccatgcgatagcagaggtcagaggatgtggtgggctttcctggctagtagtatggtgacattcttcgggggactctttattattctgttatggaggactctcaaatacctttggactgtatgctgtcactgtggcgggaagacaaaggaggcccagaaaattaataatgggtccagccaggcggatggcactttgaagcccgttgatgaaaaggaagaggccgtcgctgccgaagtcggctggatgacttcggtgaaagattgggccggcgtgatgatatccgcacagactcttactgggcgcgtgctggtcgtactggtattcgccttgtctataggggcactagtgatatatttcattgactccagcaatccgatcgagagctgtcagaatttctataaggactttacgctgcagattgacatggcctttaacgtgttttttctcctatattttggattgcggttcatcgcagctaacgataaattatggttttggctcgaggtcaactccgtggtggacttcttcaccgtaccgcccgtcttcgtgagcgtctacttgaatagaagttggttggggctccgtttcctacgcgccctccggttgatccagttcagcgagatcttgcagttcctgaatattcttaaaaccagtaattcaatcaaacttgtgaatctactgtcaattttcatctctacatggttgactgcagctggcttcatccaccttgtggagaactctggcgatccgtgggagaatttccaaaataatcaggccttgacctactgggagtgcgtttacttactgatggtgacaatgtcgacagtaggatacggagacgtctacgcgaaaacaacactggggagactgtttatggttttctttatcctcgggggcctcgccatgtttgccagttacgttcctgaaatcatagagttgatcggtaacagaaaaaaatacggagggtcttattctgccgttagtgggagaaaacacattgttgtgtgtgggcacattaccctcgagtccgtgtccaatttcctgaaagatttcctgcacaaggatagagacgatgtgaatgttgagattgtgttcctacataacatttccccaaatcttgagttggaagctctgttcaagagacattttacacaagtggagttttatcagggatccgtgcttaacccccacgatctcgctcgcgtgaaaatcgaatcagctgacgcttgtctgatcctggcaaataagtactgtgcagatccagatgctgaagatgcttcaaatattatgcgggtgatctcgatcaaaaactatcatcccaagattcgcatcatcacgcaaatgttgcagtatcataacaaagcacatctcctcaatatcccctcttggaactggaaggagggtgacgatgctatctgtttagctgaactgaaacttggcttcatcgcccagtcttgtctcgcccagggtttaagtactatgctcgccaacctcttcagcatgaggtcgttcatcaagattgaggaggacacctggcagaagtattacctcgaaggagtgtcaaacgaaatgtacacagagtatctatcgagtgctttcgttggcttatcattcccaactgtgtgtgagctgtgcttcgtaaagctgaagctgctcatgatagctatcgaatacaagagcgccaatagggaaagtagaatcctcatcaatcctggaaaccatcttaagattcaggaaggaacactgggtttcttcatagcctcagacgccaaggaagtgaaacgagcatttttttactgcaaggcatgccatgacgatataaccgatcccaaacgaataaaaaagtgcggctgcaagaggcccaagatgtctatttataaacgcatgcggcgcgcatgttgttttgattgtggtagatctgaacgtgactgcagctgtatgtcgggacgcgtgagaggcaacgtcgacacgctagagagggccttccctctgtcctctgtcagcgtcaatgattgttctacctcttttagagccttcgaggacgaacagccaagtacactttccccaaagaaaaaacaacgaaacggaggtatgagaaattcccccaatacgagtcctaagttaatgcggcatgacccactgctgattcccggaaacgaccagatcgacaatatggactctaatgtgaagaagtatgatagtaccggcatgtttcactggtgtgccccaaaggaaatcgaaaaagtgatcctgacaaggtccgaagccgccatgaccgttctgagtggccatgtagtggtctgtatcttcggtgatgtgtcgagtgcactcattggcttgcggaatctggtaatgcccctgagagcgtctaatttccattatcatgagttgaagcatatcgtgtttgtggggtcaattgagtatctgaagcgagagtgggagacacttcataacttcccgaaagtctctatactgcccggcactccactgtcccgtgcggacctccgtgccgtcaatatcaacctgtgtgacatgtgtgtgatcctcagtgcaaatcaaaacaacatagatgatactagtctgcaagataaggagtgcatccttgcttccctgaacataaaatccatgcagtttgatgacagcattggggtgctgcaggcaaattctcaaggtttcaccccacctggcatggaccggagctcccctgataatagccccgtccacgggatgttgcgacaaccgtctatcaccactggtgttaacatccccataatcactgagctagtgaacgatacaaatgtgcagttcctcgaccaagacgatgatgatgatcctgatacagaattatacctcactcagccgttcgcatgcggcacggcatttgcagtatccgtgctcgactcactgatgagcgccacctacttcaatgacaatattctgacactgatccggaccctggtgacgggtggagcaactcctgaactggaagcgctaatagccgaagaaaatgcactccgtgggggctatagtactccccagacgctagctaatagagacaggtgcagagttgcacaattggccctcttagatgggccttttgcagacttgggtgacgggggctgttacggagacctattttgtaaagccctgaagacctacaacatgctatgctttggcatttatagattgcgtgacgcgcacttgagcacaccatcccaatgcacgaaacgctacgtgatcaccaaccccccttacgagttcgaactggtgcccaccgatctgattttctgccttatgcagtttgatcacaacgctggtcaatccagagcctccctttctcactcatcgcactccagccagtccagcagcaaaaagtcgagctctgttcactccatcccttcaacggcaaatcgtcagaatagacctaagtccagagagtccagagacaaacaaaagtacgtgcaggaggaacgcttatag

SEQ ID NO: 129485 - DNA, 3720 bp, synthetic construct
  misc_feature 1..3720: note = Description of Artificial Sequence: Synthetic coding sequence
  source 1..3720: mol_type = other DNA
atggcaaacggtggtggaggtggggggggcagttcaggcggtggcgggggcggaggcgggagttcactgcgcatgtcctcaaacattcacgcgaaccatctgagtctcgacgcaagcagctcctctagcagttcctcaagcagcagcagctcctcgagctcgagttcctccagttcttcggttcacgagccgaaaatggacgcactgataattcctgttacaatggaggtgccctgcgactcaagaggacagaggatgtggtgggcttttctagcctcatccatggtgacattctttggtgggctgtttataatcctgctgtggcgtactctgaaatacctctggaccgtctgttgtcactgtgggggcaaaacaaaagaggcacagaagataaacaacgggagttcccaggcggacggcacactcaagccagttgacgagaaggaagaagcggtggccgccgaagttggctggatgactagtgtcaaagactgggcgggcgtgatgatctcagctcagacgctaactggccgggtgctagttgtgcttgtctttgccctctcaatcggagcactggtgatttactttattgattctagcaacccgatcgaaagctgtcagaacttctataaggattttacacttcagatcgacatggccttcaacgtgttcttcctactgtattttggcctccgtttcattgctgctaatgacaagctctggttctggctggaggtcaactccgtcgtagatttctttaccgttcctccagtgtttgtctcagtatatctgaaccgctcctggcttggccttcgctttctacgcgccttgcggctgatccagttctctgagatactccagtttcttaatatcttgaagacttcgaatagtatcaagttggtcaatctcctttctatctttatttcaacttggctgacagcagcaggtttcattcaccttgtcgaaaacagtggagatccttgggagaactttcagaataatcaagccctgacgtattgggaatgcgtttacctgctgatggtcacaatgagtacggtgggctatggcgatgtgtacgccaagacgacactgggccgcctcttcatggtgttttttattctgggcggactggcaatgtttgcctcctacgttcccgagataatcgaactcatcggtaatcgtaaaaaatacgggggcagttactccgcggtgtctggacgaaagcatattgttgtgtgcggccacatcacattagagagcgtcagcaattttctgaaagatttcctgcacaaggacagagatgatgtcaacgtggaaatcgtgttcctgcataacatttctcccaacctggagcttgaagccttgtttaaacgccacttcactcaggttgagttttatcaaggatcggtcttaaatccccatgacctcgcaagggttaaaattgaatctgcagatgcatgcctgattctcgcgaacaagtattgcgccgatcctgatgccgaggacgccagcaacatcatgcgcgtgattagcattaagaattaccaccccaagatccggatcatcacacagatgctgcagtatcacaacaaggcccatctcctgaacatccctagttggaactggaaagaaggggacgacgccatctgcctcgcggagcttaagctaggcttcatcgctcagtcctgtctcgcccagggcctgagcacaatgttggcaaacttgttcagcatgcggtccttcatcaagatagaggaggatacatggcaaaagtattacttggagggagtgtctaacgaaatgtacacggagtacctgtcctctgcttttgtgggccttagctttcctaccgtgtgcgagttgtgttttgtgaagctaaaattactcatgatagctattgaatacaaatccgccaatagggagtctcggatcttaatcaatccagggaaccacctgaagatccaggagggaaccctgggcttttttattgcatctgatgctaaggaggtgaagcgagccttcttttactgcaaggcctgtcatgacgacattaccgatcccaaaagaatcaagaaatgcggatgcaagcgcagatgggaggagcattgttccctgtggagactcgaaagtaagggcaacgtgcgaagactgaattactgccggggccagcagactttctcagtgaaggtgaaggtggcagcacgcagcaggtacagtaaggacccattcgagttcaagaaggagactccaaacagtcgccttgtcactgagcctgtggaggatgagcagccaagcaccctgagccctaaaaaaaaacagcgcaatggaggtatgcgtaactccccaaatacatccccaaagctcatgcggcatgacccactcctcatccccggcaacgaccagattgataacatggacagtaatgtcaaaaaatatgacagcacagggatgttccattggtgcgccccaaaggagatagagaaagtgatcctgacaagatctgaggccgctatgaccgtcctgtcaggccatgtggtggtctgcatctttggagacgtcagtagcgctctgatcggccttcggaatctggttatgccacttagagctagcaactttcactatcacgagctgaaacatattgtgttcgtgggttctattgaatatctgaagagggagtgggagactctgcacaactttcccaaagtgtccattctacccgggacaccacttagcagggctgatctcagagctgttaacattaacctgtgcgatatgtgcgttattctgtccgcgaatcagaacaacattgatgacacctcccttcaggataaagaatgtattctggcctccttgaacatcaaaagcatgcaattcgacgactctataggggtgctgcaggccaacagtcagggttttaccccgccaggtatggatcgctcatcccctgataattctccagtgcacgggatgctgcgtcagccatctatcaccacaggcgtgaacattccaatcatcacagagcttgtgaatgacactaatgtccaatttctggaccaggacgacgacgatgaccccgacacggaactgtacctgactcagccatttgcctgcgggacggccttcgcagtcagtgttttggatagcctgatgagtgcgacctatttcaacgataacatcctgactctgataagaacactggtgacgggtggggccaccccagaacttgaagcccttatagccgaggaaaacgccctcaggggcgggtatagcacgccacaaacgctggccaacagagatcgttgccgggtggcgcaactggctctgcttgatggaccattcgctgacttgggcgacggaggatgttacggggatcttttttgtaaggcattaaaaacatataacatgttgtgttttggcatctaccgtctccgggacgctcacctgtctacaccgagccagtgcacaaagcggtacgtgatcacaaaccccccttacgagttcgagttggttcctacagatctcattttttgcctgatgcaatttgaccacaatgctgggcagtcccgagcctcactctctcactcctctcactcctcgcagtcctctagtaaaaagtctagcagcgtccactcaattccatcaaccgcgaaccggcaaaacagaccaaaatcgcgcgagagtagagataagcaaaagtatgtgcaggaagaacgactttag

SEQ ID NO: 129486 - DNA, 3549 bp, synthetic construct
  misc_feature 1..3549: note = Description of Artificial Sequence: Synthetic coding sequence
  source 1..3549: mol_type = other DNA
tgaagtagctcctcttcatcaagttcctcctccgtccacgaacccaagatggatgctctcattatccctgtgacaatggaagtgccatgcgacagccgcggacaacggatgtggtgggctttcctcgctagctccatggtgacgttcttcggcggactgtttatcatcctgctatggcgaacattgaagtacttgtggaccgtttgctgtcactgtgggggaaaaacaaaggaagcccagaagatcaataatggcagttcacaagctgatggtacacttaaaccagtggacgaaaaagaagaagccgtggcagcagaagtgggatggatgacatcggtcaaggattgggccggcgtcatgatcagtgcgcagaccctgaccggccgcgtgctggtggtgctggttttcgccttgagcattggggcgctggtgatttatttcattgatagctccaaccctattgaatcctgccagaatttttacaaagactttaccctgcagattgatatggcattcaacgttttttttcttctctatttcgggctccgctttattgctgcaaacgacaaactgtggttctggttggaggtgaattcagtcgtcgatttcttcacagtgccaccagttttcgtgtccgtttacctgaatcggtcttggctcggcctgcgctttctgcgggcactgcggctgattcagttttctgagatcctgcagttcctaaacatccttaagaccagcaacagcatcaagctagtgaatctgctttctatttttatcagcacctggctgacagccgccgggttcatccatctggtggaaaactccggagacccatgggagaacttccagaataaccaggcactgacttactgggagtgcgtgtatctgctgatggtgaccatgagcaccgtgggctacggtgatgtgtacgccaagacaacccttgggcggctatttatggtctttttcatactgggcggcctggctatgtttgcatcatatgtccccgagatcatcgagctgatcggtaacaggaagaaatatggcgggtcctattcagctgtgtctggacggaaacacatcgtcgtttgcgggcatatcactctggaatccgtgtctaatttcctcaaagatttcctccacaaagatcgggatgatgtgaacgtggagatcgtgtttctgcacaacatcagtcctaacctcgaactggaggccctgttcaaacgacacttcacccaagtggaattctaccaaggcagcgtcctgaatcctcacgaccttgcccgggtgaagattgagtccgctgatgcttgtttgattttggcaaataagtactgtgcagacccagatgcggaagacgccagcaatatcatgcgggtcatctctatcaaaaactatcatcccaagattaggattatcacacaaatgctgcagtatcataacaaagctcacctgctgaatataccctcctggaattggaaagagggggatgatgccatttgccttgcagagctgaaacttggtttcatcgcacagtcttgcctggcccaaggccttagtaccatgctcgctaatctgtttagtatgagaagtttcatcaaaatcgaagaggatacatggcaaaagtattacctagaaggagtgtccaatgagatgtacacagaatatctatcgagcgcatttgtagggctctcctttcccacagtctgtgagctgtgtttcgtgaaactgaagctgctgatgatcgccattgagtacaagtccgccaatcgtgagtcacgaatactgattaatcccgggaatcacttaaagatccaggaaggcacgttgggcttctttatcgccagcgacgccaaagaggtgaaaagagcctttttttactgcaaagcctgccatgatgacatcacagacccaaaacgcatcaagaaatgtgggtgtaagcgtctcgaagatgagcaaccttctacactcagccccaaaaagaaacagagaaatgggggcatgcgcaacagtccgaatacctcccccaaactgatgcggcacgaccctctgttgattcccggtaacgatcaaatcgataatatggattctaatgtaaagaaatacgacagtaccgggatgtttcactggtgtgctccaaaagaaattgaaaaagtcatcctcactcgttcggaggccgctatgaccgtgctgagtggacacgtggttgtgtgtatcttcggagacgtgtcaagcgcactgattggcttacgtaacctggtcatgccactgcgcgcaagcaacttccactatcacgagctgaaacatatcgtgttcgtcgggtccatagaatatttgaaaagggaatgggagaccttgcataatttccccaaagtgagcatcctaccaggcacacccctaagcagggcagacctcagggcagtcaacattaacctgtgtgacatgtgcgtaattctctccgctaaccagaataatatcgatgacacgtcactgcaggacaaggagtgcatcctggcttctctgaatatcaagtcaatgcaatttgatgacagcatcggagtgctgcaggctaactcccagggcttcacacctcctgggatggatcgatccagtccagacaactcacctgtgcacggcatgctgcgccagccttcaataacaacgggcgttaatatccctatcatcaccgagctagttaacgacaccaacgtacaatttcttgaccaagacgatgacgacgaccctgacacagaactatatctgacacagccattcgcatgcgggactgccttcgccgtttccgtgctagactccctcatgtctgccacgtacttcaacgacaacatactcaccctcatccgaaccctggtcactgggggggctactccagagctcgaagcactgattgctgaagagaatgctctgcgcggaggttactccacacctcagactctcgcgaatagggaccggtgtcgcgtggcccagctggccctgctggacgggcctttcgctgatcttggggacggtggatgttacggggacctgttttgcaaggctctgaagacctataatatgctctgcttcgggatctaccggctgcgtgatgcacatttgtccactccaagccagtgtacaaaacggtatgtcatcacaaaccccccctatgagtttgaattggtacccactgatctcatcttctgtctgatgcagttcgaccataatgcaggtcaaagtagggcctcactgtctcatagctcacatagttctcaaagctccagcaagaagagctcctctgttcattcaataccttccaccgctaatcggcagaatcgccctaagagccgtgagagccgagacaaacagaacgcaacgcggatgaaccggatggggcaggccgaaaaaaagtggttcactgacgagcccgacaacgcatacccgaggaacatccagatcaaaccaatgtcgactcatatggcaaatcagatcaaccagtataagtctacatcatctcttatcccacctatcagagaagtggaagatgagtgctag

SEQ ID NO: 129487 - DNA, 3504 bp, synthetic construct
  misc_feature 1..3504: note = Description of Artificial Sequence: Synthetic coding sequence
  source 1..3504: mol_type = other DNA
cctaaaatggatgcgctgattattcccgtcactatggaggtgccttgcgatagtcggggccagcgcatgtggtgggcttttctggcaagcagtatggttacctttttcggaggcctgtttattatcctgctgtggaggactctgaaatacctgtggacagtgtgctgccactgtgggggcaaaactaaagaagctcagaagattaataacggctcttcccaagccgacggtaccctcaagcccgtggacgaaaaagaggaggccgttgccgcggaggttggctggatgacctctgtgaaggattgggccggggtgatgattagcgcccagacactgacaggccgcgtcttggtcgttctcgtgttcgccctttctattggggccctggtcatttacttcatcgattcctctaatcccatcgagtcttgccagaatttctacaaggattttactcttcagattgacatggctttcaatgtgttcttcttactgtactttggcctgcggttcatagccgctaacgataagctctggttttggttggaggtcaactctgtagtggacttcttcacagtgccacccgtttttgttagcgtgtatctcaataggtcatggctgggcctgaggtttctgcgcgcactgagactgattcagttttcagaaattttacaatttctgaacatcttgaagactagtaattccataaaactggtcaacctgttgagcatattcataagcacctggctgaccgccgcaggttttatccatttagtggagaactccggtgacccatgggaaaactttcagaacaatcaagcccttacttactgggagtgtgtgtacctcctaatggtgaccatgtctacagtgggctatggggatgtgtatgctaagactacgttaggccgactgtttatggttttctttatcttaggaggcttagccatgttcgcatcgtacgtgcctgaaattatagaactcataggcaatcgtaaaaagtacggtgggtcttactctgccgtgagcggacgaaaacatatcgttgtgtgcggacacatcactctggagagcgtttctaacttcctcaaggacttcctgcacaaagacagagatgatgtgaatgtggagatcgtgtttctacacaacattagtcccaacctcgaactagaagccctgttcaagagacatttcactcaggttgagttttatcaaggctctgttctcaatcctcacgaccttgcaagagtgaagatcgagagcgccgatgcatgcttaatattagctaacaagtactgcgccgaccctgatgcagaggatgcctctaatattatgagggtgatttcaattaagaactatcatcccaaaattcgtattatcacgcaaatgcttcagtaccataacaaagcgcatctcctgaatataccaagttggaattggaaagagggcgatgacgcaatatgcctggcagagctgaaattaggcttcattgctcaatcatgcctggcccaggggctgagcacaatgttggcaaatttatttagtatgagatcattcatcaaaatagaggaggatacctggcagaaatattatctggagggggtctccaatgaaatgtatactgaatacctgagctctgcttttgtgggcctgtccttccccacggtttgcgagctgtgttttgtgaaactgaagctcctgatgatcgctatcgagtacaagtctgccaatagggaatctagaattctcatcaaccctggaaatcacttgaagatacaagaaggaacacttgggttcttcatagcttccgacgcgaaggaggttaaacgtgcattcttttattgcaaagcctgccacgatgatatcactgaccctaaaagaatcaagaaatgtgggtgtaagagacttgaggatgaacagccctcaaccttaagtccgaaaaaaaagcaaaggaatggcgggatgaggaatagcccgaatacaagccccaaacttatgcgccacgacccactgttgattccaggcaacgaccagattgataacatggacagtaacgtgaaaaagtacgactctactggtatgttccattggtgtgcgcctaaggaaatcgagaaggtgattctgaccaggtcagaggccgccatgacagtcctatcaggccacgtggtggtgtgtatcttcggcgatgtttcctcggctctcatcggtcttaggaacctcgtcatgccactccgcgccagcaacttccactatcacgagttgaaacacatcgtttttgtaggctctatcgagtatctgaagcgtgaatgggagacactgcataattttcctaaggtctcgatcttgcccgggacaccattaagtcgagccgacttgagggctgtcaacatcaacctatgcgacatgtgtgtgatattgagcgcgaatcagaacaatatagacgatacatccctgcaagacaaggaatgcattttggcctcactcaacatcaaaagtatgcaattcgatgactcgattggcgtgttgcaggcaaattcccagggctttaccccacccggtatggacaggtccagcccggacaattccccagtccacggcatgctgcggcaaccttcaatcactacaggcgtcaacatcccaatcatcacagagctagttaacgacactaacgtgcagttcttggaccaagacgacgacgatgacccggacaccgaactctacctaacacagccattcgcttgcggaactgccttcgccgtgagtgtccttgattcactgatgagtgctacctatttcaacgataacattctcacactgattaggacgttggttacgggaggggctacccctgagttggaagcccttattgccgaggaaaacgccctgagagggggatatagcacaccccagactcttgctaatcgggaccggtgcagagtagcccagctcgccctgctagatgggcctttcgcggatctcggagatggtggctgctacggggacctgttctgcaaagcgctgaagacttataacatgctctgcttcggaatttacaggctgcgcgacgcccacctctcaactccctctcagtgcactaaaagatacgtgattactaaccccccctacgagttcgagctggttccgacagacctcattttctgcctgatgcagttcgaccacaacgcaggacagagtcgtgcatccctgtcccattctagtcattcctcacagagctcttcaaagaagagctctagcgtacactccattccctctactgccaatcgccagaacagacccaagtccagagagtcccgcgacaaacagaatgcaaccaggatgaaccgaatggggcaagaaaaaaagtggttcacagacgaaccagacaatgcataccccagaaacatccagatcaagcccatgtcaacacatatggcaaatcagattaaccagtacaagagcacatcgtctctgatccctccaatccgggaggtcgaggatgagtgctag

SEQ ID NO: 129488 - DNA, 3504 bp, synthetic construct
  misc_feature 1..3504: note = Description of Artificial Sequence: Synthetic coding sequence
  source 1..3504: mol_type = other DNA
tagggtggcggaggcggcggcgggggaagctctctgcgcatgtcttcaaatattcacgctaatcacctctccctggacgccagtagctcttcctctagctcctcaagttcttcatcctcatcctcttccagctcttcgtcctcatctgtgcacgaacccaaaatggacgctctgatcattccagtaaccatggaagtgccctgcgacagcagggggcagagaatgtggtgggcgtttctggcctcgagtatggtaacatttttcggagggctcttcataatcttactttggagaactttgaaatatctgtggaccgtatgttgtcattgtggcggcaagaccaaggaagcacagaagattaacaatggcagctcccaggcagacggcaccttaaagccagtggacgagaaagaagaggccgtggcagcagaggtggggtggatgacctctgtgaaagactgggccggtgttatgatttctgcacagactttgacagggagagttctggtggtcctggtgtttgctctgtcgatcggcgcattggtcatatacttcatagactcctcaaatcccatcgagtcttgtcagaacttttacaaagacttcactttgcagatagacatggcattcaacgtgttttttttactctactttggccttaggtttatcgctgcaaatgataaactatggttctggttagaggtgaactccgtagtagattttttcaccgtgcccccggtgtttgtgagtgtgtacttgaaccgatcatggttggggctgaggttcttgcgagccctccggctcatccagttctccgagattctgcagttcctcaacatcttgaaaacctccaactctatcaagcttgttaacctcttgtcaatcttcataagtacctggctgactgccgcaggtttcatccacctcgtggagaacagcggagacccatgggaaaactttcaaaataatcaggctcttacatattgggagtgtgtttatctgctcatggtaaccatgtctaccgtgggctacggagacgtctacgcgaagacaacgctgggcaggctgttcatggtgttcttcatactcggcggacttgcaatgttcgcgagttacgtgccagaaatcatcgagctgattgggaaccggaaaaagtatgggggctcttacagcgctgtgagtggaagaaagcatatcgtggtatgtggacatatcacactcgaaagcgtgtcgaacttccttaaggactttttgcacaaagaccgcgacgacgtaaacgttgaaattgtttttctgcacaacatctccccgaatctcgagttagaggctctctttaaacgccattttacccaggtcgagttttatcaggggtctgtgctgaaccctcatgacctggctcgggttaaaatcgagagtgccgacgcatgccttatcctggccaataaatattgtgccgaccctgatgccgaggatgccagcaatatcatgagggtgatcagtattaagaattaccaccctaagatccggatcattacacagatgctgcaataccataacaaggcacatctgctgaatattccaagctggaattggaaagaaggagacgacgccatatgtcttgccgagctgaagttgggatttatcgcccagagttgcttggcccaaggtctttcgactatgctggctaacctgttttctatgcggagctttattaagatcgaggaggacacctggcaaaagtactacttagagggggtgtcaaacgaaatgtatacagagtatcttagttccgccttcgtgggactgtcctttcctaccgtgtgcgagctgtgtttcgtgaaactgaagttgttgatgatagcaatcgagtacaagtctgctaaccgcgaatcccggatcctgattaatcccggaaaccatctgaaaatccaggaagggacactggggttcttcatcgcatctgatgctaaggaggtgaaacgggccttcttctattgcaaggcttgccacgacgacattaccgatcccaagcgtatcaagaaatgtgggtgcaaaaggcttgaggatgagcagcctagcactctgtcgcccaaaaaaaaacagagaaatggagggatgcgtaacagccctaataccagtccgaagctcatgcgacatgatcctttactaataccaggcaatgaccagatcgataatatggattcaaacgtgaaaaagtatgacagcacaggaatgttccactggtgtgcccctaaggagattgagaaagtcattctgacccgatctgaggccgccatgaccgtgctgtcagggcatgtagtagtctgcatcttcggggacgttagctcggccctgatcggcttaaggaatctggtcatgccgctacgtgcaagcaacttccactatcatgaattaaaacatattgtttttgttgggtcgatagaatacctaaagagagaatgggagactctgcacaatttccctaaagtcagcatcttgcctggaactccgctctcacgagccgatttacgcgctgtaaacattaacctgtgcgacatgtgtgtgattctgtccgccaatcaaaacaacattgacgacacctccctccaggataaggagtgtatactagcgagtctcaacattaagagcatgcaatttgatgactccattggtgttctacaggccaacagccaggggttcaccccacccggaatggatagaagctcccctgataacagcccagtgcacggaatgttgcggcaaccaagtatcacgactggagtgaacatcccaatcatcacggaattagtcaacgacacgaacgtgcaatttcttgaccaagacgatgatgacgatccagacaccgaattatatttgacgcagcctttcgcatgcgggactgctttcgcagtttctgtgttggattctctaatgagtgctacctatttcaatgataatatactcaccttaatacgtaccctcgtcacgggaggagccacacccgagttggaggccctgatcgccgaggaaaatgccctgcgcgggggttattcaactccacagacactggctaatagagatcgatgtagagttgcccagctagccctccttgacgggccattcgcggatctaggtgacggcggttgctatggagatctgttttgcaaggctctgaaaacctacaatatgttatgctttgggatatatcggctgcgtgacgcccatctgtccacccccagtcagtgtactaagcgctatgtcattactaatcccccttacgaatttgagctggtccctactgatcttattttttgcctgatgcagttcgaccacaatgctggtcagtctagggcctccctctctcattcaagtcactcaagtcaatcaagctctaaaaaaagcagcagtgtccactccatacctagcactgcaaatcgacagaaccgcccaaaaagtagagaaagcagagacaagcagaatcgcaaagaaatggtgtacagatag

SEQ ID NO: 129489 - DNA, 3516 bp, synthetic construct
  misc_feature 1..3516: note = Description of Artificial Sequence: Synthetic coding sequence
  source 1..3516: mol_type = other DNA
atggacgccctgatcatacccgttaccatggaggtgccttgcgactctagagggcaacgaatgtggtgggccttcctcgcttcctcgatggtgacatttttcgggggattgttcataatcctgctgtggaggacccttaaatacctgtggacggtttgttgtcactgcggcgggaagaccaaggaggctcaaaagatcaataacggaagtagccaggccgacgggaccctcaaacccgtagacgaaaaagaggaagctgtggctgccgaggttggctggatgacctccgtaaaagactgggccggagtgatgatctctgctcagactctgaccggccgggtacttgtggttttggtcttcgccctcagcattggcgccctggtaatatatttcatagattctagtaatcccatcgagagctgccagaacttttacaaagattttacattacaaatcgatatggctttcaatgtcttctttctgctatacttcgggctgaggtttatagcagccaacgataaattgtggttttggctcgaagtcaactcagtggtagatttctttactgtgccaccagtgtttgtctctgtgtatttgaaccgatcatggttaggcctccgctttttgcgtgctctgagattaatacagttttctgagattctccagttccttaatattcttaaaacctctaacagcattaaattggtgaatctgttgtcgatctttataagcacttggcttaccgccgccgggtttatacatcttgttgagaacagtggggacccctgggaaaatttccagaataatcaggctcttacatactgggagtgtgtctacttgttgatggtcaccatgtccaccgtgggatatggagatgtgtacgcgaagactacgctcggacgcctgtttatggttttcttcatcttgggcggcctcgccatgtttgcttcttacgtgccggaaatcatcgaattgatcggaaatcgcaaaaagtatggaggctcgtatagcgctgtgtccggacgtaaacacattgtagtgtgcggtcatataacgctggagagtgtgtctaattttttaaaagacttcctgcacaaggacagagatgacgtcaacgtggagattgtgtttctgcataatataagtccgaacctcgaactggaggcccttttcaagaggcactttacccaggtcgagttttaccaaggcagcgttctcaaccctcatgacttggctcgggtaaaaatcgagtctgctgatgcctgtctgatcctcgccaataaatactgtgccgaccctgatgccgaagatgcttctaatatcatgagagtgataagtatcaaaaactatcaccctaaaatcagaataataacgcagatgctgcagtaccataacaaggcccacctgcttaatatcccaagctggaattggaaagagggggatgacgcaatctgtcttgccgagctaaagctgggtttcattgcccagtcttgtctcgcccaagggttaagcaccatgttggccaatttgttctccatgcgtagctttattaagatcgaagaggatacctggcagaaatactacctggaaggcgtctcaaatgaaatgtatacagagtatctgagctcagccttcgtcggactgagcttccctacggtatgcgagttatgcttcgttaaattaaagctgctcatgattgctattgagtataagtcagctaacagggagtcccggatcttgatcaatccgggtaatcatttgaagatccaggaaggcactctcgggttcttcattgcaagcgatgccaaagaggtcaaacgtgcctttttctactgtaaggcatgccacgatgatataacagatccaaagagaatcaagaagtgcggctgtaaacgcccgaagatgtctatttacaagaggatgaggagggcctgttgtttcgactgcgggagatctgagagggattgtagctgtatgtcgggcagagtccgcggtaacgtcgatacgttggagagagccttccctctgagttccgtgtccgtcaatgactgttctactagttttagggctttcgaggatgaacagcctagcaccctttctccaaaaaagaagcagaggaatggtgggatgcggaatagccccaatacaagtcctaagctaatgcgacacgatccattactcatcccgggcaatgaccagatcgataacatggactcgaatgtcaaaaagtacgattcaacgggcatgtttcactggtgcgccccgaaggagatcgaaaaggttattcttactaggtcggaggccgccatgaccgtgctcagcggccacgtcgtagtgtgtatctttggcgatgtaagcagcgcactgatcggcctgcggaacttggtgatgccgttgcgcgcctccaattttcactatcatgagttaaaacacatcgtgtttgtgggaagtatcgaatacctcaaaagggagtgggagaccttacacaattttccaaaagtctccattttgcctggcacccccctgtcccgggctgacctcagggctgtaaatattaatctttgtgatatgtgtgtgatcctctccgccaatcaaaataatattgacgacacaagcctccaggataaagaatgcattctggcctcgctcaatatcaaatcaatgcagtttgatgacagtataggcgtcctacaggccaatagtcaaggcttcactccaccaggaatggacagaagctccccagacaactcaccagtgcatgggatgctacggcagcccagcatcaccacaggagtcaatattccaatcataacggagcttgtcaatgacactaatgtgcagtttctcgatcaagatgacgacgacgatccagataccgagctataccttacacaaccctttgcctgtgggaccgcattcgccgtctcggtgctcgacagcctcatgtctgccacttattttaatgacaatatcctgacgctcattaggacgcttgttaccggaggggccacccctgagttagaggccttaatcgccgaagagaacgcattaagaggcggctactcgaccccccaaacacttgcgaacagggacaggtgccgcgtggctcagctggccctgctggacggcccctttgctgacctgggcgatggaggttgctatggagatttgttctgtaaagcactcaagacttacaacatgctgtgtttcggaatctacaggctcagagatgcgcatttatcaacaccctctcaatgtactaaacgctatgtaatcacaaaccccccatacgagtttgagctcgtgcccaccgacctgatcttttgtctgatgcagttcgatcacaacgccggacagagtcgcgcatccctgtctcactcctcccactcgtcgcagtcgtctagtaaaaaatcttcttcagtgcactctatcccttcaacggctaatcggcaaaatagacccaagtcaagggagtcccgggataaacagaaccgcaaggaaatggtgtacaggtag

SEQ ID NO: 129490 - DNA, 3534 bp, synthetic construct
  misc_feature 1..3534: note = Description of Artificial Sequence: Synthetic coding sequence
  source 1..3534: mol_type = other DNA
atggctaatgggggcgggggtggcggagggtctagtggcgggggtggtggcgggggtgggtctagtctcagaatgtcctccaacattcacgccaaccatctgagcctcgacgcttcttccagctcttcatcaagcagcagctcctcctcctctagttcctctagcagcagctcctctagcgtacatgagccaaagatggacgcactcattattcccgtgaccatggaggttccatgcgactctcgaggtcagcgaatgtggtgggccttcctcgcctctagcatggtgacttttttcggcgggctattcattattctactgtggcgaacccttaagtatctctggacagtgtgctgtcactgtggaggaaagacaaaagaagcccagaaaattaacaatggatcatcacaggcagatggcacactcaaacctgtcgatgagaaggaagaggctgtggccgccgaagtgggttggatgaccagtgtcaaagattgggcaggcgtgatgatctccgcgcagaccctgacgggtcgcgtcctggtggtcctcgtttttgctttgtcgattggcgcgctggtgatctatttcatcgattcatcaaaccctatcgagtcatgccagaacttttataaagacttcaccctgcagatcgatatggcctttaatgtgttttttctcctatacttcggcctgcgttttatagccgccaacgataaattgtggttctggctggaggttaatagtgtggtcgatttctttactgtccccccggtttttgtcagcgtctatttaaacaggtcttggttggggctgcggtttctgcgcgcccttaggctcattcagttctctgagattttgcagttcctgaatattcttaagacgtctaattctatcaaacttgtgaacctgctcagtattttcatctcaacctggctgaccgctgccggattcattcaccttgttgagaactccggagatccctgggagaattttcagaacaaccaagcgctcacttattgggaatgtgtgtatctcctcatggtaaccatgagtaccgtcgggtatggtgacgtgtatgctaaaacaactcttggccggctgttcatggttttcttcattttaggcggcctggccatgtttgccagctacgtgccggagatcatagagctcataggtaatagaaagaagtacggtggatcttactcagcagtgtcgggccgcaagcacattgtggtctgtggccacataactttggagagcgttagtaatttcttgaaggatttcctccacaaagatcgggatgacgtgaatgtagaaatcgtttttctccacaatatatcaccgaatctcgaacttgaagccttgtttaaacggcacttcacacaggtggaattttaccagggttcagtcctgaatcctcacgatcttgctagagtaaagatcgagtcggcagacgcctgtctgatcctagcgaacaaatattgtgcagatccggatgcagaggatgcttccaacatcatgcgcgtcataagtattaaaaactaccatccgaagatacgcataatcacccaaatgctccagtatcacaacaaggcacacctgttgaacatcccctcatggaattggaaagagggggacgatgcgatctgtctggccgaactcaagctgggcttcattgcgcagagttgtctcgcccaaggactgtctaccatgcttgcgaatctgttttctatgagaagctttattaagattgaggaggatacctggcagaagtattatctggagggagtgagtaacgagatgtacaccgaatacctgagttccgcctttgtgggattgagcttccccacagtttgtgagctgtgtttcgtgaagctcaagcttctgatgattgccattgaatacaagtccgctaatcgggagtctagaattctcattaaccctggcaatcatctgaaaattcaagaggggacactgggattcttcatagccagcgacgccaaggaggtcaagcgggcattcttctactgtaaagcctgccacgacgacattactgacccaaaacgaatcaagaagtgcggctgcaagcgcctagaggacgaacaaccttcaaccctaagccccaaaaaaaaacagcggaatggcggaatgagaaacagcccaaatacatctcctaagctcatgaggcacgatcccttactaattcccggaaacgatcaaattgacaatatggacagcaacgtgaaaaagtacgattctactggaatgttccattggtgcgcacctaaggagatcgagaaagttatactgacccgcagcgaggcagcaatgacagtgctgtctggccatgtcgtggtgtgcatctttggcgatgtgtctagtgctctgatcggacttagaaacctggtgatgccactccgggcctccaactttcattatcatgaactgaaacatattgtgtttgtcggctccatagagtatctgaagcgagagtgggaaacactgcacaacttcccaaaagtcagcatcctccctggcacgccgctgagtagggcagacttgagggctgtgaatattaacctatgtgacatgtgcgtgatactgagtgctaatcagaacaatatagacgacacttccctacaggataaagaatgtatcctagcctcactaaacatcaaatctatgcagttcgacgactctatcggggtccttcaggcaaatagtcagggattcaccccacccggtatggatcgttcctccccagacaactcacctgtgcacggtatgttgaggcagccttccatcacaactggagtcaacattcccataatcacagagctcgtgaatgacaccaatgttcaattcctcgaccaggatgacgacgacgacccagacaccgagctttatctcactcagccattcgcatgtggcaccgccttcgccgtctccgtgcttgacagtttaatgtccgctacctactttaacgataatattctcactctcatcagaactctggtgacaggtggcgcaactccggagcttgaggctctcatcgctgaagagaacgccctgcgagggggttattccactccccagaccctcgccaacagggatcggtgtcgcgtggcacagcttgctctcctggacggcccatttgcagacttgggagatggaggctgctatggcgatctattctgtaaagccctcaagacctacaacatgctgtgctttggcatctaccgtctcagagacgcccatctctctacgccatcacaatgtaccaagcgctatgtcatcaccaacccaccgtacgagttcgagctcgtgccgacagatctgatcttctgcttgatgcagtttgaccacaacgctggccagagccgagcttctttgtctcattcatcacattcgtcacagagtagtagcaagaagagcagcagcgttcattctataccctccacagcgaaccgccagaatcgccctaaatcccgtgaaagcagggataaacaaaagaaagaaatggtgtacagatag

SEQ ID NO: 129491 - DNA, 3618 bp, synthetic construct
  misc_feature 1..3618: note = Description of Artificial Sequence: Synthetic coding sequence
  source 1..3618: mol_type = other DNA
atggcaaacggtggggggggaggcggtggatcttctggtggtgggggcggtggggggggctcctccctccgcatgagctcaaacatccacgccaaccatttgtcgttagacgcctctagtagcagcagttcaagctcatctagtagtagctcttcatcatccagctcctcgtcatcttcggtccacgaaccaaaaatggacgcattaataattcctgtaaccatggaagtgccctgcgattcgaggggtcaaagaatgtggtgggcatttctcgcttccagtatggttacgttttttggcggactgttcatcatcctgctgtggcggacactgaagtacctctggacagtgtgctgtcattgtggcggaaaaaccaaagaagcccagaaaataaataacggctcaagccaagcagacggtaccttgaaacctgtggacgagaaagaagaggccgtggccgccgaggtaggatggatgacatctgtcaaggattgggccggagtgatgattagtgcgcagacattgacagggagggtcctcgtggtactagtgttcgccctctccatcggggccctcgtaatttatttcattgacagctccaacccaatcgaatcatgtcaaaatttttacaaagatttcacgctgcagatcgacatggcgtttaacgtgttttttctgctgtatttcggcctgcgattcatcgccgcaaatgacaagttatggttttggttggaggttaatagcgtcgttgacttcttcactgtccctccagtgtttgttagtgtatatctcaacaggagctggttgggactgagattcctgcgagctttgaggcttattcagttttccgagattctgcagttcctcaacattctgaagacgtccaactccattaaactggttaatctcctcagtatctttatcagcacctggcttaccgccgcagggtttatccacctggtggaaaactctggagatccttgggagaatttccagaataatcaggcacttacgtactgggagtgcgtatacctgctcatggtgactatgtcgaccgtgggctacggtgatgtatatgccaagaccacgctgggtcggctgttcatggttttttttatccttggcggcctggctatgttcgcctcttacgttccagaaattatagaacttatagggaaccgaaagaagtacggcggctcctactcagcagtgagcggtagaaagcacatcgtggtttgcgggcatattacactcgagtccgtgtcgaactttctgaaagactttcttcataaggatagggatgacgtcaatgtggagatcgtgttcttacacaatatctcccctaatctggaacttgaggcactctttaagcgtcatttcacccaggtcgaattctaccagggctcggtgctgaatcctcatgatttggcccgcgtgaaaattgagagcgccgatgcatgcctgatcctcgcaaataagtactgtgcggacccggatgcagaagatgcaagcaacatcatgagagttattagcatcaaaaactatcatccaaaaatcagaatcatcacgcaaatgttgcagtatcacaacaaagcacacttactgaacatccccagctggaattggaaggagggcgacgacgcaatttgcctcgccgaactgaagcttggttttattgcacaatcttgtctggcgcaggggctgagcacaatgctggcaaatctgttctcaatgaggtcattcattaaaatcgaggaggatacctggcagaagtactacctggagggggtttctaacgaaatgtataccgagtacttgagttcagcctttgtagggcttagctttcctacagtttgtgagctttgttttgtcaaactgaaactcctaatgattgccatcgagtataagtctgctaatcgcgagagccgtattctcatcaacccaggaaatcatcttaagatacaggagggcacactcggcttttttatagctagtgacgctaaggaagtgaagagggcattcttttattgcaaggcctgtcatgacgacattaccgatccgaaacggatcaagaagtgtgggtgtaagcgacttgaggacgaacagccttctacactctcacctaagaaaaaacaacggaatggcggaatgcgtaacagccctaatacgtcacccaaactaatgagacacgacccactcctaattcccggtaacgaccagatcgataacatggatagcaatgttaagaaatatgactcaaccgggatgtttcactggtgtgctcccaaggagattgaaaaagttatcttgacacggtccgaagccgcgatgactgtgttaagcggacatgtcgtggtttgcatctttggcgacgtgtctagtgctctaatcgggcttcgaaatctggtgatgcctctgcgggcctccaacttccactatcatgagttaaagcatatagtcttcgtgggatcaatcgagtacctgaagagagaatgggagacacttcacaacttccctaaggtctcaattctgcctgggacccctttgtcacgggcagatctgcgcgcagttaatattaatttgtgtgatatgtgtgtcatactgtccgctaaccagaataatatcgatgacacttcgctgcaggacaaagaatgtattctcgcctctcttaacattaagagcatgcagtttgatgacagtatcggagtactccaggcaaatagtcagggatttacccctcctggcatggaccgctccagtcccgataactcccctgtccacgggatgctgcgtcagcctagcattaccaccggcgtcaatattccaattatcacagagctggccaagcctggcaaactcccactcgtaagcgtcaaccaggagaagaattccgggacgcatatccttatgatcaccgagctggtgaacgacacgaacgtgcaattccttgaccaggacgatgacgacgatccagacacagagctgtacctgacgcagccatttgcgtgtggtacggcatttgccgtgtccgtcctagattcactaatgtctgccacctacttcaatgacaacattctgactttaatcaggactctggtcaccggtggggccacaccggaactggaagcactgatcgcagaagaaaatgcacttcggggaggatattcaaccccgcagactttagctaatagagaccgatgtagggttgcccagctggctctgttggacggccccttcgcagaccttggcgatggaggctgctacggagacctgttttgtaaggcgctgaagacttataacatgttgtgcttcggcatctatcggctacgcgatgctcatctgagcaccccatcccaatgtacaaagcgatacgttatcacaaatccgccctatgaattcgaactggtgcccacggacctgatcttctgccttatgcaatttgatcacaatgccggacagagtcgagcgagcctatcccactcgtctcacagtagccagtcaagtagcaaaaagagctcgagcgttcatagcattcctagcaccgctaacagacagaatcgtccaaagtcccgcgaatctcgggacaagcagaaccggaaagagatggtgtaccgatag

SEQ ID NO: 129492 - DNA, 3678 bp, synthetic construct
  misc_feature 1..3678: note = Description of Artificial Sequence: Synthetic coding sequence
  source 1..3678: mol_type = other DNA
cccaaaatggacgctctgattataccagtcacaatggaagtgccttgcgatagcagaggccagcggatgtggtgggctttcctggccagctctatggtgacctttttcggaggcttatttataattcttttatggaggaccttgaagtacctatggacagtgtgttgtcactgcggaggcaagacaaaggaggcccagaaaatcaataatggcagcagtcaagctgacggcactctgaagcccgtggacgagaaagaggaagcagttgcagccgaagtaggctggatgaccagcgtgaaagactgggccggggtgatgatctctgctcaaacgcttactggcagagtgctggtggtactcgtcttcgccctctccattggcgctctcgtgatttattttattgattcatcaaatcctatagagtcttgtcagaacttttacaaggacttcacgttacagatcgatatggccttcaacgtgtttttcctcctctacttcggtctgcgatttattgccgcgaatgataagctgtggttctggctcgaggtgaattccgttgtggactttttcactgtgccccccgtatttgtcagcgtttatctgaaccggtcttggttgggtctgcgtttcctgagagccctgcgtctgatacagttctcggaaatccttcagttcctaaacattctaaagacctctaattcgataaagctcgtcaatttgctgtctatctttatcagcacatggctgacagccgctgggttcatccacctggttgagaacagcggagacccttgggagaactttcagaacaaccaggccctgacatattgggaatgtgtctaccttctcatggtgaccatgagcacagtgggctatggggacgtttacgccaagaccacactcgggcgtctttttatggtgttcttcatcctgggaggcctcgctatgttcgcctcttacgttcccgagattattgaactcatcggaaatagaaagaagtacggcgggagttatagcgccgtgagtggcaggaaacacatcgttgtgtgtggacacataacactggagagcgtctcaaatttcctgaaggacttcctgcacaaagaccgggacgatgtaaacgtagaaatcgtgttcttgcacaacatttcacctaacttagaactggaagcactgttcaaaagacacttcacccaggtggaattttaccagggatcagtcctgaatccgcatgatctcgcacgtgtgaaaatagaatctgctgacgcatgcctcatactcgcaaataaatactgcgctgatccggacgccgaggatgccagtaatataatgagggtgattagtataaagaattatcacccaaaaattaggattattacacagatgctccagtatcacaacaaggcccaccttttaaatatcccgtcgtggaactggaaggagggcgacgacgcaatttgcctggccgagctgaaacttggatttattgctcagagctgtcttgcccagggtctctcaacaatgctggcaaacttattttcgatgcggagcttcatcaagatagaggaggacacttggcagaaatattacttggagggcgtctcaaatgagatgtacaccgagtacctctccagcgcttttgtgggattgtcatttcccacagtgtgcgaactttgcttcgtgaaacttaaacttttaatgatcgccattgagtataaatcggccaaccgcgagtcgcgaatcctgatcaatccgggtaaccatctcaaaattcaagaaggcactctgggcttctttatcgcatccgatgccaaggaagtgaaacgtgcattcttttactgcaaagcatgtcatgacgacattaccgacccgaagaggattaagaagtgcgggtgtaagcgtccaaaaatgagcatatacaaaagaatgcggcgggcctgctgttttgactgcggcaggagcgaacgagattgctcttgcatgtcaggtagagtgcgcggcaacgtggacacgctggagagggcctttcctctgtcgagcgtgtccgttaacgattgcagcactagcttccgagcgtttgaggacgaacagccgtctacattatccccaaagaagaaacaaaggaacggcggcatgcggaatagccccaacacaagccctaaactcatgagacacgaccccctcctgattcctggaaatgaccagattgacaacatggattcaaacgtcaagaaatacgattccaccggtatgtttcattggtgtgcgcccaaggagatcgaaaaagtcatcctgacacggtccgaggccgccatgaccgtactcagcgggcacgtggtggtctgtatttttggagacgtgagtagtgcgctcattgggctgcgaaatctcgtcatgcccctgagagcaagcaactttcactatcacgagctgaagcacattgtttttgtgggatctattgaatatttgaaaagagaatgggagaccctgcacaacttcccgaaagtatccatacttccaggcacaccattgtctcgcgcagacctccgggcagtgaacattaatctgtgtgacatgtgtgtcatcctgagcgccaaccaaaataatattgatgatacttctctgcaagacaaggagtgtatactcgcttcgctgaatatcaagtccatgcagttcgacgactccataggggtattacaggccaacagtcaaggttttaccccccccggtatggacagaagcagtcctgataatagtccggtgcatggtatgctgcggcagccttctataacaacgggcgttaacattcccatcatcacagaactcgtaaacgatacaaacgtgcaattcctggaccaggacgatgatgacgatccagacactgagctttatttaacccagccttttgcctgtggcacagccttcgccgtttcagtgctagacagcctgatgtcagccacttattttaacgacaatatccttaccttaattcgaaccctggtcacagggggagccacacctgagctggaggcactgatcgcggaggaaaacgcacttcgtgggggatactccactcctcaaacattggctaacagagatagatgtagagttgcacagctggctttgcttgacggaccttttgctgatctgggtgacgggggctgttatggcgacctattttgtaaagctctcaagacctataatatgctttgcttcggtatctatcgtctgagggacgcgcacctttcaacaccctcccagtgtactaagaggtacgtgattacaaatcctccttacgaatttgaattagtccctacggacctcatcttctgcctgatgcagtttgaccacaatgctggccaatcccgggcttccttatctcactcctcacactctagccagtctagttcaaaaaagtctagtagcgttcactctattccttccactgcaaacagacagaatcgacccaagtcccgcgaaagccgagataaacaaaatgctacacgcatgaatcgcatgggacaggagaagaaatggttcaccgatgaaccagacaatgcttatccgaggaatatccaaattaaacccatgtctacccacatggccaatcagattaaccaatacaagagcacaagttctttaatccctccgataagagaggtagaagatgagtgctag

SEQ ID NO: 129493 - DNA, 3660 bp, synthetic construct
  misc_feature 1..3660: note = Description of Artificial Sequence: Synthetic coding sequence
  source 1..3660: mol_type = other DNA
atggctaacggcggcgggggcggcggtgggtcgtccgggggaggcggcggaggcggagggtctagtctgagaatgagctccaatattcacgccaatcaccttagcctggacgcaagctcctcctcgagcagctctagcagctcctccagctcctcgtcatcctctagtagttcttccagcgtgcatgagccaaagatggacgccctgatcatccctgtgacaatggaggttccgtgtgatagtcgtggtcagcgcatgtggtgggctttcctcgctagctcaatggtgacgttcttcggcggattgttcatcattttgctgtggaggacccttaaatatctgtggacggtgtgttgccattgcggcggcaagacaaaggaggcacagaagattaacaacgggtcgagccaggcagatggtaccctgaagcctgtggacgaaaaagaggaagcagtggctgccgaggtcggatggatgactagtgtgaaagattgggctggcgtaatgatttccgctcagacgctgacgggacgcgttctagtcgttctggtgtttgcactatctatcggagctctggtcatctattttatcgattcctccaaccctatcgaatcatgccagaatttttacaaggacttcactttgcagattgacatggcatttaatgtcttcttcctgctgtatttcggtctgcgtttcatcgctgcaaatgataagctgtggttctggctggaagtgaattccgtggtggacttcttcaccgtgcccccagtgtttgtgagtgtttacctgaatagatcctggttaggactgcgctttcttcgcgctttacgtttgatccagttcagtgaaattttgcagttcttaaacatactcaaaacttcgaactcaattaagctggtaaatctactgtccatttttattagcacctggctgaccgcggctggtttcatccacctggtcgaaaatagcggtgatccctgggagaacttccaaaataatcaggccctgacgtactgggagtgtgtatacttactcatggtcaccatgtctacagttggatacggagacgtctatgctaagaccacactcggccggttatttatggtcttcttcatcctgggcggactggctatgttcgcttcatatgttccggaaatcatagaactgattgggaataggaagaagtacggcggcagctatagtgccgtgagtggccggaaacacatagttgtgtgcgggcacatcaccctggaaagcgtgagcaactttctgaaggacttccttcataaggaccgcgatgacgtcaacgtggaaattgtgtttctgcataacatatcccctaacctggaactggaagccctcttcaagcgtcatttcactcaggttgagttttaccaaggaagcgtgctgaacccacatgacctggcaagagtgaaaatcgagagcgccgatgcctgtttgatccttgctaataagtactgtgctgatcctgacgcagaagacgcctctaatattatgagagtgattagtatcaagaactatcaccccaagatacgaatcataactcagatgttacaataccacaacaaagcccacttgctcaacattccttcgtggaactggaaggagggtgacgacgccatatgcctcgctgagttaaagctgggctttatcgcccagtcatgtctagctcagggtctgtccactatgctcgccaacctattctcgatgcggagttttattaagattgaagaggatacatggcagaaatactatcttgagggcgtgtcaaacgaaatgtacacagagtacctgagtagcgcatttgtaggtctgtccttccccaccgtctgcgagctgtgtttcgtcaagctgaaactgctcatgatcgccatcgagtacaaatctgcaaaccgggaatcgcggatcctgatcaaccctggcaaccatctcaagatccaggaaggaacattgggattcttcatagccagcgatgcgaaggaagtgaagagggcatttttttactgtaaagcttgtcatgacgacatcactgaccctaagcgcattaagaagtgcgggtgcaagcggttagaagatgaacagccgagtacactgagtcccaagaagaaacagcgcaacggcggcatgcgcaatagccccaacaccagcccgaaattgatgcggcatgaccccttgctgattcccggcaatgatcagatagataatatggatagcaatgtcaagaaatacgattccacaggcatgtttcactggtgtgcacccaaagagattgagaaggttattcttgtaactgggtggatgccctatctcggtccccgcgtactcatgacatgcctcgacatcggagttgtctgcatgcccactgacatccagtctacatccccagcgtcaatcaaaaaattcaaggaaacacgctcagaggctgctatgactgtattgagcggccacgtggtcgtgtgcatttttggggatgtatcgagcgccttgataggtctaaggaacctcgtgatgccgttgcgggcctcaaactttcattatcacgagctgaagcacatcgtttttgtgggtagcatagagtatctgaagcgggaatgggagacgctgcacaactttccgaaagtgagtatcttgcctggaactcctctgtcacgcgctgatctcagagccgtaaatatcaacttatgtgatatgtgtgtcatcctctccgctaaccagaataatatcgacgatacaagtctccaggataaagagtgcatactcgcctccttaaacatcaagtctatgcagtttgatgattctataggcgtgcttcaggccaacagtcagggtttcactccccccggaatggatcgaagcagtcccgacaactcgccagtgcacgggatgctgaggcaaccatctattacaaccggcgtgaacatccctataatcacagaactcgtgaacgatacaaacgtccagttcctcgatcaggatgatgatgatgaccctgatacagagctgtacctgacacaacctttcgcatgtggtacagcatttgctgtgagcgtgctggatagcctgatgagtgcaacctactttaatgataatattttgacactgatcaggacactcgtaacaggcggtgctacccccgagttggaggccttgatcgcagaagaaaacgctttacgcggcggctactccacaccccagacactcgccaacagggaccggtgcagagttgcccagctagctctgttggatggcccctttgccgaccttggggatggaggttgctacggcgacctcttctgcaaggccctgaagacttataatatgctctgtttcggaatctacagacttagggatgcacatttatctacccctagccagtgcactaagcgctacgtgataacgaacccaccttacgagtttgagttagtgcccaccgacctaatattttgtttgatgcagtttgaccacaacgccggacagtctcgggcctcgctctcccacagttctcattcgtctcagagctcctccaaaaagtcttcatccgttcactccattccttctaccgcaaaccgacagaacagacccaaatcccgggaatctcgggataaacagaagtacgtacaggaagagcgcctctag

SEQ ID NO: 129494 - DNA, 3723 bp, synthetic construct
  misc_feature 1..3723: note = Description of Artificial Sequence: Synthetic coding sequence
  source 1..3723: mol_type = other DNA
atggccaatggcggcggcggcggtggaggctcctctggcggcggggggggcggcggcggatcaagtctgagaatgtcctctaacatacacgccaatcacctcagcttagatgcttccagtagcagcagttccagcagttcctcatcctcctcatctagctcgtcatcaagttcgtcttcggtacacgagcccaagatggatgccctcatcattcccgtgaccatggaggttccatgtgactcacgagggcagcggatgtggtgggcttttctggcgtccagcatggtgacattcttcggaggcctttttatcatactgctttggaggaccctgaagtacctgtggacagtgtgctgccactgcggggggaagacaaaagaggcccagaaaatcaacaacggctcctcccaggcggacggtactctgaaaccagtcgacgagaaggaggaagcagtggcagctgaagtcggctggatgaccagcgttaaagactgggctggcgttatgatctcggcccagaccctcaccggccgggtgctcgtggtgcttgttttcgctctcagcattggagcgctggtcatctactttatcgatagctcaaatccaattgaatcttgccagaatttctataaagattttaccctgcagattgatatggccttcaatgtgttcttcctgctgtactttggcttaaggttcatcgctgctaatgataaactttggttttggctggaagtaaactctgtcgttgattttttcaccgtgccccctgtgttcgtgtctgtgtacttgaacagaagctggctgggcctccgctttcttagagccctgaggctcatccaattcagcgaaatcctacaattcctgaacatcctgaagacatccaattcaatcaagctcgtgaatctgctgagcatattcataagtacctggttgaccgcagccggattcattcatttagtcgaaaactcaggggatccttgggagaattttcagaataatcaggcgctgacttattgggagtgtgtgtatctcctgatggtaactatgagcactgtgggatatggcgatgtctacgccaagactacgctgggccggttatttatggtattctttatacttgggggattggccatgtttgctagctatgtccctgagattattgagctaatcgggaataggaaaaagtatggaggatcatacagtgccgtgtcagggcggaagcatatcgttgtgtgtggccacattacactagagagcgtctcgaattttttgaaagactttctccacaaggatcgagacgatgttaatgtggaaatcgtgtttctgcacaatatcagtcccaacctggagctggaagccctgtttaagagacatttcacccaggtggaattctaccaaggctctgtcctcaacccccatgacctggctcgagtcaagatcgaaagcgcagacgcttgcctaatcttagctaataaatattgcgcggacccggatgcagaagacgcctctaatatcatgagagtcatttcaatcaaaaattatcatcctaaaatcaggatcatcacgcagatgttgcagtatcataacaaagcccatcttttgaatattccctcttggaattggaaagagggtgatgacgctatttgcctggccgagttaaaactgggctttattgctcaaagttgcttggcccaggggctctcaactatgttggccaacctgtttagtatgcggagcttcattaaaatagaggaggacacctggcagaaatattatctggagggcgtgtcgaatgagatgtatacggagtatctgtctagtgcctttgtggggctaagctttccgaccgtttgtgaactctgcttcgtgaaactcaaactattgatgatcgccattgaatataagagcgcgaacagggagtccagaggccggctcagcatcttaataaacccaggtaatcatcttaaaatccaggaggggaccctgggcttttttatagccagcgacgccaaggaggtcaagcgcgccttcttctactgtaaggcgtgtcacgatgatataacagaccccaaacggatcaaaaaatgtggttgtaaacgcccgaagatgtccatttataagaggatgaggagagcctgctgctttgactgtggccgctccgaacgcgattgcagctgcatgtccggtcgagtaaggggaaatgtggatacactagagcgtgcctttcctttatcttcggttagcgtgaatgactgttccacaagttttagggcttttgaggatgaacaaccctcgacgctttcaccaaagaagaagcagagaaatggaggcatgcggaatagccctaacacttcaccgaaacttatgagacatgatcctctgttaatcccgggaaatgaccaaattgacaacatggattccaatgtgaaaaagtacgattcaacaggcatgtttcactggtgcgcaccgaaagagattgagaaagtgatcctaacaagatccgaggctgccatgaccgtactgagcggccatgtggtggtgtgcatttttggggacgtttcatccgctctgattggtctgcggaatcttgtaatgcctttgagggcttccaatttccattaccacgagctcaaacacattgtatttgtgggctctatagagtatcttaagcgcgagtgggaaacacttcataattttcctaaagtgtctatcttgccaggaaccccacttagtagagccgacttgcgggccgtgaatatcaacctgtgtgatatgtgtgtgattctctccgccaaccaaaacaacattgacgacacatctctgcaagacaaggagtgtatcttagcctcactgaatatcaagagtatgcagtttgatgactcaatcggggtgctgcaggcgaatagtcaagggtttacccccccaggcatggacagaagttctccggataactcaccagtccacggaatgcttcgccagccaagcattaccacaggggtgaatatccctatcatcacagagctggtaaacgacactaatgtccagtttctcgaccaggacgatgacgatgatccagacactgagttatacctaacacagccatttgcctgcggaacagcgttcgcggtgagcgtgctggatagtcttatgtcagcaacttacttcaatgataacatcctgaccttgattaggacacttgtcacagggggggccacaccagagctggaagcattaatcgccgaggaaaacgccttgcgcggcggatattccacaccgcagaccctcgccaatcgagatcgctgcagagttgcacagctggccctcctggacggacccttcgcagatctgggagacggtggatgctacggcgaccttttttgtaaggcgctgaaaacctacaatatgctgtgtttcggcatctatcgtttacgggacgctcacctttcaaccccaagccagtgcactaagagatacgtgatcacaaaccctccctacgagttcgagctggtgccaacagatctcatcttctgtttgatgcagttcgaccacaacgccggccagtcccgtgctagcctttctcacagctctcattcaagtcagagctcctcgaaaaaatccagctcagttcattcaatccctagcaccgctaaccgccaaaatagaccgaagagcagggagtctcgggataaacaaaagtacgtgcaggaagagcggttatag

SEQ ID NO: 129495 - DNA, 2970 bp, synthetic construct
  misc_feature 1..2970: note = Description of Artificial Sequence: Synthetic coding sequence
  source 1..2970: mol_type = other DNA
atggccttcaacgtattctttctgctgtatttcgggctcagatttatcgcagcgaacgacaaactgtggttttggctggaagtgaactccgtggttgatttctttactgtaccacccgtgtttgtgagtgtgtacctcaatagatcgtggctggggctccgctttcttcgcgcgctccggctgattcagttttcagagatcctccagtttctgaatattttgaagacctcaaactcaatcaagcttgttaatctactttcaatcttcatctctacctggctcactgcagccggatttattcatctcgtcgagaacagcggcgacccgtgggagaattttcagaacaaccaggcattgacctactgggagtgtgtgtatctattgatggtgactatgtctactgtagggtacggtgatgtgtacgcaaagaccaccctggggcggttgttcatggtgttcttcattttaggggggcttgcaatgttcgcaagctacgtgcccgagattatcgagctgattggaaaccgcaagaagtacggcggttcctactctgcggtgagtgggcgcaaacacatagtcgtgtgcggccacatcaccttggaatcagtctcaaacttcctgaaagatttcctgcacaaggatcgcgacgacgttaatgtggaaatcgtgtttttacataacatctcaccaaacctggaacttgaagccctttttaagcgtcatttcacgcaggttgaattctaccaaggctctgtgctgaacccccacgacctagctcgcgtgaaaattgaaagcgccgatgcctgtctcatcctcgccaataagtactgcgcggatccagacgccgaggatgcctcaaatatcatgagggttatatctataaaaaactaccacccgaagattcggataattacgcaaatgctgcaataccacaacaaagcccaccttctcaatatcccttcgtggaactggaaggaaggagatgacgcaatttgcctcgcagaactgaagctcggttttatagcccagtcctgcctagcgcaggggcttagtaccatgctggccaatctattcagcatgcgctcatttattaagatagaggaggacacctggcagaaatactacctggagggcgtctccaacgaaatgtatactgagtatttaagcagcgccttcgtgggactttcctttccaacagtctgtgagctgtgttttgtaaaactcaagctgctgatgattgccatcgagtataaatccgccaatagggaatcaaggattttaattaacccgggcaaccatttgaaaatacaagaggggaccctgggatttttcatagcttccgacgccaaagaagttaaacgcgcctttttttactgcaaagcctgtcacgacgatatcaccgatccaaagaggatcaagaagtgcggctgtaagagacttaaggttgcggctaggagccgctatagtaaggatccattcgaatttaagaaagagaccccaaacagccgacttgtgaccgagccagtcgaggacgagcagccttccaccctatctcctaaaaaaaaacagagaaacgggggaatgaggaattccccaaacacaagccctaaattgatgcgccacgatcctctcctcattcccgggaacgatcagatcgacaacatggattccaacgtgaagaagtacgacagcacaggtatgtttcactggtgcgctcctaaggagatcgaaaaggttatcctcaccagatccgaggccgcaatgactgtcctcagtggtcacgtggtggtgtgtatctttggtgacgtatcatccgcattaatagggctcagaaacttagttatgccactgcgggccagcaactttcactatcacgagcttaaacacatagtcttcgtggggtccatcgagtaccttaaaagggagtgggaaacactgcataattttcccaaggtgtccatcctccctggcacaccgcttagtcgggcagatctcagggcagttaatattaacctatgtgatatgtgcgttatattgtctgccaaccaaaataacattgatgatacctccctgcaggacaaagaatgcatcctagctagtctgaacataaagtcaatgcagtttgacgatagtataggagttctgcaagccaatagccagggcttcacaccccccggcatggacagaagctcaccggacaattctcccgtgcacggcatgctgcgccagccctctattactaccggggttaatatcccaattattactgagctggtcaacgatacaaacgtgcagtttctagaccaggacgacgacgacgacccagatacggaactgtacctgacacaaccctttgcgtgtggaaccgcctttgccgtctcagtgctggattccctcatgagcgccacctacttcaatgataacatactgacgctgatccggaccttggtgacgggtggagctactccagagcttgaggcactcattgccgaagaaaacgctctccgtggcgggtacagcacaccccaaactctcgcaaatagggataggtgccgtgtagcacagctggctctgttggatggaccattcgctgacctaggtgacggtggctgttacggcgacttgttctgcaaagcattgaagacatacaatatgctgtgcttcggcatttataggctgcgagacgcccacctctcgacaccctcacaatgtaccaagcggtacgtcatcactaatccaccctatgaattcgagctcgtccctaccgatctgattttctgtctcatgcagtttgaccataacgccggccagtcccgcgctagcctcagtcactcctcgcattcctcacagtctagctcaaaaaagagctctagcgtccatagcattccctcaaccgcaaataggcaaaataggcccaaatcgcgcgagagcagggataaacagaagtatgtccaagaggagaggctgtag

SEQ ID NO: 129496 - DNA, 543 bp, synthetic construct
  misc_feature 1..543: note = Description of Artificial Sequence: Synthetic coding sequence
  source 1..543: mol_type = other DNA
taaaaaattaggattatcacacagatgctccagtaccacaataaggcccatctgttgaacataccttcatggaattggaaagaaggcgacgacgccatctgtctggcagaactcaaattggggtttattgcccagtcgtgcctggcacaaggattatccaccatgctggccaatctgttttctatgcggtctttcatcaaaattgaggaggatacatggcagaaatactatctggaaggtgtgagcaacgagatgtataccgaatacctttccagtgcctttgtcggcttgagtttcccgaccgtgtgtgaactgtgctttgtcaagctgaaattactcatgattgcgatcgaatataaatccgctaacagggagagcaggattctcatcaatccaggcaaccacctgaaaatccaagagggcacattgggatttttcatcgcatcggacgccaaagaagtcaagcgccctccccaactttgtctgcccctggctgctcagaaacgttgctttcagtcagataagctcgatatctttatctag

SEQ ID NO: 129497 - DNA, 2661 bp, synthetic construct
  misc_feature 1..2661: note = Description of Artificial Sequence: Synthetic coding sequence
  source 1..2661: mol_type = other DNA
taaaatagcggtgacccgtgggaaaatttccaaaataaccaggccctgacttattgggagtgcgtgtacttgctgatggtgactatgtcgaccgtagggtacggggatgtgtacgcaaagacaacattgggcagactgtttatggttttctttatcctcggaggattagccatgtttgcctcttacgtgccagaaattatcgaactcataggcaaccggaagaagtacggaggatcatattcagcagtgtccggacgaaagcacatcgtcgtctgcggacacatcacactggagtccgtgtctaattttttaaaagattttcttcacaaggacagagatgatgtcaacgtggagatcgtattcttgcacaatatcagtcctaatcttgagctggaagcattatttaagagacacttcactcaagttgaattttaccagggcagcgtgttgaacccccatgacttggccagggtgaagatcgaatctgctgacgcttgcttgattcttgctaataagtactgtgcagatcctgacgcggaggacgcatctaacattatgagagtgatcagcatcaagaactaccaccctaaaatcagaatcatcactcaaatgctccagtatcacaataaggcacacctgctgaacattcccagctggaactggaaggagggggacgacgccatctgtctcgcagagttgaaactgggcttcattgcccagtcttgcctggcccaagggctaagtacaatgcttgcaaatctgttttctatgaggagctttatcaagatcgaagaggacacctggcagaagtactacctggagggtgtctcaaatgagatgtacaccgaatacctcagtagcgccttcgtaggattgtcgttccctaccgtttgtgagttgtgcttcgtcaagttgaagcttcttatgattgccattgagtacaaaagcgcaaacagagaaagcagaatactgatcaaccccgggaatcacctaaagatccaagagggcactctaggcttttttattgctagtgatgcgaaggaggtcaaaagggctttcttttactgtaaggcttgccatgatgatatcacagatccaaagaggataaaaaaatgtggctgtaagcgtttgaaagttgcggcccggtctcggtactccaaggacccttttgaattcaagaaggagacccccaacagtaggctggttacagagccagtggaggacgaacaaccaagcacattaagcccaaaaaagaaacagagaaatggaggaatgcgaaatagccctaatacaagccctaagctcatgcgccatgatcctctgcttatcccggggaacgaccaaatagataacatggacagtaatgtgaagaagtacgattcaaccgggatgtttcattggtgcgcccccaaggagatcgagaaagttatcttgacaaggagcgaagcagccatgacggtgctgtccgggcatgtcgtcgtctgcatatttggcgatgtgtccagtgctctcatcggcctgcgcaacctggtcatgcccctacgggcgagcaatttccactatcacgagctgaaacacattgtcttcgtcggatccatcgagtacttgaaacgcgaatgggagaccctgcataacttccctaaggtaagcatcctgccaggcacccctctgtcacgagccgacctgcgcgcagtcaacatcaacctctgtgatatgtgtgtgatcctgagtgcaaaccagaataatatcgatgatactagtctgcaggataaggagtgcatcctggcctcgctcaacataaaaagcatgcagttcgacgacagcattggggtgcttcaggccaactctcagggcttcactcctccgggtatggacagaagttccccagataacagccctgtacacgggatgttgagacagccaagcatcaccacaggagtaaatattcccatcattaccgaactcgtaaacgatacaaatgtccagtttttggaccaagatgacgacgacgatcccgacacagaactgtatttgacacagccttttgcttgtggcacggcgtttgcagtgagtgttctggactcactgatgtccgctacatacttcaacgataatatactcacactgataagaaccctggtgaccggcggcgcgacaccagaattagaggccctgattgcggaagaaaatgctcttcgtgggggctattccacccctcaaacactggccaatcgagatcgctgtcgggtggctcagctggcgctcctggatggtccatttgctgaccttggtgatggaggctgctacggggacttgttctgcaaggctttgaaaacttataatatgctatgctttggaatctaccgtctcagggacgcccacctcagcacccctagccagtgcactaaaaggtatgtgatcacgaaccctccatacgagttcgaactggttcccaccgatctgatcttctgtcttatgcagttcgatcacaatgctggccagtcccgggcttcactctctcacagttcccacagctcccagtcctcaagcaagaaaagcagctctgtacactccattccatctaccgccaaccgacagaaccggccgaagtcacgcgaaagccgcgacaagcagaaatacgtgcaggaagagcgcctgtag

SEQ ID NO: 129498 - DNA, 795 bp, synthetic construct
  misc_feature 1..795: note = Description of Artificial Sequence: Synthetic coding sequence
  source 1..795: mol_type = other DNA
tgagtgatttccatcaaaaattaccacccgaaaataagaatcattactcagatgctgcagtaccataacaaggctcacctcctcaatatcccttcttggaattggaaagagggggacgacgctatctgcctcgcagaattgaagttggggttcatagcccaatcatgccttgcacaggggctgtctacaatgctggcaaatctgttctccatgcgaagttttattaaaatcgaagaggacacctggcaaaagtactacctggaaggtgtgtccaatgagatgtatactgagtacctgagcagcgcctttgtgggactgtcattccctactgtctgtgagctgtgttttgttaagcttaagctgctgatgatcgccatagaatacaagtcagcgaacagggaaagtcgtattctgattaatccgggaaatcatctgaaaatccaggaaggaaccttaggattcttcatcgcctccgatgctaaggaagttaagagagcatttttttactgcaaagcatgccatgacgatatcactgaccccaagcgcatcaagaaatgcgggtgcaagcgcttggccggctcccaggatacacaccctgactccttttaccaccaagctgtgaacgctagttcctatctccatgggggtgggcagatgtggcctgtgagcagctcttcaagcatattgctgcattatttacgacggcaaatgcctgggcctgccaggctgccgctggagctatcatgccaggggagcgccctcagccctaatccggacctatactgtatgaagtag

SEQ ID NO: 129499 - DNA, 3630 bp, synthetic construct
  misc_feature 1..3630: note = Description of Artificial Sequence: Synthetic coding sequence
  source 1..3630: mol_type = other DNA
tctaacattcacgcaaaccacttgtccctcgatgcctcatcttcatcatctagctcaagttcatcgtcatcctcaagctcgagctcttctagtagctcaagtgtgcacgagccgaaaatggatgccttaatcataccagtgaccatggaggttccttgtgacagtcgagggcagcgcatgtggtgggcatttctcgcttcctcaatggttacttttttcggggggctgttcatcattttgctctggagaaccctgaagtatctgtggacggtttgctgccactgcgggggaaaaaccaaagaggcgcagaagattaataatggctcaagccaggctgacggaaccctgaagcccgtggatgaaaaagaagaggcggtggccgccgaggttggttggatgacttcagtgaaagattgggcaggtgtgatgatctccgctcagactctgacaggaagagtgttagttgttctggtttttgcattgagcattggagctttggtaatatattttatcgatagcagcaatcctatcgaaagctgtcagaatttctataaggattttaccctccagattgacatggccttcaacgtgttctttctgctgtatttcggcctgaggttcatcgctgccaacgacaagctctggttctggctagaggtgaattccgtcgttgacttctttaccgtcccgcccgtgtttgtgtcggtctacctcaatagaagctggctggggttgcggtttcttagggcgctgcgcctgatccagttctccgagattctgcagttcttaaatattctaaaaacttccaattcgatcaagttggtgaatctacttagtatattcattagtacttggttgaccgcagctggatttatacatttggtcgagaattctggtgatccctgggaaaactttcagaacaaccaggcgctgacctactgggagtgcgtgtacctcctgatggtgactatgagcactgtaggatacggagatgtgtacgcgaaaactactctcggcaggctattcatggtctttttcatccttggcggcctggccatgttcgcctcttacgtgccagagatcatcgagctgatcggcaaccgcaagaaatatggggggtcttattcagccgttagcggccgaaagcatatcgttgtgtgtggccacatcactctcgagagcgtttctaattttctgaaggattttctgcacaaggatagagatgatgtaaatgttgagatcgtttttctgcacaacatcagccccaatttggaacttgaagcattgtttaagaggcacttcacacaggtagagttctaccaggggtctgttctaaatccacacgacttggcgcgggtgaaaatagaatctgcagacgcatgtctcatcctcgcaaataagtattgtgcagaccctgacgccgaagacgctagcaacataatgcgggtgatctctataaaaaactaccaccccaagataaggattattactcagatgttgcagtaccacaacaaagcccacttgttaaacatcccatcatggaactggaaggaaggtgacgacgcaatttgccttgccgaactcaaactggggtttatcgcgcagagttgcttagcccagggcctctccaccatgttggccaacctgttcagcatgagatcattcattaagatcgaagaggacacttggcaaaaatattatctggagggagtgagcaatgagatgtacaccgagtacttgtcttccgctttcgtgggtctcagcttcccaacagtttgcgagctgtgctttgtaaaactcaagctcttaatgatcgccattgaatacaagtctgcaaaccgtgagtctcggatactgattaatccgggcaaccacctgaagatccaggagggaacactgggctttttcatcgcatctgacgccaaagaggtgaaaagggcttttttctactgtaaggcatgccacgatgatataacagaccccaagcgaattaagaagtgcggctgcaaacgacccaaaatgtcaatatacaagagaatgagacgagcttgctgctttgattgtggaaggtctgagcgcgactgtagctgcatgtctggtagagtaaggggtaatgtcgatacattggaacgagcttttccactgtcctcagtgagcgtcaatgattgttcgactagtttcagagcgtttgaagatgagcaaccctccaccctgagtcctaaaaaaaaacagcgtaatggagggatgaggaactcgccaaatacgtccccaaagctgatgcgccacgacccacttctgattcctggcaacgaccagatcgacaatatggacagcaatgttaagaagtacgattctacagggatgtttcactggtgcgccccgaaagagattgagaaagttatcctgacaaggtcggaggccgcgatgacagtgctgtccgggcacgtggtggtgtgcatcttcggtgatgtctcttccgccctcatcggactcaggaatctcgtcatgcccttgcgagcctcaaattttcactatcacgagttgaaacacatcgttttcgttggctcaatcgagtatcttaaacgggaatgggagacacttcataatttccctaaggtgagcattctaccaggaactcccttaagcagggccgacctgcgggccgtcaatatcaacctgtgcgacatgtgcgtcatcctaagcgcaaaccagaataatatcgatgatacctctctccaggataaagagtgcattctcgcgtcattgaatatcaaaagcatgcagttcgacgattctatcggagtgctgcaggccaatagtcaagggttcacgcctccgggcatggatagaagttcgccagataatagcccagtccatggtatgctcaggcaaccttccattacgacaggcgtgaacatacccataatcaccgagctggtgaacgacactaacgtgcaattcttagaccaggatgacgacgacgaccccgacaccgaattgtatctaacgcagcctttcgcctgcggcacggctttcgcggtatccgtgttggacagtctgatgagtgccacttattttaatgacaacatacttactctcattcggaccctggtgactgggggggcaaccccagagctggaagctcttatcgccgaggagaatgcattgcgcggagggtactcaaccccccagactcttgctaaccgtgatcggtgcagggtggcccagctggccctgttggacggccctttcgctgatctgggggacggcggctgttacggtgatctcttctgtaaggccctgaagacctacaatatgctctgtttcggtatctaccgcttgcgagacgcgcatttatcaactccatcacagtgtactaagcgctatgtcatcaccaaccctccatacgaatttgagctggtccctaccgacttgatcttctgcctgatgcagtttgaccataacgccggacagtcaagagcctcactgagtcattcatctcattcaagccaaagcagcagtaagaagagctcaagcgttcactcaattccaagtactgccaataggcaaaacagaccgaagagtcgagagtcgcgggataagcagaagaaagagatggtctatagatag

SEQ ID NO: 129500 - DNA, 576 bp, synthetic construct
  misc_feature 1..576: note = Description of Artificial Sequence: Synthetic coding sequence
  source 1..576: mol_type = other DNA
atggtgaagaagcttgtgatggcccagaagagaggagaaaccagagctctgtgtctgggggttactatggtcgtttgcgcggtcataacttactacatcctggttactactgtgttgccactataccagaaatctgtatggacgcaagagagtaagtgccacctcatcgagactaatattagagaccaagaagagttgaagggcaagaaagtcccacagtacccgtgtctgtgggtgaatgtatcggccgcgggtcggtgggccgtcttgtatcatacagaagacaccagagatcagaaccagcagtgttcgtatattccagggagtgtggataactaccaaactgctcgggctgatgttgaaaaggtgcgcgccaaattccaggagcagcaggttttttattgctttagcgcccccagaggaaacgagacctcagttctgtttcagcgactctatggaccacaggctctgctcttcagcttattttggcctacgtttttgctgaccggcggactattaatcattgccatggtgaagtccaatcagtatctgtccattcttgccgcccagaaatag

SEQ ID NO: 129501 - DNA, 393 bp, synthetic construct
  misc_feature 1..393: note = Description of Artificial Sequence: Synthetic coding sequence
  source 1..393: mol_type = other DNA
atggtcaagaaactggtgatggcgcagaagagaggcgaaacaagagccttatgcctcggcgtgaccatggtcgtatgcgccgtgataacctattatatcctggtcacgacagtattgcctttgtatcagaaatccgtttggacccaggagagcaagtgccatttgatcgagaccaacatccgggaccaggaggagttgaaagggaaaaaggtgccccaatacccatgcctgtgggtcaacgtgagcgccgctgggcgctgggcagtgctctaccacacagaggacacacgagatcagaatcagcaagtgctgaattggcgtgacggggacacaagcttgtatccttgccaggtttgcgagccggtaccaaattgtccgtgcccgaggggctag

SEQ ID NO: 129502 - DNA, 633 bp, synthetic construct
  misc_feature 1..633: note = Description of Artificial Sequence: Synthetic coding sequence
  source 1..633: mol_type = other DNA
atggccaagcttcgcgtagcctacgaatacactgaggctgaagataaaagcataagactggggctctttctgattatttcaggtgttgtctcactgttcatttttggattctgttggctatcccctgctctccaggacctgcaggccactgaagccaactgtacagttttgagcgtccagcagatcggtgaggtgtttgaatgcacttttacgtgtggggccgactgccggggcactagccagtacccttgtgtgcaggtatatgtgaataacagtgaatccaactctagggctcttttacactctgacgaacatcaactgctgacaaatcctaaatgtagctatatccccccttgcaagcgagaaaaccagaagaatctcgagtcggtgatgaattggcagcaatactggaaggacgagatcggatcccagccttttacctgttactttaaccagcaccagcgacccgatgatgtgctgttgcaccgaacacacgacgaaatcgtgctgctacattgcttcctgtggccactcgtgacatttgttgttggagtgcttatagttgtgctgacaatctgtgctaagtcccttgctgtcaaggctgaagcaatgaaaaaacgcaaatttagctag

SEQ ID NO: 129503 - DNA, 2259 bp, synthetic construct
  misc_feature 1..2259: note = Description of Artificial Sequence: Synthetic coding sequence
  source 1..2259: mol_type = other DNA
atgaagcctgctgagcacgccacaatgttcctaatcgtgttgggatgcttaatcctcgcggtgttgactaccttcaaggagtatgaaaccgtgagcggcgactggctgctccttctcgaaacttttgccatcttcatctttggagcagaatttgctctgcggatttgggccgccggctgctgctgtcgctataaggggtggcgcggcaggctaaaatttgcccggaagcctctctgcatgttggacatctttgtccttatcgcttccgtgccagttgtagccgttgggaatcaaggcaacgtgctggctacctccctgcggagcctgaggttcctgcaaatccttcgcatgctccgtatggataggcgcggggggacctggaagttgctcggatccgcaatatgcgctcattccaaagagttgatcactgcttggtacataggcttcttgaccctgatcctctcaagtttcctcgtctacttggtcgagaaggacgtgcctgaagttgatgcccagggggaagaaatgaaagaggagttcgagacatacgctgatgccctgtggtggggtctgattactctggcaactatagggtatggagataaaacgccgaaaacctgggaagggcgtctgatcgccgcaacctttagtcttattggagttagcttttttgccctacccgccggtatactcggttctggactcgcgctgaaggtacaggaacaacatcggcagaagcacttcgagaagagaagaaagcccgctgcagagcttatacaggccgcttggcggtactacgccactaatcctaataggatcgacctcgtggccacatggagattttatgagagcgtggtgtccttcccgttcttccgaaaagagcagctcgaagccgcctccagccagaagctgggactcttagaccgtgtgcggctgtcaaatccgagaggctctaacacaaagggcaaactgttcacacctctcaatgtggacgccattgaggagtctccatccaaggaaccgaagcctgtgggcttgaataacaaggagcgcttccgcactgcatttcggatgaaggcttacgccttctggcaatcctccgaggatgccggcaccggggaccccatggcagaagacaggggttacggcaatgattttcctattgaagatatgatcccaaccctgaaagccgccattagagccgtgcgtattctgcagttccgattgtacaaaaagaagttcaaggaaacgcttcgaccgtatgacgtgaaagacgtcatcgagcagtattccgctggacatctggatatgttaagcagaattaaatacttgcagaccagaatcgacatgatttttacccctgggccccccagtacccctaagcataagaaatcccaaaaaggctctgcatttacatttccttcccagcagagccctaggaacgagccctatgtagcgaggccaagtaccagcgaaattgaggatcaaagcatgatgggcaaattcgtcaaggtagagcgacaggtgcaagacatggggaagaagctggattttctcgtagacatgcatatgcaacacatggagaggctgcaggtgcaggtgacagagtactaccccacaaagggcacctcaagtcccgcggaagcagagaaaaaagaagataaccgctactcagacctgaaaactattatctgcaactatagtgagaccggtccaccagagccaccctactctttccatcaagtcaccattgataaagtttccccgtacggattcttcgcccatgatcccgtcaacttgccaaggggggggccatcctcaggcaaagttcaagccacccctccctcctcagccacaacttatgtggaaaggcccacagtgctgcctattctgaccctcttagactccagggtcagctgccactcccaagccgatctccaggggccatacagcgacagaatttctccccgccaacgcaggtctattacccgcgacagtgacactcccctaagccttatgtcagtgaaccatgaagaactagagaggtccccatctggcttctcaatcagccaggacagggatgactacgtgttcgggccaaacgggggaagctcatggatgagagagaaaagatatttagcagagggtgagaccgacactgacaccgatccgtttactccttcgggtagcatgcccctatcaagcacaggagatggcatctctgattctgtctggaccccaagcaataaacccatctag

SEQ ID NO: 129504 - DNA, 1434 bp, synthetic construct
  misc_feature 1..1434: note = Description of Artificial Sequence: Synthetic coding sequence
  source 1..1434: mol_type = other DNA
atgacaggccagagtctgtgggatgtgtcagaagcaaatgtggaggacggtgaaatccggattaatgtgggagggttcaagcggcggctgaggtcccacaccctcctcagattccccgagacgcgcctgggaaggcttctgctctgccattcaagggaggccattctggaattatgcgacgattacgacgatgtccagagggaattctattttgacaggaatcctgagcttttcccatatgtactgcatttttaccacaccggaaagctgcacgtcatggcagagctctgtgtcttcagcttttcacaagagatcgagtactgggggatcaacgagttctttatcgattcttgttgttcctattcctatcatggtcgcaaggtcgaaccagagcaggaaaaatgggatgagcagagcgatcaggagagcacgacatcatcgtttgatgagatcttagctttttacaatgatgccagcaagttcgatggacagccactgggcaactttcgcagacagctatggctggctcttgataatccaggatatagcgtattaagccgggttttctccatcctgagtatactcgttgtgatgggatcaattattacaatgtgtctgaattctctgcccgacttccagatccccgactcacaaggtaatcccggagaagaccctaggtttgagatcgtggagcattttggtatcgcttggttcactttcgaactggtggcccgatttgccgtcgcgccagactttctcaagtttttcaaaaacgccctgaacctgatagacttgatgagcattgtccccttctatatcacattggttgtgaacttagttgtggaatctacgcctaccctggcgaatctgggacgtgtggcacaggtgctgcgtttgatgcgcatattccggatattgaaattggctagacactctactggccttcgaagccttggagctacgctgaaatactcctacaaggaggttgggctacttctgctgtacctgagcgttggaatctctattttcagcgtggttgcctataccatcgaaaaggaggagaatgaggggctagcaaccatcccggcttgctggtggtgggcaaccgtcagcatgactacagtcggatacggagacgtggtcccaggtacgactgccgggaaactcaccgcctcagcatgcatcctcgccggcatcctggtagtcgtgctcccaataaccttaattttcaataaattctctcacttctaccgacgccagaagcagttagaaagcgctatgcgctcttgtgatttcggggatggcatgaaggaagtcccaagtgttaatctcagagattactatgcccacaaagttaagagcttgatggcctcattaactaacatgagccggtcaagcccatcagagctgtcgcttaacgacagcctacgctag

SEQ ID NO: 129505 - DNA, 1434 bp, synthetic construct
  misc_feature 1..1434: note = Description of Artificial Sequence: Synthetic coding sequence
  source 1..1434: mol_type = other DNA
atgactggacagtccctgtgggacgtgagcgaagccaacgtggaggatggagaaataaggatcaacgtcggtggttttaagagacggcttagatctcacaccttgctcagattcccagagacccgtcttgggcgcctgctcctctgtcactccagagaagctatcctagagctctgtgacgattatgacgacgtccagagggaattttacttcgataggaatccggaattgtttccctacgtactgcatttctaccatacgggcaaactccatgtgatggcggagctgtgcgtgttttcattctcccaggagattgagtactggggaatcaacgagttctttatcgatagctgctgtagttattcgtaccacggcaggaaagtagaaccagaacaagagaagtgggatgaacaatctgaccaggaaagcacaacttcaagcttcgatgagattcttgcgttttacaacgacgcgtctaagtttgatggccagccgctgggtaacttccgacgacaactatggttggccttagataaccctgggtactccgttctcagtcgggtattttcaattctgtccatcttagtcgtcatgggtagcatcattacaatgtgcctaaacagcctgcccgactttcaaataccagactcacaaggcaatcccggggaagatcctaggtttgagattgttgaacactttgggatagcatggtttacttttgagctagtggcacgctttgcagtggccccagacttcttgaagttcttcaaaaatgctctgaacctcatcgatctcatgtctatcgtgcccttctatattaccctcgttgtaaacttagtcgtcgagtccactcctacactcgctaaccttgggcgggtagctcaggttctgcggttaatgaggatcttccgaattctgaaactggcacggcacagtaccgggctgcgtagcttgggggccacgcttaaatattcatataaggaggtgggcctgctgcttctctaccttagcgtgggtatctccatcttttcagtcgtagcatatactatcgagaaggaggaaaacgaaggtctggctacaatccctgcttgttggtggtgggcaactgtctccatgactacggtcggatacggtgacgtcgtgcctggaaccacagctgggaaactcaccgcgagtgcttgcattctcgcgggaattttggtggtcgtactcccaatcaccctgattttcaataagttcagtcacttctatagaaggcagaaacagctggaaagtgctatgagaagctgtgacttcggcgatggcatgaaggaggttccatccgtcaacctgcgggactactacgcccacaaggtgaagagtctcatggcaagtctgacgaatatgtctagatcaagtccatcggagctgtcactaaacgactccctgcgttag

SEQ ID NO: 129506 - DNA, 1476 bp, synthetic construct
  misc_feature 1..1476: note = Description of Artificial Sequence: Synthetic coding sequence
  source 1..1476: mol_type = other DNA
atggtgttcggagaattttttcatcggcctggacaagacgaggaactggtgaatctgaacgtcggcggtttcaagcagtcagttgaccagagcacattgctgcgttttccccatacacgcttgggcaagcttttaacgtgccacagtgaagaagcaatactggaactttgtgatgattactccgttgcggacaaggagtattattttgatcggaatccgtcattgttcaggtatgtgcttaatttctattataccggcaaactgcacgtgatggaggaattatgcgtgttctccttttgccaagagatcgagtactgggggattaatgaactgttcatcgatagttgctgttctaatcgttatcaggaaaggaaggaggagaatcatgagaaggattgggatcagaagagccacgacgtgtctactgactcttcatttgaggaaagttccttatttgagaaagaactcgagaaatttgacacacttcgctttggacagcttcgaaagaagatttggattagaatggaaaatcccgcctattgtctctctgccaaactgatcgctatttcgtccctcagcgttgtgctggcctcaatagtcgccatgtgcgtacactcaatgtccgagttccagaatgaggacggcgaggtcgacgaccccgttctggaaggggtggagatcgcctgtatcgcttggtttacaggggagctggccgtccggctggccgctgccccatgccagaagaaattctggaaaaaccccctgaacatcatcgactttgtgagtataatacccttttacgccacgctggccgtggacactaaggaggaggagagcgaggacatcgaaaatatggggaaagtagtgcaaattctacgcttgatgagaatctttcgtatcctgaagttagcccgccattctgtgggtctaagaagtctgggcgcaacccttcgtcattcatatcatgaagtcggccttcttctgctgtttctctcagttgggatttccattttcagcgtgcttatttattcggtcgagaaagacgatcacaccagctcattaacttctattcccatatgttggtggtgggcaaccatctccatgactacagtgggctacggtgacacccaccccgttactctggcaggtaagctgatcgcgagcacttgcatcatatgtggtattcttgtggtggctctgcccatcactataatctttaacaaattcagcaagtactaccagaagcagaaggacatcgatgtcgaccaatgcagcgaggacgccccggagaaatgccacgaactgccttactttaatatccgagatatctacgcccagagaatgcacacgttcatcacctctttgtcttccgtgggcattgtcgtgtccgatcctgattctaccgacgccagcagtattgaggataacgaagacatctgtaatactacttctctcgaaaactgcaccgccaagtag

SEQ ID NO: 129507 - DNA, 1476 bp, synthetic construct
  misc_feature 1..1476: note = Description of Artificial Sequence: Synthetic coding sequence
  source 1..1476: mol_type = other DNA
atggttttcggtgaatttttccatagacctggacaggacgaagagctggttaatttgaatgtaggtggcttcaagcagtctgtcgaccagtcgacacttctgcggttccctcatacaagattgggtaaactcctcacctgtcatagtgaggaggcaattctcgagctctgcgacgattattcggttgccgacaaggagtattactttgatcgcaatcctagccttttccggtacgtcctgaacttttattatactggcaagctgcacgtgatggaggagctatgtgtcttcagtttctgccaggaaatagagtactggggtattaatgaattgtttatcgattcctgctgctccaatagataccaggagcgcaaggaggaaaatcatgaaaaggattgggatcagaagtcccacgacgtgagcactgactcatcctttgaggagagcagcctatttgagaaagagctggagaagtttgatacactcagattcggtcagctacgaaagaagatatggattcggatggagaacccagcctactgcttatcagcaaaactcatcgcaatctcttctttatctgttgtgcttgcctccattgtggccatgtgcgtgcattctatgtcagaatttcagaacgaggacggggaggtggatgacccagtgctggagggagtggagattgcttgtattgcatggttcacaggagaactggcagtgagactcgccgcagccccgtgtcagaagaaattttggaagaacccccttaacattattgactttgtcagtatcattccattttatgctacactggcggtcgatacaaaggaagaagagtcagaagacattgagaatatggggaaagttgttcagattctgcgtctgatgcgcatctttaggatcctaaagctcgctagacactctgtcggtctccggagcctgggtgctaccctgagacactcttatcacgaggtggggcttcttctcctgttcttatccgtgggaatatcaatcttctccgtattgatatactccgtcgaaaaggatgaccataccagttcccttacctcgatcccaatttgctggtggtgggcaaccatctcaatgacgacagtcggatacggcgacactcacccagtcaccctagctgggaagttgatagcaagtacctgtattatttgtggcattttagttgttgctcttccaatcaccatcatttttaataaattctcgaagtattaccagaagcagaaagacattgatgtggatcagtgttcggaagacgctcccgagaagtgccacgagctcccctattttaatatccgtgatatctatgcgcagaggatgcacacctttatcacctccctgtccagtgtggggatcgtggtgtccgaccccgacagcaccgacgcttcttcaattgaagataatgaggatatttgcaatactacttctctggagaactgcaccgccaagtag

SEQ ID NO: 129508 - DNA, 225 bp, synthetic construct
  misc_feature 1..225: note = Description of Artificial Sequence: Synthetic coding sequence
  source 1..225: mol_type = other DNA
atggtctttggtgaattctttcatcgcccaggtcaggacgaagaactggtgaatctcaatgttgggggctttaagcagtctgtggatcagtcaacccttctccgctttccccacacccgacttggaaagctcttaacctgccacagtgaggaagccatacttgagctgtgcgatgattacagcgttgctgacaaggaatattatttcgatcgtaacccaagctag

SEQ ID NO: 129509 - DNA, 390 bp, synthetic construct
  misc_feature 1..390: note = Description of Artificial Sequence: Synthetic coding sequence
  source 1..390: mol_type = other DNA
atgatcttgagcaacaccaccgccgtgacccctttcctaactaagctgtggcaagagaccgtgcagcagggaggtaacatgtccgggttagcacggcgaagcccacggtccagcgatgggaaattggaagcactctatgtgttgatggtcttaggctttttcggcttctttacactcggcataatgctgtcatacatccggagcaagaagctggaacattcgaatgacccattcaatgtatatatagagtcggatgcctggcaggagaaagataaggcctatgtccaggcccgggtgctcgaatcatataggagttgttacgtggtcgagaatcacctggccattgagcagcccaatacacaccttccagaaactaaaccctccccatag

SEQ ID NO: 129510 - DNA, 390 bp, synthetic construct
  misc_feature 1..390: note = Description of Artificial Sequence: Synthetic coding sequence
  source 1..390: mol_type = other DNA
atgatcctatctaacaccaccgcggtgactccattcctcactaagctctggcaggagacagttcaacaaggcgggaatatgtcaggcttggctcggagatcacctaggtcctctgacgggaaactggaagccttgtacgtattgatggtgctagggtttttcggcttttttaccttaggcatcatgctcagctatatccgctccaagaagctcgagcactcgaacgatcctttcaacgtgtacatcgaaagcgatgcatggcaggagaaggataaagcatatgtgcaggcgcgcgtgctggagtcatataggagttgctacgtggtcgaaaatcacctggcaatcgaacagccaaacacccatcttcctgaaaccaagccaagtccgtag

SEQ ID NO: 129511 - DNA, 390 bp, synthetic construct
  misc_feature 1..390: note = Description of Artificial Sequence: Synthetic coding sequence
  source 1..390: mol_type = other DNA
atgattctgtctaatacgactgctgtaacaccatttctcaccaagctgtggcaggagaccgtgcagcaagggggcaatatgtcaggactcgcgcgaagaagtccccggagctcggatgggaagctggaagctctgtatgtcttgatggtgctggggtttttcggattttttactcttgggatcatgctgagttatatccgctccaaaaagctcgaacactcaaacgatcctttcaatgtgtatatcgaatcagatgcatggcaggagaaggataaggcgtacgtgcaagcacgcgtgctggagtcatatcggtcatgctacgtcgtggaaaaccacctcgccatcgaacagccaaatacccatctacctgagactaagccttccccgtag

SEQ ID NO: 129512 - DNA, 390 bp, synthetic construct
  misc_feature 1..390: note = Description of Artificial Sequence: Synthetic coding sequence
  source 1..390: mol_type = other DNA
atgattctttcaaacactacagccgtgacgccttttttgacaaagctgtggcaggagaccgtccagcaaggcggaaacatgagtggactggccaggaggtcaccgaggagttctgatggaaagctcgaagcattgtacgtactgatggtccttggattctttggcttttttactctggggatcatgctttcctatattagatccaaaaagctggaacacagcaatgatccattcaatgtgtacatcgagagcgacgcttggcaggagaaagataaagcctatgtccaggcacgagtgctagaaagttatcggtcatgctatgtggtcgaaaaccacctcgccatcgagcaaccgaatactcacctaccagagaccaagccctcaccatag

SEQ ID NO: 129513 - DNA, 390 bp, synthetic construct
  misc_feature 1..390: note = Description of Artificial Sequence: Synthetic coding sequence
  source 1..390: mol_type = other DNA
atgattctctctaatacaactgccgtgacacctttcctcacaaaattgtggcaagagacagtgcaacagggtggtaatatgtcgggcctagcacgccggagtcccaggtcgagcgatggtaaactggaagcgttgtacgttctgatggtccttggcttttttggcttttttactctgggtatcatgctatcctacattcggagcaagaagctggaacactctaacgaccctttcaacgtctacatcgagagcgatgcgtggcaggagaaagacaaggcatatgtccaggccagagtgctagaatcctaccggtcgtgttacgttgtcgagaaccatctcgccatcgagcagcccaacacccaccttcctgaaacaaagccatctccatag

SEQ ID NO: 129514 - DNA, 390 bp, synthetic construct
  misc_feature 1..390: note = Description of Artificial Sequence: Synthetic coding sequence
  source 1..390: mol_type = other DNA
atgatcctgtcgaataccactgccgttacgcctttccttaccaagctgtggcaagagactgtccagcaaggaggaaacatgtccggcctggcacggaggtccccgcgctccagtgacgggaaactggaagcactgtacgtgttgatggtgctcgggttcttcggcttcttcacactgggtattatgctgagctatattagatcaaaaaaactggagcacagtaatgaccccttcaacgtttacatcgaaagcgatgcgtggcaggagaaggacaaagcttacgtgcaggcaagagtgctcgaaagttacaggtcctgttacgtggtcgagaaccatctcgccattgagcagccaaacacacatctgccggagacgaaaccttcaccctag

SEQ ID NO: 129515 - DNA, 372 bp, synthetic construct
  misc_feature 1..372: note = Description of Artificial Sequence: Synthetic coding sequence
  source 1..372: mol_type = other DNA
atgtccactttgtccaatttcacgcagacactggaagatgtctttagaaggatctttataacatatatggataactggagacagaacactacagccgagcaagaggccctccaggcaaaggtggatgctgagaacttttactacgtgatattgtatctcatggtcatgatcggcatgttttcattcatcatcgtggccattttggtctctactgtaaagagtaaacgccgggagcatagcaacgatccttatcaccagtacatagtggaagattggcaagagaagtataaatcccaaattctgaatctggaggagtccaaagccaccattcatgagaacatcggtgctgccgggttcaagatgagtccttag

SEQ ID NO: 129516 - DNA, 312 bp, synthetic construct
  misc_feature 1..312: note = Description of Artificial Sequence: Synthetic coding sequence
  source 1..312: mol_type = other DNA
atggagacaactaatggcactgagacatggtatgagtctcttcacgcagtgctgaaggcgctcaacgccactttgcatagtaacctcttgtgccggcccgggccaggactaggccctgataatcaaacagaagaaagaagggccagtcttccaggccgtgatgacaacagctacatgtacattctcttcgtaatgttcttgtttgccgtgactgtgggttctctaatcctggggtataccagatcacgcaaggtggataagcgaagcgacccctaccatgtatacatcaagaacagagttagtatgatctag

SEQ ID NO: 129517 - DNA, 312 bp, synthetic construct
  misc_feature 1..312: note = Description of Artificial Sequence: Synthetic coding sequence
  source 1..312: mol_type = other DNA
atggaaaccacaaacggaactgagacttggtacgaatccctacacgctgtgctgaaggctctcaacgccactctccattctaatttactatgccggcccggccctggactcggacctgacaaccaaactgaggagagaagggcctccctgccaggccgagatgacaactcatatatgtatatcctctttgtgatgtttcttttcgccgtgacagttggatcgctgatccttgggtacacaagatctcgaaaggtggacaagcgctcagatccgtaccacgtgtacataaaaaacagggtgagcatgatctag

SEQ ID NO: 129518 - DNA, 39 bp, synthetic construct
  misc_feature 1..39: note = Description of Artificial Sequence: Synthetic coding sequence
  source 1..39: mol_type = other DNA
atggaaacaacaaacgggactgagacttggtacgaatag

SEQ ID NO: 129519 - DNA, 153 bp, synthetic construct
  misc_feature 1..153: note = Description of Artificial Sequence: Synthetic coding sequence
  source 1..153: mol_type = other DNA
atggaaaccaccaatggcacggaaacctggtacgaaagcttacatgcagtgctcaaagcactgaacgctacactccatagtaatctcctctgcagaccggggcccggactcggacctgataatcagacggaagaaaggcgggcatccctgtag

SEQ ID NO: 129520 - DNA, 162 bp, synthetic construct
  misc_feature 1..162: note = Description of Artificial Sequence: Synthetic coding sequence
  source 1..162: mol_type = other DNA
atggagaccaccaatggaactgaaacctggtatgagtcccttcatgccgtgcttaaagccctcaatgccacactacactctaacttgctctgccgtcccggcccaggtttgggacctgacaatcaaacagaggagagacgtgccagcctccctgggcgatag

SEQ ID NO: 129521 - DNA, 300 bp, synthetic construct
  misc_feature 1..300: note = Description of Artificial Sequence: Synthetic coding sequence
  source 1..300: mol_type = other DNA
atggagactactaatggcacagaaacgtggtacgagtccctgcacgccgtgctgaaggccctaaacgcgacactgcactctaacctgctgtgtcgacccggacctggtctggggccagataaccaaacggaagaacgacgcgcaagcctgcctggccgggacgacaacagctacatgtatatcctgttcgtgatgttccttttcgccgtcacagtggggtctctgattctggggtataccaggagccgaaaggtggacaagcggtctgacccgtatcatgtctatattaagaatagatag

SEQ ID NO: 129522 - DNA, 513 bp, synthetic construct
  misc_feature 1..513: note = Description of Artificial Sequence: Synthetic coding sequence
  source 1..513: mol_type = other DNA
atgctgaaaatggagcccctgaatagcacacacccagggaccgcagcaagcagctccccactggagtcaagggctgcagggggaggcagcgggaacggaaatgaatacttctatatcctggttgtgatgtccttttatgggatcttcctgatcggtatcatgttgggctatatgaagtcaaagcggagggaaaagaaatcatccctgctgctgctatacaaagatgaagagcgactgtggggtgaggctatgaagccacttccggttgttagtggactgaggtccgtgcaggtcccattgatgctgaatatgctacaggagagcgtggcccccgccctgagctgtacactctgcagtatggagggcgattctgttagctcagagtcgtcctctcctgatgtccacctcaccatacaggaggagggtgccgacgacgaactcgaagagaccagcgagaccccactgaacgaatcatcagagggctcaagtgagaacatccatcagaacagttag

SEQ ID NO: 129523 - DNA, 2031 bp, synthetic construct
  misc_feature 1..2031: note = Description of Artificial Sequence: Synthetic coding sequence
  source 1..2031: mol_type = other DNA
atggctgctgcttcatcaccaccccgggctgaaagaaagcgctgggggtggggacgcctcccgggggcaaggaggggctcagcaggcctggccaagaagtgcccctttagtctggagttagctgaaggggggcccgctggtggcgcactgtacgcacctatagcaccaggtgccccaggccccgccccccctgcgagtccagccgccccagccgcacccccagtcgccagcgacttgggtccccggccaccagtctcccttgatccccgggtctccatctatagtactaggagacccgttctcgctaggacacatgtacaaggacgtgtgtacaactttctggagaggcccacaggctggaaatgctttgtataccatttcgcagtcttcctaatagttctcgtctgcctcattttttccgtactcagcactattgagcagtacgctgctcttgccaccggcaccctgttttggatggagatcgtgctcgtggtcttctttggaaccgaatatgttgtcaggttatggtctgctgggtgtagatccaaatacgtcgggttatggggaaggttgcgctttgcacgcaaacccatcagcatcattgacttgatcgtggtggtagctagcatggtagtcctgtgcgtcgggagcaaggggcaggtgttcgcgacatccgccatacgggggattcgattcttgcagatactgcggatgctacatgtggatcggcagggcggcacctggagacttctggggtcagtggtattcattcacaggcaggaattgattacgacactctacattgggtttttaggcctgattttttccagttactttgtgtaccttgccgagaaggacgccgtgaacgagagcgggagagtggagtttggatcttacgccgatgccctctggtggggcgtggtgaccgtcaccaccattggttatggggacaaggtgccgcaaacatgggtgggaaaaactatcgcttcttgcttctccgtttttgccatttctttcttcgcactgcctgctggtattctggggtcaggtttcgccctgaaggtgcagcagaagcagcggcagaagcacttcaaccggcaaatacccgctgccgcctccctgatccagaccgcatggcggtgttatgccgcggagaatcccgactctagcacatggaaaatctacataagaaaagctcctcggtcccacacactcctgagcccttcacccaagcctaaaaaaagtgttgtggtgaagaaaaaaaaatttaaactcgacaaagacaacggggtaacgccaggggagaaaatgttgaccgtaccccacattacctgtgatcccccagaggaaaggcgcctggaccatttctcagtggacggctacgactcctcagtcagaaagagtcctacgctgctggaagtgtccatgccgcacttcatgcgaaccaatagctttgccgaggatctggatttggaaggcgaaactctcttgacccccattacgcacatctctcagctgcgtgagcatcatcgagcgaccattaaagttatccgccgcatgcagtacttcgtggccaaaaaaaagttccagcaagcacggaagccttacgacgtccgggatgtcatagaacaatatagtcagggacacctgaatcttatggtgagaataaaggagctacaacggaggttggatcagtccatcggaaagccctctttatttatttccgtctctgaaaaatcaaaggatcgaggtagcaatactataggtgcgagactcaatcgggtggaggataaagtgactcagctggatcagcgtctcgctctgataacagatatgctccatcagttgctcagcctgcacggaggatccacccccggatcgggaggtccacctagggagggcggagcacacatcacacagccctgtggatctgggggctctgtggacccagagctcttcctgccttccaacacactgcctacctatgagcagctcacagttccccgccgtggtccagatgagggcagctag

SEQ ID NO: 129524 - DNA, 1650 bp, synthetic construct
  misc_feature 1..1650: note = Description of Artificial Sequence: Synthetic coding sequence
  source 1..1650: mol_type = other DNA
atggactttctcattgtcttggtgtgcctgatcttctcggtactgtcgaccattgagcagtatgcagccttggccacaggaactttattttggatggagatcgtgctagtcgtcttctttggcactgagtacgtcgtgcgtctatggtctgcgggctgccgatcaaaatacgtgggcctctggggacggcttcgttttgcccgaaagccaatttcgattattgacttgatcgtggttgtagcaagcatggtcgttctgtgcgtgggcagtaaagggcaggtgtttgcaacttctgccattagggggataagattcctccagatattaagaatgcttcatgtggaccgtcaaggcgggacctggcgactactgggctcagtggtctttattcatcggcaagaactgatcaccacgttgtacataggcttcctcgggctcatctttagtagttactttgtgtacctggccgagaaggacgcagtgaatgagtcaggaagagtggaatttggatcatacgctgatgcgttgtggtggggcgtcgtgactgtgaccaccattgggtacggagataaggtgccccaaacatgggtgggcaaaactatcgcctcttgtttttcggtgtttgctatatcattcttcgccctccctgcgggaatactcggatctggctttgccctaaaagtgcagcagaaacagaggcagaagcacttcaacagacagatacccgctgccgcttccctgatacagaccgcctggcgatgttacgctgctgaaaacccagactcttcaacatggaagatttacattaggaaggcacctcgatcacacacgttgctgtccccctcacctaagcctaaaaaaagtgtggtagtgaagaaaaaaaaatttaagctggacaaggacaacggcgttactccaggggagaagatgcttacggtgccacacataacatgtgaccctcctgaagaacgccgactggaccacttcagcgtggacggctatgattcctctgtgaggaagtcacctacacttttggaggtgagcatgccacatttcatgcggaccaactccttcgcagaggacctcgatctcgagggggaaaccctgctgaccccgattacgcacatcagccagttgcgggagcatcaccgggccaccattaaggtgattagaagaatgcagtactttgtcgccaaaaaaaagtttcagcaagcacgaaaaccatacgatgttagggacgtgattgaacagtattctcagggacatctcaacctgatggttaggataaaggaacttcagcggaggctagaccagtcgatcgggaagccatctctgttcattagcgtgtccgagaaaagtaaggatagaggctccaacaccatcggcgccagactcaatcgagtggaagacaaagtgactcagctcgatcagaggctggcactgatcacagatatgctgcaccagctgctgtccttgcacggcgggtcaactccgggatccggaggcccaccgcgcgaagggggcgctcacattacccagccctgtgggtccggtggttcggtggaccctgagctttttctgccatcaaacaccctgcccacgtatgaacagctgacagtccccaggcgaggaccagacgagggctcttag

SEQ ID NO: 129525 - DNA, 1182 bp, synthetic construct
  misc_feature 1..1182: note = Description of Artificial Sequence: Synthetic coding sequence
  source 1..1182: mol_type = other DNA
atggtccaaaaatccaggaatggtggtgtataccctggcccatcaggggaaaaaaagctaaaagtgggatttgtggggcttgatccgggcgcacccgatagcacaagagatggcgctctgctcattgccggctctgaagcccccaagaggggctctatactgtccaagccaagggcaggaggtgccggtgcagggaagccacccaagcgcaatgccttctacaggaagctacagaactttctgtataacgttctagaacgacctagggggtgggcatttatctaccacgcctacgttttcctcctggtcttctcatgccttgtgctcagcgtattcagcacgataaaggaatacgagaaatccagcgagggtgcgctgtacatcctggagatagtgaccatcgttgtgttcggggttgaatactttgtaaggatttgggcagccggctgctgctgtcgttaccgcgggtggcggggcaggctgaaattcgcacgcaaacccttctgcgtgatcgatatcatggttttaattgctagcattgcagttcttgccgccggaagccagggcaatgtgtttgccacctcagctcttagatcactccgctttctgcagattctccgaatgatacgcatggatcgacggggtggtacctggaagctgctagggtctgtggtgtacgcacacagcaaagagttagtgaccgcttggtacatcgggttcctttgcttgatactcgccagtttcctggtctacttagccgagaagggcgaaaatgatcacttcgacacgtatgccgacgcactttggtggggtctaataaccctgactacgattggctacggtgacaagtatccacagacatggaacggtagattattggccgccaccttcaccctcattggagtaagtttttttgccttacccgcgggtattctcggctccgggttcgccctgaaggttcaggaacaacacagacagaagcacttcgaaaaaaggcgaaatcctgccgcgggacttatccaaagtgcttggaggttctacgcgacaaacctgtctcgaacagacctgcactccacctggcagtattatgaacggaccgtcactgtgcccatgtacagataccgtagaagagctccagccactaaacagcttttccattttctgttctccatctgttcgtag

SEQ ID NO: 129526 - DNA, 2607 bp, synthetic construct
  misc_feature 1..2607: note = Description of Artificial Sequence: Synthetic coding sequence
  source 1..2607: mol_type = other DNA
atggtgcaaaagagtagaaacgggggggtttacccggggcctagtggtgagaagaaactgaaagtgggctttgtcggacttgatcccggcgcccctgatagtactcgcgatggtgccctactcattgctgggtcagaggctccgaagaggggcagcattcttagtaagcccagggccggcggcgccggcgctggaaagccacctaaaaggaatgccttctatcggaagttgcaaaactttctttacaacgtcctggagcgccccagaggttgggcatttatttatcatgcctacgtgtttctgctcgtgttcagctgcctggtgctttccgtgttctctactattaaagaatatgaaaaatcgagcgagggggctctctacatcctcgaaatcgtgaccatcgtggtgtttggcgtcgaatacttcgtcagaatttgggccgccggttgttgctgccgatatagagggtggcgaggtcggctgaaattcgcccggaagccattctgtgttattgacattatggtattaattgcctcaattgcagtgttggccgcaggttcacagggcaatgtctttgcaacttccgctctcagatcactgcggttcttacaaattctacggatgattcgcatggaccgaagaggtggcacctggaaactgctcgggagcgtcgtgtacgcacacagtaaggaactggtgaccgcttggtacattgggttcctttgcttgattctggccagctttctcgtttaccttgctgaaaaaggcgaaaatgatcactttgatacttatgcagacgctctttggtggggtctgattacactgacgacaatcggttatggcgataagtatccgcagacatggaacggtcggctgctggcagctacctttaccctcatcggcgtatccttttttgccctgccagccggcatccttgggagcggattcgccctgaaagttcaagagcagcacaggcaaaaacacttcgagaagcgccgtaaccccgcagctgggctcattcagagtgcatggcggttttacgccacaaacttatcccgtacagatctgcacagcacgtggcaatactatgaaagaacagtcacagtgcccatgtatcgattgatccctcctttgaaccagctcgagctgctgcggaacctgaagtcaaaaagcggtctggcctttcgaaaagatccccctcctgagccgtcgccttcaccccgaggagtcgccgcaaagggcaagggcagcccacaggcccaaaccgttcggcggagcccttccgccgatcagtccctggaggactccccctccaaggtgccaaagtcatggagtttcggggacagatcaagagcccggcaggcctttcgcatcaagggggccgcctcccggcaaaattctgaggaagccagtctgcctggggaagatatcgtcgatgacaagtcctgcccttgtgagtttgtgaccgaagacctcacacccgggttgaaagtgtcaatccgcgcggtctgcgtgatgcgcttcctggtgtccaagagaaagttcaaagaatctctacgaccatatgacgtgatggacgtgatcgagcagtacagcgccggccacctggacatgctgagcagaatcaagtctttacagagcaggattgatatgattgtaggtcccccccctccttctactcctcggcacaagaaatatcctacaaaggggccaactgctcctcctagagaaagccctcagtacagtcccagggtagatcagatcgttggcaggggtcccgccatcactgataaagatcgaacaaaagggcccgccgaggccgaactgccagaagatccatctatgatggggagactaggaaaagtggagaagcaggttctgtccatggaaaaaaaactcgactttctggtgaacatttatatgcagcgaatggggataccacccacggagaccgaggcctacttcggcgccaaggagccagagccagctcctccctaccactcgcctgaggatagcagggagcatgttgatagacatgggtgcattgtcaaaattgttcgcagttccagctccacagggcagaaaaacttttcagctccccctgccgcccccccggttcaatgtccaccgtccacaagctggcagcctcaaagtcaccctagacaaggtcatggcacctctcctgttggagaccacggttccctggtcagaatcccccctccccccgcacacgaacgcagtctgtcagcatatggaggcgggaatagggctagtatggagttcctgagacaggaggatactccagggtgccgccctcctgaagggaatctccgtgactctgacacatcaatttctattccctccgttgatcatgaggagctggagcggagtttctccggtttctccatctctcagtccaaggagaatttggacgcactgaactcctgttatgctgccgtggccccatgcgcgaaagtgaggccttacatcgcagaaggcgagagcgataccgactccgatctgtgcactccgtgtggaccacctcctaggagcgccacaggcgaaggtccttttggggatgtcggctgggcaggccctcgtaaatag

SEQ ID NO: 129527 - DNA, 2643 bp, synthetic construct
  misc_feature 1..2643: note = Description of Artificial Sequence: Synthetic coding sequence
  source 1..2643: mol_type = other DNA
atggtccagaagtcacgcaacgggggagtctacccaggcccttcaggagaaaagaaattaaaagtggggttcgtgggtctggatcccggggctccggattccaccagagacggagctctgctgatcgccggaagcgaagcaccaaagagagggtcaattctcagcaagcctagggccggcggcgcaggcgctgggaagccaccaaaaagaaatgccttttatagaaaactgcagaacttcctatacaacgtcctcgagcgaccccgcggatgggcctttatttaccatgcctacgtgtttcttctggttttcagctgccttgtactcagtgtgttcagcaccatcaaggagtacgagaaatctagcgaaggcgccctgtatattctggagatagttacgattgtagtctttggagtcgagtactttgtgaggatctgggccgctggctgttgttgtcggtatagaggctggcggggccgtttgaagtttgctcgcaagccattctgcgtcatagacatcatggtccttatcgcaagcatagccgtcttggccgccggtagccagggtaatgtatttgccaccagtgccctacgatccctgagattcctgcagattcttcgcatgatccggatggatcgaaggggagggacatggaagcttttaggctccgtggtctacgcccacagcaaggagctggtgactgcttggtatataggcttcctgtgtttgatactagcgtcctttttggtgtatctggccgagaaaggagaaaatgatcatttcgatacctatgccgatgcactttggtggggactgatcacactgacaacgatcggatatggcgacaaatacccacagacctggaatggcaggcttcttgcagctacttttacattgataggcgtaagctttttcgcccttcccgctgggatactgggaagtgggttcgcccttaaggtgcaggaacagcaccgccagaagcattttgaaaagcggagaaaccctgctgccggacttatccagagcgcatggagattctacgcaactaacctgtccaggactgacttacattctacctggcaatactatgagagaacagttactgtgccaatgtatcgcctcatcccccccctcaaccaactagaactgttacgcaatcttaagtccaagtccggattagcgtttaggaaggatcctccaccagagccttctcccagccagaaagtgtcacttaaggaccgtgttttttcctctcccagaggggtggcagccaaggggaaaggatccccacaggcacagaccgtgcggagatctccaagcgccgaccagtcacttgaggacagccccagtaaggtccccaagtcttggagtttcggtgatagatcgcgggcccgccaagcatttagaatcaagggtgctgcttccaggcagaatagcgaagaagccagcctgcccggagaggatattgttgacgataagagctgtccctgtgaattcgtcaccgaagaccttacccccggcctgaaggtctcaataagggccgtgtgtgtcatgaggttcctggtctcaaagcgaaagttcaaggaatcactcagaccatacgacgtgatggatgttattgagcaatattcggctggccatctggacatgttgtctcggattaagtcattgcagacaggaatagatatgatcgtcggaccgccgccacccagcaccccgaggcacaagaaataccccaccaagggaccaacagctcctccccgcgaatctccacagtatagtccgcgggttgaccagattgttggaagaggacctgcaattaccgataaggataggactaaagggccagcggaggcggaactaccggaagatccctcgatgatggggagactgggaaaggttgaaaagcaggtgcttagtatggagaaaaagctggatttcttggtaaacatatacatgcagcggatgggaatcccacctacggagactgaagcctacttcggagcgaaggaaccagagcccgcccccccatatcatagcccggaggacagtcgagagcatgtggatagacacggctgcatagttaaaattgttcgctcctcgagcagcaccggacagaagaattttagcgcgccccctgccgcccccccagtccagtgccctccctccacatcctggcagcctcagtcccatccacgccagggccacggcacttctccagtcggcgatcacgggtccttggtgcgaattccccctccccctgcccacgagcgatcccttagcgcctacggcggggggaatagagcctccatggaatttctgcgtcaggaggatacgcccggatgtaggccgcccgaaggcaatctacgagacagcgacacctcaatttcgattcccagcgtagaccacgaggagctcgagcgatctttcagcggctttagcattagtcagtctaaagaaaacctggatgccttgaattcttgctatgccgcggtggcgccatgcgctaaggtgaggccatatattgcagagggcgagagcgataccgattccgatttatgtacaccctgcggccccccgccacgaagcgcaactggggaaggcccttttggggatgtggggtgggcgggacccagaaagtag

SEQ ID NO: 129528 - DNA, 2565 bp, synthetic construct
  misc_feature 1..2565: note = Description of Artificial Sequence: Synthetic coding sequence
  source 1..2565: mol_type = other DNA
atggttcagaagagccggaatggtggggtgtatccaggtccatccggagagaagaaactaaaagtgggatttgtgggattggatcctggcgctccagatagcactcgggatggcgcgttgctgatcgccggctcagaagcccctaaacgggggtcgattctgagcaaacctagagccggcggtgctggcgcaggtaaacctccgaagcgaaacgccttctatcgcaaactgcagaatttcttatacaacgtgctagagagaccccgcggatgggctttcatctatcatgcctatgtgttcctgctggtcttttcttgtctggttctaagcgttttctcgaccattaaggagtatgagaaatccagtgaaggtgccctgtacatcctggagatcgtgaccatcgtcgtgttcggggtcgagtacttcgtcaggatctgggccgccggatgctgttgtaggtaccgaggatggcgggggcggctgaagtttgcccgtaagcccttttgcgtgatcgacatcatggtcctgatagcatccatcgctgtgttagctgccggaagtcaaggcaacgtgtttgctacctctgctttgcggtccctccgattccttcagattttgagaatgatccgcatggaccgcaggggaggcacatggaaactcctcggcagcgtagtctacgcacactccaaggagctggtcacagcatggtacattggcttcctctgtttgatcctggcgtcgtttctggtgtacttggccgagaaaggcgagaatgaccacttcgacacctatgcagacgcactgtggtggggtttaatcaccttgaccactatcggatatggggacaaatacccacagacttggaacggacgcttattggcagctacgtttaccctgatcggagtgtctttttttgccctgcccgccgggatactgggctccggttttgcattgaaggtgcaagagcaacatagacagaaacactttgaaaaacgcaggaatcctgctgcaggattgatccagtctgcgtggcgcttttatgctaccaatcttagccgaacagacctgcacagtacttggcagtattatgagcgcaccgtcacagtcccaatgtactcgtcccagacacagacctacggggcaagcagacttatcccgcccctgaatcagctggaactcctaaggaacctcaaaagtaagtccgggctcgcctttagaaaagaccctccgccggaaccttctccttcccagaaagtcagtcttaaagatcgagtttttagcagccctaggggtgtggccgccaaagggaagggatctccccaagcacagactgtcagacgatccccatctgctgatcagtctctggaagatagtccaagcaaggtgcctaagtcatggtcctttggcgaccggagtagagctcggcaagcctttaggatcaaaggtgctgcgtctaggcagaattctgaggaagcctctctgcctggagaagacattgtggatgataaaagttgtccttgtgaatttgttacagaggacctcaccccaggcttgaaggtgagcataagggctgtttgtgtcatgaggtttctggtgtctaagagaaaatttaaggagtctctacgtccttacgacgtcatggatgtgattgagcagtactctgctggccatctagacatgctgtctagaattaagagtctgcaatcccgcgtggatcagattgtgggacgcggcccagctattactgacaaagataggaccaaaggacccgctgaagctgagcttcccgaggacccaagcatgatggggagactcgggaaagtcgaaaagcaggtgctttcaatggagaaaaaactcgactttcttgtcaatatctacatgcaacggatgggaatccccccgacggagactgaagcgtatttcggggccaaagaacccgaacctgccccaccgtaccattctcctgaagattcccgcgaacatgtggacagacacggctgtatagtaaagatcgttagaagtagcagtagcacagggcaaaaaaacttctccgcaccaccagccgcaccccccgtgcaatgccctccctccacaagctggcaacctcagtcacacccacggcaaggacatgggacaagcccagtcggtgaccacgggagcctggtgcgcatccctcccccccccgcacacgagaggtctctctcagcgtacggcggcggaaaccgcgcgagcatggagttcctccgccaggaagacactcctggctgtcgcccacctgaaggtaatctgcgcgactccgacacatcgatttcaatcccctccgtcgaccatgaagagttggagcggagcttttcaggtttttccatttcccagtccaaggagaatctggacgctcttaactcctgttatgctgccgttgccccctgcgccaaggtgcggccatacatagctgaaggcgaaagtgacactgacagcgacctgtgcactccatgtggacccccaccgcgcagcgctactggcgaaggaccttttggcgacgtggggtgggccggcccccgcaagtag

SEQ ID NO: 129529 - DNA, 2619 bp, synthetic construct
  misc_feature 1..2619: note = Description of Artificial Sequence: Synthetic coding sequence
  source 1..2619: mol_type = other DNA
atggtgcaaaaatcccggaacggcggggtgtatccgggaccatcaggggaaaaaaaattgaaggtgggatttgtggggctggaccctggagctcccgatagcactcgcgacggagccctgctcattgcggggtccgaggcccctaaaaggggctccatactcagcaaaccgagagctggcggagctggtgcaggcaagccgcctaagaggaacgccttctacagaaaactccagaatttcctatacaatgtgctggagcggccacgggggtgggcgttcatttaccatgcctacgtgttcctgctggttttttcctgtcttgtactatctgtgtttagcaccattaaagagtatgagaagtcgagtgagggtgcactatatattttagaaattgtcaccatagtggttttcggcgtagaatacttcgtcaggatttgggccgcagggtgttgctgcagatatcgaggctggcgaggacgcctaaagttcgccaggaaacccttctgtgttattgatattatggtgctcatcgcatcaatcgcagtgctggccgcaggaagccaggggaacgtgtttgccacaagtgcactgagaagtctccgattcctgcagatcctccggatgattcggatggatcgacggggcggcacctggaagcttctgggaagtgtggtgtacgcacactccaaagaactggtcacagcctggtatatcggatttctgtgtctcatattggcctccttccttgtttatctggctgaaaagggagagaatgatcattttgatacttatgctgacgcgctgtggtggggtctcattactttaactactattggttatggggacaaatatccgcagacatggaacggccgactgttagctgccacttttacgttaattggagtcagcttttttgctctgcccgccggcatactgggctccggattcgctctgaaggtgcaagagcagcacaggcagaagcactttgagaagaggcgaaatcctgccgcagggctgatccagtctgcctggaggttttatgcgactaacctcagcaggacagacctacactccacatggcagtattatgagaggacagtgacagtccctatgtacagttcccagactcaaacttatggggcttcaaggctaatccccccccttaaccagctcgaacttctacgcaatctaaagtccaaaagcggactggccttccgtaaagatccccctcctgagccatcaccctctaaaggatcaccatgccgcggaccattatgcggctgctgcccaggtcggtcttcccaaaaagtgagcttgaaggatcgggttttcagttcgcctcgtggcgtggcagccaaaggaaagggatccccacaggcgcagaccgtccgcagaagcccatctgctgaccagtcactggaggatagcccatccaaagtccccaagagctggtccttcggagatcgcagtcgagcaaggcaagcttttcgaatcaagggtgccgcctctcgtcagaacagcgaagaggcctctctcccaggcgaggatattgtcgatgataaaagctgcccgtgtgagtttgttaccgaagatctgacaccagggcttaaagtcagcatcagggccgtgtgcgtcatgcgtttcctggtctcgaagcgtaaattcaaggagtctctccgaccatatgatgtgatggacgtcattgagcagtacagtgccggccacctggatatgctgtctcggatcaagtccttgcagtcccgcgtggatcagattgtgggaagaggccccgcaataaccgacaaggatagaaccaaaggacccgccgaagctgagctgcctgaagacccatcaatgatgggccgactaggcaaagtggagaaacaggtcctgtccatggagaagaagctggacttcctggtgaatatctacatgcagcgcatggggattcccccaactgaaacggaggcatacttcggggctaaggaacctgagcctgcacccccttatcactccccagaggattctcgtgaacatgtggatcggcacggatgcattgttaagatcgttcggtcttctagtagtactggacagaagaattttagcgccccccctgccgcgccaccggttcaatgtcctccctctacctcttggcagcctcagagccacccaaggcagggccatggaacaagcccagtgggcgaccatggcagccttgtgcgtatccctccaccgccagcccatgaacggtcactatcggcttatggcggcggaaaccgggcgagtatggaattcctcagacaggaggacacgccaggctgcaggcctcctgagggaaacctgcgcgactccgacacctccatcagcatcccgtctgtagaccatgaagagctcgagagatcattttccggcttttctatttcacagagtaaggagaatctcgacgcgcttaactcctgttatgctgcagtggctccatgcgcaaaagtccggccatatatcgcagagggtgaatctgatactgactctgatctgtgcaccccatgtgggcctcctccccgcagcgcaactggagaagggcccttcggtgatgtaggctgggcaggccctcgcaagtag

SEQ ID NO: 129530 - DNA, 2619 bp, synthetic construct
  misc_feature 1..2619: note = Description of Artificial Sequence: Synthetic coding sequence
  source 1..2619: mol_type = other DNA
atggtccaaaagagcagaaacggaggggtctatccaggcccgtccggcgaaaagaaacttaaggtaggctttgtggggctagatccaggtgcgccggactccacgcgagacggcgctctactgatagccggaagcgaggcccccaagaggggatccattctgtccaagccgcgcgctggcggcgccggcgccggcaagccaccaaaacgcaacgctttctatcgaaagctgcagaattttctgtataatgtccttgaacgaccccgaggatgggccttcatctaccacgcctacgttttcctgctcgtgttttcctgtctggtactgtcagtgttttcaactatcaaagagtatgaaaaaagcagcgaaggggccctttatatcctcgagattgttactattgtggttttcggcgttgagtactttgtgcgcatttgggcggctgggtgttgttgcagatacagaggatggcggggcaggcttaaatttgcgagaaaacccttctgcgtgatagacattatggtgttgattgccagcatagcagttctcgcagctggaagccaaggaaatgtttttgcaactagcgccctgcggtcactccgatttctgcagatcctaaggatgatccggatggatagacgtggcggcacctggaaactgcttggatcagtggtctacgcacattctaaggaattggttacggcgtggtacatcggttttctgtgcctcatcctggcctccttcctagtgtacctggcggagaaaggggaaaacgaccactttgatacatatgccgacgcgctgtggtgggggctgattaccctgactaccattggctatggcgacaagtacccccagacctggaacgggagactgctcgcagctacctttaccctgataggggtgtcattcttcgccttacctgctgggatccttggctctgggtttgctctcaaggtgcaggagcaacatagacagaagcatttcgagaagcgcagaaatcctgcagctggactgatccagagtgcatggagattttatgctacaaacttgtcccggacggatctgcattctacatggcaatattatgaaagaactgtcactgtacccatgtactcttcccaaacacagacatacggtgcctcacgactgatcccaccactgaatcagttagagctgctaagaaacttaaaatccaaatccggcctggcatttcgaaaggaccccccacccgaaccctctccctcaaaaggaagtccatgcagaggcccactgtgcggttgctgccctggtagatcctcccaaaaagtgagtttgaaagatcgcgtgttcagttcaccgagaggagtagccgctaagggcaagggctcaccgcaggcacagacagtacggcggtcaccaagtgccgaccaatctctggaggactcccccagcaaagtgcccaaatcctggagctttggagatcggtctcgggctcgtcaagcattccgtatcaagggtgcggcatcacggcagaactcagaggaggccagtcttcccggagaagacatcgtggacgacaagagctgtccctgcgagttcgttacggaggatctgacacctggcctgaaggttagcattcgggccgtgtgcgttatgcgattcctggtgtctaaaaggaagttcaaagaaagccttagaccatacgacgtcatggatgtcattgagcagtacagtgctggccatctggatatgctgtctaggatcaagtctctccagtctcaggtagaccagattgtggggcgtggacccgccatcacagacaaagataggaccaagggtcccgccgaagctgaacttcctgaggacccttcaatgatgggcaggctcggcaaggtcgaaaagcaggtactctctatggaaaaaaaactggatttcttagtcaatatctacatgcagcggatggggataccacctactgagacagaagcctatttcggtgcaaaggaacctgagccagcaccaccctaccacagcccagaagactccagagagcacgttgataggcacggctgtatcgtcaaaattgtgcggtcaagctcgagtaccggacagaagaatttttccgctccacccgccgcccctccagtgcagtgccccccctctacatcatggcaaccacagtctcaccctaggcagggtcatggtacttctccagtcggagatcacggtagtctggtgcggatcccgccaccgccagctcacgagagaagtctttctgcttatggaggaggcaacagggcgagcatggagtttctcagacaagaggatacaccaggctgcaggccccccgagggaaacctcagagacagcgacacctcgataagcattccctctgtggaccacgaggagctggagcgcagcttctcaggctttagcatctcccaatctaaggaaaatctcgatgctttgaacagttgttacgctgccgtagcaccttgcgcaaaggtgcggccgtatattgctgaaggtgagtcagacaccgattcggatctttgcaccccatgcggccctccacccaggtccgctaccggcgaaggtccattcggcgacgtcggctgggctggaccgcgaaagtag

SEQ ID NO: 129531 - DNA, 2535 bp, synthetic construct
  misc_feature 1..2535: note = Description of Artificial Sequence: Synthetic coding sequence
  source 1..2535: mol_type = other DNA
atggtccaaaagagtagaaatggaggcgtatatccaggcccatctggggaaaagaagctgaaggtcggcttcgtggggcttgatcctggggctcccgattccacccgggacggcgcactgctcatcgccggctccgaagcaccaaagcgggggagcatcttgtccaagcctagggctggcggggccggcgcggggaagccaccaaaaagaaacgctttttacagaaaacttcagaactttctttataatgtgttggaaagacctcgaggttgggcctttatctaccatgcctacgtgtttctactcgttttttcttgcctcgtgctcagtgtcttcagtactatcaaggagtatgaaaagagtagtgaaggtgcgctctacatcctggaaatcgtcactatcgtcgtgtttggtgtggagtattttgtcaggatctgggccgcgggatgctgctgtaggtacagaggttggagaggacgcctgaaattcgcacggaaaccgttctgcgtgatagacataatggtgcttatcgcatccattgcggtgcttgccgccgggagccagggaaacgtgttcgccacgtctgcactgcggtccctcagatttctgcagattttacgcatgattcgcatggataggaggggcggcacttggaaactcctgggcagcgtggtatacgcgcatagcaaggaactggttacagcttggtacatagggtttctgtgcttgattctggcttcattcctcgtctatttagcagagaagggagagaatgaccatttcgacacttacgccgacgccctgtggtgggggttaatcacgctcacaactattggctacggtgataaataccctcaaacctggaacggacgcttgctggctgccaccttcacccttattggcgtctcgtttttcgccctgcccgccggaattctgggcagtggattcgccctgaaagtgcaggagcagcatcggcagaagcacttcgagaaaagacgtaaccctgctgccgggttaattcaaagcgcctggcgcttctatgcgaccaatctgagtagaaccgatctgcattcgacttggcagtactacgagcgcaccgtcactgtcccgatgtatagattaattcccccattgaaccagttagaactgctgcgaaatctgaagtcaaaaagcggcctggctttccggaaggatcctccaccagagccttcacctagtcagaaggtgtcacttaaggatcgagtgttttcatccccccgtggcgtggcagctaaaggcaaggggtccccccaggcccagactgtccgacgcagtccaagcgccgaccagagcctggaggatagtccaagtaaggtccccaaatcttggagctttggggatcgtagcagagctaggcaggctttcagaatcaaaggggctgcttcgagacaaaactctgaagaggcctccttgccaggagaagacatagtagacgacaaatcctgtccctgcgaattcgtgacggaagatttaaccccaggccttaaagtgtccatcagagcagtatgcgtcatgcggtttctggtcagcaagcgtaagtttaaagaaagtctgcggccatacgacgtgatggatgtgatcgagcagtattctgctggccatttggatatgctctccagaatcaagagtcttcagtcgcgcgtcgaccaaatcgtcgggagaggacccgccattactgataaggacaggacaaaggggcctgccgaggccgagttaccagaggaccctagcatgatgggccgcctggggaaggtagaaaagcaagttctgtccatggagaagaaactcgactttttggtcaatatttatatgcagaggatgggtatcccgccaactgagactgaggcatatttcggtgcaaaagaaccagaacccgcccccccttaccactcgccagaagattcccgcgagcatgtggatcgtcatggctgcatagttaaaatagtgcggagcagtagttccaccggccagaaaaatttttcagccccccctgccgccccacctgttcagtgcccaccaagcacttcctggcagccacagagccatcccaggcagggccatggaacaagtcctgtcggcgaccacggtagcctcgtgagaattccacctcctcctgcccacgagcgatcactcagtgcatatggcggcggtaacagagcgtccatggaatttctccggcaggaagatacgccaggctgccgccctccagaagggaacctaagggactcagatacctctatcagtataccttcagtagaccatgaagaacttgaaaggtcattttcggggttctcgatcagccagagcaaggaaaatttggacgctctgaactcctgctatgcggcggtcgccccctgcgctaaggtaagaccctacattgccgaaggggagagcgacacggacagcgacctgtgtacaccatgtggcccaccccccagatcggccaccggcgagggcccattcggagatgtgggctgggccggcccccgcaaatag

SEQ ID NO: 129532 - DNA, 1311 bp, synthetic construct
  misc_feature 1..1311: note = Description of Artificial Sequence: Synthetic coding sequence
  source 1..1311: mol_type = other DNA
atggtccagaagagccgcaacgggggggtctacccaggcccttccggagaaaaaaagctcaaagtgggattcgtcgggctggatccaggtgctccagattctactcgtgacggggcgttattgattgccggctcggaagctccgaagaggggctccattctgtcgaaaccgagagctggtggcgccggagcaggcaagccccccaagaggaacgccttctatcgaaaactccagaactttctgtacaacgtactggagcgtcccaggggctgggcatttatataccatgcctacgtatttctgctcgtgttcagttgtttggtgctatccgtgttcagtactatcaaagaatatgaaaagtcctcagaaggggcactgtatattttggagatcgtaacgatcgttgtatttggggtggagtattttgttaggatctgggccgccgggtgctgttgtaggtatcgggggtggagaggccgactaaaatttgcgcgcaaacccttttgcgtcatcgatattatggttctgatcgccagcatcgcggttctcgccgcaggtagccagggtaacgtgtttgcaacaagcgcccttcggagcctgcgcttcctgcagatacttaggatgattaggatggataggcgcgggggcacatggaaacttctgggtagtgtcgtctacgcccacagcaaggaactggtaaccgcgtggtatatagggtttctctgtttgatcctggcatcttttctcgtgtacctggccgaaaaaggggagaatgaccactttgatacctacgccgatgcactttggtggggcctgattacactcacaaccatcgggtacggcgacaaatatcctcaaacatggaacgggcgcctactggccgctacatttacacttattggagtcagttttttcgcattacccgctggcattctgggctccgggtttgcattgaaagtccaggaacaacatcggcagaaacattttgagaagaggcgcaacccagcagccggcctcatccagtctgcttggcgattttatgctacgaacctctcccggactgacctccattcaacatggcagtattatgaacggacggtgactgtccctatgtatcgcttgatcccccctctgaaccagttggagctgcttcgaaatctgaagtcaaagtctggtttggcttttcggaaggacccaccgccggagccaagcccccggtccgtgccccccgccgccactctggtgtctgccgtatgtacggcggtttggtcgttatcgcacacttgtgcgcagccagtgatggagatgtag

SEQ ID NO: 129533 - DNA, 1848 bp, synthetic construct
  misc_feature 1..1848: note = Description of Artificial Sequence: Synthetic coding sequence
  source 1..1848: mol_type = other DNA
atggtccagaagtctcggaatggcggcgtctaccctgggccgtccggggaaaagaagctcaaagtgggcttcgtgggtctcgaccccggagccccagattctacccgggacggtgccctcctcatcgctggctcagaggcgccgaagcgcggatctatcctgagcaaaccccgtgccggaggcgcaggcgccgggaaaccacctaagaggaatgcattctaccggaagctgcagaattttctgtataacgtgctagaacggccacggggttgggcctttatttatcacgcttacgtcttcctcctggtcttcagctgcctggtgctgtctgtcttcagcacgattaaggaatatgaaaagtcttctgagggcgcgttatatatcttagagatcgtgacaattgtggtgtttggggtcgaatattttgtgcggatctgggcagctgggtgttgctgcagatacagaggttggaggggtcggctgaagtttgctagaaaacctttctgcgtgattgacatcatggttctgatagcttctatcgcagtgttggcggccggttcccagggaaacgtctttgcaaccagtgctcttcgctctcttaggttcctgcaaatactccggatgatccgaatggaccgtaggggcggcacctggaaattactggggtcagtggtgtacgcacattccaaggagctagttaccgcatggtacatcgggttcctgtgtctgatcctggccagctttcttgtgtacctggccgagaagggggagaacgaccattttgacacctacgctgatgcattgtggtgggggctgattaccctgacaacgatcggctatggggataaatatccgcagacatggaacggccggcttctggccgcgacttttacgttgatcggggttagctttttcgcactccctgccggcatcctggggagtggatttgccctcaaagtacaagaacagcacagacagaagcatttcgagaagagacgaaacccagcagcagggctaattcagtccgcgtggcggttctatgctacgaatctgagtaggacggacctacacagtacatggcagtattacgagcggacagtgaccgtgccaatgtacagacttattcctcccctgaatcaattagaactactgcgcaaccttaaatcgaagtcagggctagcgttccgtaaggatcccccccctgagccttcaccgtcgcaaaaagtgtctctcaaggaccgcgtgttctcttctccccggggcgtagcggctaagggcaagggcagtcctcaggcacagacagtgaggcgctctccctctgctgaccagagcctcgaggactctcctagcaaagtgcccaagtcgtggagcttcggggaccgctctagagcccggcaggctttccggatcaaaggagctgcctcccgccaaaactcagaggaggcctctctgccgggcgaagacatcgtcgacgacaaatcctgtccatgcgagttcgtgaccgaggatctcacacctggcttgaaggtctctatcagagccgtgtgcgtaatgaggttcctcgtgtccaaaaggaagttcaaggaatccctacggccatatgacgtgatggacgtcattgaacagtatagcgccggccatttggacatgctctcccgcatcaagtccctgcaaagtaggcaggagccaaggctcccagttcagcagggaacccggactggatgggcatctggaacgaagccaactgtcgctcacggtggctccgctggcggagtatgggccgggccccctccacatccgcgcaggcccctcagtgcgagcgtggtctccagccaatccttattctag

SEQ ID NO: 129534 - DNA, 2643 bp, synthetic construct
  misc_feature 1..2643: note = Description of Artificial Sequence: Synthetic coding sequence
  source 1..2643: mol_type = other DNA
atggttcaaaaatctagaaacggtggcgtgtaccctggaccctcaggagagaagaagttgaaggttggatttgttggtttggatcccggcgcccccgatagcactcgtgatggtgccctgctgatcgctggcagcgaagctcctaagcggggctcgatcctgagtaagccaagggctggtggggctggggcgggcaaaccaccaaaaagaaatgccttctataggaaactgcaaaactttttgtacaatgtgcttgagcgcccccgcgggtgggctttcatttaccatgcgtacgtttttcttttagtgtttagctgcctcgtcctcagcgtgttctcgacaattaaagagtacgagaaaagttcggagggtgccctctacattctggaaatagtgacgatcgtggtctttggcgtcgagtacttcgtgaggatttgggctgcaggctgctgctgtcgctaccgcggctggcgcggccgcctgaagttcgcccgaaaacccttctgtgtaattgacattatggtccttattgctagcattgctgtcctggccgcgggttcccaggggaatgtgttcgcaacttccgctcttcgctctctgagatttctgcagatcctgagaatgatccgtatggatagaaggggcgggacatggaagctgctaggctcagtggtgtatgcacacagcaaagagctggtgacggcttggtacattggatttctgtgtctgatcctggcgtccttcctggtgtatctggccgaaaaaggcgagaatgatcacttcgatacctacgcagacgcactctggtgggggctgattacattgaccaccataggctacggggataaatacccccagacatggaacggacgcctgctggccgcaacatttaccctgatcggagtttcattttttgccctgcctgcgggcatactggggtcaggattcgcgctgaaagtccaagagcagcatcggcagaagcacttcgagaaaaggcggaaccctgccgcagggttaattcaatctgcctggcgtttttatgcaacaaatttgagcaggaccgatcttcacagtacatggcagtattacgagcgaacggtcaccgtcccaatgtaccggttaattccgccattgaaccagctggagctcctgcgcaacttgaaatctaaaagcggcttggcattccgaaaagatccccctcccgagccctcgccctctcaaaaagtgagccttaaggacagagtgttttctagcccaagaggggtggcagcaaaggggaagggctcccctcaggcacagactgtgcgtagaagcccatctgccgaccagagccttgaggatagtccctccaaagttcctaaaagttggtcattcggtgatcgttctcgagccagacaagccttcagaatcaagggcgctgctagcaggcagaattccgaagaggcctccctccctggggaggacatcgtggatgataagtcatgtccctgcgaattcgtgacggaggatcttacccccgggctcaaggtttctatccgggctgtttgcgtgatgcgcttcctggtctcaaagagaaagttcaaagaatcacttcgcccctacgacgtgatggacgtcatcgagcagtattctgccggacatctggacatgttatctaggattaaatctctccagagtaggattgacatgattgtgggacctcctccgccttccactcctaggcacaagaagtaccccaccaagggacctaccgcgccacccagagagagcccacagtactcacctagagtcgatcagatcgtcggacgtggacctgccattacagacaaggacagaactaagggtcccgccgaagccgagctccctgaggacccatccatgatgggaaggctgggaaaggtcgagaagcaagttctgtccatggagaaaaaactcgactttctggtgaatatttatatgcagcggatgggcatccctcctaccgagacagaagcatactttggcgctaaagagcccgagcccgcgccgccataccacagtccagaggattctagggagcacgtggacagacatggctgcattgtcaaaatcgtgaggtcttcgagttcaacgggacagaagaatttttccgctcccccggcagcaccgcccgttcaatgcccaccaagcacaagttggcaacctcagtctcaccccaggcaaggacacggtactagccccgtgggagatcatgggtctttggtccgaattccacccccccctgcacatgagagatcgttatccgcctacggtggagggaaccgcgcatcaatggagttcctgcgccaagaagatacgcctgggtgtcggccccccgaagggaatctccgagactccgacactagcatcagtatcccctccgtggatcatgaagagctggaacgaagctttagtggcttctctataagccagagtaaggagaatctcgatgctttgaactcttgttacgccgccgtggctccatgcgcaaaggtgcggccgtacatcgccgagggggagtccgataccgattctgacctttgtacgccctgtgggccaccacctagaagtgccactggcgaggggcccttcggtgatgtgggctgggccggaccacgcaagtag

SEQ ID NO: 129535 - DNA, 2529 bp, synthetic construct
  misc_feature 1..2529: note = Description of Artificial Sequence: Synthetic coding sequence
  source 1..2529: mol_type = other DNA
atggtccagaaatcccggaacggaggagtatacccgggacccagtggcgaaaaaaagttaaaggttggtttcgtgggactggatcccggagcacctgactccactcgagatggcgcccttttgattgccggaagtgaagctccaaagcggggtagcattctcagcaagccaagggccggaggcgcgggagccggaaaacctcctaagcgaaacgcattttatagaaaattacagaattttttgtataacgtccttgaacgccctcggggctgggcttttatatatcatgcctatgtcttcttgctcgtgttctcatgcctggtactctctgtctttagcactatcaaggagtatgaaaagagcagcgagggtgccttatatatcctcgagatcgtaacaatcgtcgtttttggcgtggagtactttgtgcgaatctgggcagcaggctgctgctgtcgatatcggggctggcgggggagactcaagttcgccagaaaacccttctgtgtcattgatatcatggtcctcatcgcgtcaattgctgtgctggccgcgggctcccagggcaacgtgttcgctacatctgctctgcgctcactgagattcctacagattcttcgcatgataaggatggataggagggggggcacctggaaactgctggggtccgtggtgtatgcccactcaaaagaactggtaaccgcctggtacatcggcttcttgtgcttaatcctggcctccttcctcgtgtatctcgccgagaagggcgaaaatgatcactttgacacatacgccgatgctttgtggtggggactgattaccttaacaacaattggatacggcgacaaatacccacaaacttggaacgggcggctacttgccgccacctttacacttatcggcgtatcgtttttcgccctgcctgccggcatactgggcagtggtttcgcattgaaagtgcaggaacagcacaggcaaaagcactttgagaagcgccgcaacccagccgcaggcctgatacaatctgcctggcgtttctatgccaccaatctgagtagaactgatcttcacagcacttggcagtactacgaacggactgtcactgtgcctatgtacagttcccagacccagacatatggggcgtctaggcttatccctcccctgaaccagttagagcttctgagaaacctcaagtcaaagtctggccttgcgttccggaaggacccccccccagaaccctccccctctcctcgaggagtggctgcaaaaggcaaggggtctccccaagcacagaccgtgaggagatcaccatctgccgaccagtctctggaagacagtcctagcaaagttccaaagagttggtcattcggagataggagtagagcccggcaggcctttaggatcaaaggggccgcaagtaggcagaactcagaagaagcatcgctgccaggcgaagatattgtggatgataagtcttgcccctgtgaattcgtgaccgaggaccttacaccaggactgaaagtgagtatccgggccgtatgcgtgatgaggttcctcgtgtcgaagaggaagttcaaggaaagcctgcgcccttacgacgttatggatgtcatcgagcagtactctgctggccacttagatatgctcagccgcataaaatcgcttcagtcaagagtggaccagattgtgggtcgaggtcccgccattacagataaagataggaccaaggggcctgccgaggctgagttacctgaagatccttcgatgatgggtcgactaggtaaagtagagaagcaggtactcagcatggagaaaaaactggattttcttgtcaacatttatatgcagcggatggggattccccccaccgaaacagaggcctatttcggagccaaagaacctgaaccggcgcccccttaccattctccggaagattcccgtgagcatgtcgataggcacggctgcattgtcaagatcgtgagaagtagctcatccaccggccaaaagaattttagcgcaccgcccgccgctcctcctgtgcagtgcccaccttccacctcgtggcagcctcagtcgcaccctcggcagggtcatggcaccagcccagtcggtgaccatgggtcccttgtgcggattcctccacctcccgcccacgagcggagcctgtctgcttatggcggcggcaacagggcctctatggagttcctgcgtcaagaagatacacccggttgcaggccccctgagggcaacttacgggactccgacacctcaatcagcatcccgtccgtggatcatgaggaacttgagcgctccttcagcggcttctcaattagccagagcaaagagaatctggacgccttaaatagttgttacgctgcagttgccccatgcgcaaaagtgcgcccctacattgcggaaggggaatctgataccgattctgacttgtgtaccccctgcggcccccctcctcgatcagctactggcgaaggccccttcggtgacgtaggctgggctggaccgagaaaatag

SEQ ID NO: 129536 - DNA, 2526 bp, synthetic construct
  misc_feature 1..2526: note = Description of Artificial Sequence: Synthetic coding sequence
  source 1..2526: mol_type = other DNA
atggtgcagaaatctaggaacggcggcgtttaccccggaccatccggcgagaaaaagttgaaagtaggttttgtagggctggatcctggtgctcccgatagcaccagggatggcgctcttctgattgccggttcagaggccccaaagcgcggatcgattttgagcaaaccacgagcagggggcgccggcgcaggcaaacccccaaagagaaacgccttctacaggaagttgcagaacttcttatataatgtactggagcgtcctcggggatgggctttcatttatcacgcctacgtgttcctcctggtgttcagctgcttagtgttatcagtcttttctactatcaaagaatacgagaagtccagtgagggtgctctgtacatcctggaaattgtgactattgtagtgttcggtgtggaatattttgtccggatatgggcagctggatgttgctgtcgctaccgtgggtggaggggtaggttaaaattcgcccgaaagcctttctgtgtgatagacataatggtgctgattgcaagtatcgccgtgctcgctgccggttcccaggggaacgtattcgctacgtctgctcttcgcagtctacgatttctccagattctgcgcatgattcggatggacaggagaggcgggacatggaaactcctcggctccgtggtgtacgctcacagcaaggagctggtgacagcttggtacattggcttcctttgcctgatcctggcctcattcctcgtgtacttggccgaaaaaggcgagaacgaccacttcgacacttacgcagatgctctatggtgggggctgatcactctgacaacaatcggatatggagacaagtatccacagacgtggaacggcagactcttggcggccacctttaccctaattggggtaagttttttcgctctacctgccggcatactaggaagcggatttgccctcaaggttcaggagcagcataggcagaagcatttcgagaaacggaggaaccccgccgccggattgatccaaagtgcatggcgattttacgcaacgaacctgtctagaaccgatctccactccacatggcagtactacgagcgtactgttaccgttcccatgtacagctcacagacacagacatacggcgctagccgacttattcctcccctaaaccagttggaacttctgcgaaatctgaaaagtaagagcggcttggcattccgcaaggacccacctcctgagcccagcccgtccccacgcggggtcgctgcaaagggcaagggctccccccaggctcagaccgtccggcgaagcccatcggcagatcagagcctggaagattcaccaagtaaggtgccaaaatcttggtccttcggcgaccgaagccgggcacggcaggccttccggatcaaaggcgccgcaagccggcagaattccgaggctagcctccccggtgaggacattgtcgatgacaaatcatgtccttgtgagttcgtaactgaggacctgactcccggactcaaagtctctatcagagcagtttgcgtgatgcggttcctcgtgtctaagcgcaagttcaaagagtcactcagaccctacgacgtgatggatgtcatcgaacagtattccgctgggcatctcgacatgctgtcacgtattaagtcattacagtctagagtggaccaaatcgtagggagaggccccgctatcacagacaaagacaggacaaaaggcccggcagaggcagaacttcctgaggaccctagcatgatgggtcgattgggtaaagtggagaagcaggtattgagcatggagaagaagctagattttttggttaacatctatatgcagcgcatgggaatccctcctactgagacagaggcatattttggtgccaaagagcctgagcccgccccaccttatcattccccagaagactcgagggagcacgtggatagacatggctgcatcgtcaagatcgtgcgatcctcctcctcaactggtcagaagaacttttcagcccctcctgccgcgccgcccgtgcagtgtccaccatctacatcatggcagccacaaagccatccccgacaggggcatggaacctcaccagtgggagaccatgggagtttagtgcgcatccctccccctcccgctcatgagagaagtctttccgcgtatggtggcggcaatcgagcaagcatggagttcctgagacaggaagacaccccggggtgtagaccacccgaggggaacctgagggattctgacacctctatcagcatacctagtgtcgatcacgaagaactggagcgttcttttagcggtttttccattagtcagagtaaagaaaacttggatgcgcttaattcctgctatgcagctgtggccccatgcgctaaagtgcggccctatattgccgagggggagtctgatacagatagcgatctctgcactccctgtggacctcctcctagatcagccacaggggaaggtccttttggcgacgtgggctgggccggcccccgcaaatag

SEQ ID NO: 129537 - DNA, 2619 bp, synthetic construct
  misc_feature 1..2619: note = Description of Artificial Sequence: Synthetic coding sequence
  source 1..2619: mol_type = other DNA
atgggtctgaaagctagaagagctgccggtgcagccggaggaggcggcgatgggggcggaggcggtggaggggcggccaatccagctgggggagacgcggccgcagccggcgatgaagagcggaaggttgggctggctccaggggatgtcgagcaagtgacactggccttaggtgccggtgccgacaaagatggcacattactcttagaaggcggaggcagggacgagggtcaacgccgaaccccccaggggattggtctgctagcgaagaccccactgtcacgccccgtcaagcgcaacaatgctaaataccgtcgtatccaaacacttatttacgacgcactggagagacccaggggttgggccctgctctaccatgcgttggtattcttaatcgtcttggggtgcctgattttagcagtactgacgacttttaaggagtatgagacagtgtccggggattggctgctacttcttgagacattcgccatttttatattcggggcagaattcgcactgcgcatctgggccgccggatgctgttgcaggtacaagggatggcggggcagactgaaattcgctcgcaagccactgtgtatgctggacattttcgtcttgatagcgagcgttcctgtggtggcagtcggaaatcagggcaacgttcttgcgacgagtctcagatcgttgcgattcctgcagattctccgaatgcttagaatggatcgccgcggaggtacctggaagttattgggaagcgcaatatgtgcacattctaaagaactaataacggcttggtacatcggtttcctgactttgatcctttcctcttttctggtgtatctggtggaaaaagacgtgcccgaggttgacgcgcagggagaagagatgaaagaagaattcgaaacctatgctgacgccctctggtggggactcattacactggctactattggctatggggacaagaccccgaaaacctgggaggggcgtctcatagcagcaaccttctccctgataggagtgtcgtttttcgcacttcccgcaggcattctgggttccgggctggcactgaaggttcaggagcaacacagacagaaacacttcgagaagcgtcgaaagcctgccgcagaattaatacaggcggcctggcgatattacgcaaccaacccgaaccgcatcgacctggttgctacctggcgcttttatgaatccgtggtatctttcccgttcttcaggaaagagcagctcgaggccgccagctcccagaagctaggacttttggaccgggttaggctgagtaacccacgaggatcgaataccaaaggaaagctatttaccccactcaacgtggatgcaatcgaggagtccccctctaaggagccaaagcccgtgggtctcaataacaaagagcgttttcgcacagcgtttaggatgaaggcatatgctttctggcagtcatcagaagatgcaggaactggcgatcccatggctgaagaccgggggtatggaaatgattttcctatcgaagatatgatccccacactcaaagcagctatacgagccgtccgcattctgcagtttcgtctttacaaaaaaaaatttaaagaaacactgcgcccatacgatgttaaggatgtgattgaacagtactccgctggacatttggatatgctatctcggattaaatacctccagactcggatcgacatgatctttaccccgggcccaccctcaactccaaagcacaaaaaatcacagaagggctcagcgttcacattcccgtcgcaacagtccccgcggaatgaaccatatgtggcacgcccttctacatctgagatcgaagaccaatctatgatgggtaaattcgtaaaagtcgaaaggcaggtgcaggatatgggcaaaaaactcgatttcctggttgatatgcacatgcagcatatggaacgtcttcaggttcaggttaccgagtattatcctaccaaagggacatcgagccccgccgaggccgagaagaaagaagataatcgttactccgacttaaagacaataatatgtaattatagcgaaaccggaccaccagagcccccatattctttccaccaggtgaccatagacaaggtcagtccctacggcttctttgctcatgacccagtgaacctcccccggggcggaccatcctccgggaaagtgcaggctactccgcccagctctgccaccacctatgtggagcgcccgacagtgcttccaattctcacactcctcgacagcagagtttcttgccacagccaagccgacctgcaaggaccttacagtgatcggatcagtcctaggcagcggagatccattactagagactctgacacacctctgtccctgatgtcggtgaaccatgaggagttggagcggtcaccttccggcttcagcatttcacaagacagagatgactacgtttttggccccaacgggggctcctcttggatgcgagagaagaggtacttagcagaaggcgagactgatactgatacagatccgtttaccccctctggtagtatgccactctctagtaccggggatggaatcagcgacagcgtctggacaccctctaataaacccatttag

SEQ ID NO: 129538 - DNA, 2256 bp, synthetic construct
  misc_feature 1..2256: note = Description of Artificial Sequence: Synthetic coding sequence
  source 1..2256: mol_type = other DNA
aagccaaagaaacacgggccaatgttcctgatcgtgctgggctgcttgatacttgccgtcttgaccacgtttaaggaatatgagaccgtttccggggactggctccttctgcttgagactttcgcaattttcatatttggtgccgaattcgccctcagaatttgggccgcaggctgttgttgccggtataaaggttggaggggaagactgaaattcgcccgtaagccactctgtatgttggacatttttgtcctgatagcttcagtgccagtggtggctgtgggtaatcaaggcaatgtactggctacaagtctgagatctctgcggtttttgcaaatcttgaggatgttgaggatggaccgcaggggtggaacatggaagcttctgggtagcgccatttgtgcacattctaaggagctcatcacggcatggtacatcggcttcctgaccctgatcctgagctcattcttagtgtacttggtggagaaggatgtacccgaagtggacgcgcagggagaggagatgaaagaggaatttgagacctacgccgacgctctgtggtggggcctcattacgctcgccacaattgggtatggtgacaaaacacctaagacttgggaagggaggttgattgcagctaccttttctcttattggtgtgtccttttttgcgttgcccgccgggatactgggcagcggcctggcactgaaagtccaggagcagcaccgtcagaaacactttgagaagaggaggaagcctgccgcagagctcatccaagccgcctggaggtactatgcaacaaatccaaataggatcgatctggttgccacatggcgcttttacgaatccgtggtgagctttcctttttttcgtaaggagcaactggaggcagcaagttcccagaagttggggctgttggatagggtacgcctgagcaacccacgggggtccaatacaaaagggaagctgttcacgcccctcaacgtagacgccattgaagagagccctagtaaggagccaaagcctgtaggattgaataacaaggaacggtttaggaccgcctttcggatgaaagcttatgcgttttggcaatctagtgaagatgctggcacaggagacccaatggccgaggaccgcggttatggaaatgattttcccattgaggacatgattcctactctgaaagccgcaatcagggccgttaggatactccagttcagactctataagaagaagttcaaggaaactctgcggccatatgacgtcaaggacgtcattgaacaatacagcgccggccacctggatatgctcagccggatcaagtatctacagacccggatcgacatgatttttacgcccggcccaccttctacacctaagcataaaaaaagtcaaaagggtagtgcgttcacattcccttcacagcagtctccacggaacgagccgtatgtggcgcgtccctcaacctctgagattgaggaccagtccatgatgggtaagttcgtaaaggttgaacggcaggttcaggacatgggcaagaagctggacttcttggtagacatgcacatgcaacatatggagaggttgcaggtgcaggtcacagaatattaccctacgaagggaacctcatccccagctgaggctgaaaagaaagaggataaccgctattctgatctgaagacgattatctgtaactattccgagacaggtccacccgaacccccctacagctttcaccaggtcacaattgataaggtgtcaccatatggcttcttcgcccacgaccccgttaatctgcctagaggaggtcccagttcgggtaaggtccaggctacacctccgtcctcagctacaacgtatgtagagaggcctacggtactgcccatcttgacgcttctcgactccagggtgtcatgccattcacaggccgatctccagggaccctattccgatcgtatatctccccgccagcggcgcagtatcacacgcgatagcgacactcctctgtcccttatgagtgtgaatcacgaggagctggagagatctccatccggctttagcatttcccaagacagagacgactatgtctttgggcctaatggcggaagctcatggatgcgtgagaagcgctatctcgcggaaggggaaactgacacagacacggatccgtttacccctagcggtagcatgcctctcagcagtaccggggatggtatcagcgattccgtgtggacgcctagcaataagcctatctag

SEQ ID NO: 129539 - DNA, 2550 bp, synthetic construct
  misc_feature 1..2550: note = Description of Artificial Sequence: Synthetic coding sequence
  source 1..2550: mol_type = other DNA
agggcggccgcggagaaggcgaagcgtccagccggtgcacggcagatgggtctgaaggcccgacgtgcggccgctggggacgaagagcgcaaagttggactggctcccggcgatgtggagcaagttacactggctctgggcgccggcgccgataaggacggtacacttctgctcgagggtggcggaagggacgagggacagcgccgcactcctcagggtatcggccttttggctaagacccccctgagtaggcccgtcaaaaggaacaacgctaagtaccggagaattcaaacactgatctacgatgccctggagcgaccaagagggtgggctctgctttatcacgccttggttttcttgatagtcctgggttgcctgattttggctgtactcacgacctttaaagagtacgagacggtatctggggactggctcctgttgcttgagacatttgcgatcttcatattcggcgccgaattcgcactgaggatttgggctgcaggctgctgctgcaggtataagggctggagaggaaggctgaagtttgcgcgcaaaccactgtgcatgctggacatttttgtgctgattgcctcagtgccagttgtggcggtcggaaaccaaggaaacgtgctcgctacatcattgcgctcgcttcgatttctgcaaattctccgcatgctgcggatggacagacgtggcggaacttggaagctgctcggctcagccatctgcgctcactctaaagagctgataactgcctggtacattggtttcctaaccttaattcttagcagtttcctggtgtatctcgtagagaaggacgtgcctgaagtggatgcccagggcgaggagatgaaagaagagtttgagacttatgcggatgccttgtggtggggtttgatcacgctggctaccatagggtacggcgacaaaaccccaaaaacctgggaaggaagactgattgccgcaacattcagcctgatcggcgtgagctttttcgctctgccagccggaatactggggagtggtcttgcactgaaggttcaggagcagcaccgacagaaacattttgaaaaaaggagaaagcccgccgcagaactcatacaggcagcctggagatattacgccactaatcccaaccgcattgatttagtggcaacgtggcgcttttatgagagtgtggtaagtttcccatttttccggaaagagcagctggaggccgcttcgtcccagaagctcgggctgctggaccgcgttcgccttagcaatccccgcggctccaacacaaaggggaagctcttcacaccactcaatgtcgatgctatcgaggaaagcccctcgaaggagcccaagcctgtgggcctgaacaacaaggaacgatttaggactgcttttagaatgaaagcctatgccttctggcagagctctgaagatgccggcaccggcgaccccatggcagaagaccggggatatggaaacgacttccctattgaagacatgattccaaccctgaaggccgctattcgggccgtccggattcttcaattcagactgtacaaaaaaaagtttaaggagactctccgcccgtatgacgtgaaggacgtcatcgagcagtattccgcagggcacctcgatatgctaagtaggataaaatacctgcagacccgtattgatatgatcttcacacccgggccacctagtactccaaagcacaaaaagtctcagaagggaaacgaaccttacgtcgcacgcccctccacatccgagattgaggaccagagcatgatgggaaaatttgtcaaggtagagcggcaggtccaagacatgggcaagaagctcgactttctggtcgatatgcacatgcagcacatggagagactccaggtgcaggtgaccgagtattatcctactaaaggaacatcatctcccgccgaggctgagaaaaaagaagataatagatactctgacctcaaaactatcatctgcaactattctgagaccgggccacctgagcctccttactcatttcaccaggtcaccattgataaagtgtctccttacggattcttcgcacatgacccagtcaacctgcctcgtggaggacccagttctggtaaggtccaggcgacccctccttcctctgcaaccacgtacgttgaaagaccaacggtcttgccaatccttactctgctcgattccagggtttcatgccactcccaggccgacctacagggtccatactccgatcgaatttctccccggcaacgtagatccattactcgcgatagtgacaccccactgtccctgatgtccgtgaatcacgaggaactcgagagatcccccagtggcttctctatatcccaagaccgtgacgactacgtatttggacccaacggtggaagctcctggatgagggaaaagaggtacctggcagagggcgagaccgacacggacaccgatccttttacaccctccggctctatgccgctgagctctacaggcgatggcataagtgactcagtgtggaccccttccaataaacccatctag

SEQ ID NO: 129540 - DNA, 2088 bp, synthetic construct
  misc_feature 1..2088: note = Description of Artificial Sequence: Synthetic coding sequence
  source 1..2088: mol_type = other DNA
atggctgaggcaccaccacggaggctgggtttgggcccgcctcctggagatgcccctagagctgagctggtggcgctcaccgcagtgcagagtgaacaaggcgaggccggtggcggcggatctcctcgtcggctgggccttctcggttctcccctaccacctggcgccccactgcccggacccgggtccggctccggaagcgcatgtggtcagagaagctccgccgctcacaaaagatacaggcgccttcagaactgggtctataacgtgctagagagaccccggggatgggctttcgtgtaccatgtgtttattttcttacttgtcttctcatgcctcgtcctatcagtgctgtctaccatccaggagcaccaagagctagcaaatgagtgcttactaattctggaattcgtgatgattgttgtgttcggtctcgaatacatagttcgggtgtggtccgccgggtgttgttgcaggtacaggggatggcaaggccggttcaggtttgcccgaaaacccttctgtgtgatcgattttatcgtctttgtggcttctgtagccgtgattgcagctggtacccagggaaacatctttgccacgtccgccctgcggagcatgagatttttgcagattctgaggatggtgcggatggatcgtcggggagggacttggaagcttctgggatcagtagtgtacgcgcatagtaaggaactgatcactgcctggtatatagggttcctggtccttattttcgcctccttccttgtttacctggccgagaaggacgcgaactccgacttcagtagctatgccgactcactctggtgggggactatcactttgaccactatcggttacggagacaagacgccccatacttggctcggaagggtcttagccgcaggctttgccctgctcggcatctcttttttcgctctgccggcaggtattttgggatcaggcttcgctctcaaagtgcaggaacagcatcgacagaagcacttcgaaaaacggcgcatgcccgcggcaaatcttattcaggctgcttggcgactatactccactgatatgtcaagagcctaccttaccgctacctggtactactacgacagcattctcccaagttttagagaactggccctcctgttcgaacatgtacagcgcgcacggaacggcgggctgaggcccctggaagtccgccgggccccggtgccagatggtgctcctagtcgatatcccccagtggccacatgtcacaggccaggctctacctctttctgccctggtgagagttcaaggatgggcataaaagaccgcattcggatgggaagcagccagagaaggacaggccccagcaagcagcatctggctcccccaacaatgcctaccagtccttccagtgagcaggtaggggaggccacttccccgacaaaggttcagaagagttggtctttcaacgatcgaaccagatttagagcatccttgcggctgaagccaagaacctcagccgaggatgcaccatctgaagaggtcgccgaggagaagtcctaccagtgcgagctcaccgtggacgacataatgcctgctgttaagaccgtcatccgctcaatacggatcttaaagttcttggttgcaaaaagaaagtttaaggagaccctgagaccgtatgatgtaaaggacgtgatcgagcagtacagtgccggccatctggatatgctgggacggatcaagtcactgcagacaagagtcgatcaaatcgtgggccggggtcctggggaccgcaaggcccgcgagaagggagacaagggaccttctgacgccgaggtggtggacgagatctctatgatggggagagtggtcaaagtggaaaagcaagtgcaaagtatcgagcacaagttggatctgctgttagggttctactcccgatgtctgcgctcagggactagcgcttctttgggcgccgtacaggttccactgttcgaccctgacatcacttctgactatcacagtccagttgatcacgaggatatcagcgtttcggctcagacactgtcaatttcacggtccgtctctacaaatatggattag

SEQ ID NO: 129541 - DNA, 2856 bp, synthetic construct
  misc_feature 1..2856: note = Description of Artificial Sequence: Synthetic coding sequence
  source 1..2856: mol_type = other DNA
atgccacggcatcacgctggaggcgaggaaggaggtgctgccggtttgtgggtgaagtctggggcggccgccgcagcggcgggtggcggtcgcctgggaagtggaatgaaggacgtcgagtccggaagagggcgcgtgctgttaaacagcgcggctgctaggggagacgggttgttactcctgggtacgagggctgctacattgggtggagggggtggcgggctgcgagagtctagacgtgggaagcaaggggctagaatgagcctgctgggaaagcctttgtcttacactagcagtcaatcttgtagaaggaacgtcaagtataggcgcgtgcagaactatttgtacaatgtcctagagagacctaggggctgggccttcatttaccatgcctttgtctttctcctggtctttggttgtttgatactttcagtattcagcactatcccggagcacactaagctggcttcatcatgtctgcttatactggaatttgtgatgatagtcgtgttcggactcgagttcatcattcggatctggtctgcgggatgttgctgcagatatagaggatggcaggggcggctgcgattcgcccgaaagccattttgcgtcatcgacaccatcgttcttatcgcttccatcgccgtggtctcagcgaagacgcagggaaacatcttcgcaacttccgctctccggtcactgcggtttttacagattctgagaatggtgcggatggaccggcgggggggaacctggaagttgctgggttccgtggtatatgcacattccaaagaactaattactgcctggtatatcggcttcctcgtcttaatcttctcatctttccttgtttacttggtcgaaaaggacgctaacaaagagttcagcacatatgccgacgccctctggtggggcaccattaccttaactaccattggttacggagacaagacccccctaacatggcttggcaggcttctctctgctggctttgccctgttggggataagcttttttgccctgcctgcaggcatacttgggagcgggttcgccctgaaggtgcaggagcagcaccggcagaagcattttgagaaaagaagaaatcccgcggcaaatttaatccaatgtgtctggagaagctatgctgccgatgagaaaagcgtgtcgattgccacttggaagccacatttgaaggctctgcacacctgctcccctactaaaaaggagcagggtgaagcgtcatctagcaaattctgtagcaataaacagaaactgtttcggatgtacacctctcggaagcagagtcagaagctgagcttcaaggagcgggtcagaatggctagtccacgtggacagtccatcaaatctaggcaggcttctgtcggagatagaaggtcgccaagcactgacatcacagctgaagggtcacccactaaagtacagaaatcttggagcttcaacgaccgcacccgattccgtccctcactacgtctgaagtcatcacagcccaaacctgtgatcgacgctgataccgccctaggcactgatgacgtgtacgatgaaaaaggatgtcaatgcgacgtgtctgtggaagatctcacacctccattgaagaccgtgataagagcaatccgaataatgaagttccacgtggctaagcgaaagtttaaagagactctgcggccatacgacgtgaaagatgtcatcgagcagtacagcgccggccacctcgatatgctctgcagaatcaaaagcttgcagacccgtgtagatcagatactgggcaagggccaaataacatccgacaaaaagtctagagagaaaattacagctgagcacgagacaaccgacgatctttccatgctcgggcgggtcgtgaaggtggagaagcaggtgcaatccattgagagcaaacttgactgtctgctcgacatctaccagcaggtgctacggaaaggctcagctagcgccctggctttggcctcattccaaattccaccctttgaatgcgaacagacatctgattaccagtcaccggtggacagtaaggacttgagcgggagcgcacagaattccggctgtctttcccggagcacaagcgccaacatcagtcgtgggcttcagtttattctgactcctaatgagttctcagcacagactttctatgcattgtcaccaaccatgcatagccaggccacacaagtccctataagtcaatctgatgggtctgcagttgccgccaccaacaccattgctaaccagataaacaccgccccaaaacccgccgcccccacaaccctacagataccaccgccacttccagccatcaagcacttgccccgccccgagactctccaccctaatccagccggactgcaagaatccattagtgacgttacaacctgcctggtggcatccaaggaaaacgtgcaggtggcgcagagcaacttgaccaaggatcgtagcatgagaaaaagctttgacatgggaggagaaaccctgcttagcgtgtgcccgatggtgccgaaggatttgggaaagagccttagtgttcagaacctgattcgctccaccgaagagcttaacatccaactttccggatccgagagtagtggaagcagaggatctcaggacttttaccccaaatggcgggaatctaagctgtttatcaccgatgaagaagtgggccccgaggaaacagaaactgacacatttgacgccgctcctcagcctgctagggaggccgcattcgcctcagatagcctgaggactggccgatcacgctcctcacaaagcatttgcaaggcaggcgagtctacagacgccctgtccctaccacacgtcaaactcaaatag

SEQ ID NO: 129542 - DNA, 2799 bp, synthetic construct
  misc_feature 1..2799: note = Description of Artificial Sequence: Synthetic coding sequence
  source 1..2799: mol_type = other DNA
atgccacggcaccacgccggaggtgaggaagggggggcagctggcctgtgggtgaaatcgggagccgccgccgcagctgctggaggcggtaggctgggctctggcatgaaggacgtggagtccggacgtggacgcgtcctgttgaactccgcggctgcccgaggcgatggactccttctgttgggcactcgtgccgcaacactgggcggcggcggcggtggattgcgggaatcaagacgcgggaagcagggcgcgaggatgtcattgcttggaaagcctttgtcgtatactagcagccaatcatgccggagaaacgttaagtacaggcgagtgcagaactatttgtataatgtacttgaacgcccccgcgggtgggcatttatctatcatgcctttgtgtttctcccagttttcggctgccttatactgagtgtgttcagcacaattcctgaacacaccaagctggcatcctcctgtctcctgattctggagttcgtgatgatcgtggtgttcgggctagagttcattattcgcatctggtccgccggttgctgctgcaggtacagggggtggcagggcaggcttcgcttcgcccggaaaccgttttgcgttattgatacgatcgttcttatcgcttccatcgccgtagtctctgccaagacccaaggtaacatcttcgcaacctcagcattgcgttctttacggttcctgcaaattcttcggatggtccgaatggacagaagaggcggcacctggaaactgcttggtagtgtggtgtacgctcactcaaaagaactgatcactgcctggtacatcgggtttctggtgctgatatttagctccttcctggtttacctcgtggagaaggacgcaaacaaagaattcagtacttatgccgatgccctatggtggggtactatcacgctgactacaattggctatggcgataagacacccctgacatggttgggtcgattattgagcgccggctttgcactgttgggcatcagtttctttgcattgccagccggaattttgggaagtggcttcgcactgaaagtccaggagcagcaccggcagaagcatttcgaaaaaaggcggaacccagcggccaatcttatccaatgcgtttggcgatcatatgcggccgatgagaaatctgtgtcaatcgccacatggaaaccacacctgaaggctctccacacttgctctccaaccaagaaggaacaaggcgaggcctcctcttctcaaaagctaagttttaaagaaagagttcgcatggcatcgccaagaggccagagcatcaagtcaaggcaggccagtgtcggagatagaagatcgccctcaacagacatcacggccgaagggtcgccgaccaaggtacagaagtcctggtcttttaacgaccggaccagattcaggcccagcctgcgactgaagagctcccagcctaaacccgtcattgatgccgacactgccctgggaactgacgacgtctacgatgaaaagggctgccagtgtgatgtgagcgtcgaggacctaactcccccactcaaaaccgtaattcgggccattcgcatcatgaagtttcacgtggccaaacggaaattcaaggaaactctccgcccttatgatgttaaggacgttatcgagcagtatagtgctggccaccttgatatgctttgtcgcataaaaagcctccagacccgggtggatcagattctcggaaaagggcagatcacatcggacaagaagtcacgggagaaaatcacagcagaacatgagacaacagatgatctaagcatgctcgggagggttgtcaaggttgagaaacaggttcagtcaattgagtcaaaactcgactgcctgcttgacatctaccagcaggtgctccgaaaagggtcggcatctgctctcgctctcgcatcctttcaaattcccccctttgaatgtgagcaaacgtctgattaccagagccccgtcgacagtaaggatctctctggcagtgcccaaaacagtggctgtctgtccagaagcactagtgccaacatatctcgcggtctacaattcatccttacccccaatgagttctcagcacagaccttttatgctttgtcccctacgatgcattcgcaggctacacaagtgccaatttcgcaaagcgacggctctgctgtcgccgccactaacactatcgcaaaccagatcaacacagcacccaagccagctgcaccgacgaccttgcagattccgcctcccctccctgcaataaaacatctgccacggcctgaaacgctccatcccaatccagcaggcctgcaagagagcataagcgacgtgactacctgtctggtggctagcaaggaaaatgtgcaagtcgcccaatccaatttaactaaagacagaagcatgcggaagagcttcgatatgggcggggaaactctgctgtcagtgtgccccatggttccaaaagacctgggcaagtctctttctgtgcagaatctgatacggtctaccgaggagcttaatattcagttgagtggcagtgagagcagtggttctcggggctctcaagacttctatcccaaatggcgagagagcaagctgttcatcaccgacgaggaggtggggcccgaggagactgaaacagataccttcgacgcagcccctcagcctgctagggaagccgcattcgccagtgactctttgcgtacaggtcggtcccgtagctcccagagcatctgcaaggctggcgagtccaccgacgccctctctctacctcacgtgaagctgaagtag

SEQ ID NO: 129543 - DNA, 2802 bp, synthetic construct
  misc_feature 1..2802: note = Description of Artificial Sequence: Synthetic coding sequence
  source 1..2802: mol_type = other DNA
atgcccaggcaccacgcgggaggcgaggaggggggcgccgctgggctctgggtgaagtccggcgccgcagctgcagccgccggggggggacgactaggcagtggaatgaaggacgtcgagagcggcagaggcagggtgctgctgaatagcgctgcggcaagaggcgacgggctcttactgcttggaaccagagccgccaccttgggcggcggaggggggggtttgagggagtcccggagaggcaagcagggagccagaatgagtctacttggcaagcccctgagttataccagcagtcaaagttgccggcgtaacgttaagtaccggagggttcagaattacttgtacaatgtcctggagagaccaaggggttgggccttcatctatcatgcattcgtgtttttactcgtgtttggatgtctgatcctgtcagtattttcaacgattcctgagcacacgaagctcgcgtcaagctgcttattgattctcgaatttgtgatgattgtcgtttttgggcttgagttcatcatccgtatttggagcgctggctgctgttgtcggtacagaggctggcagggtagactgcggttcgcaagaaagccattttgcgtgattgatactattgtgctgattgcttctatcgcagttgtatctgccaaaactcaggggaatatcttcgcgacctcggcactccgatccctgagattcctgcagattcttagaatggtgagaatggatagacggggaggcacgtggaaactgttggggtcagttgtatacgctcatagcaaggaactcattactgcttggtatataggattcctcgttttgatcttttcttcgtttcttgtttacctagtcgagaaggatgccaataaagaattctcaacctacgcagacgctctgtggtggggcacgattacactgactaccatcggctacggtgataagacacctctaacatggttgggccgcctactttccgctggctttgccctcctaggaatctcattcttcgccctccccgccggcattttggggtccggattcgcccttaaagtccaggaacagcacaggcagaagcatttcgaaaagagacgcaatccagcagctaacctgatacagtgtgtttggaggtcttacgccgcggacgaaaaaagcgtcagtatcgccacatggaagccacatctgaaagctcttcacacatgttctcctacgaagcaaaaccagcagggcgaatctcagtcatgccagaagctgtcttttaaggaaagagtccgtatggcttcccctcgaggccagtcaatcaagagccgccaagccagcgtaggcgaccggcgttctccgtcaacagatatcacggctgaaggatcacccactaaagtgcaaaagtcctggtctttcaacgacagaacccggttccgcccgagcctgagactgaaatccagccagcccaagcccgtgatcgatgctgatacagcactggggactgacgatgtctatgacgagaagggctgtcagtgcgacgtatccgtagaggacctgactcctcccctcaagacggtcatcagggccattcgcatcatgaaatttcatgtcgccaaaagaaagtttaaggagacactccgtccttatgacgtgaaggacgtgatagaacaatactccgcagggcatctggacatgctatgtcggatcaagtccctccaaacacgcgtggatcagatcctcgggaaggggcagatcacttccgacaagaagtccagagaaaagatcacggcagaacacgaaaccactgacgacctgagcatgttggggcgggtggtcaaagtggagaagcaggtccagtcaatcgagtctaaactcgactgtctcctcgatatctaccagcaggtcctgcgcaaggggtcggcttccgccctggcgctggcctcatttcagatcccacctttcgaatgcgagcaaacttcagactaccagtcacctgtggattctaaggacctgagcggttccgcgcaaaacagcgggtgtctctcacggagcacaagcgccaacatcagccgtggattacaattcatcctgacacccaacgaattttctgctcagactttttatgccctaagtccaacaatgcacagccaggctacgcaagtaccgatatcccagagtgacggatcagctgtggcggccaccaatacaattgcaaatcagattaacactgctccgaaacccgccgctccaaccacactgcaaatccccccccccctgcctgccattaaacacctccctcgtcccgaaacactgcatcccaaccccgcaggtctgcaagagtcgatctctgatgtcacaacttgcctggtcgcttcgaaggagaacgtgcaagtcgctcagagtaatctcaccaaagacaggagcatgcggaaatcttttgatatggggggggagacactgctctctgtctgccccatggtgccaaaagacctgggcaagtccctgtctgtgcagaatctcataagatcaacagaagaactgaatatccaactgagcggcagtgagtcatctgggagccggggctcccaagacttctatcctaagtggagggaatccaagctcttcattacagacgaggaagtgggtcccgaggagacagaaactgatacgtttgatgctgctccacagcccgctcgagaagcggcatttgctagcgacagcttgcgaactggcagatcaagatcctctcaaagcatctgcaaggcaggagagagcacagacgctcttagcctgccgcacgtcaaattaaaatag

SEQ ID NO: 129544 - DNA, 1284 bp, synthetic construct
  misc_feature 1..1284: note = Description of Artificial Sequence: Synthetic coding sequence
  source 1..1284: mol_type = other DNA
atgccacggcatcatgcggggggcgaggaaggaggcgctgccggcctgtgggtaaagagcggtgcggccgccgcggctgcggggggcggccgtcttggctcagggatgaaagatgtcgaatctggtagggggcgggtcctgttgaactccgctgcagctaggggagatggactactattactcgggactcgtgctgcaacactgggggggggcggtggcggactccgagagagtagaagaggcaaacagggcgcaaggatgtcacttctgggtaagccactgtcatatacctctagtcagtcctgcaggcggaacgtcaaataccgccgggtgcagaactatctctataacgtccttgaaagaccaagaggctgggcatttatttaccacgccttcgtcttcttgctagtgttcgggtgtctgatcctgtcggtgttcagcaccatacccgagcacacaaagctggcgtcatcttgcctgcttattttggaattcgtgatgatcgtcgtctttgggttagaatttatcatcagaatctggtctgctggctgttgctgccggtaccggggctggcagggcaggcttcggtttgccaggaaaccattctgcgttatcgatacaattgtactgatcgcaagcatagccgtagtgagcgccaagacacaggggaatatattcgctactagcgcgctgcgatctctgaggttcctgcagatcctcaggatggtgcgcatggaccgaaggggcggcacctggaaactcctggggagcgtggtgtacgcacacagtaaggagctgattactgcttggtacatcggatttctggtgcttattttttcctcattcctggtctatctggtagagaaagatgcaaataaagaattctccacttatgccgacgcactctggtggggtactattaccctcactaccatcggatacggggacaaaactcccctcacctggctcggacgcctgctttccgcaggcttcgccttgctcggtatcagcttttttgctctccccgccggtatcctgggctccgggttcgccctcaaggtacaggagcagcaccgtcagaaacattttgagaaacgcagaaaccccgctgccaatctgatccagtgtgtttggaggtcgtatgcggctgacgagaagtcagtctcaattgctacttggaaacctcatttgaaggccctccatacatgcagtccaacgaagaaagagcagggggaggcatctagccgtttcgtaatctctttactgctgcacgtttgtctatag

SEQ ID NO: 129545 - DNA, 2799 bp, synthetic construct
  misc_feature 1..2799: note = Description of Artificial Sequence: Synthetic coding sequence
  source 1..2799: mol_type = other DNA
atgcctcggcatcatgccgggggcgaagaggggggtgccgcaggactgtgggtaaaatccggcgcagccgctgccgcggccggcggcggcagattggggtccggaatgaaggacgttgagagcgggagaggccgggtgttactcaattctgcagccgcccgtggagatggcttgctgctcctggggactagggccgctaccctgggtgggggcggtggggggttgcgtgagagcaggcgagggaagcagggtgcgcgaatgagcctgctcgggaaacccctgagctacacatcctcccagtcctgccgccggaacgtcaaatatagacgggtgcagaattatctctataatgtgttggagagacccagaggatgggcatttatttatcacgccttcgtatttcttctggtttttgggtgcctgatcctatccgtgttctctacgattccggaacatactaagctggcgagttcttgccttttgattctggagttcgtcatgattgtggtgtttggtctggaatttattatcaggatctggagcgcggggtgttgttgccgttacagaggatggcagggcaggctccgcttcgctcgtaagccattctgcgtcatcgacactattgtgttaatcgcctccatcgctgtcgtgtctgccaagacccagggtaacatatttgccacgagtgccctgcgtagccttaggttcttacagatcctccggatggtccgcatggatcggagaggcggcacgtggaaactcctgggatctgtggtgtatgcccactccaaagagctcattaccgcctggtacattggctttcttgtcctaatcttctcttcttttctagtgtacctggtggaaaaagacgccaataaagaattttcaacttacgctgatgctctgtggtggggcactatcacacttactactattggctacggagataaaacccccttgacttggctgggacgactgctgtctgcaggctttgccttgcttggcatttctttttttgccttacccgccggcattttagggagcgggtttgcccttaaagtgcaggagcagcaccgacagaaacatttcgagaagcgacggaatccagctgctaacctgatccagtgtgtgtggaggagctacgccgcagatgaaaagagcgtctctatcgcaacctggaaaccacaccttaaagccctgcacacctgtagtcccacaaaaaaggaacagggggaagcctcttcttcgcagaagctgtcgttcaaagagcgcgtgagaatggcaagtccgcgcggccaatctatcaagagtaggcaagcatcggtgggcgaccggcgatcaccatcaactgatataactgcggagggttccccaacgaaggtccagaaatcctggagcttcaacgaccggacacgattccgtccttccctgcgtcttaagtctagtcagccaaaacccgttattgacgccgataccgcactgggtacagacgacgtgtatgacgaaaaaggctgccagtgtgacgttagtgttgaagatctaacccccccactgaaaaccgtaatccgagcgatacgcataatgaaatttcacgtcgccaaacgaaaattcaaggaaactttacgcccgtatgatgtgaaggacgttattgaacagtatagcgcgggtcacttggacatgctgtgtagaatcaaaagcctgcagacaagagtcgatcagatccttggtaaaggccagattacatcagacaaaaaatctcgagaaaaaataaccgcggagcatgagaccaccgacgacttatccatgctgggccgtgtcgtcaaggtagaaaaacaggtgcaaagcatagagtcaaagctggattgcctcttagacatttaccagcaggttttgagaaaaggttccgctagtgcactggcgttagcctcattccagatacccccattcgaatgcgaacagacgagcgactatcagtcccctgtagatagcaaggacctgagtggatccgctcagaactcaggctgcctttcgagaagtacctccgcaaacattagtcgcggcttgcaatttatacttacacctaacgagttctccgctcagaccttctatgctctatcacccaccatgcacagtcaggcaactcaagttcccatcagccagagcgacggctcagccgtggcagccactaacactattgctaaccagatcaataccgccccaaaaccagccgcgcccacgactctccagatcccaccgcctctccccgctatcaaacacctgccacggccagagaccctgcatccaaacccagctggtctgcaggaatctatctcagatgtaaccacctgcttggtggcttctaaggaaaacgttcaggtcgcccagagcaatttgaccaaggatcgaagtatgagaaagagtttcgacatgggcggcgagaccctgctgagcgtgtgtcccatggtccctaaggacctggggaagtccctgtctgtccagaatctcattagatccacagaagagttgaacattcagctgagtggcagtgaatcctctgggtcacgagggagtcaggacttttatcccaagtggagggagtccaaactgttcattaccgatgaggaggttggccccgaggaaactgagacagataccttcgatgctgccccacagccagccagggaggccgcattcgcctccgattcactccgtacagggcgcagcagatcgtcacagagcatttgcaaggccggagaaagtacggacgctctcagcctgccccacgtaaaactgaaatag

SEQ ID NO: 129546 - DNA, 2829 bp, synthetic construct
  misc_feature 1..2829: note = Description of Artificial Sequence: Synthetic coding sequence
  source 1..2829: mol_type = other DNA
atgcccagacaccacgcaggtggcgaagagggcggagctgctggcctttgggtaaagtctggagcagcagccgccgccgccggcggcggacgactaggctccggcatgaaggacgtggagagcggtagaggcagggtgttgctaaattcagccgccgcacgcggtgatggacttctgctgttggggaccagggcagccactctgggaggcggcggtggagggctccgggaatcaaggcgtggtaagcaaggggccaggatgagcttgttaggcaagcctctctcttatacctcgtcacagagctgtcgtcggaacgttaagtatcggcgcgtgcagaactacctgtataacgttctggagcgcccccgaggatgggcgttcatctaccatgccttcgtgtttctcttggtattcgggtgtctgattctgtccgtgtttagtacaattccagagcacaccaagctggcatcgagctgtctgctcatcctggaatttgttatgattgtggtgtttgggctcgagttcatcattcgcatttggagcgctgggtgctgttgccgatatcggggatggcaggggaggctgcggtttgcacggaagccgttctgtgttatcgataccattgtcctgatagcttcaatcgcagtggtgagcgcaaagacccagggtaatatattcgcgacatctgccctacggtcccttcgctttctccaaatcctgcgaatggtgcgaatggatcgcagggggggcacctggaaactgctggggagcgtggtctatgcacatagcaaggagctcattaccgcctggtatataggatttcttgtgttgatcttctctagttttctggtgtaccttgtagagaaggatgcaaataaggagttttccacatatgccgatgccctgtggtggggcactatcacactgaccaccataggttatggcgacaagactcctctgacatggttggggcgactacttagcgctgggtttgccttgctgggcatatctttctttgccctgcccgctgggatattggggagtggtttcgctctgaaagtacaggaacagcacagacagaagcactttgaaaaaagaagaaacccagctgctaatctaatccagtgcgtttggagatcctatgccgcggacgaaaagtcagtctccattgctacctggaaacctcaccttaaagctttgcatacgtgtagccctacaaataaattttgtagtaataagcagaaactcttcagaatgtatacttctagaaagcagtcccagaaactgagctttaaggagagggtgagaatggcctccccacgcggacagtcaatcaagtcccggcaggcctctgttggggacaggcgcagcccttccactgacatcactgcagaagggtcccccactaaagtgcagaaatcatggagcttcaacgatagaactcggtttagaccctccctgagactgaagtcttcacaacccaaacccgtgattgacgcggacactgcgctcggaactgacgacgtgtatgacgagaagggctgccagtgtgacgtgagcgtcgaggatctcactccccctctgaaaaccgtaatacgcgctataagaattatgaagtttcacgttgcaaagagaaaatttaaggagacactccggccgtatgacgtgaaggatgtcattgaacagtattccgctggtcacctagacatgctctgccggatcaaaagcctccaaacacgcgtggaccaaatcctggggaaggggcagattaccagcgataagaagtcccgggagaaaatcaccgcggaacacgagacaactgacgatctttccatgctgggtcgtgtcgtcaaagttgagaaacaagtccaatcgattgagagtaagcttgattgtctgctggacatctatcaacaagtactgcggaaggggtctgcatcagcccttgccctggcttcctttcagatccccccttttgagtgcgagcagacttcagactatcagagccctgtagatagcaaggacctgtccggttctgcacagaacagtggctgtctgagtaggagcacatccgccaacatctcacgtgggctacagtttattctcacccctaacgagttttctgcccagacgttctacgctctgtcacctactatgcattctcaggcgacacaagtaccaatttctcagtctgatggatctgctgttgcggcgaccaacactatagcaaaccagattaacacagcccccaagccagcagctccgacaacgctccagattcctccccctctacctgctattaaacatctgccgcgaccagagaccctgcacccaaatcccgctggcctacaggagagcatcagtgacgttaccacctgtctcgtggcttccaaagaaaacgtacaggtggcccaatctaacctaactaaggacaggagcatgaggaagtcatttgacatgggaggggaaacactgttgtcggtttgtcccatggtccctaaagaccttggaaagtcactgagcgtgcagaatctgatccgttcaacagaagaattaaacatccagctttccggctctgagtcttcagggtcccgcggatctcaagacttctatccgaagtggagagaatctaagctttttatcacggatgaggaggtgggcccggaagagacagagactgacacattcgatgctgctccccagccagctagggaggcagcatttgcctccgactcactccgaaccggccgcagtcgctcttcacagtcaatctgcaaggcaggggaaagtacggacgcgctttccctgcctcatgttaagcttaagtag

SEQ ID NO: 129547 - DNA, 2772 bp, synthetic construct
  misc_feature 1..2772: note = Description of Artificial Sequence: Synthetic coding sequence
  source 1..2772: mol_type = other DNA
atgccacgtcatcacgctggtggcgaggagggcggggcagccggcctctgggtgaaaagtggcgcagctgcagcagctgctggtgggggccggctcggctccggtatgaaagacgttgaatctggtcgaggtcgggtccttttgaactccgcagcggcgaggggagatggtctcctcttgctgggtaccagggctgctacactgggaggagggggcgggggcctgagggaatctagaagaggaaagcagggagcccggatgtctctgctcggaaagcctctttcttataccagcagccagtcctgtcgcagaaatgtaaagtatagaagagtccagaattatctgtacaacgttctggagagaccaaggggttgggcatttatataccacgcattcgtcttcttgctggtgtttggctgcctgattctgtcagtgttctcaactattccagaacataccaagcttgccagttcttgcttactgattctagagttcgtgatgattgtggtctttggcctagagtttatcatccgcatttggagcgccggttgctgctgccgctatcgtggatggcagggccgactgaggtttgcccggaagccgttctgtgtgatcgacaccatcgtccttatcgcatctatcgcagtggtgagtgccaagactcagggtaatatcttcgccacgtctgccctgcggagcctgaggtttctgcagattctgaggatggtgaggatggatcggcggggaggtacgtggaagcttttggggagcgtagtctatgctcatagcaaggaattgatcacagcctggtacattggcttcctcgtcttgatttttagctccttcctggtctatctggtggaaaaggatgcaaacaaagagttttccacctatgccgacgccctgtggtggggcactattacgctcacaaccattgggtacggggacaagacacctctgacttggttaggccgactcctgagcgctgggttcgcactcctcggcatttctttttttgccctgccggctggtatcctcggtagcggttttgcactaaaggtccaagagcaacatcggcaaaagcatttcgagaaaaggaggaatcctgccgcaaatcttattcaatgtgtgtggagaagctacgccgctgacgagaaaagtgtgagcatcgccacttggaagccacatctgaaagcccttcatacatgcagccccacaaatcagaagctgagcttcaaggagagagtccgcatggcttcgccaaggggtcagtcgatcaaatcccgtcaggcctctgtgggcgaccgacgcagcccgtcgactgatatcaccgcagagggttccccgactaaggtgcaaaaaagctggtcatttaacgaccgcacgcggtttcgcccatccctgaggctgaagtcaagccaaccgaagcccgtcattgacgctgacaccgccctgggaactgacgacgtgtatgatgaaaaaggatgccagtgtgatgtgtccgtggaggacctaacgccgccattaaaaaccgttatccgcgccattcggatcatgaaattccacgttgctaaaaggaaatttaaagagacacttagaccctatgatgtcaaagatgtgatcgaacagtacagtgctggacatctggacatgttatgccgcattaagtccttgcagacaagagtcgaccagatcttgggcaagggacagattactagcgacaagaaaagccgagaaaagatcaccgccgaacacgaaacaaccgacgacctgtccatgttgggtcgcgttgtgaaggtggagaagcaagtgcagtcaatcgagtctaaactagactgtctcctggacatataccaacaggtgttgagaaaggggtccgcctcggcgctcgcactggcatcttttcagatccccccgtttgagtgcgaacagaccagcgactaccagagccccgtggattccaaggacctgagtggaagtgctcagaactccggctgcttgagcaggagtacctccgccaacattagccggggactccagttcattctgactccaaacgagtttagtgctcaaacgttctacgctcttagcccaactatgcactcacaggccacccaggttcccatcagtcagagcgatgggagcgctgttgctgcgacgaataccatcgccaaccagatcaacactgcccccaagccagctgctcccaccacccttcagatccccccacccctaccggccatcaaacacttgcccaggcccgagacacttcaccccaatcctgccggtttgcaggagagcatctcggacgtcactacatgcctggtggcgagtaaggaaaacgtgcaggttgcccagtccaatttgaccaaagataggagcatgcgcaagagttttgacatgggtggtgagacacttctttctgtctgccctatggtgcccaaggatcttggtaagagcctgagcgtgcagaacctgatccgcagcactgaggagctgaacatacaactgagtggcagcgaatcttcaggatcccgtggctctcaggatttctacccgaaatggagagaatccaaactgtttatcaccgatgaagaggtgggacctgaggagaccgagactgatacctttgacgccgcgccccaaccagccagagaggctgcatttgcctccgattccctcagaacaggcagatctcgctcctctcagagtatttgtaaagctggcgagagtaccgatgccctgtcgctgcctcacgtgaaactgaaatag

SEQ ID NO: 129548 - DNA, 2469 bp, synthetic construct
  misc_feature 1..2469: note = Description of Artificial Sequence: Synthetic coding sequence
  source 1..2469: mol_type = other DNA
atgcctaggcatcacgccggtggcgaagaaggtggcgccgccgggctgtgggtcaagagcggcgccgctgccgccgctgccgggggaggccgtcttgggtctggtatgaaggatgtggagtcaggacgcggtagggtgcttctcaatagcgcggctgcaaggggggatgggctgttgctgctggggaccagggctgctactctcggcggaggcggcggaggactgcgtgaatcaagacgtggcaagcagggcgcaagaatgtccttactgggcaagcccctttcatacacgagctctcagtcctgcagacgcaacgtaaagtaccgccgggtgcagaactatctgtacaacgtcttggaacgaccacggggctgggcgttcatttatcacgcctttgtgttcttactggtgtttggatgcctcatcctctccgtcttctccactatccctgagcacactaaactggccagctcttgcttgctgatcttagaattcgtgatgattgtcgtgtttggactggaatttatcattcggatctggtctgctggatgttgttgccgctatcgtggctggcagggaagactgaggtttgcgaggaagcctttttgtgttatcgatactattgtgctgatagcttcaattgctgtagtaagcgctaaaacacagggaaacatcttcgcaacatccgccctccgtagcctgagatttctccaaattctgaggatggtgcggatggaccgacggggcggcacttggaagctgttgggatcggtggtgtatgcacacagcaaggagcttattactgcttggtatattggattcctcgtgttaattttttcttccttcctggtctatctggtcgagaaagacgcaaacaaggagttctctacatacgcagacgctctgtggtgggggacaattaccctcactacaatcggctatggagacaagactcctcttacatggctggggagactcctttccgctggttttgctttgctgggaatcagttttttcgccctgccagccgggattctcgggagtggattcgccctgaaagtccaggaacagcaccgacaaaagcactttgaaaagagacgaaacccagctgctaatctcatacagtgcgtgtggagaagttatgcggcggatgagaaaagtgtatccattgctacctggaagcctcacctgaaggcgctgcatacctgttccccgaccaagaaggagcaaggtgaggcctcttctagaatcatgaagttccacgttgcaaagagaaagttcaaggagaccctgcggccctacgacgtcaaagatgtgattgagcagtactccgccgggcacctcgatatgctgtgtcgcatcaagtcactgcagactcgtgtagaccaaatcttaggaaaaggtcagatcacctccgataagaaatcccgggagaagattactgccgaacacgagacaacagacgatttaagcatgttgggccgagtggtgaaagtggagaagcaggtgcagtccattgaatctaaactggattgcctactggatatttatcagcaagtcctgcgcaaggggagcgcctccgcacttgcgctggcctccttccagattcccccattcgagtgcgagcaaacctccgattatcagtctcctgtcgactcaaaggacctgtcaggctccgcccagaacagcggttgcctctctaggtccacgtccgctaacatttctcgtggcttacagtttattctgacccctaacgaatttagcgcacagaccttctatgcactaagtccaactatgcacagccaagctactcaggtaccaattagccaaagcgacgggtcagctgtagccgctactaacactattgcgaatcagattaataccgcccccaaacccgcagctccaaccaccttgcagattcctccccctttgccggctataaagcacctgccccgtcccgaaacgcttcaccccaatcccgctggcctgcaggaatctatctccgatgtcacaacttgtctggtcgcgagcaaggaaaatgtacaggttgcccagagcaacctgacaaaggacaggtcaatgagaaagagttttgacatggggggcgaaacattgctgagtgtctgccctatggtccctaaggatctaggtaagagtttgtccgtccagaatttgatccgaagtacggaggagctgaacatccagcttagcgggtccgagtctagcggttcaagaggctcccaagacttctatcctaaatggcgggaatcaaagttattcatcactgatgaggaagtcggcccagaggaaacggagactgataccttcgatgctgcaccacagccagcccgagaagccgcctttgcaagcgactccctgcgcaccgggcgctcccgatcttcacagtccatatgtaaagctggggaatccacagatgccctgtcactgccacacgttaaactgaagtag

SEQ ID NO: 129549 - DNA, 2856 bp, synthetic construct
  misc_feature 1..2856: note = Description of Artificial Sequence: Synthetic coding sequence
  source 1..2856: mol_type = other DNA
atgcctaggcatcacgcaggaggcgaggagggtggcgccgcagggctgtgggtgaagagcggagctgcagccgctgcggccgggggcgggcgcctggggtctggcatgaaggatgtggaatccggaaggggacgcgttctgttaaattcggccgcagccagaggagatgggctactgctcctgggaactcgtgccgccacattgggcggcggcgggggcgggctccgggagtccaggagaggtaaacagggtgccagaatgagccttttaggtaagcccctctcatatactagttcacagtcttgcaggcggaacgttaaataccggagggtgcaaaattacctttataacgtcctcgagcgtcctcgcggttgggcttttatttaccacgcatttgtcttcctgcccgtgtttggctgcttgatcctgtctgtgttctccaccatccccgagcacactaagctggcctcgtcttgtttgctgatcctcgagttcgtcatgatcgttgtctttggcctggaattcatcattagaatctggtcagctggatgctgctgtcgctaccgcggttggcagggccggttgagatttgcacgcaagccattttgcgtgatcgacaccatagtcctaatagcttctatagctgtcgtgtctgccaaaacacagggcaatatttttgccacaagcgccttgcgatccctccggtttctgcagattctgagaatggtacgcatggaccgacgggggggcacttggaaattattgggatccgtagtgtacgcacacagcaaagaacttattaccgcatggtacattgggtttctcgtgctgattttttccagcttcttagtgtatctagtggaaaaagatgcaaacaaggaatttagcacgtacgccgacgccctttggtggggcactataaccctcaccacaattggatatggcgataagacccccctcacatggttagggcggttactgagtgcaggcttcgcgcttttaggtataagcttctttgctcttcccgccgggattctgggttcaggcttcgcccttaaggtacaggagcagcacagacaaaagcattttgaaaaacgccgaaatcctgcagcaaacttaatccaatgcgtctggagatcatacgcagcagatgaaaaatcggtgtctatcgcgacatggaaacctcacctaaaagccctgcacacttgctcacctacaaagaaggaacagggagaggctagctccagtaagttttgttcaaacaagcagaaactatttcgaatgtacacctcccggaagcagtctcaaaaactgagcttcaaggagagggtacgaatggcctcacccagaggacagtccattaaatctagacaagcttcagttggcgacaggaggtccccttctaccgatatcaccgcagaagggagccctaccaaagtccaaaagagctggtcatttaatgatcgcaccaggtttaggccttctcttagattaaagtcctctcagcccaaaccggttatcgatgctgacacagccctgggcacagatgatgtgtatgacgaaaaggggtgccagtgcgatgtcagtgtagaggacctcaccccgcccctgaaaactgtaattagggccatacgtatcatgaagttccacgtcgctaaacgtaaatttaaggaaaccctccgaccgtatgacgttaaggacgtgatcgaacagtactccgccgggcacctggatatgctgtgcaggatcaagtcgctgcaaacaagagtggatcagatcctaggaaagggccagattacaagcgacaagaagagtagagaaaaaatcacagccgaacacgagacgactgacgatttgtcaatgctgggaagagtagtgaaagtggaaaaacaagtccaatctatagaaagcaaactcgactgtctgctggatatctaccagcaggtgctccggaaaggtagtgcaagtgctctggccctggcttcgttccagatccctccgtttgaatgtgagcagacatccgactaccaatccccagtcgatagtaaggacctttctgggtcagcacagaactctggctgcctctcaagaagcacaagtgccaatatatcccggggcctccaattcattctcactcctaatgagttctccgcacaaaccttttacgccttatcacccacgatgcatagccaggcaacacaggtgccaatttcgcagtcagacgggagcgccgttgccgctacaaataccatcgccaaccaaattaacactgctccgaaacccgccgctccaactactcttcagatcccacctcctttaccggccattaagcatctgccccggccagaaactctgcaccccaatccagcggggctgcaggagtctatcagcgacgttaccacatgcctggttgcctctaaagagaatgtgcaggtggcccagtctaacctgaccaaggatcggtctatgaggaagagctttgacatgggcggggagactctgctgtccgtgtgcccaatggttcccaaagatctggggaagagcttgtccgtacagaatctgatacgctcaacagaagaactgaacattcagttgagtggttcggagagtagcgggtcccggggcagtcaggacttctaccccaaatggcgggagtcgaaacttttcataaccgacgaagaggtgggccccgaagagacagaaaccgacacgtttgatgcagcgcctcagcccgcccgagaggctgccttcgcatcagattccctgcggacagggagatccagatcttcccagtccatttgcaaggccggagagagtaccgacgcactttctctccctcatgtcaagttaaaatag

SEQ ID NO: 129550 - DNA, 2577 bp, synthetic construct
  misc_feature 1..2577: note = Description of Artificial Sequence: Synthetic coding sequence
  source 1..2577: mol_type = other DNA
atgccggccggtatgacaaagcatggcagccgttcaacctcaagcctgccccctgaacccatggaaatagtgaggtctaaggcctgcagcagacgcgtgcggttgaacgtaggcgggctggcgcacgaggtactgtggagaactctggacagactgccacggacacgcctggggaagttgcgggattgtaatacacacgacagcctgctggaggtgtgtgacgattatagcctggacgataacgaatattttttcgatcggcacccgggagccttcacctcgatcttaaacttctaccggaccgggcgtctgcacatgatggaggagatgtgcgcactcagcttctcgcaggagctggattattggggcattgatgagatctatctggaatcctgttgccaggcccggtaccaccaaaaaaaagagcaaatgaatgaagagcttaagagagaggcagagactctgagagagagagaaggtgaagagtttgataatacttgttgtgccgagaagagaaagaagctgtgggacctgctggaaaagccgaatagctcggtggcagccaagattctggctataatttctataatgttcattgtgctctccacaattgccttatcattaaacactctgccggagcttcagagtttagatgaattcgggcagtctacagacaacccccagctggctcatgtcgaggcagtgtgtatcgcctggttcacaatggagtatcttttgcggtttctttcatctcccaaaaagtggaaattttttaaaggtcctttgaacgctatagatctgctcgccatcctcccctattatgtaaccatctttcttacggaatccaataagagcgtgctgcaatttcaaaacgtgcgtagggtggtacagattttccggataatgcgcattctgcgcatcctcaagctggcccgccattcaacagggctgcaatccctgggttttaccctgcggcgctcctacaatgaactggggctcttgatattgttcctcgccatgggcattatgattttttctagcctggtgttctttgcagaaaaggacgaggacgatacaaagtttaaatcaatccctgccagcttctggtgggctaccataactatgaccactgtggggtacggcgacatctaccctaagaccctgctgggaaagattgtggggggtctgtgttgcatcgccggcgtcttggtgatagctttgcctatcccgattatagtgaacaatttttccgagttctataaggaacagaagcgtcaggaaaaagctattaagagaagggaggcattggaaagggcaaagcggaacggcagcattgtatctatgaacatgaaggacgctttcgcgagaagtatagagatgatggacatcgtagttgaaaagaacggagagaacatgggcaagaaggacaaggtacaggataaccacttgtctccgaataagtggaaatggacgaagcgtaccctctccgagacttcctcaagcaaatcatttgaaaccaaggagcaggggagccctgagaaggctaggagctcaagctccccgcagcatctgaatgtgcagcaactcgaggacatgtataataaaatggccaagacccagtcgcaaccgatcctgaataccaaggagagtgcagcgcaaagtaagcctaaggaggagctggagatggaatctatcccctcccccgttgccccattacccacccggacagagggagtcatcgatatgcgatccatgtccagcatcgacagctttatctcctgtgctacggacttcccagaagccactcggttctctcactccccactcacgagcctgcctagcaagacagggggatccacggcgcccgaggtggggtggcggggcgctcttggcgcctctgggggtagattcgtggaagccaacccatccccagacgcctcccaacattcctcatttttcatagagtcacctaaatcctctatgaaaactaacaatcccctcaagctgcgagccctgaaggtgaacttcatggaaggcgacccatcacccctgctgccagtattggggatgtaccatgaccccttgaggaaccgggggagcgcagccgccgcggtcgcaggcctggaatgcgcaactctgctggataaggcggtgctgagcccagaaagcagcatctacaccaccgcatcagccaagactccacctagatcacctgagaaacacaccgcaatcgccttcaactttgaggcaggcgtccaccagtatatcgacgctgacacagacgatgaaggccagttgctgtacagcgtggacagctccccacccaagtctctgcctggcagcacctctccaaaattcagtacaggcaccaggagcgagaagaatcattttgaatcgagtccactgcctacctcccccaagtttcttcggcaaaattgtatttattcgacagaggccctgaccgggaagggcccgagcggtcaggagaagtgtaagttggaaaaccacattagtcccgatgttcgcgttttaccaggcggaggcgctcacggaagcactcgagaccagagcatttag

SEQ ID NO: 129551 - DNA, 2442 bp, synthetic construct
  misc_feature 1..2442: note = Description of Artificial Sequence: Synthetic coding sequence
  source 1..2442: mol_type = other DNA
cgggacggaggggaaaaaactgcagtcaccagactgggtaaactgcgggattgtaatacccacgacagcctcctcgaggtgtgtgacgattactctctggacgataacgagtacttctttgacaggcaccccggcgcattcacttcaatcctaaacttctatcgtactggccgccttcatatgatggaggaaatgtgtgcactgagcttttctcaggaactggattactgggggatagacgagatttacctggagtcatgttgtcaggccaggtaccatcagaagaaggaacaaatgaacgaggagctgaagagggaggcagagacactgcgcgaaagggagggagaggagtttgacaatacctgttgtgcagaaaagcgaaagaagctttgggacctgctggaaaagccaaattcctccgttgccgcgaaaatcctggctatcatcagcatcatgtttatagtacttagtacgatcgccctctcgttaaatacacttcctgaactgcaatcccttgatgagtttggccagagtactgacaatccacaactggcccatgtcgaggcggtctgtattgcatggtttactatggaataccttctgcggtttttgagctcgccaaaaaaatggaagttcttcaagggccctctcaatgctatagacctgctggcaatcttaccgtattatgtaaccatctttttgacggagtccaataaatctgtcctacagtttcagaacgtcagaagggttgttcagatctttcgcattatgcggatcctgaggatcctaaaactggcccgtcactcaacgggacttcagagcctgggtttcaccctacgccgaagttataacgagttggggctcctgattctgttccttgccatgggcatcatgatcttttcatcccttgttttttttgcggaaaaggacgaagacgacaccaagtttaaatcaatcccggctagcttttggtgggccacgatcactatgaccaccgtcggttacggcgacatttatcccaaaaccttgcttggcaagatcgtgggagggctttgctgtattgccggcgtactagtgatagctctcccgatacctattatcgtgaataatttttctgaattttacaaagagcagaagcgacaagagaaggcgatcaagcgccgcgaagcactcgagagagctaaacgcaacggtagcatcgtttcaatgaatatgaaggatgcttttgcgaggtcaatcgaaatgatggacattgtcgtagagaagaatggagaaaacatggggaagaaggataaggttcaagacaatcacctgagccctaataagtggaaatggacaaaacgcacactcagcgagacttcttcttccaaaagtttcgagacaaaagagcagggatccccagagaaagctaggagtagcagttcgccccagcacctcaatgtgcagcagctggaggatatgtacaataagatggcaaagactcagagccagccaattttgaataccaaggagagcgcagcccaatcaaaaccgaaggaagagttagaaatggaatccattcctagtccagtggcccccctgcctacacggactgaaggagtcatcgatatgagaagcatgtcctctattgacagtttcatatcgtgcgccacagatttccctgaagcaacgaggttttcccactcacccctgacaagtctcccatctaaaacaggaggtagcacagcccccgaagtgggttggcgtggggcccttggggcctcgggagggagattcgtggaggctaatccgagccccgacgcgtcacagcattcctcattctttattgaaagtcctaagagctccatgaaaacgaataatcccttgaaactgagagctctgaaagtcaattttatggaaggagacccttcacctctgctccccgtcttgggtatgtaccacgatccgctgcggaatagaggctccgctgctgctgccgtggcgggcttagagtgcgctactctgctggataaagccgtgctttctcctgagtcaagcatctacaccaccgcatcagcaaagacaccaccccgtagtccagagaagcacacggccattgctttcaactttgaggccggagtgcaccaatacattgacgccgatactgacgacgagggtcagttgctgtactcggtggattcatctcccccaaaaagcctccccggctcgaccagcccaaaattcagcaccggaacacgcagtgagaaaaaccattttgagtcaagtcctctgccaacatccccaaagttcctacgccagaactgcatttattctactgaggctctgaccggcaagggccctagcggccaagagaaatgtaaactggaaaaccacatcagcccagacgtcagggtgctgcctggagggggcgcccacggctctacgagggaccagtctatctag

SEQ ID NO: 129552 - DNA, 2736 bp, synthetic construct
  misc_feature 1..2736: note = Description of Artificial Sequence: Synthetic coding sequence
  source 1..2736: mol_type = other DNA
atggccgaaaaagcccctccagggttgaatcgcaagacctctcgctcaaccctgagtctgccaccagagccggtggacattatcagatctaaaacttgttccaggcgagtcaagatcaacgttggcggcttaaaccacgaggttctctggaggaccttggaccgtttaccgcgtacacgcctgggaaagctgagagactgcaacactcatgagagtctcctggaagtttgtgacgattacaacctcaatgaaaacgaatacttttttgacaggcacccgggggctttcacctctatcctgaacttctatagaactggcaaactgcacatgatggaagaaatgtgcgcactgtcattcgggcaggagctagattactggggaatcgacgagatttatctggaatcatgttgccaggcaagatatcaccagaagaaggagcagatgaatgaggaactcagaagggaagctgaaactatgagggagcgagaaggcgaggaatttgataatacttgctgtcccgataagaggaagaagttatgggatctgcttgagaaaccaaattcctcagtggctgcaaagattctggccatagtttccattctcttcattgtgctcagtacaatcgcactgagtctcaacacactgcctgagctgcaagagaccgatgagtttggccagctgaatgataacagacagctcgcacatgtggaggccgtctgtatagcatggtttactatggaatatctgttgcgctttttgtcgtccccgaacaagtggaagtttttcaaaggaccgctcaatgttattgacttactggcaatcctcccatattatgtaactattttccttaccgagtctaacaaaagtgttcttcagttccagaacgtcaggagagtggtgcaaatatttaggatcatgaggatcctccgaatccttaagctcgcccgacattcaactggccttcagagcctaggctttacgctcagacgatcttataacgagctaggactattgatcctctttctcgcaatgggtattatgatcttcagctcactggtgtttttcgcagaaaaagacgaggatgctactaagttcactagcatccctgcttctttctggtgggccactatcacaatgacgacagttgggtacggggatatctaccctaaaacactattaggtaagatcgtgggcggcctatgctgtatcgccggagtccttgtcattgccttgccaattcctatcattgtgaacaatttttcagaattttataaggagcagaagcgccaggaaaaggccataaagcgcagggaggccctcgaacgggccaagaggaacggatcaatcgtgtcgatgaatctgaaagacgcctttgcacggtccatggagttgattgatgttgcagtggagaaagccggagaatccgccaacaccaaagattctgctgacgataatcacctctccccatcccggtggaagtgggctcggaaagctttgtctgagacctccagcaacaaaagtttcgaaaataagtaccaggaggtatcccagaaggacagccacgagcagctgaataacacctcttcgagctcccctcagcatctgtctgcacagaaattggaaatgctgtataatgagataacgaagacacagccccattcccaccctaacccggactgccaggagaagcctgagaggccttcagcttatgaagaggagatcgagatggaggaggtggtatgccctcaggaacagctagccgtcgcacagacggaggtcatcgtagatatgaagagtacctcctcaatagattcttttacctcatgcgccaccgactttacggagacagaacgctctcctctgcctcccccttccgcttctcatctgcagatgaaatttcctactgacctccctggaactgaagaacatcaacgtgctaggggccccccttttcttaccctgtccagagagaaaggacccgccgcacgtgatggtacgttggagtacgcccctgtagacatcactgttaatctcgatgctagcggatctcagtgcggcctgcattccccactacagtctgataacgccacagacagtcctaagagctctctgaagggttccaatcctctcaagagcagaagcctgaaagtgaactttaaagagaaccgcggctccgcccctcagaccccgcctagcaccgccagacctctgccggtgaccactgctgatttcagtcttactacgcctcaacacatcagtacgattttgctggaggagacgccttctcagggggacagacccctcctggggaccgaggtgtctgctccgtgccaagggccaagtaagggcctgtcccctcgattcccgaagcagaaactgtttcccttctcttcgcgggaacggcggtctttcaccgagattgacaccggcgacgacgaggacttcctagagttgcccggtgctcgcgaggaaaagcaggttgatagctctccgaattgtttcgccgataagccttcagatgggcgggaccctcttcgagaggaggggtccgtggggtcatcaagcccccaggataccggacataactgccggcaggacatctatcatgcagtgtcagaggtgaagaaggattcctcccaggaaggctgcaaaatggagaaccatctgttcgccccagagatccactctaaccctggagacaccggctattgtccaactagggaaacgtcaatgtag

SEQ ID NO: 129553 - DNA, 1206 bp, synthetic construct
  misc_feature 1..1206: note = Description of Artificial Sequence: Synthetic coding sequence
  source 1..1206: mol_type = other DNA
atgcaggtcagcattgcctgtacggaacataaccttaagtctcgcaatggtgaagaccggttgctgtcaaaacaatcttccacagcacccaatgtggtgaacgccgccagagctaagttccgaactgtggcaatcatcgcacgctcgcttggcacatttaccccacagcaccatatctcattgaaagaaagtacagccaagcagaccggcatgaagtacagaaacctgggaaagagtggcctgcgagtgtcctgtctgggattagggacttgggtgacatttgggggccagatatccgacgaagttgctgagaggctgatgaccatcgcttacgaaagtggagtgaatctctttgacaccgccgaggtttacgcagcagggaaagcggaggttatcctgggttccatcatcaaaaaaaagggctggcggagatcctctctcgtgattacaacaaagttgtactggggtggaaaggcagagactgaacgaggtcttagcagaaagcatataatcgagggacttaagggatcactgcagaggctgcagctggaatacgtcgacgttgtttttgctaataggccggactcaaatacgcccatggaagaaatagtgcgggcgatgacccacgtgattaatcagggaatggctatgtactgggggacctcacggtggtcggctatggaaattatggaggcttacagcgtggctaggcagtttaatatgatacccccagtgtgcgagcaggccgagtaccacctgttccagcgggaaaaagtcgaagtgcagctgcctgaactgtaccacaagatcggggtgggggcgatgacctggagcccactcgcttgcggcatcatctccggaaagtacggaaacggtgttcccgagagctcacgcgcatctctaaagtgttatcaatggctgaaagagagaattgtgtcggaagaaggcagaaagcagcaaaataagctgaaagacctatctcccattgcagaaaggttgggatgtaccttgcctcaactcgccgtcgcctggtgtctgcgaaacgaaggggtcagctccgttttgcttggtagttctactcctgagcaactcatagaaaacctgggagccattcaggtattgccaaagatgaccagccatgtcgtgaacgagattgataacatactcaggaataagccgtatagtaagaaagactatagaagctag

SEQ ID NO: 129554 - DNA, 1173 bp, synthetic construct
  misc_feature 1..1173: note = Description of Artificial Sequence: Synthetic coding sequence
  source 1..1173: mol_type = other DNA
atgttagctgcccggaccggcgcagcgggctcccaaatttccgaggagaatactaagctacgcagacagtcggggttctccgtcgccggaaaggacaaatctccgaaaaaggcaagtgaaaacgctaaggattcctccctctcacctagcggagaatctcaactgagggcaagacagctcgcccttcttcgcgaagtagagatgaattggtacttgaagttatgtgacctctcgagtgaacacactaccgtgtgtaccacaggcatgcctcatagaaatctgggtaagtctggcctgagagtctcttgcttgggtttgggaacttgggtcaccttcgggggccaaataagcgacgaggtggccgagagactcatgacaatcgcttacgaatctggagtgaatctgtttgacacggctgaggtttacgctgcaggtaaagccgaagttatcctgggctcaatcataaagaaaaagggctggcggaggtccagcttagtcattaccaccaaattgtattggggcggaaaagccgagaccgaaaggggcttgtcacggaagcatattattgaggagatcgtgagggccatgacccacgtgattaatcagggcatggctatgtactggggtacaagcagatggagcgccatggagatcatggaagcttactcagttgctcggcagttcaacatgatccctcccgtgtgcgagcaagcagagtaccacctgtttcagagggaaaaagtcgaagtgcagttgcctgagctgtatcataagatcggtgtgggagctatgacttggtctccattagcatgcggcatcattagcggcaaatatggcaatggcgtgcccgagagctccagggcatccttgaagtgctaccagtggcttaaggagcgtatagtctccgaagaaggcaggaaacagcaaaataagctgaaggatctgtctccaatcgcggagaggttgggttgcacacttcctcagctggccgtcgcatggtgcctgcgcaacgagggcgtttcctctgtgcttctaggctcttcaacccccgaacagctgatagagaatttgggagccatacaggtcttgcccaaaatgaccagccatgtggtgaatgagatagacaacatccttcggaataagccatacagcaagaaggattatcgttcctag

SEQ ID NO: 129555 - DNA, 1227 bp, synthetic construct
  misc_feature 1..1227: note = Description of Artificial Sequence: Synthetic coding sequence
  source 1..1227: mol_type = other DNA
atgcatctgtacaagcctgcttgcgcagacatcccaagtccgaagctgggcctgcctaagtcttcggagtcggcactgaagtgtagatggcacctcgcagtgacaaagacccagccgcaggccgcatgtaaacctgttagaccctctggtgctgcagagcagaaatacgtggagaagtttcttagggtccacggcattagcctccaggaaacaaccagggcagaaaccggaatggcgtacagaaacctggggaagagcggcctgcgcgtgagctgcctgggcctcggcacgtgggtcacatttggaggccagatttccgatgaggttgctgaaagacttatgaccattgcctacgaatcaggtgtcaacctatttgatactgccgaggtgtatgccgccgggaaggctgaggtaatcctgggttcaatcattaagaaaaaaggatggcgccgttctagcctcgtcatcaccaccaaactgtactggggtggtaaagctgagacagaacggggcttgtcccgaaagcatattatcgaagggcttaaggggagcctccagagactgcagctggaatacgtcgacgtcgtgtttgcaaatcgtcccgacagcaacacccctatggaggagatcgtccgggccatgacccacgtcattaaccagggtatggccatgtactggggcacttctagatggtctgcgatggaaatcatggaagcatacagcgtggcaaggcagttcaacatgattccgcctgtgtgcgagcaggctgagtaccacctgttccaacgcgagaaagtggaggttcagctccccgagctttatcataagattggcgtgggggccatgacctggtcgccactggcttgtggtatcatttcaggtaagtacggcaacggtgtgcctgagtctagtagggcaagcctgaaatgttaccagtggcttaaggagcggatcgtaagtgaggagggcaggaagcagcagaacaaactcaaggatctgagtcctatagcagaacgcctgggttgtactctgccccagcttgccgtggcctggtgcttacggaatgagggtgtgtccagtgtcctgcttggttcgtcaacgccagagcagctcatcgaaaacctgggggccatacaggtgttgcctaagatgacaagtcatgtggtcaatgaaatcgacaatatcttgaggaacaaaccttactctaaaaaggattataggtcctag

SEQ ID NO: 129556 - DNA, 1260 bp, synthetic construct
  misc_feature 1..1260: note = Description of Artificial Sequence: Synthetic coding sequence
  source 1..1260: mol_type = other DNA
atgctggccgcacggacaggtgctgcgggctcgcagataagtgaagagaacacaaagctgcggaggcaatccggctttagtgtggcaggcaaagacaaaagtcctaagaaggcaagcgaaaatgctaaggactcctctctgtctccgtccggagaatctcagttgcgcgcacggcagctagcgctgttgcgggaggtggagatgaactggtacctgaagttatgcgatttgagttcggagcatactaccgtctgcaccactggcatgccccacaggaacctaggcaagagcggattgcgggtttcatgtctcggacttggaacctgggtgacatttggtggccagatctctgatgaggtggctgagcgactgatgaccattgcatacgagagcggcgtgaacctgttcgacacggccgaagtgtacgcagcagggaaggccgaggtgattttaggaagcattatcaaaaagaaagggtggaggcggagttcactggtaatcactacaaaattatattggggcggtaaggccgagaccgaacgggggctatcccgaaagcatataattgaagggctcaaaggatctctgcaacgtctgcagctcgaatacgttgatgttgtcttcgcaaataggcccgattccaacactcctatggaagagatcgtgagggccatgacacatgtgatcaatcagggaatggcgatgtattggggcacatctcgttggagcgcgatggagattatggaagcttattcggtagcaaggcagtttaatatgatcccaccagtatgcgagcaggccgaataccacctctttcagcgcgagaaggtcgaagttcagctccccgaactttaccacaagataggcgtgggagccatgacctggtcgcccttggcctgtggcatcataagcggaaagtatggtaatggagtgcctgagtcctctagagccagtcttaaatgttatcagtggcttaaggaaagaattgtgtctgaggaggggcgcaagcagcagaacaaactgaaagacctgtcacctatcgctgagcgccttggttgcactctccctcaactggcagtggcctggtgcctcaggaacgagggtgtaagcagcgtcctcctcggatctagcacgcctgagcagctgatagagaacctcggtgccattcaggtgctgcctaaaatgacctctcacgtggtaaatgaaatcgacaatatattacgcaataagccctacagcaagaaggactatcggagttag

SEQ ID NO: 129557 - DNA, 1104 bp, synthetic construct
  misc_feature 1..1104: note = Description of Artificial Sequence: Synthetic coding sequence
  source 1..1104: mol_type = other DNA
atgtatcccgagtccaccactggctcgcccgcgcgacttagccttcggcagactggatctcccggtatgatctactcgactagatatggtagtcctaaacggcaactgcagttttacaggaacctgggtaagtccggtctgagagtaagttgcctgggtttgggcacttgggtgacttttggcggtcagataactgacgaaatggccgagcagcttatgacactcgcctatgacaacggaatcaatctttttgatacggctgaggtttacgcggccggaaaggccgaagtggttctgggcaacataattaagaaaaaaggatggcgtagatcatctctagttattaccacgaaaattttttggggtggcaaggccgagactgaacgcggcctgagtaggaaacacatcatcgagggattgaaggctagcttggaacgacttcagctggaatatgtagacgtggtgttcgccaaccgacccgatcctaacactccaatggaagagaccgtccgtgccatgacacacgtgattaaccaaggcatggctatgtattggggaacttcccggtggtcctcaatggagatcatggaagcctattccgttgcaaggcagttcaaccttaccccacctatatgtgagcaggccgaataccacatgttccagcgtgagaaggtggaggttcagctgccagagttgttccacaagattggagttggtgccatgacttggagccctctagcctgtggaatagtgtcagggaagtacgactccggcatccctccttattccagggcctctcttaagggatatcagtggctcaaggacaagattttgtccgaagaggggaggcggcagcaagcaaaacttaaggaactgcaggcaatcgccgagagactaggctgcaccctgccccagctcgccatcgcttggtgcctgcgcaatgagggcgtgtcaagcgtgctgcttggcgcatcaaacgccgatcagttaatggagaatatcggcgcaattcaggtcctgcctaaactcagtagcagcattattcacgaaatcgactccattttgggcaataagccttactccaaaaaggactacaggtcctag

SEQ ID NO: 129558 - DNA, 1104 bp, synthetic construct
  misc_feature 1..1104: note = Description of Artificial Sequence: Synthetic coding sequence
  source 1..1104: mol_type = other DNA
atgtatcctgagtcaacaacaggcagtcccgccaggttgtccctcaggcagacaggctcacccgggatgatctactcaacccgatacggcagccctaagcgacagctccagttttatcgcaacctgggcaaaagcggtctgcgtgtgagctgtctgggactcggcacttgggttactttcggcggccagatcacggacgagatggccgagcagctgatgactcttgcttatgataacggaatcaacctttttgataccgccgaagtttatgcagcgggtaaagcagaagtcgtcctgggcaatataatcaagaagaaaggttggcgaaggagctctctggtcatcactaccaagatattctggggaggcaaggctgaaaccgagcgtggactgagcagaaaacacattattgagggcctcaaggctagcttagagaggctccagctcgaatacgtggacgtcgtgtttgcaaatcgccctgacccaaatacacctatggaggagacggtgcgggcaatgactcatgtaatcaaccagggaatggccatgtactgggggacatcccgttggtcatccatggaaataatggaagcctacagtgttgcgagacagtttaacttaactcctccaatttgtgagcaggctgagtaccacatgttccagcgagagaaggtggaggtgcagctccccgagctgttccacaaaataggcgtgggagcaatgacctggtcccccctcgcgtgcgggattgtgagcggcaagtatgactccgggataccaccctattcccgggcatctctgaaggggtaccagtggctgaaggacaaaatcctctctgaggaagggaggagacaacaggccaagcttaaagaactgcaggccatcgccgagagactgggatgtactctgccccagttggccatcgcctggtgtctgcgaaacgagggcgtgtcttccgtgctcctgggcgcctccaacgctgatcagctgatggaaaacataggcgccatccaggtgttaccaaagttatcaagttctatcatccacgaaattgactccatcctgggcaataagccatatagcaagaaagactatcggtcatag

SEQ ID NO: 129559 - DNA, 1062 bp, synthetic construct
  misc_feature 1..1062: note = Description of Artificial Sequence: Synthetic coding sequence
  source 1..1062: mol_type = other DNA
atgtaccctgagtctacgactggctctcctgctcgactaagcttacgacagacaggaagtccaggaatgatttaccgtaacctcggcaaaagcggtctgcgggtgtcatgcctcggccttggcacctgggtaacctttggtggacagattacagacgaaatggctgagcagctgatgaccctggcatatgacaacggtatcaatttattcgatacagccgaagtttatgccgccgggaaggcagaagttgtcctcggaaatattattaagaaaaagggctggcggcgctcttctctggtgataaccaccaaaattttctggggcggcaaagctgagactgaaagggggctttcccggaaacacatcatcgagggtctcaaggcgagcctggagcggctgcagctagagtacgtcgacgtcgtgtttgcgaaccgcccagatccaaataccccaatggaagagacggtgcgcgccatgacccacgtaataaaccagggcatggccatgtactggggcacctctcgctggtccagcatggagattatggaagcatattccgtggccagacaatttaacttgacgcctcccatctgcgagcaggcggagtatcacatgttccaaagggaaaaagtggaggtacagctccctgaactgtttcacaaaattggagtaggagcaatgacatggtcacctctggcatgcgggattgtgagtggcaaatatgactctgggataccaccctacagtcgggcatcactgaagggctatcagtggttgaaagataaaatcctttctgaagaaggacgtaggcagcaagccaaactgaaagagctacaggctatagcagagaggctggggtgtactctgccacagctcgcgatcgcttggtgtcttaggaacgaaggagtgagttcagttctgctgggcgcatccaatgctgaccagctcatggaaaacattggtgcgattcaagtgcttcctaagttgagctcctccatcattcatgaaatcgatagcatcctaggcaacaaaccctactctaagaaagattatcgcagctag

SEQ ID NO: 129560 - DNA, 1248 bp, synthetic construct
  misc_feature 1..1248: note = Description of Artificial Sequence: Synthetic coding sequence
  source 1..1248: mol_type = other DNA
atgttatccatgacatattccgagtctttacggagtgtctcgtcgagatgccatagtgaatgggcccttcatcccgtgcggcaaaccgacaccttggagctgcagcgcttgcgagaagttcgggctgctgcccaggcccggaacatggaaagcttcctgcggatgcatggactgtctttagacggttgtaccgctcagagaactggcatgaagtacagaaacctgggcaagagtggcctcagagtgtcttgtctcggactcgggacttgggtgacctttggtgggcagatcacagatgagatggctgaacaattgatgaccttagcttatgataatggtatcaatctattcgacactgctgaagtttacgcagccggcaaagcggaagtggtactggggaatatcattaagaagaaaggttggcgaagatctagtctggttatcaccaccaagatcttttgggggggcaaggcagaaacagagcgtggcctctctcgcaagcatatcatagagggcctcaaagcttctctggagaggctgcagcttgagtacgttgacgtggtatttgctaacaggcctgacccaaataccccgatggaaggcgatcctttttcaagctccaagtccaggacttttattattgaggagaccgttagagctatgacacacgtcattaaccagggcatggctatgtattggggaacgtcccgatggtcctcaatggagatcatggaagcatactctgttgctcgacagttcaatctaacccctcccatttgcgagcaagccgaataccacatgttccagcgggaaaaagtggaggtgcagctgcctgagttgttccacaagatcggagtcggtgctatgacctggtcacccctggcatgtgggattgtgagcgggaaatatgactctggaatccccccctactcaagggcctccctcaaaggctaccagtggttgaaggacaagattctgagcgaggaggggcggcggcagcaggccaagctcaaggagctgcaggccattgctgagcggctcggatgtacattaccccagttagctattgcctggtgcttgcgcaatgagggagtcagctcggtgctcctaggagcttccaacgccgaccaactaatggagaatatcggagcaatacaggtccttccaaagctgagctcatctattattcacgagattgattccatcctagggaataagccttattcgaagaaggattatagatcgtag

SEQ ID NO: 129561 - DNA, 522 bp, synthetic construct
  misc_feature 1..522: note = Description of Artificial Sequence: Synthetic coding sequence
  source 1..522: mol_type = other DNA
atgtaccccgaaagtactacaggaagccctgcacggctgtcattgcgacagaccggctcccccggcatgatctactcaacacgctacggcagccccaagcggcagcttcaattttacagaaatctagggaagtctggacttagagtgtcatgtctgggtctcggaacctgggtgactttcggtggccagattacagacgaaatggctgaacagttgatgactctggcctacgacaacggcatcaacctcttcgacaccgcggaggtgtatgccgcaggaaaagccgaggtggtactgggcaacatcatcaagaaaaaaggttggtcccagcagggagaacgggccgggcaggcaagagtcaccccgccatgctctttgggccgtcgagctagagatgcttccaagagtgccggcgctggatgccacctgcaggcacaagcatgtgttccctcctcaacacaggccctgcaaacgactcgcggcagagcccctctgaagccacccccaccactggcctcgtag

SEQ ID NO: 129562 - DNA, 1062 bp, synthetic construct
  misc_feature 1..1062: note = Description of Artificial Sequence: Synthetic coding sequence
  source 1..1062: mol_type = other DNA
atgtaccccgaatccacaactggcagtccggctaggctgtccctgaggcagaccgggtcacccggcatgatttataggaacctcggcaaatctggcttacgcgtgtcttgcctgggcttgggtacctgggtgaccttcggtggccagatcaccgacgaaatggctgaacagctaatgaccttggcgtacgacaatggcattaacctgttcgatactgccgaagtctacgcggccggcaaagcagaggtggtgcttggaaacatcattaaaaagaagggctggcgtcggagctctctggtgataaccacaaagattttttggggggggaaggcagagactgaacgagggttgtcgcggaaacatattatcgagggcctgaaagcgtcactggagaggctccagctcgagtatgtggatgttgtgttcgccaataggcctgatccgaatactcccatggaggagaccgtgagagccatgacccacgtaattaaccaggggatggcgatgtactggggaacgagtcgctggagcagcatggagatcatggaggcttactcagtagcccgacagtttaacctgacgccccctatctgcgagcaggccgagtaccacatgttccagcgcgaaaaggttgaggttcagctgcctgagctgttccataagatcggggtgggtgccatgacgtggagtcctctcgcttgtggcatagtaagcggtaagtacgattcgggcatcccaccatattcccgagcttctcttaaaggctaccagtggctaaaggacaagattctaagcgaggagggtagaagacagcaggcaaagcttaaggaactgcaggccattgcggagaggctgggatgtaccctgccccagctggccatcgcctggtgtctccgcaatgaaggagtctcttctgtgctcctaggagcttccaacgccgatcagctgatggagaatattggcgccatccaggtactgccaaagctttcgtcttctattatccacgaaatagactccatattgggcaataaaccctactccaaaaaggactaccggtcatag

SEQ ID NO: 129563 - DNA, 1104 bp, synthetic construct
  misc_feature 1..1104: note = Description of Artificial Sequence: Synthetic coding sequence
  source 1..1104: mol_type = other DNA
atgtaccccgagtctaccacaggcagccccgcacgcctcagcctgaggcagacgggctcgccgggcatgatctatagtacccgatacggctcccccaagcgccaattacaattctatcgcaatttgggcaagagcgggctgagggtttcctgtttaggactgggcacttgggtcacttttggcggtcaaattacagacgagatggcagaacagttgatgactctcgcatacgacaacggtattaacctgtttgacaccgccgaggtgtacgccgccggaaaagctgaggtagtgctgggaaatataatcaagaagaagggatggcgtagatcatcactggtgattactacaaagattttttggggagggaaagcggagactgaacgcgggctgagtcgaaaacacataatcgaaggactgaaggcctccctcgaaagattgcagctggaatacgtcgacgttgtgtttgctaacagaccggatcctaacaccccaatggaggagactgtgagagcgatgacccatgtcatcaaccaaggcatggctatgtattggggcacatcccgctggtcctccatggaaatcatggaggcctattccgtggcaagacagttcaatctcacaccaccgatctgtgagcaagccgaataccacatgttccagcgggagaaagtcgaagtgcagcttcctgagttgttccacaagatcggggtcggagccatgacttggtcccctttggcttgcgggatcgtgtcaggcaagtatgactccggcatccccccgtactcacgcgctagtcttaagggctaccagtggcttaaagataagattcttagtgaagaggggcgcaggcagcaggccaaattgaaagaattgcaggcaatcgccgaacggttggggtgcaccctgccccagctagctattgcctggtgtctaaggaacgaaggcgtcagctccgtgctgttgggggcctcaaacgccgaccagttgatggagaacatcggtgctattcaggtcctgcctaagctaagcagtagcataatccatgagattgattcgatcctgggtaacaaaccctacagtaaaaaagactaccgctcttag

SEQ ID NO: 129564 - DNA, 522 bp, synthetic construct
  misc_feature 1..522: note = Description of Artificial Sequence: Synthetic coding sequence
  source 1..522: mol_type = other DNA
atgtacccggagtccacaacaggctccccagctcgcttatccctgagacaaactggctctccgggaatgatctatagcactaggtacgggagtccgaaacgccagctgcaattttaccgcaacttaggcaaatcagggctgagggtaagctgcctggggctgggaacgtgggtcacatttggtggacaaattaccgatgagatggcggagcagctgatgaccctggcctatgataatggcatcaacttattcgatactgctgaagtgtacgcagctggtaaggctgaggttgtccttggtaatataattaagaaaaaagggtggcgccaaaggggggagagggcaggccaggcccgcgtgacccccccatgttctctaggtagacgtgccagagacgcaagcaagtctgctggagccggatgtcacctgcaggctcaggcttgtgttccttctagcacccaggccctccagaccactcgggggcgggcgccgctgaagccgcccccacccctggcatcctag

SEQ ID NO: 129565 - DNA, 762 bp, synthetic construct
  misc_feature 1..762: note = Description of Artificial Sequence: Synthetic coding sequence
  source 1..762: mol_type = other DNA
atgtaccctgagtccacaaccggctctcctgccagattatcgcttcgacaaaccggaagcccaggaatgatttattcaaccaggtatggcagtcctaagaggcagttacagttttaccggaatttgggcaagtccgggctgcgcgtatcatgtctgggactaggaacctgggttaccttcggagggcaaattactgatgaaatggcagaacagctgatgactttggcgtatgacaacggcataaatctctttgacaccgccgaggtttatgccgcagggaaagccgaagtggtgcttggcaatatcatcaagaagaaagggtggaggcggtcgagcctggtcatcaccaccaagatcttctggggtggcaaagccgaaacagagaggggtctttccagaaaacacatcattgagggtttgaaggcgagtttggaacggctgcaactcgaatatgtggacgtcgtgtttgccaaccggcctgatccaaatactccaatggaagaaaccgtgagggctatgacccacgtcatcaatcaggggatggccatgtactgggggacttctcggtggagttcaatggagatcatggaagcttacagcgtggccagacagtttaatctgacaccccctatctgcgagcaagccgagtatcacatgttccagcgcgagaaagtggaagtgcaactgccggagcttttccacaagataggtgtcggcgcgatgacttggtcccctctagcctgcggaatcgtgtcagggtag

SEQ ID NO: 129566 - DNA, 765 bp, synthetic construct
  misc_feature 1..765: note = Description of Artificial Sequence: Synthetic coding sequence
  source 1..765: mol_type = other DNA
atgtaccccgagtccacaacaggctctccggcgcgattgagtctgagacagacaggatcccctggaatgatttataggaatctgggcaagtctggactgagagtttcttgtcttggcctggggacctgggttaccttcggggggcagataacagacgaaatggcagagcaactgatgactctagcttatgataatgggattaacttgtttgatactgctgaagtgtatgccgcgggcaaggccgaagttgtgctcggcaacatcataaaaaaaaagggctggaggcgctcctcgctggttataactaccaaaatcttctggggcggtaaagcagagaccgagagaggtctgtctcggaagcatatcatcgagggtttgaaagctagcctggaacgcttgcagcttgagtacgttgatgtagtatttgcaaataggcctgatcccaatacacccatggaggagaccgtcagagccatgacacacgtgataaaccagggaatggcaatgtactggggcacatcccggtggtcttctatggagatcatggaggcttattccgtcgctcgacagtttaacctcaccccccccatctgcgaacaggctgaataccacatgttccaacgggagaaagtggaggttcagttgccagagctcttccacaaaatcggggtcggggccatgacttggtctcctctggcttgcggaatcgtttccggcaagtatgattcaggcatccctccttacagcagggctagccttaaatag

SEQ ID NO: 129567 - DNA, 288 bp, synthetic construct
  misc_feature 1..288: note = Description of Artificial Sequence: Synthetic coding sequence
  source 1..288: mol_type = other DNA
atgtatcctgagtctactactggaagccccgccaggctatcactgcggcagacaggatctccaggcatgatttatcgcaacctcggtaaatcagggttgagagtctcttgccttggattggggacttgggtgacctttggagggcagatcaccgacgaaatggcagagcagctgatgacacttgcgtacgacaatggtattaacttgtttgacactgccgaggtgtacgcagccggcaaagccgaagtagtcctgggcaacatcataaagaaaaaaggatggaggtag

SEQ ID NO: 129568 - DNA, 159 bp, synthetic construct
  misc_feature 1..159: note = Description of Artificial Sequence: Synthetic coding sequence
  source 1..159: mol_type = other DNA
atgtaccctgaatccactacagggagccctgcgcgcctgtccctaaggcagactggatctccaggcatgatctacagcacacggtatggcagtcctaaaaggcagctgcaattctatagaaacctcggaaagtctgggctgcgggtctcttgtctttag

SEQ ID NO: 129569 - DNA, 903 bp, synthetic construct
  misc_feature 1..903: note = Description of Artificial Sequence: Synthetic coding sequence
  source 1..903: mol_type = other DNA
atggccgaacagctgatgaccttagcctacgataatggcattaatcttttcgacacagccgaggtgtatgccgccgggaaagcagaagtggtgctcggtaacataataaagaaaaaagggtggaggaggagttcccttgtaatcaccacaaagatcttttggggcgggaaagcagaaacagaacgcggcctcagcaggaagcacattattgagggtttgaaagcttctctggaacgcttacaactggagtacgtggatgtggtctttgctaatcggcctgacccaaataccccaatggaagagacagttcgagccatgactcacgtaattaaccagggaatggccatgtattggggcactagtaggtggagcagcatggaaattatggaggcctactccgtagctagacagtttaaccttacgccccccatctgtgagcaggccgaataccatatgtttcaacgggagaaagtagaagttcagctgccagagttattccacaaaataggagttggtgccatgacctggtctccacttgcttgcggtattgtaagtggcaagtacgactcaggtatccccccgtactccagagcgagtctcaaggggtatcaatggttaaaggacaagatactgagcgaggagggaagaagacaacaggctaaacttaaagaactccaggccatagccgaaaggctggggtgtaccttaccacaacttgcaatcgcctggtgtctgaggaacgagggtgtgagttcagtgctgctgggggccagtaacgctgatcagctgatggaaaatatcggagccatccaagtgctcccaaagttgagcagctctatcattcacgagatcgatagtattctgggtaacaagccctactcaaaaaaagactacaggtcttag

SEQ ID NO: 129570 - DNA, 1215 bp, synthetic construct
  misc_feature 1..1215: note = Description of Artificial Sequence: Synthetic coding sequence
  source 1..1215: mol_type = other DNA
atgcaggtgtctattgcttgcaccgagcagaatctgcgcagccgcagcagcgaggacagactgtgcggccctagacccggaccaggcggcggcaacggcgggcctgccggaggcggacacgggaacccacccggtggcggcgggagcggacctaaagcccgggccgccctggtacccagaccacccgcccccgcaggtgccctgcgagaatcaacaggtcgcgggactggaatgaagtacagaaaccttggcaaatcggggctccgtgtgagctgccttggactaggaacctgggtgacctttggcagtcagatttcagatgagaccgccgaggatgtactcaccgttgcctacgagcatggtgtcaacctgtttgataccgcagaagtgtatgccgccgggaaagcagagcggaccctggggaacattttgaagtccaaagggtggagaagatcatcgtacgtgataacaacaaaaatcttttggggaggccaagccgagaccgagagaggactgtctcggaagcacattattgagggcctgagaggctccctcgagcggctccaacttggctacgttgatattgtgtttgctaacagatccgaccccaattgtcctatggaggagatagtgagggcaatgacttacgtcattaatcaggggttggcactgtactgggggacttcccgctggggcgcggcagagatcatggaggcatactcgatggcccggcagtttaacttgatacccccagtctgtgagcaggctgagcaccacctcttccaaagagagaaagtggaaatgcagctgcctgaattgtatcacaagatcggagtgggatccgtgacatggtatccgctggcatgtggactgatcacttccaaatatgatggaagggttcccgacacttgtagggcctcgataaaggggtaccagtggcttaaggacaaagtgcagtccgaagatggcaagaaacagcaagctaaagtcatggacctactgccagtagcccatcagcttggatgcacagtggctcagctcgccatcgcatggtgcctgcgtagcgaaggtgtcagctccgtattgctcggagtttctagcgcagaacaactcattgagcacctcggagcactgcaggtgcttagtcagctcacgccccagaccgtgatggagatcgatggactcctcggaaacaagccccacagcaagaaatag

SEQ ID NO: 129571 - DNA, 2562 bp, synthetic construct
  misc_feature 1..2562: note = Description of Artificial Sequence: Synthetic coding sequence
  source 1..2562: mol_type = other DNA
atgagcgaaaaggtcgattggctgcaaagccaaaacggcgtatgtaaagtagacgtgtacagccccggcgataaccaggctcaggattggaagatggacacttcaaccgatcctgtgagggttttatcatggctgcggagagaccttgagaagagcacagcggagtttcaggacgtccgctttaagccaggcgaaagcttcgggggagagacaagtaacagcggcgacccccataagggattctcggttgactattataatacgactacaaagggtacgcccgaaaggttacacttcgagatgacacacaaagaaatcccgtgccagggaccaagggcgcagctgggaaacggcagcagcgtcgatgaggtgagcttttatgctaatcggcttaccaatctggttattgctatggcccggaaagagatcaacgagaaaattgatgggagcgaaaacaaatgcgtgtaccaaagtttgtacatgggtaatgagccaaccccaaccaagtctctctctaaaattgccagcgagttagttaacgaaacagtcagtgcttgctcaagaaatgccgcccctgataaggcgcctgggtcaggtgaccgcgttagtggctcatcgcagtcccctcctaatctcaagtacaagtcaacattaaaaataaaggaatctaccaaagagcgccagggcccagatgacaagcctccgagcaaaaaatcattcttttacaaggaagtattcgaatccaggaatggcgactacgcacgcgaaggaggaaggttctttcctagagaaagaaagcgttttagggggcaggaacgacccgatgacttcaccgctagtgtgtcagaaggcattatgacctatgccaacagtgtggtgtccgacatgatggtatccatcatgaagactttgaagatacaagttaaggatacaaccattgctaccatcctcttgaaaaaggtcctgctaaagcatgccaaggaggtggtgtctgatctgattgacagctttctacggaatctacactctgtaaccggtactctcatgacggatacccaatttgtatctgccgtcaaaagaaccgttttctctcatggcagtcagaaggctacagacattatggatgctatgttacgtaagctgtacaatgtaatgtttgcaaagaaggttcccgagcatgtcagaaaggcccaggataaggccgagagctactctctgatttccatgaagggaatgggcgacccgaaaaaccgcaacgtaaactttgccatgaaaagtgagactaagctgagggaaaagatgtactctgaaccaaagtctgaagaggagacttgcgccaaaacgctcggcgagcatattataaaggagggcctcacactttggcataagacgcagcaaaaagaatgcaaaagcctaggatttcagcatgctgcattcgaggcacccaatacccaacgcaagcctgcctccgatatctcatttgagtatcctgaggacattggaaatttgagcctgcccccctacccgccagaaaaaccggaaaactttatgtacgactctgacagctgggccgaggacctgattgtgtccgctctcctgctgattcaatatcatctggctcagggcggccgccgggatgccaggtcctttgtcgaagcagcagggaccacaaactttcccgccaatgaacccccggtcgcaccagatgagtcctgtttgaagtctgcaccaattgttggcgaccaagaacaggctgaaaagaaggatctaagaagcgttttctttaactttattcgcaatctgctgtcggagacgatttttaaacgggaccagtcccctgaaccaaaggttcccgagcagccagtgaaggaggacaggaagctatgcgaaaggccgctggccagctctcccccgcgtctgtatgaggatgatgaaacccctggtgccctatcggggctcactaaaatggcggtgtcccaaatagatgggcacatgagcggacagatggtggaacatctgatgaattctgtcatgaagttatgcgtgattatcgccaaatcttgcgacgcaagtctggctgagctcggtgacgacaagagcggggacgccagccggctgacgtctgctttcccggatagcctttacgagtgtctgcccgccaagggcaccgggagtgctgaagccgtgctccagaacgcataccaggcaattcataacgaaatgaggggtacaagcggccagcccccagagggttgtgctgccccaaccgtcattgtgagtaatcacaatctgacagacacggtgcagaacaagcagctgcaggccgtgttgcagtgggtggctgcgagtgagctcaacgttcccattctctatttcgctggcgatgacgaaggaattcaggaaaaactactgcaactgagcgccgccgctgttgacaaggggtgctcagtgggagaagttctccaatctgtgctgaggtatgagaaagaacgccagctgaatgaagccgtagggaatgtgacacccttgcagttactagactggttaatggtgaacctttag

SEQ ID NO: 129572 - DNA, 1488 bp, synthetic construct
  misc_feature 1..1488: note = Description of Artificial Sequence: Synthetic coding sequence
  source 1..1488: mol_type = other DNA
atgacagtgatgtcaggcgagaatgtagatgaggccagtgctgcccccgggcatccccaagacggctcataccctaggcaggccgatcatgacgaccacgagtgctgcgaaagagtggttattaatatctccggtctcagatttgagacgcagctcaagaccttggcacaattcccgaataccctgctaggaaaccctaaaaaaaggatgcggtatttcgacccgcttcggaatgaatattttttcgatcgtaacaggccaagctttgatgcaatcctttactattaccagagtgggggacgactgcggaggccagtgaacgtccctttggatatgttctccgaagaaataaaattctacgaactaggcgaggaggctatggagaagttcagagaagacgaggggttcataaaggaagaggagaggcctctgccggaaaaagagtaccagcgacaagtatggttgctgtttgagtacccggaatcttcaggacccgctcgagtgatcgccatcgtttcagtgatggtgattctgatctctattgtgatcttctgtctggagaccctgccggagcttaaggacgataaggatttcaccggcaccgtgcataggatagataacacgacggtgatctataactccaacatctttactgatcctttcttcatcgtggaaacattgtgtatcatctggtttagcttcgagcttgttgtgagatttttcgcgtgcccttccaaaaccgacttttttaagaacattatgaattttatcgacattgttgcaattataccctatttcatcactctgggtaccgagattgcggaacaggaaggaaatcagaaaggggagcaggctacctctctcgcaatcctgagggtgatcagactcgttagggtcttcagaattttcaagctgtctcggcacagcaagggcttgcagattctggggcagactctgaaggcttcaatgcgtgagctgggcttgctgattttctttctgtttatcggagtgatattgttctccagcgcagtgtatttcgcagaagccgaggaggctgagagccattttagcagcatacccgacgccttttggtgggcggtggtctcaatgacgacagtgggctacggtgatatgtaccccgtcacaatcgggggcaagattgtaggttccctatgcgccatagctggcgttctgactattgcactccctgtgcctgtgattgtgagcaactttaattacttttatcatagggagactgagggggaggaacaggcgcagctgttgcatgtaagctccccaaacctggcatctgatagtgacctgtctagacgctcatcttccaccatgagtaaaagcgaatatatggaaatagaggaagatatgaacaattctatagcccactacaggcaagtgaacatcagaacagcaaactgcaccacagccaaccagaactgtgtgaacaagtcaaagctgctgacagatgtgtag

SEQ ID NO: 129573 - DNA, 1536 bp, synthetic construct
  misc_feature 1..1536: note = Description of Artificial Sequence: Synthetic coding sequence
  source 1..1536: mol_type = other DNA
atggacgtatgcggatggaaagagatggaggtggctctcgtgaatttcgataacagcgacgagatccaggaggagcccggttacgccacagactttgactcgacaagtccaaagggtcgcccaggaggaagttcgttctcgaatggcaaaattttgatttccgaatccaccaaccatgaaactgcgttctccaagctgcccggggactacgcagaccctcccggaccagaacccgtggttttgaatgaaggcaatcagagagtgataataaatattgccggcctgcggttcgaaacgcagttgcgaactctgtcgcagttcccagaaacgcttctgggtgacagggagaagcggatgcagttttttgatagcatgaggaacgagtatttctttgaccgcaacaggcctagcttcgacggaattctttactattatcaaagtggtggtaaaatcagacggcctgcaaatgtgcccattgacatattcgctgacgagattagtttttatgagctaggtagcgaggcaatggaccaatttagggaagacgagggatttatcaaagatcccgagacacttctgccaacaaatgacattcatagacagttttggctccttttcgaataccctgaatcatcatctgctgctcgggcagttgctgtggtttctgtcctggtggttgttatttctatcacgatcttctgcctggagactttgcctgagttccgtgaggatcgcgagctcaaggtggtaagagacccgaacctaaatatgtctaagacggtgcttagccaaaccatgtttaccgacccgttcttcatggtcgaatccacttgtatcgtgtggtttacctttgagctagtactgcgctttgtggtgtgtccatcaaagaccgactttttccggaacatcatgaatatcatcgatattatctctatcattccatatttcgccactttgattaccgagttggtacaggagaccgaaccttccgctcaacaaaatatgtctctcgccatattgcggatcatcaggctggtccgggtttttcggatctttaagctctctcggcacagcaaaggactgcagatcctgggacagacgctgaaggcctcaatgcgcgaacttggactactgatcttcttcctttttatcggtgtaattctgtttagctctgcagtgtattttgccgaagtagacgaacctgagtctcatttcagtagcattccagacggattttggtgggctgttgtcacaatgaccaccgtgggatacggcgacatgtgtcccacaacgcctggagggaaaatcgtcggcaccctctgcgccatcgccggagtgctgacaattgccctgccagtgccagtgatcgtgagtaatttcaactacttttatcatagagagaccgagaacgaagagaaacagaatatcccaggcgagattgagcggatcttgaattcggtgggatctcgcatggggtctactgattcactgaacaagactaatggcgggtgcagtactgagaagtcccggaaatag

SEQ ID NO: 129574 - DNA, 1728 bp, synthetic construct
  misc_feature 1..1728: note = Description of Artificial Sequence: Synthetic coding sequence
  source 1..1728: mol_type = other DNA
atggacgagcggctgtccctgctaagaagccccccaccaccttctgctaggcaccgggcccatcctccccagcgtcctgcctcgtccggaggcgcacacaccctggtaaaccacgggtacgccgaacccgccgcaggtagggagctcccccccgacatgacagttgtgcctggcgaccacttgctggagcccgaggtggctgacggcggcggggccccgccccaggggggatgtggcggcggcggctgcgaccgatacgagcccctgcctccttctctgccagcagccggcgagcaggattgctgcggcgagagagtggttattaacatctctggtctgagattcgagacacaactgaagactctgtgccaattcccagagacgctgttgggcgacccaaaaaggagaatgagatatttcgacccgctgaggaatgagtatttcttcgatcgcaatcggcctagctttgatgccatactgtattactaccagtcgggagggaggattaggcgaccagtgaacgtgcctatcgatatcttctccgaggagatcagattctaccagctgggggaggaggctatggaaaagtttagagaagatgaaggatttctgcgggaggaggagagaccactccccaggcgcgacttccagagacaggtctggctgttattcgagtatccagagtcgagcggccccgcccggggaatagccatagtttcagtcttggtcatcctgatcagcatcgtgattttttgcctggagaccttgcccgaatttcgtgacgagaaggattacccggcttctacatcccaggacagttttgaggctgcggggaacagcaccagtggtagccgggcaggtgccagcagtttctcagaccctttttttgtcgtggagaccctgtgtatcatatggttctctttcgagctgctggtcaggttttttgcctgtccaagcaaagcaaccttcagtaggaatattatgaacctcatcgacatcgtggccatcatcccctactttataaccctaggaaccgaacttgcggagaggcagggcaacgggcaacaggcaatgagcctggctatcctaagggtaatcaggttagtgagagttttcaggatttttaagctgagcagacacagtaaaggactacagatactgggtcagacactcaaggcctccatgcgtgagctgggtttgctgatcttttttcttttcatcggagtcatcctttttagcagcgcggtctattttgccgaggccgacgacccgacaagtggatttagctcaatacctgatgccttctggtgggccgttgtcaccatgacaaccgtcggttatggagacatgcatccagtgaccatcggcggcaagatcgtgggttctctgtgtgccatcgctggcgtactcactatcgcgctgcccgttcccgttatagtgagcaatttcaattatttctaccacagggagacagagggggaggaacagtctcagtatatgcacgttggaagttgccagcacttgtcctcctccgccgaagagctgcggaaagctcgcagcaactcaacattatcaaaatccgaatacatggtgattgaggaaggaggaatgaaccacagcgcatttccccagactccattcaagactggtaacagtaccgcaacatgcaccacgaacaacaatcccaactcttgcgttaatataaagaaaatcttcacagacgtttag

SEQ ID NO: 129575 - DNA, 1962 bp, synthetic construct
  misc_feature 1..1962: note = Description of Artificial Sequence: Synthetic coding sequence
  source 1..1962: mol_type = other DNA
atggaggtggccatggtctccgccgagagttccgggtgcaattcacacatgccttatggctacgctgctcaagcccgtgcacgcgagagagagcggctcgctcacagccgtgccgctgccgctgcggctgtcgcagctgctaccgcagccgtagagggatctggtggttcaggtggggggagccatcaccatcatcaatcccggggggcttgtaccagtcacgatccccagtcgtcaaggggaagccggcgccgccgcaggcagcgctccgagaagaaaaaggctcattaccggcagagttccttccctcactgctccgatctgatgccgtctggctccgaagagaaaatactccgcgagctgtctgaggaggaggaggacgaagaggaagaggaggaggaggaagaggagggacggttttactattccgaagacgatcatggggacgaatgctcctatacggacttgttgccccaggatgaaggaggtggcggatactcctcagtgcgctattccgactgttgtgagagagtagtgatcaatgtttctgggcttcgtttcgaaacccagatgaaaacactagcacagttccctgaaaccttgttaggagacccagagaagcggacccagtacttcgatcccctgcggaatgaatactttttcgacagaaacaggcctagttttgacgctattctgtactattaccagtccggtggacggctcaagcggcctgttaatgttcccttcgacatcttcaccgaggaagtgaaattttatcaattaggagaggaagctctgctcaaattccgagaagatgagggcttcgtacgggaagaggaagatcgggctctaccagagaacgaattcaaaaagcagatttggcttttatttgaatatccggaaagctccagccccgcacgtgggatcgccattgtctctgttctcgtaattttgatctccatcgttatattttgtttggagacactgcccgagtttagagatgatcgggatttggtcatggccttaagcgccggagggcatggagggctgctgaacgatacctcagcacctcacctggaaaacagcggacacactattttcaatgatcccttctttatcgtggagactgtgtgcatcgtctggttctctttcgaattcgtggtgaggtgctttgcttgcccatcgcaggctttgttcttcaaaaatattatgaatatcatagatattgtcagcattctgccttactttatcacgctggggacagacctcgcccagcagcagggtggaggaaatgggcagcagcagcaagctatgtcttttgcgatactgcgtataatacgccttgtacgcgtgttcaggatcttcaagttgtctcgacactcgaaggggctacagatacttgggcatacactccgagctagcatgagagaactgggactgcttatcttttttttgtttatcggagtgatcctgttttcatcagccgtctatttcgccgaggcagacgagcccaccacacactttcagtcaatccctgacgccttttggtgggctgtggttaccatgacgactgttggatatggagacatgaagcctatcacagtcggcggaaaaatcgtcgggtcactgtgcgctattgccggcgtgctgaccatagctctgccagtgccggtaatcgtgagtaattttaattacttctatcaccgagaaaccgagaacgaggagcaaacccagttgactcagaatgcagtgagctgcccctatctgccatcgaacctcctgaaaaagtttcggagctctactagttcttcactgggtgataaatcggaatatctagagatggaggagggcgtcaaagaatccctgtgcgctaaagaggagaagtgccaaggcaaaggtgatgattccgaaaccgataagaataattgttctaacgctaaggcggttgagacagatgtgtag

SEQ ID NO: 129576 - DNA, 1842 bp, synthetic construct
  misc_feature 1..1842: note = Description of Artificial Sequence: Synthetic coding sequence
  source 1..1842: mol_type = other DNA
atggaaattgccctcgtccctctggagaatggcggagccatgaccgtcaggggcggcgacgaggccagagccgggtgtggccaggcaacaggaggtgaattgcagtgcccccctaccgctgggctcagcgatggacctaaggaacccgcccctaagggcaggggcgctcagcgggacgccgattcaggtgttcgcccactgccgcccctgcctgacccaggggtgcggccccttccacctcttcctgaagagctgccacgccctcggagacctcctcctgaggacgaggaggaagagggtgaccccgggcttggtacggtggaagatcaagctctcggtactgccagccttcatcatcagcgtgtccatatcaatatttctggattaaggttcgagactcaattagggaccctggcacagttcccaaacactcttctgggcgatcccgccaaaagattgcggtacttcgatccattgagaaacgagtattttttcgatcggaaccgcccctctttcgatggaattctgtactattaccaatccggcggtcgcctgaggcgtccagtgaacgtgagcctcgatgttttcgccgacgagattcgcttctaccagctgggcgacgaagccatggaacgctttcgcgaagacgaaggctttatcaaggaagaagaaaagccattgcctcggaacgagtttcaacgtcaagtctggttaatctttgagtatcctgagagcagcggcagcgcacgcgccattgcgatcgtatcagttctggtcatcctgatttcaatcatcacgttttgcctggagacgctgccagagtttcgagacgaaagggaactcctgagacatccccctgccccacatcaacccccagccccggctcccggcgctaatgggagtggcgttatggccccaccgagcgggccgacggtggctcccctgctgccacgtacattggcagatcccttctttattgtggaaaccacttgtgtcatctggttcaccttcgagttgttagtgaggttctttgcttgtccatccaaggctggcttcagccggaatattatgaatattatcgacgtggtcgcaatctttccctattttatcactctcggaactgaactagctgaacagcaaccagggggtgggggtggaggtcagaatggccagcaggccatgtcacttgcgattttacgggttatccgcttagtgcgcgttttcagaattttcaaactgtcccgccacagcaagggtctccagattctgggcaaaacccttcaagccagtatgagggagctcggacttttgatcttctttctatttatcggcgtcatcctgttctcgtccgccgtgtattttgccgaagcagataaccaagggacacacttctcctctatccctgacgccttctggtgggctgtcgtgaccatgaccactgtcggttacggtgacatgaggcctatcactgtaggcgggaagattgttggctctctgtgcgcgattgccggcgtcttgactatcgccttacctgtccctgttatcgttagtaactttaactacttctaccatagggagaccgatcacgaggagcccgccgtactgaaggaggagcagggcacacagagtcaggggccaggcctggacaggggtgttcagcgtaaggtttccggttcaaggggctccttttgcaaggctggaggaacactggaaaacgctgacagcgcccgccgcggcagctgccctctcgagaagtgtaacgtaaaggctaaatcaaatgtggatctgcgccggtccttgtacgccttgtgccttgatacaagtagagaaacggatctttag

SEQ ID NO: 129577 - DNA, 1557 bp, synthetic construct
  misc_feature 1..1557: note = Description of Artificial Sequence: Synthetic coding sequence
  source 1..1557: mol_type = other DNA
atggccgcaagcatggcgcggaggctctggcccctccttacccggcggggcttcaggcctcggggcggatgtatctccaatgacagcccacgcaggtctttcacgacagagaaaaggaaccgcaacttgctctacgagtacgctcgcgaaggatattcggcccttccacagttggatatagagaggttctgtgcttgtccagaggaggctgcacacgctctcgaattgagaaagggcgagctgagaagtgcagacctcccggcgatcatctccacatggcaagagctgcggcaactccaggagcagatccggtccttggaggaggaaaaagcggccgtcacagaagccgtgcgggcactgctggccaatcaagacagcggcgaggtgcaacaggatccgaaatatcagggtctgagagccaggggtagggagatcagaaaggagctggtgcatctctaccctcgggaagcacaacttgaagagcagttctatctccaggctcttaagttgccaaaccagacacacccggacgtgcccgtgggcgatgagtcccaggcacgagtccttcatatggtaggcgacaaaccggttttctccttccagccgcgggggcacctcgaaattggagagaaactggatataataagacagaaaagattatctcatgtgtcaggtcacaggtcttactaccttaggggcgctggggccctgctgcagcacggcctggttaatttcacctttaataagctcctgcggagaggttttactccgatgactgtgccggacctgttgaggggcgcagtgtttgagggctgcggtatgacccctaatgccaatccatcacaaatttataatattgatcctgctcgattcaaagacttgaatctcgccggaacagcggaggtgggattggctggctactttatggaccacactgttgcattccgcgaccttcctgttagaatggtgtgtagcagtacctgctacagagccgaaaccaacactggtcaagagccaagagggctctaccgcgtgcaccattttactaaagtcgaaatgttcggcgtgactggaccgggcctcgagcagagctcacaattactggaagagtttctttcattacagatggagatcctgacggagttaggattgcattttcgggtgttggacatgccaacccaagagctgggtctgccagcttatcgaaagtttgatattgaggcatggatgcccggcaggggaaggtttggagaggttacctcagcctcaaattgcaccgacttccagtctcgcagattgcacatcatgttccagaccgaggcaggggaattgcagtttgcgcacaccgtgaacgcgacagcttgtgccgtgcccagacttctgattgctctgctggaatctaaccaacagaaggacgggagtgtgctggtacccccagcattgcagtcctacctgggtacagacagaattaccgcccccacacacgtgcccctgcagtacattgggcccaatcagccacggaagcctgggctccctggccagccagctgtctcgtag

SEQ ID NO: 129578 - DNA, 1893 bp, synthetic construct
  misc_feature 1..1893: note = Description of Artificial Sequence: Synthetic coding sequence
  source 1..1893: mol_type = other DNA
atggcagcaggcgtcgccgcttggttgccctttgccagggctgctgccatcggctggatgccggtggccagtggcccaatgcctgctcccccaaggcaggaacggaagcgaacccaggatgccctgattgttctgaatgtcagcgggacgcgctttcagacctggcaggatacattggaacggtatccagataccctcctgggcagcagcgagagggattttttttaccacccggaaactcagcagtatttcttcgatcgcgatccagatatcttcagacacatcctcaatttttaccgcacaggaaagctgcattaccctaggcacgaatgtatctctgcctacgacgaggagcttgcctttttcggtctcatcccggagataataggtgattgttgctacgaggagtataaagataggcgccgagaaaacgcagaaagacttcaagacgacgcggataccgataccgctggcgagtccgccctcccaactatgacggcccgacaaagggtttggagggcgttcgagaatccgcatacgtccacaatggcattggtgttttattacgtaactgggttttttattgctgtttccgtgatcgctaatgtggtcgagacagtgccatgcggttcttctccagggcatataaaggagctgccatgtggcgagcgctatgccgtggctttcttttgcctagatacggcatgtgtcatgatcttcaccgtcgagtacctgttaaggctcgccgccgccccctcccgttaccgattcgtgcgcagcgttatgagcattattgacgtagtggcgattcttccatattacataggacttgtgatgacagataacgaagatgtgtccggggccttcgtgaccctacgcgtctttcgagtcttccgcattttcaaattcagcagacacagtcaaggcctgagaatacttggctacacgttaaagagttgcgcttctgaattagggttccttttgttttcgctgacaatggccataatcatttttgcaactgtgatgttctatgctgagaagggttcctcggcctctaagttcacctcgatccctgcagccttctggtacaccattgtcaccatgacaaccctcgggtatggcgacatggtgccaaaaactatcgccggaaagatattcggcagcatttgcagtttgtcaggggtgctcgtcatcgctcttccagtacctgtcatcgtttccaatttcagtcgcatctaccaccagaaccagagggctgacaaacgaagggcacagaagaaagcaaggctggctcgcatcagagccgcaaaaagcggctcagcaaacgcttatatgcagtctaagcggaatggccttctgtcaaaccagctgcagagcagtgaggacgagcaggcttttgttagtaagtctgggtcttcattcgaaacccagcaccaccacctgttacactgtcttgagaaaaccacaaatcacgaattcgtggacgagcaggtcttcgaagagtcctgcatggaggttgcgactgttaaccgacctagctcccattctccgtccctgtctagccagcaaggagtgacctcaacttgctgtagccgccgccataagaagacttttcgaatacccaatgcaaatgtgtcaggatcacatcagggatctatccaggagctgtctacgatacagatacggtgcgttgagagaacacctctgtcaaattcacggagctctctgaacgccaaaatggaagagtgcgttaaacttaactgcgagcagccttatgtaactacggcaattatctccatccctaccccccctgtgaccactcctgagggcgatgatcggccagagtccccggagtattcgggtggaaatattgtgcgcgtgtcagccctgtag

SEQ ID NO: 129579 - DNA, 1911 bp, synthetic construct
  misc_feature 1..1911: note = Description of Artificial Sequence: Synthetic coding sequence
  source 1..1911: mol_type = other DNA
atggctgctggagtggctgcctggctcccctttgccagagccgccgcaattggctggatgccagtggcgaattgccccatgcccctcgcaccagccgataagaataagaggcaggatgagctgatagtgctcaacgtttctgggcgcaggtttcagacatggaggacaactctggagagataccccgacaccctgctggggagcactgaaaaagagtttttttttaacgaggacacaaaagaatacttcttcgaccgcgatccagaggtgtttcggtgtgtgctgaatttttatcgaaccggaaagctgcattacccccgttacgaatgcatctccgcctatgacgacgaactggctttttacggtatactacctgaaattataggcgactgctgctatgaagaatataaagacagaaagcgcgaaaacgccgaaagactgatggacgacaacgacagcgagaacaatcaggagagcatgcctagcttgtcctttcgccagaccatgtggagagcgtttgagaatccccatactagtactttagcactggtcttctactacgttactgggttttttattgccgtctctgttattacaaatgtagtcgagacagtgccttgtggcacagtgccaggcagtaaggaattgccttgcggggaacgctacagcgtcgccttcttctgtctagacaccgcctgtgtgatgatttttacagttgagtacctcttacgcctgttcgcagccccctcccgttatcgatttatcaggagcgtgatgtcaattattgacgttgtggcgatcatgccatactatatcggtctggtgatgacaaataatgaagacgtgtcaggagctttcgtgacactgagagtcttccgtgtcttccggatttttaaattctcaagacattctcagggtttgcggattctaggctacacgcttaaatcctgtgctagcgaattaggatttcttttgttttctctgaccatggccattatcattttcgcgactgtgatgttctatgctgaaaagggctcctcggccagcaagttcacctcgatccccgcttctttttggtacactattgtgaccatgacaaccctcggatatggcgacatggtgcccaagaccatcgcaggcaaaattttcggctccatttgctcactgagtggcgtgctcgtgattgccttgccagtgcccgtaatagtgtcaaactttagccggatttaccaccagaatcagcgggctgacaaaagacgtgcgcagaagaaagcccggttagcgcgtatccgcgtcgccaagactggaagcagcaacgcctacctgcacagcaaacgtaatggcctgctgaatgaggccctggagctgactggcacaccagaagaagagcacatggggaagactacctctttgatcgagagccaacaccaccacctgttgcactgcctggagaagaccaccaaccacgaatttatcgatgagcagatgttcgaacagaactgtatggagtcttctatgcagaactacccatctaccagatccccatctttaagcagccatccaggcctgacaactacttgctgttcgcgacgcagtaaaaagaccactcacttaccaaactctaatttaccagccactagacttcggagcatgcaggagctctctacgatccacattcaaggaagcgaacagccctctcttaccacatctcggagctccctgaatttgaaggctgacgatggtttacgacctaactgcaagactagccaaataactacagctatcatctccatcccgactccgcctgccctgactccagaaggagagtctcgtcccccccctgccagcccaggaccaaacaccaatattccaagtatcgccagcaatgtagtgaaggtgagcgccctgtag

SEQ ID NO: 129580 - DNA, 1968 bp, synthetic construct
  misc_feature 1..1968: note = Description of Artificial Sequence: Synthetic coding sequence
  source 1..1968: mol_type = other DNA
atggccgcaggggtcgccgcctggctgccctttgcacgggctgccgctataggttggatgcccgtggcaaactgccccatgcccctagcacccgcagataagaataaaagacaagacgagctgattgtattaaacgttagtgggcggcggttccagacttggaggacaacacttgaacgataccctgatacactgctgggctcaaccgagaaagagtttttctttaacgaagacacaaaggaatacttttttgatcgggaccctgaagtctttagatgtgtgctcaatttctatagaacaggtaaactgcattatccacgatacgagtgcatctcagcctatgacgacgaacttgcgttctatggcattctaccagaaattattggagactgctgctatgaagagtacaaggatcgcaagcgggagaacgctgagcgccttatggacgacaacgactccgagaataatcaggagtccatgcctagtctgtccttccgccagactatgtggcgcgctttcgaaaacccccacacgagcacactagctctggtgttttattacgtaaccggcttcttcatcgccgtttctgtgataacaaacgttgttgagactgtcccgtgcggcactgtgccaggctcgaaagaactgccctgcggtgagcggtattccgtcgcctttttttgcttggacactgcatgcgtgatgatctttaccgtggaatacctcctgcggctgttcgccgcaccaagcagatatcgattcatacgttccgtaatgtcaatcatagacgtcgttgcaattatgccttactacatcggactggtgatgacaaataatgaggacgtctcaggtgcttttgtcactctccgggtcttccgcgtttttaggatcttcaagtttagtaggcactcccaaggactgagaattctaggctacaccctcaagtcttgcgccagcgagttaggtttcctgctcttcagccttacaatggcgataataatctttgcaacagtgatgttctacgcagaaaaggggagctctgcctccaagtttacgagcatccccgcaagtttctggtataccatagtgactatgactacgctgggatacggtgatatggtaccaaaaaccatcgcaggtaaaatttttggcagtatatgctcactttccggcgtgctcgtgattgctttaccagtgccagttattgtctccaatttctctaggatttatcaccagaatcagagagccgataaacggcgggcccagaagaaggcgagactggcacgaatccgggtggcaaaaacaggcagttctaacgcctacctacactccaagcgcaatggattgctgaacgaagcactggagctgactgggactccagaggaggaacacatgggtaagactacatcattaattgaaagccagcatcatcatctcctgcactgcctggaaaagaccacgggactgagctacctggtcgacgatcccctgctctccgtgcgcacgtcgactataaagaaccacgagtttatcgacgaacaaatgtttgagcagaattgcatggagagctcaatgcagaactatccttccactcgttccccttctttgagctctcaccctgggctgacaaccacatgctgctcgagaagatccaagaagaccacacatctccctaattcaaatctgccagctacaagactgagatccatgcaggaattatcaaccattcacatccagggaagcgagcagccaagccttactacgtctcggtcctcccttaatctcaaagcggacgacgggttaagacccaactgtaaaaccagccagataacgacggcaattattagcatacccacccctcctgcactgaccccagaaggagaatctcgccctcccccagcttccccagggcctaataccaacattccttctatcgcttccaatgtggtgaaggtctccgcactatag

SEQ ID NO: 129581 - DNA, 1911 bp, synthetic construct
  misc_feature 1..1911: note = Description of Artificial Sequence: Synthetic coding sequence
  source 1..1911: mol_type = other DNA
atggcagcaggcgtggctgcctggttgccgttcgcccgcgccgcggccattggctggatgccagtcgccaactgcccgatgcctctggcccccgcagacaaaaataagcggcaggacgagttgattgttttgaacgtgtctgggcggaggttccagacctggagaactacgcttgaaagatatcctgatacattgttaggaagtacagagaaggagttcttcttcaacgaggacactaaagagtactttttcgatcgtgatcctgaggtctttcgctgcgtgctgaacttttatagaaccgggaagctgcactatccaagatacgaatgcataagtgcatacgacgatgaattggcattctacggcatcctcccggagataatcggagactgctgctacgaggagtacaaggacagaaagagagagaatgcagaaaggttgatggacgacaacgactcggagaataaccaggagagtatgcccagtcttagctttcggcagacaatgtggcgtgctttcgagaacccacacacctctaccctggctctagtattctactacgtgactgggttttttatcgctgtttccgtgattacaaacgtcgtcgaaactgttccttgtgggaccgtgcccggcagcaaagagcttccttgcggcgagcgttactcagtggcctttttttgtttggataccgcttgcgtcatgattttcaccgtggaatatctcttgaggctgttcgcagccccctcacgataccgttttattcgctcagtgatgagcattatcgatgtcgtcgccatcatgccgtattacatagggttagtgatgaccaacaacgaggatgtttccggcgccttcgttactctcagggtgttccgggtcttcaggatcttcaagttttctagacatagtcaaggattgaggatccttggttacaccctgaaatcctgcgcctccgaacttggattcctgctgttcagcctgacaatggctatcataatctttgccacagtgatgttctatgccgaaaaaggttcctctgccagcaaattcaccagcattcccgccagtttctggtataccatcgttaccatgaccacactggggtacggagacatggtgcccaagactatagccgggaagatttttggcagtatctgttccctgtcgggcgtcttggtgattgcccttcctgtacccgttatcgtctccaatttctctcgcatttaccaccagaatcagcgtgctgacaaacgccgggctcaaaaaaaagcccggctggcccgcatcagggtggccaagacaggatccagtaacgcataccttcacagcaagagaaatggactccttaatgaggcactggaactgacgggcacacctgaggaagagcacatgggcaagacaacatcactcatcgagtcccagcaccatcacctccttcattgcctggagaagaccacgaaccacgagttcattgatgagcagatgttcgagcagaactgcatggagagctctatgcaaaattacccttcaactaggagccccagcttgagctctcacccaggcctcaccacaacctgttgctctcggaggagcaaaaagacgacacatctgcctaacagcaaccttccagccaccagactgaggagcatgcaagaactgtccaccatccacatccagggaagcgagcaacctagcttaactacttctcgcagctccttgaacctgaaggccgatgacggcttacggcccaattgcaagacttcccagattacaacagcgattattagtattccaacgccacccgcccttacccccgagggggaatcacgacctccccccgctagccctgggcccaacactaacatcccaagtatcgcttctaatgtcgtgaaagtaagtgcactgtag

SEQ ID NO: 129582 - DNA, 1758 bp, synthetic construct
  misc_feature 1..1758: note = Description of Artificial Sequence: Synthetic coding sequence
  source 1..1758: mol_type = other DNA
atggggcagggagatgagagcgagcgcatcgtcatcaatgtggggggaacccgacatcagacctatcgatctacacttaggaccctgcccggtactcgactggcatggctggcggagcccgacgcccactcccactttgactatgatccccgagcagatgaattcttttttgacaggcatccaggagtgtttgcacacattcttaattactacagaaccggcaagctccactgccctgcagacgtgtgcggacctttgtacgaagaagaattggctttctggggcattgatgagaccgacgttgaaccctgctgctggatgacatacaggcaacacagggatgcggaagaagcactggactctttcggcggtgcgcccttggacaacagtgcagatgacgcggatgcagacggccccggagatagcggcgacggggaggacgaacttgagatgaccaagcgcctggccctcagtgactcccccgacggcaggccgggtggattctggagaaggtggcagcctagaatctgggccctgtttgaggacccgtatagctcacgttatgcacggtacgtggcctttgctagcttattttttatcctggtgtctatcactaccttctgccttgagacacatgagcgctttaatcccatagttaataagaccgagatcgagaatgtgaggaacggcacacaggtgcggtactatcgcgaagctgagacagaggcgttcttgacctatatagagggagtgtgcgtggtctggtttacctttgagttcctgatgagggttattttttgtcctaacaaggtggagttcatcaaaaatagtctcaacatcatagattttgttgccatcctgcctttttacttagaggtcggtcttagcggactcagctctaaagccgctaaagatgtgttgggtttcctacgagtggtcaggttcgtgcggattctgcgaattttcaagttgacacgacattttgtcgggctacgcgtgcttgggcatactctgcgggcatctaccaacgagtttctgctccttatcatattcttggcgctgggagtccttatctttgccacaatgatctattacgccgagcggatcggggctcagcctaacgatccgtccgcaagtgaacacactcactttaaaaatatccctataggattctggtgggccgtcgtgaccatgaccacattggggtacggggatatgtatccacagacttggtcaggtatgctggtgggggccctgtgtgccttagctggggtgcttaccattgcaatgccagtaccagttatagtcaacaactttggaatgtattactccctcgcaatggctaaacagaagctacccaagaagaaaaaaaaacatataccaaggcctcctcagctgggctcgccaaattattgcaaatcagtcgtgaacagtccacatcacagtacccagtccgatacctgccccctcgcccaggaagagattctagaaattaaccgtgcagactcaaagctgaacggggaggttgccaaggcggcactggctaatgaggattgtccccacatagatcaggcactcacgcccgacgaagggttacccttcactcgctccgggactagagagcgatatggaccatgtttcctactgtcaactggagaatacgcctgtccccccgggggcggtatgaggaaagatctctgcaaagagtccccagtgatcgcgaagtacatgccgaccgaggccgtgcgggtgacctag

SEQ ID NO: 129583 - DNA, 1536 bp, synthetic construct
  misc_feature 1..1536: note = Description of Artificial Sequence: Synthetic coding sequence
  source 1..1536: mol_type = other DNA
atggggcagggggatgaatctgaacgcatcgtcattaatgtgggaggtacacgacatcagacctatcggtccactctgcgaacactccctggcacgcgcttggcatggctggccgagcccgacgcacacagccatttcgactatgaccctcgtgctgatgagtttttttttgatagacaccctggcgtctttgcacatattctgaactactatcgcacaggtaaactgcactgcccagccgatgtatgtgggcccctgtatgaggaggaactcgccttctggggcatcgatgaaaccgatgttgagccctgctgttggatgacctatagacagcacagagacgccgaggaggccttagattcctttgggggtgctccgctggacaattccgctgatgatgcggacgcagatggtcctggggacagtggcgacggggaggatgagctcgagatgaccaagaggctagctctgtcagactctcctgatggacgccccggcggtttctggcgacggtggcaaccccgcatttgggcacttttcgaggatccatacagctcccgttatgccagatatgtggcttttgccagtctgttttttatcctggtgagcatcacaacgttttgtcttgagacccatgagcgtttcaacccgattgtgaacaagactgaaatcgagaatgttaggaatgggacacaggtcaggtattatcgggaagccgaaactgaggctttcctcacttatattgaaggggtgtgtgtcgtgtggtttacatttgagttccttatgcgcgtgatattttgccctaacaaggtagaattcataaaaaactctctcaacattatcgatttcgtagccatactgcccttctacctggaggtcggcctcagcggtctttcctccaaggcagcgaaggacgtgctcggatttctccgggtagttcgatttgtccgcattctgcgcatctttaaactgaccagacatttcgtcgggctgagagttctcggacacaccctgagggcatccaccaacgagttccttctgctgattatcttcctagctttaggagtgctaatattcgctaccatgatctactacgccgagcggataggcgcgcagcccaacgacccttccgcatcagaacacactcacttcaaaaatattcctatcgggttttggtgggctgtggtgacaatgactaccctcggatatggggatatgtatcctcagacctggtccggtatgctagtgggcgccctgtgcgccctggcaggtgtgctgacaatagccatgcccgtgccagtaatagtgaataattttggaatgtattacagcctcgctatggccaaacagaagctgcccaaaaaaaagaaaaagcatatccccagacccccacagttaggttccccaaattattgtaagtcagtcgtcaacagcccacatcacagcacgcagagcgatacatgtccattagcccaagaagaaatcttggaaattaaccgggccggcagaaagccactccgaggaatgtcgatttag

SEQ ID NO: 129584 - DNA, 1842 bp, synthetic construct
  misc_feature 1..1842: note = Description of Artificial Sequence: Synthetic coding sequence
  source 1..1842: mol_type = other DNA
atggggaaaatcgagaacaatgaaagggtgatactgaacgtgggcggcaccaggcacgagacctatagatccaccctgaagaccctgcctggaaccagactggccttgttagcaagcagcgagccacccggggactgcctgactacagcaggagacaaattgcagccctcccccccccccctgtccccaccaccacgcgcacccccgctatctccgggaccaggggggtgcttcgaagggggcgccggaaattgctcttcccgtgggggccgagcctctgaccaccccggcggaggaagagagttcttttttgatcgacatccgggagtatttgcttatgtattgaattattatcggaccgggaaactgcattgccctgccgatgtgtgcggtcctctgtttgaggaggaactggctttttggggcatagacgagacagacgtggaaccatgttgctggatgacctacaggcagcatagagacgcagaggaagctctcgacatatttgaaactcctgaccttattggcggggatccaggcgacgacgaggacttagctgctaagcggctcggcatcgaggacgccgccggcctcggcggccccgatggaaagtctggacgttggagacgtctccagcctcgtatgtgggcattgttcgaggatccttacagcagccgggcagcacggtttatcgcgttcgcctccctgtttttcatactcgtgagtattaccaccttttgtcttgagacccacgaagccttcaatatcgtcaaaaataagacagaacctgtcatcaatggcacatctgtcgttctgcaatatgagattgaaactgaccctgctctgacttatgtggaaggcgtttgtgtggtttggttcactttcgaatttctagtaaggatcgtgttctctcctaataaattagaatttatcaaaaatctcttgaacatcatcgacttcgtagcaatcttgcccttctaccttgaagtgggactctccgggttatctagcaaggccgcaaaggacgttctgggctttctcagagtagtgcgctttgtcagaatcctcaggatttttaaacttactcgacactttgtgggtttaagggtgcttggccacactttgagggcatccaccaatgagttcctgcttctgatcatattcctggcattaggtgtgctgatctttgcaacaatgatatattacgcggagagggtcggagcacagcccaacgacccctcagccagcgaacacacccagttcaaaaatattccaattggtttctggtgggccgtcgtaactatgacgacccttgggtatggcgacatgtatcctcagacctggtcaggtatgctggtgggggccctctgcgcactggcgggggtgctgaccatcgcaatgcccgtgccagttattgttaacaattttggcatgtattactcactggccatggccaaacagaagctgccaagaaagaggaagaagcacataccacccgccccccaggcttctagtcctaccttctgcaagactgaactcaatatggcctgtaacagtacccagtccgatacatgtcttggcaaagacaaccgccttctcgaacacaaccggagtgtgttgtccggggacgattcaactggtagtgagcctcctcttagtccccctgaacgactccctatacggagaagttccacacgggacaaaaatcgaagaggcgagacttgtttcttactgacaaccggcgattatacctgcgcttccgatggaggcattcgtaaagataactgcaaggaggtcgtgatcacggggtacacacaggccgaagctcggagccttacctag

SEQ ID NO: 129585 - DNA, 1890 bp, synthetic construct
  misc_feature 1..1890: note = Description of Artificial Sequence: Synthetic coding sequence
  source 1..1890: mol_type = other DNA
atggggaaaattgaaaataacgagcgggtgattctgaatgtgggaggcaccagacatgagacgtaccggtccactctgaagacgctccctggcactaggcttgcccttttggcttcctctgaaccccctggcgactgcctcacaaccgctggggacaagctgcagccaagtcctccgccactcagtccgcccccgcgtgctcccccgctctctccaggccctgggggatgtttcgaaggtggggcaggtaattgttcgagccgcggaggaagagcatcggatcaccccgggggcggccgtgagttctttttcgatcggcatccgggggtctttgcctacgtgctcaattattataggactgggaagttgcattgcccagccgacgtgtgcggtccgttgttcgaggaggagctggcattctggggtatcgatgagactgatgtggagccctgctgttggatgacataccgtcagcaccgcgacgcagaagaggctctggatatcttcgaaactccagatctgattggaggtgaccccggggatgacgaggatctagccgccaagcggctcggaatagaggacgctgctggcctcggtggccccgacggcaagagcgggagatggagaaggctgcagcctcgcatgtgggccctgttcgaggacccctattctagccgggccgcccgcttcatcgcgtttgcttctctattctttattctcgtctccatcacgacattctgcctagagactcatgaagcctttaacatcgtcaaaaataaaaccgagcctgtcattaatggtaccagcgtggttcttcagtatgagatcgagacagaccccgctctgacatacgtcgagggggtgtgtgtcgtgtggtttactttcgagtttctagtgcgaattgtgttttcacctaataaactggaattcataaagaacctgttgaatatcatagatttcgtggctatcttgcccttttatctggaggttggcttgagtggactgtcaagtaaggctgccaaggatgtgttgggattcctgcgggtggtgcgtttcgtgcggatcttgcggatcttcaagctgacccgccactttgtgggtctgagagtgctaggccatacactccgagcttcaaccaacgagttcttacttctgatcattttcctggctttgggagtgctcatatttgcaactatgatttattacgcagaaagggtgggcgcacagcccaatgacccttccgccagtgaacatacccagtttaaaaacatacccatagggttctggtgggccgtggtcaccatgacaacattaggatatggggacatgtacccgcagacatggagtggaatgcttgtcggcgctctgtgtgctctggcgggcgtgcttacaatcgcaatgcctgtgcccgtcatcgtgaacaacttcgggatgtactacagtctagctatggctaaacagaagctcccacgaaagagaaagaaacacatcccccctgccccccaggcttcaagtccaactttctgcaagaccgaattgaatatggcgtgtaacagcacacagagcgacacctgtctaggaaaagataatcggttgcttgagcacaatagaagcgtgttatccggcgacgactcaacaggatcagaaccccccctgtctccccccgagcggctccccatcagacggtcatcaacacgggataagaacagaagaggcgagacctgctttctgctgaccactggtgattatacttgcgcgtccgacggaggcatcaggaaggtgctttataggatttaccacggcttgctaacggcagaaaagggcacagtagagttctcacataccaaggattacactggcaatagactgttactgttgaacgtgccttag

SEQ ID NO: 129586 - DNA, 1677 bp, synthetic construct
  misc_feature 1..1677: note = Description of Artificial Sequence: Synthetic coding sequence
  source 1..1677: mol_type = other DNA
atggggaaaatcgaaaataatgagagagtgatactgaacgtaggagggaccagacatgagacttatcggagtacgctgaagacactgcccggaacgagactcgcattgttggcatcttctgagcctcctggcgattgcctgaccaccgccggtgacaagcttcagccgagtcctccgcccctgagccctcccccacgagctccgcctctcagccctgggcccggggggtgttttgaggggggagccggcaactgcagtagccgggggggcagagcgtcagaccatccgggcggaggacgggagttcttcttcgaccggcaccccggggtcttcgcatatgtactgaattactatcgtacaggaaaactccattgccctgcagatgtctgcggaccccttttcgaggaagagctcgctttttggggtatcgacgaaacagacgtcgaaccttgttgctggatgacttataggcaacacagagacgccgaagaggcattggatatctttgaaactccggatctgattggcggcgatcctggcgacgatgaggacctcgccgccaaacgcttgggaatagaggacgcagccggactgggagggccagacggcaagtctgggaggtggagaaggctgcagccccgaatgtgggcccttttcgaagacccttacagctctcgcgctgctaggtttatcgcatttgcatctttattttttatcctggtttctattacaaccttctgcctggagactcacgaagcattcaacattgtcaagaacaagaccgagcccgtaataaacggcacgtcagtcgttctccagtacgagattgaaaccgatcctgccttgacttacgtggaaggagtctgtgtcgtttggttcacctttgaatttttagtgagaatcgtgttttcgcctaataagctggagttcataaagaatttacttaacattatcgatttcgtggccattctacccttctatctcgaggtggggctttcagggctgagcagcaaagccgcgaaggacgttctgggctttctcagagtagttcgtttcgtgagaatcctgcgtattttcaagctcaccagacactttgtaggcctgcgggtgctaggccacactctacgggcctcaaccaacgagtttctactccttattatcttccttgctctcggcgtgctgatatttgccactatgatctactatgccgagcgggtgggggcacagccaaacgacccttcggcgtctgaacatacccagttcaagaatatcccgatcggcttttggtgggcagtggtcactatgacaacccttgggtatggcgatatgtacccccagacatggtctggcatgcttgtgggcgctttgtgcgcacttgcaggggtgctgacaatcgccatgccagttccagttatcgtgaacaacttcggaatgtactattccctggctatggctaagcagaaactgcccagaaaacggaagaagcacataccacctgcgcctcaggcctccagtcctacattttgtaagacagagctaaacatggcatgcaattctactcaatctgacacctgtctgggcaaagataaccgcctgctggagcacaatcgctcagataattgtaaagaagtggttattacaggctatacccaagccgaggcccgcagcctcacatag

SEQ ID NO: 129587 - DNA, 1842 bp, synthetic construct
  misc_feature 1..1842: note = Description of Artificial Sequence: Synthetic coding sequence
  source 1..1842: mol_type = other DNA
atgggaaaaattgaaaacaatgaacgggtgattctaaacgtcggggggactcgccatgaaacttatcggagcacactgaagacgttgccgggcacaaggctggccctgctcgcttcgagtgagccacccggagactgtttgaccacagctggagataagttgcagccgtccccccctcccctctctccccccccacgagcacctcccttaagcccggggccagggggttgcttcgagggcggggccgggaactgctcaagccgaggcggacgggcctcggaccatccgggaggcggacgcgagttcttctttgatcgacatcccggggttttcgcatatgtcctcaattactataggactggcaaactgcattgccccgctgacgtgtgcggacctctctttgaagaggagcttgctttctggggcattgatgaaacagatgtagagccttgctgctggatgacttaccgtcaacaccgtgatgcggaggaagccctggatatcttcgagactccggaccttatcggaggagacccgggcgacgatgaggatctggcagctaagcggcttggcattgaggatgcagcggggctgggaggtcctgacgggaagtccggtcgctggcgtcggctgcagccccggatgtgggcattatttgaagatccctacagtagcagagctgccaggttcatcgcttttgcttcattgttttttattctggtcagtatcaccacattctgcttagaaactcacgaggcattcaacatcgtgaaaaacaaaaccgaacctgtaatcaacggcacatccgtcgttctccaatatgaaattgaaactgaccccgctcttacttatgtcgaaggcgtgtgcgttgtttggttcacatttgagtttcttgtgcgcatcgttttctctccaaacaagctcgagtttatcaagaacctactcaacatcattgatttcgtggccatcctgccattttacctggaagtcgggttgtcgggactgtcaagcaaggccgccaaggatgtcctgggattcctgagggtagtcagattcgtacggatattaagaatcttcaagttgacgcgtcactttgtcggattgcgtgtcctgggccacactctcagggcctcaactaatgagttcctcttactgatcatttttctagccctgggggtgcttatcttcgctaccatgatttactacgccgaacgggtaggcgcacaacctaatgaccctagtgctagtgagcatacacagtttaaaaacattcccatcggtttttggtgggccgtggtcaccatgaccaccctgggttacggcgatatgtatcctcagacgtggagcggtatgcttgtaggggctctttgcgctctggcgggcgtgctcacgatagctatgcccgtccccgtcattgttaataattttggaatgtattactccttagcaatggcaaaacagaagctgccaagaaagagaaaaaagcacatccctcccgctccgcaggctagctcaccgacattctgcaagactgagctaaacatggcatgtaattccacgcagagtgatacctgccttggcaaagataaccgcctcttagagcacaaccggagtgtgctgtctggcgatgacagcactggctcagagcctcccctctctcctcctgagagactgccaattcgccgctcctccacaagggataagaacagaaggggtgagacatgctttttgcttaccacaggcgactatacttgcgcctctgatggcggtatacgtaaagacaactgtaaagaggtggtgattacaggatacacgcaggcagaggccaggtcattaacatag

SEQ ID NO: 129588 - DNA, 1917 bp, synthetic construct
  misc_feature 1..1917: note = Description of Artificial Sequence: Synthetic coding sequence
  source 1..1917: mol_type = other DNA
atgggtaaaatcgagaacaatgagcgggtgatactaaacgtggggggcaccagacacgagacatacaggtcaacactgaaaactctccctggtaccagactggccctgctcgccagttccgaacctccaggcgattgcctgaccactgccggcgataaactgcagccctcacccccacctctgtctcctccaccccgcgcaccccccttgtctcctggtccaggaggatgctttgagggaggcgctggtaactgttcctcccgtggcggacgagccagtgatcacccaggtggcgggcgcgagttcttctttgatagacatcccggcgtgtttgcttacgtcctgaactactataggaccggaaagttacactgtcccgcagatgtctgcggccccctgtttgaggaagaactggctttttggggaatcgacgaaactgacgtggaaccgtgctgttggatgacctaccggcagcatcgtgacgcagaggaagcactagacattttcgagactcccgatttgatcggaggcgatccaggagacgatgaggatcttgcagcgaaacgcctgggcattgaggacgctgcaggactcggcggtcctgatgggaaaagcgggaggtggcgccgcctgcagcctcgcatgtgggcactgtttgaggacccctactcctcccgtgctgcacgctttatcgcctttgctagtctctttttcatactagtgtccattacaaccttttgcttggagactcatgaggcttttaatatcgtcaagaataaaacggaacctgtgattaatggaacctctgttgtgctgcagtacgagatcgagactgacccagctttgacctacgtcgaaggcgtgtgcgtggtctggtttacgtttgaatttctcgtgaggattgtgttctcccctaataagctcgagtttatcaagaacttgctgaacatcatagatttcgtggctattctccccttttatttggaggtggggctgtcggggttgtcctcgaaagccgctaaggatgtcttgggatttctgcgcgttgtgaggtttgtacggatcctgaggatattcaaactgacacgacattttgtaggattacgtgtgctaggacacaccctgcgggccagtactaacgaattcttgttgttaatcatattcctagcattgggggtgctgatctttgctacgatgatctactacgcggagagagtgggcgctcaacccaacgacccctctgcttcagaacacacacagtttaaaaacattccgattgggttctggtgggctgtggtcaccatgacaactctcggttacggtgacatgtacccccagacttggtccggaatgttagtgggggctctctgtgccctggccggagtcctcacaatagctatgccagttcccgtcattgtaaataactttggaatgtactattcgttagctatggctaagcagaaacttcccagaaagcgcaaaaagcacattccgcccgcgccccaggctagcagtcctacattctgtaaaactgaattgaacatggcatgcaacagcacccagagtgatacgtgtctgggaaaagacaatcgtcttttggagcacaatcgctccgtcctcagcggggatgattcgacaggcagcgagccacccttgtcaccccccgagaggctgcccatacggaggtctagcacccgcgataagaaccgcagaggagaaacctgcttcctgttgaccacgggcgactacacctgcgcttcggacggcggtatccggaagggctacgaaaaaagcagatcattgaacaacattgctggcctcgctggaaacgctctccgcctgagtcctgtgacgtcaccttacaactcaccatgccctctgcggagaagtagaagccccataccatccatactttag

SEQ ID NO: 129589 - DNA, 1890 bp, synthetic construct
  misc_feature 1..1890: note = Description of Artificial Sequence: Synthetic coding sequence
  source 1..1890: mol_type = other DNA
atgggcaagatcgaaaacaacgagcgagtgatcctgaacgtcgggggaacaaggcatgagacataccggagcactctaaaaaccctccccggaactaggcttgccttactcgcttcgtctgagccacccggggattgccttacgacagccggcgataaactacagccaagtccccctccccttagccctcctccacgcgctccacccttatcacccgggccaggaggctgctttgaaggcggggccggaaactgtagttctaggggaggcagggcgagcgatcacccgggaggcgggagagagttcttctttgatcgacaccctggcgtctttgcctatgttctgaattactacagaacaggcaaattgcactgtcctgcagacgtctgtgggcctctgtttgaagaggaattggccttctggggtatcgacgaaacagatgtggagccctgttgctggatgacatatagacagcaccgtgacgcggaggaagctttagacatcttcgaaacgccagacctgattggcggtgacccgggcgacgatgaagacctggcagcgaagcgcttgggaatcgaagacgccgctgggctcggaggccccgatggcaaatcaggacgctggcggagactgcagccccgaatgtgggcgttgtttgaggatccctactcttctcgggcagcacgattcattgcgtttgcatcgcttttttttattctggtgagtatcaccacattttgtcttgagactcatgaggcttttaacatagtgaaaaacaagaccgagccggtgatcaacggaaccagcgtcgtgctccaatatgagatcgagactgatcccgccctgacatacgtggagggtgtgtgcgtggtgtggtttacattcgaattcttagtaaggattgttttctcccctaataagctggagtttatcaaaaatctgctgaatatcattgattttgtcgcaatactacccttttatctggaagtcgggctgtcaggcctgagctcaaaggcagcaaaagacgtgcttggctttttgcgtgtagtgcgtttcgtcagaattctcaggatcttcaagctgacaagacacttcgtcggcctgcgcgtcctggggcacacccttcgcgcgtcaacaaacgagtttcttctcctgattattttcctcgcattgggagttctgatcttcgcgactatgatatactatgccgagagagtcggagcccagcccaacgacccttcggcatccgaacatacccaattcaaaaacatccctataggattttggtgggccgtggttacaatgacgactcttggctatggcgacatgtatccacagacctggagtggaatgctagtcggggctttgtgcgcgctagccggagtgctgacaattgccatgccggtaccagtcatcgtgaataactttgggatgtactactctctcgcaatggccaagcagaagttaccgagaaaacgcaaaaagcatatcccacccgctccgcaggcctcatcgccgaccttctgtaagactgagttgaatatggcgtgtaattctacccaaagcgatacctgtttaggcaaggacaataggctgctggaacataaccgcagcgtgctcagcggggacgactccacaggtagcgaacctccgctctccccgccagagcgactgcccattaggagatctagcactagggacaaaaaccggcgtggggagacatgtttcctgcttaccaccggggactacacgtgtgcttcggacggtggcatccggaaggtgctataccgcatatatcatggactcctgaccgccgaaaaaggcactgtggaattcagccatacaaaggactatacagggaaccggctattgttactgaatgtaccatag

SEQ ID NO: 129590 - DNA, 2187 bp, synthetic construct
  misc_feature 1..2187: note = Description of Artificial Sequence: Synthetic coding sequence
  source 1..2187: mol_type = other DNA
atgttgtcatcagtgtgcgtgtccagttttaggggtcggcagggcgcttctaaacaacagcctgctcccccaccacagccaccagaatctccacctccccctcccttaccaccccaacagcagcagccagctcagcccggccctgccgcgtcgcctgccggccctcccgcaccgagggggccgggggacagaagggccgaaccttgtcctggactcccagccgccgccatgggtcgccacggcggaggcggaggcgacagtggaaagatcgttatcaatgtcggaggcgttaggcacgaaacctataggtccactcttcgcaccttaccaggcacaaggctcgccgggctaaccgagcccgaggctgctgccagatttgattacgaccctggcgccgacgaattctttttcgatcggcaccccggcgtctttgcttacgtactgaattattaccggacaggcaaattgcactgtccagccgacgtgtgtggccccctcttcgaagaggaactgggcttctggggtatcgacgagaccgacgtggaagcctgttgttggatgacttaccgtcagcaccgggatgccgaagaagccttggattcatttgaggcccccgacccagccggggcagcgaacgccgccaacgctgccggcgcacatgacggagggctagacgatgaggccggggccgggggcggggggctggatggagctggaggtgaactgaaacggctgtgcttccaggacgctggtgggggagcagggggccccccaggtggagccggtggtgcagggggcacctggtggagaaggtggcagccacgcgtgtgggcccttttcgaggatccatactcttctagagctgcacgctatgttgcttttgcaagtctcttttttattctcatctctatcacgacattctgtctcgaaacgcatgaggggttcattcacatctccaataaaacagtgacccaggcctcacctatccctggagctccccccgagaatattaccaacgtggaagttgagaccgagccatttctcacctacgtagagggagtgtgcgtggtatggtttaccttcgaatttttaatgcgcatcacattctgccctgacaaggtcgagttcctgaagtcgtctcttaacattatcgattgcgtggcaattctgccgttttaccttgaagtggggctttcgggtctgtctagcaaagcggccaaggatgtgttgggctttttgcgggtggtacggttcgtgagaatcttacgcattttcaagctcacacgccactttgtgggcctccgagtgcttggacacaccctgcgcgcgtcaacaaacgaatttctgctccttattatcttcctagccctcggggttttaattttcgctacgatgatctactacgcggagcggattggcgctgacccggatgacatcttgggctcaaaccacacatattttaaaaacatccctattgggttctggtgggctgtggttaccatgactacgctggggtacggagacatgtatcccaagacgtggtcaggcatgctagtgggggctctgtgtgccttggccggggtcctgacgatcgccatgcctgttcccgttatcgtgaataattttggcatgtactactccctggctatggcaaaacagaagctccccaagaaaaagaacaagcacatcccgcggccaccgcaaccaggctcccccaattactgcaaaccggatccccccccacctcctcctcctcaccctcatcacgggtccggaggtatttcccctccacccccgatcacaccaccttctatgggagtgactgtggccggagcctatcctgctggccctcacacccaccccggtttgctgcgcggcggcgccggaggcctggggatcatgggtcttccccctttacccgctcctggtgaaccctgccctctcgcccaagaggaggtcattgagataaacagagccgacccacggcctaatggcgacccagccgctgccgccctggctcatgaagattgtccggccatcgaccaacctgctatgtcgccggaggacaaatcacccataactccagggtctaggggccggtacagcagagatagggcttgttttttgctgactgattatgccccttctccggatggcagtatacggaaggccctggttacagcctag

SEQ ID NO: 129591 - DNA, 468 bp, synthetic construct
  misc_feature 1..468: note = Description of Artificial Sequence: Synthetic coding sequence
  source 1..468: mol_type = other DNA
atgggaatccgacaacagctcaggctccccacccgtactgcacaaccactcactagcttgccttgtccaaggaaaacaagggcgcccagcagactggaggcagtcgccgcgattgccggcaccgagccggcctcttccagccccaccatgccactcccgctgatggccccaagcgagaagttgctttctcctcccgagacttcaagggactttagaagcccccctccactgccaccccgcctgcgtgagatcccccagccacaacagcatcggggaccggagagaggcgtcccagccccacgggctccttgtcacccaccctggctaagtcctggaaggcctcccagatcccctgatccagccctgcaccccctggccctgccgagccctctgtggggggacagcggtgttactggcaagaaggtgaaaggcgccggcggcggcgggtggggcaaggggttcttttag

SEQ ID NO: 129592 - DNA, 1629 bp, synthetic construct
  misc_feature 1..1629: note = Description of Artificial Sequence: Synthetic coding sequence
  source 1..1629: mol_type = other DNA
atgacatacaggcagcatcgtgacgctgaggaggctcttgactccttcgaggccccagatcccgccggcgctgccaatgcagccaatgccgcgggggcccacgacgggggactcgacgatgaggctggtgccggaggcgggggactcgatggcgccggaggagagctgaaaagactctgttttcaggacgccggaggtggtgccggcgggccgccaggcggggccggaggggccggaggcacctggtggagacgatggcagcccagggtctgggccctgtttgaggatccatactcaagccgcgccgctcggtatgtggcattcgcctctctgttttttatcctgatctcgatcaccaccttttgtttggagacacacgagggttttattcacatttctaataagacagtgactcaagcttcacccatcccgggcgcccctcccgagaacataacgaatgtcgaggtagaaacagaaccatttctgacgtatgtggaaggagtctgtgtggtgtggtttacctttgaatttctgatgcggattacattttgtccagataaagtggagttcctcaaatcctctctcaacatcattgactgcgttgctatcctaccgttttatctggaggtggggctaagtggtctgtcctcgaaggcagcaaaggacgtgctcgggtttctacgggtggtgaggttcgtgcgtatcctgagaatcttcaagttgacccgccacttcgtggggctaagggttctagggcacactctcagggcttcaacaaatgagttcctgcttcttataatatttctggccctgggggtgctaatcttcgctactatgatctactatgcagagcggataggcgccgacccggatgatatccttgggtctaaccatacgtactttaaaaacatcccgatcggtttttggtgggctgtagtcactatgacaacgttgggctacggcgatatgtatcctaaaacttggtccggtatgctcgtgggggcattatgcgcgcttgcgggagttctgacgattgcaatgcctgtgccagttatcgtgaataactttggcatgtactattccttggcaatggcaaaacaaaagctccccaaaaaaaagaacaaacacatacctcggccgcctcagcccgggtcccctaactactgtaaaccggatccgcccccacctcctcctccgcacccccaccacggatccggcggaattagccctcctccacctatcaccccaccaagcatgggagtgaccgtggccggcgcctatcccgccggtcctcacactcacccaggccttcttaggggcggcgctggagggttaggtattatgggactgccacccctccctgccccaggtgaaccctgcccgctggcgcaggaggaagtcatcgagatcaaccgagccgacccccgcccgaatggtgatcctgcagccgccgcacttgcacatgaagactgcccggccatcgatcagcctgctatgagcccagaggataagtcgccgatcacacccggcagtcggggcagatacagtagggaccgcgcctgtttccttctgaccgattacgccccatcacccgacgggagcattcgtaaggccctcgtgactgcatag

SEQ ID NO: 129593 - DNA, 2274 bp, synthetic construct
  misc_feature 1..2274: note = Description of Artificial Sequence: Synthetic coding sequence
  source 1..2274: mol_type = other DNA
atgttgtctagcgtttgtgtgagcagtttccgggggagacagggagcttcgaagcagcagcctgcccctcccccacagcctcccgagtcacccccaccacctcctctgcccccccagcagcagcagcctgcgcaacccggccctgccgcgtcacccgcagggcctcctgccccccgcggcccgggggatcgacgggccgaaccctgccccgggctgccggcagccgccatgggccgccatggcggcggcggcggtgatagtggtaagattgttattaatgtaggcggcgtgcgacacgaaacgtaccgcagcactctcagaactctacctggaacccgcctggccggactcacagaacccgaggccgccgctagatttgactatgatcctggagccgacgagtttttcttcgaccgccaccctggggtgttcgcatacgtcctgaactattaccggaccggtaaactgcattgtccagctgacgtctgtggccccctgttcgaggaggagcttggcttctggggaatagacgagacagacgtcgaagcatgttgttggatgacctataggcaacacagggatgccgaggaagcattggattcctttgaagctcctgaccccgccggagctgctaatgcagccaacgccgccggggcccatgacgggggtctggacgatgaagccggcgccggcggaggcggtcttgatggtgcgggaggcgaactgaagcgtctgtgcttccaggatgctgggggcggcgccggcggtcccccaggtggggctggcggcgcaggaggcacatggtggagaaggtggcagccacgggtgtgggcgctgttcgaagacccatattcctcccgggcggcacgatacgtcgccttcgcgtccctctttttcatcctgatctccatcactactttttgcttggagacacatgagggctttatccatattagcaataaaacagtcactcaagcgagcccgatacccggggctcctcctgagaacatcactaatgtggaagtcgagaccgagcccttcttgacctacgtggagggggtatgtgttgtttggttcacatttgagttcctgatgaggattactttttgccccgacaaggtggaattcctcaagtccagcttaaacattattgactgtgtcgccattctgcccttctacttagaggtgggtctcagcggtctgtccagtaaggccgccaaagacgtccttgggtttcttcgtgttgtgcgtttcgtccgcatcctccgaatttttaaattgactcgccattttgtgggcttgcgagtgctcggccacaccttgagggcaagcacgaacgaattcctgttactcataattttcttagctctgggagtcctgatctttgccacaatgatatattacgccgagcgcatcggagcagaccctgacgatatcctgggatccaatcacacctactttaagaatatccccatcggcttctggtgggcagttgttaccatgaccacgctgggttacggcgatatgtatccaaaaacttggtccggcatgctggtcggagctctgtgtgcactcgcaggcgttctgactatcgcaatgcccgtgcctgttatcgtcaacaatttcggaatgtattatagtctggccatggctaagcaaaaactgccaaaaaaaaaaaacaaacacattcctcgacccccccagcctgggtccccaaattactgcaaacccgatccaccccctccgcccccccctcacccccaccacgggtccggagggatctcgcctcccccgcctattacgcctcccagtatgggagttaccgtggccggagcctaccctgctggaccccacacccaccccggactgctgcgtggaggcgccggcgggctgggcatcatgggccttccgccactgcctgcaccaggcgagccctgccccctggctcaagaggaagttatagagattaatagagcagatccacggccaaatggagatcccgccgcagccgcactggcccacgaagattgtcctgccatcgaccaacccgcgatgtcccccgaagacaagtccccaataacacccggtagcagagggcgttacagcagagaccgcgcctgctttctcttgacagactacgcccccagtccggacggctccatccgtaaagctactggggctccaccactaccgccccaggattggcgcaagcctggcccccccagttttctgcccgacctgaatgccaacgccgccgcatggatctctccttag

SEQ ID NO: 129594 - DNA, 1908 bp, synthetic construct
  misc_feature 1..1908: note = Description of Artificial Sequence: Synthetic coding sequence
  source 1..1908: mol_type = other DNA
atgattagctccgtgtgtgtgtcttcttaccgtggtcgaaagagcggaaacaaacctccaagtaaaacatgcctgaaggaggaaatggcaaaaggggaggccagcgagaagataattatcaatgtgggagggacgaggcatgagacctaccgaagcacgctcagaacgctcccaggcaccaggcttgcctggctggcggatccggacggggggggaaggccggagaccgatggagggggggtgggatcttccggctctagtggagggggcggttgcgagtttttctttgaccgccaccccggggtctttgcatacgtgctgaattattaccgcaccggaaaactccactgtccagctgatgtctgcggacccctgtttgaggaagaactgacattctggggaattgacgaaacagatgtcgaaccttgctgttggatgacatataggcagcatagggatgcggaagaagccctggatatcttcgagtctcctgacggtggaggttccggagctggaccgagcgatgaggccggcgatgatgaaagagaactcgctttgcaaagattgggaccccacgagggcggagccggccacggggctggcagcggcgggtgcaggggttggcagccgagaatgtgggcattattcgaagacccttactcctccagagcagcccgcgttgtggccttcgcttctttgtttttcattctggttagcatcactacattctgtctggagacgcatgaggcctttaatatcgacagaaacgtgacggagattcttagagtgggaaatatcacgagcgtgcactttcgccgggaagtggaaaccgagccaatcctcacttatatcgaaggtgtttgcgtgctgtggtttaccttggaattcctggttcgtatcgtatgctgccctgataccctcgactttgtgaaaaatctactgaatataattgacttcgtagccattctaccgttctatctggaagtgggcctcagcggcctgtcctcaaaagccgcacgagacgtgttagggtttctgcgcgtggtccggttcgttcggattcttagaatcttcaagttgactcggcactttgtagggctgcgagtcctaggtcacacgctgagagccagcactaatgaatttctactgttaatcatcttcctggctctaggagtgctgatctttgctaccatgatctattatgccgaaagaattggggctcggccttcagaccctaggggaaatgaccacacggatttcaaaaacataccgatcggcttttggtgggcggtggtgacaatgacaaccctggggtacggggacatgtatcctaagacgtggagcgggatgttagtaggcgccctgtgcgcattggcgggtgtgcttacaattgctatgcctgttccggtgattgttaacaattttggaatgtactactctctcgctatggctaaacagaaactgccgaaaaagagaaaaaaacacgtcccaaggcctgcccagctggaaagtcccatgtactgtaaatccgaggaaacctcaccaagggactctacctgctcagacacgtcaccacccgctagggaggagggcatgatagagagaaagcgcgcggattccaagcagaacggtgacgctaacgccgtccttagtgatgaggaaggcgcgggacttactcagcctctcgccagctcaccaacccccgaggagcggcgagcgctgcgacggtccaccaccagagaccgtaacaaaaaggctgctgcatgttttctgctttcaacaggcgactacgcctgcgccgatggctcggtgcggaagggcaccttcgtgcttcgcgacctgcccctgcaacacagtcccgaggccgcttgcccccctactgccggcacactcttcctgccccattag

SEQ ID NO: 129595 - DNA, 1881 bp, synthetic construct
  misc_feature 1..1881: note = Description of Artificial Sequence: Synthetic coding sequence
  source 1..1881: mol_type = other DNA
atgatcagctccgtgtgcgtttccagctatagaggtcgtaagtcgggaaacaagcccccttcaaagacatgcttgaaggaagagatggccaagggagaggcttcggagaagatcatcattaacgtcgggggcacacggcatgagacttataggagcacactgagaacactaccaggcacacgattggcttggctcgccgatcccgacggtgggggaaggccagagactgacggcggtggagttggaagctccggtagcagcggcggtggaggttgtgaattttttttcgaccgccaccccggcgtgtttgcatatgttctgaattactacagaacggggaagctgcactgtcccgcagacgtttgcggccctctcttcgaagaagagctcacattctggggtatcgacgaaacagacgtcgagccttgttgctggatgacttacagacagcatcgtgacgcggaagaggcactcgacatttttgaatctcctgatgggggcggatccggcgccggcccatccgacgaagcaggcgatgacgagcgagagctggccctgcagcgattgggaccacacgaaggtggagcaggacacggtgccgggtctggggggtgcagaggctggcaaccccgcatgtgggcattgtttgaggacccctacagttcacgcgctgctcgggtcgtcgcgttcgccagcctcttttttatcctggtttccatcaccactttttgcctggagacacacgaggcatttaacattgataggaacgtaaccgagatccttcgcgtgggtaatattactagtgtgcatttccgaagagaggtggagactgagcctatcctcacgtatatcgagggagtctgtgtgctctggttcaccctggagttcctggttaggatcgtgtgctgtcccgacaccctcgactttgtaaagaacctcctgaacattattgatttcgtggctatcctcccgttctatctggaggtgggactctccggcctttcttctaaagcagccagagacgtgctcgggttcctgcgggtagtcagatttgtgagaatcttgagaatttttaaacttacgaggcattttgtaggactgcgggtgctgggacataccctgagagcatctacaaacgaatttttgttactcatcatattcctggcccttggggtgttgattttcgctactatgatctactatgctgaaaggatcggcgcccggccctctgacccaaggggaaatgaccacactgacttcaagaacatccctattggattctggtgggccgttgtgaccatgacgaccttgggctatggggatatgtatcctaagacctggagcggaatgttggtcggagctctgtgtgcgctcgcaggagtgttaacaatagccatgcctgttcccgtaatcgtgaacaacttcgggatgtattactcactagccatggcgaaacagaagctgccaaagaagaggaaaaaacacgtgccccgaccggcacagctggagtctcccatgtattgcaagtccgaagagacaagcccacgtgattcgacatgcagtgataccagtccacctgcccgggaggaaggcatgatcgagcgaaaaagagccgactcaaaacagaatggcgatgcaaatgccgtattgtcagatgaagagggggccgggctgacccagccattggcttcctcacccacacctgaggagcggagagctttgcgccgctctacaacacgtgacagaaataagaaggccgccgcatgctttctcctgagtactggagattatgcttgtgcggatgggagcgtacggaaggagacctgccaggacgccttatcaagcaattatgcacaggcagaggttcttacactcagctag

SEQ ID NO: 129596 - DNA, 1908 bp, synthetic construct
  misc_feature 1..1908: note = Description of Artificial Sequence: Synthetic coding sequence
  source 1..1908: mol_type = other DNA
atgattagctctgtctgcgtctctagttacagagggcgtaaaagcggcaacaaaccccctagcaaaacatgtctgaaggaagaaatggctaagggcgaggcaagtgaaaagatcattattaatgtcggcggtacccgacatgagacataccgatccacactgaggaccctgccggggacccgtcttgcctggcttgcggaccccgatggaggggggcggcccgaaacagacggtggaggggtgggatcatcgggatctagtggcggtggtggatgcgagtttttttttgatcgacaccccggagtttttgcgtacgtgctcaattactaccgcacaggcaaattgcactgcccggctgacgtgtgcggaccactgtttgaagaggaacttacattttggggaatcgacgaaaccgatgtggagccctgctgctggatgacctaccgccagcatagggacgcagaagaagctctggacatcttcgagtccccggacggaggtggcagcggagctggacccagcgatgaggctggtgacgatgagcgagagctggccctgcaacggttgggacctcatgagggaggagctggtcacggagcaggttccggcggctgtcggggctggcagcctcgcatgtgggctctatttgaagatccatatagctccagggccgcaagagttgtggccttcgcatccctgttttttatcctggttagcataacaacattctgtctggagacacatgaagctttcaacatagataggaatgtaacagagatcctgcgggttggtaatataacttcagtacattttagaagagaggtggagaccgagcccatcctgacctacatcgaaggcgtatgcgtcctatggtttactcttgaatttttagtgcgcattgtctgttgtccagacaccctcgacttcgtcaaaaacttactgaacatcattgacttcgtggccatccttcccttttacctggaagtgggcttgtccggcctttcatccaaagccgcccgagacgtcctaggctttctcagggtggtgaggttcgtccggattctgcggattttcaaactcaccagacacttcgttggactgcgcgttctggggcataccctacgggcatcgaccaacgaattcctcctgcttattatctttttagctcttggggtgcttatcttcgccacaatgatttattacgcagagagaattggcgccaggccaagtgacccaaggggcaatgatcacaccgattttaagaatatcccgattgggttctggtgggcggttgtcactatgaccaccctcggatacggcgatatgtacccaaagacatggagcggtatgcttgttggcgcactctgcgccctcgcaggcgtacttaccatcgctatgcccgttcccgtaatcgtcaataacttcggcatgtactattcattggctatggcgaagcagaaactgcccaagaagcgcaaaaagcatgtgcctagaccagcgcagctggaatcaccaatgtactgcaagtcagaggagacatctcctcgcgattctacctgttccgacacatcacctccagcccgcgaggagggaatgatcgaaagaaaacgcgcagattccaaacaaaatggggatgcaaacgctgtactttccgatgaggaaggtgccggattgacccagcctctagcctcatccccgacgcccgaagagagaagagcactgagaaggtccaccactcgagatcggaacaagaaggctgctgcatgctttttactcagcaccggtgactacgcttgtgcagatggcagcgtgcgaaaagggacttttgtcctcagggatctgcctctacaacattccccggaggccgcttgccctcccactgcaggtactcttttcttgccccactag

SEQ ID NO: 129597 - DNA, 1485 bp, synthetic construct
  misc_feature 1..1485: note = Description of Artificial Sequence: Synthetic coding sequence
  source 1..1485: mol_type = other DNA
atggacggctctggagagcggtccctgcccgaacctgggtctcagagcagcgccgcctcagacgacattgagattgtagtgaacgtggggggtgtgaggcaggtgctctacggggacctcttgtcccagtatcctgagacccgactagccgaactcataaattgcctggccggaggctacgatactattttttccctttgtgacgactacgatcctgggaagcgagaattctactttgacagggaccctgatgccttcaaatgcgttatcgaggtgtattattttggggaggtgcatatgaaaaagggaatctgcccaatttgcttcaaaaatgagatggacttctggaaagtggacctgaagttcttagatgactgttgcaaatctcacctcagcgagaaaagggaagaactggaggagattgcccgccgggtgcaactgattcttgacgatttgggtgtggacgcagccgagggtcggtggcgccggtgccagaaatgcgtgtggaaatttctggagaaacctgagtcttcctgcccagctagagtggtcgccgtcctcagctttctactgatcctcgtctctagcgttgtgatgtgcatgggtaccattccggaactgcaagtcctagacgcggagggaaaccgtgtggagcatcctaccctggagaatgtcgaaacagcctgcataggctggtttacgctcgaatatttgctgaggctgttttcatcacctaataaattgcattttgccttatcatttatgaacatcgtggatgttctcgctatcctgcctttctatgtgtccctgacccttacgcatctgggcgcaagaatgatggagttaaccaatgtgcagcaggcagtgcaggctctgagaattatgcgaatcgcccggatctttaaactggccaggcacagtagcggcctgcagacacttacctatgccctcaagaggtcattcaaggagctgggcttactcttaatgtacttggccgtggggatctttgttttttcagcccttgggtatacaatggagcaaagccaccccgagacgttgttcaagtctattccacaaagtttctggtgggcaatcatcacaatgaccacggtcggatacggcgatatctatccaaagaccaccttaggcaagctcaatgcagcgatttcttttctctgcggggtaatagccattgctctccccatccaccccataatcaacaatttcgtgagatactataacaagcagcgcgttcttgaaaccgccgccaagcacgaactggagctgatggaactgaacagtagcagcggaggggaggggaaaaccgggggttctcggtccgaccttgataatctgcctcctgaaccagcggggaaagaggctccctcttgctcgtccaggctgaagttatcgcactcggacacgttcatacccctgctgaccgaagaaaaacatcaccggaccaggctgcagtcatgcaaatag

SEQ ID NO: 129598 - DNA, 1542 bp, synthetic construct
  misc_feature 1..1542: note = Description of Artificial Sequence: Synthetic coding sequence
  source 1..1542: mol_type = other DNA
atgactctgctgcccggcgataatagcgactacgattacagcgccctatcctgcacaagtgatgccagttttcatccagcattcctgccgcagcgacaagccatcaagggggctttttatcggcgggcacagcggctccggccacaggacgagccccggcagggctgccagccggaggaccgcagacggcggatcatcatcaacgtcggcggcataaaatattctttgccttggacgactttagatgaatttccactgacacgattggggcaactgaaggcctgcactaatttcgacgacatcttgaacgtttgcgatgattacgatgttacatgtaatgaatttttttttgatcgcaatcccggcgcgttcggaacgatcttgacattcctacgtgctggcaaactacggcttctccgtgagatgtgcgctctgagcttccaggaggagttgctgtactggggaatcgccgaggaccatctggacgggtgttgcaaaagaaggtacctgcaaaagatcgaggaatttgccgaaatggtggagagggaggaggaagacgatgcccttgattccgagggcagggattctgaggggcccgccgagggagaagggcggctggggcgctgcatgaggcggttgagggacatggtggagcggccccatagcggcctgcccggcaaggtattcgcctgtctgagcgtgctatttgtgacggttactgccgtaaatttatccgttagcaccctccccagcctgagggaggaggaagagcaaggacattgcagtcaaatgtgccacaatgtgtttatagtggaatctgtatgcgtggggtggttttcattggaatttttactcagacttattcaggcaccaagcaaattcgctttcctgaggtctcccctgacactgatcgatctggtggcgattctaccatattacattacactcctggtggatggggcggccgcaggaaggcgcaagccgggggcgggaaattcatacctcgataaggtcggactcgtcctgcgcgtgctaagagccctccgcatcctctatgtgatgcggctcgctaggcatagccttgggctacagactctcggactcactgcaagacgttgtactagagagtttgggctgctgctgctgtttctgtgcgtggcaatcgcccttttcgcgccgctactgtatgtgattgagaacgagatggccgacagccccgagttcacctcaatcccggcatgctattggtgggccgtcatcaccatgaccacagtagggtacggggacatggtgcccagatcgacaccaggtcaggtggtggctctatcctccatcttaagtggcatacttctgatggctttcccagttacatccatattccatacattctcgcgctcatacttagagctgaagcaggagcaggagagagtgatgtttcggagggctcagtttttgataaagacgaagtcgcagttatccgtgtcacaggacagtgatatcctcttcggtagcgcatcctccgatactcgagataataattag

SEQ ID NO: 129599 - DNA, 828 bp, synthetic construct
  misc_feature 1..828: note = Description of Artificial Sequence: Synthetic coding sequence
  source 1..828: mol_type = other DNA
atgacactgcttccaggcgacaactcagattatgactatagcgccctaagctgcacctctgacgccagctttcacccggctttcttgcctcagcggcaagcgattaagggagcattctataggcgcgctcagcggctaagaccacaggatgagcctaggcaaggttgtcaaccagaagaccggcggagacggatcattatcaatgtgggagggattaagtactctctaccttggaccaccttggatgagttcccactcaccaggctcggccagctgaaggcttgcactaattttgatgatatacttaacgtgtgtgatgattatgacgtcacttgcaacgaatttttctttgatcgaaatccaggggcatttggcaccatcctcaccttcctgcgggcaggaaagctccggcttctccgggagatgtgtgcactgtccttccaggaggagttgctctactggggcattgcagaggatcacctggatggatgctgcaaaagaaggtacctgcagaaaatcgaggagtttgcagagatggtcgagcgggaagaggaggatgatgcccttgatagtgagggccgggacagcgagggaccagccgagggagagggcaggctggggaggtgtatgaggcggctcagagatatggtggaaaggccgcatagcggcctccccgggaaggtcttcgcatgcctcagtgttctatttgtaactgtcacagcagttaacctctcagtttctactctcccctctttgcgcgaggaggaagaacaggtgcgtgcccatgcgccccgcggcaacgctccgccccgcggaaaagggctgtag

SEQ ID NO: 129600 - DNA, 543 bp, synthetic construct
  misc_feature 1..543: note = Description of Artificial Sequence: Synthetic coding sequence
  source 1..543: mol_type = other DNA
atgacgctgcttccaggcgataattctgactatgactactccgccctcagttgcacgagtgacgctagtttccaccctgcgttcttaccacaaagacaggctatcaaaggtgccttttatagaagagcccagagactgcgccctcaagacgagcccagacaagggtgtcagcccgaggatcgccgacggcgcataatcataaacgtgggcggtattaaatacagcctgccctggaccacgttggatgagtttccactgaccagactgggccagctgaaggcgtgcactaattttgatgatatactgaatgtctgcgacgattatgatgtcacatgcaacgagttcttttttgacagaaatcctggggcctttggaacaatcctcacatttttacgagccggcaagctacgactgctccgggaaatgtgcgcactttcgtttcaagaggaactgctttattggggcatcgcagaagaccacctggatgggtgttgtaaaaggaggtacctgcagaagatagaggagttcgccgaaatggtctag

SEQ ID NO: 129601 - DNA, 291 bp, synthetic construct
  misc_feature 1..291: note = Description of Artificial Sequence: Synthetic coding sequence
  source 1..291: mol_type = other DNA
atgactcttctgccgggagacaactctgactatgactactctgccctgtcatgtacaagtgatgcgagcttccaccccgcctttctcccccagcgccaggcaattaagggtgctttctaccggcgcgctcaacgcctgagaccacaggatgaaccccggcagggatgccagccagaggaccggcggcgacggatcattattaacgttggaggcatcaagtacagccttccttggactaccctagacgagtttccactgacacgcttaggccagcttaaagcctgtacgtag

SEQ ID NO: 129602 - DNA, 777 bp, synthetic construct
  misc_feature 1..777: note = Description of Artificial Sequence: Synthetic coding sequence
  source 1..777: mol_type = other DNA
atgaccctattgcctggagacaacagcgattatgactattccgccctctcttgcactagcgacgctagcttccaccccgccttcctgcctcaacgccaagcaatcaagggagccttctatcgccgcgcccagcgtctgagaccacaggacgagcccaggcagggttgtcagcccgaggaccgaagacggcgtattattattaacgtgggtgggatcaagtacagccttccctggaccacgctggatgaatttcccttgacgcgcctcgggcagcttaaagcctgcactaacttcgatgacatcctaaatgtgtgtgacgactatgatgtcacatgtaacgaattcttttttgacaggaatccaggcgcctttggaaccatccttacttttctgagagctgggaaactaagactgttgagggagatgtgcgctctgagctttcaggaagaactgctgtactggggaattgctgaggaccatctcgatggatgttgtaaacggagatatctgcaaaaaatcgaggaattcgccgagatggtagaacgggaagaggaggatgatgcactcgactctgagggcagggattccgaaggacccgcggaaggagaagggagactggggagatgcatgagaagactgagagatatggtcgagaggccacatagcggcttgcccgggaaggtgtttgcttgcctttctgtgttatttgtcactgtgaccgccgtaaacttgtccgtgagcacactgcctagcctgagagaggaggaggagcaatag

SEQ ID NO: 129603 - DNA, 147 bp, synthetic construct
  misc_feature 1..147: note = Description of Artificial Sequence: Synthetic coding sequence
  source 1..147: mol_type = other DNA
atgactctgctcccaggggacaatagtgattatgattactctgcactgagctgcaccagtgacgcatcctttcatcccgcctttctgccacaacggcaggcaattaaaggggccttttatcggcgcgcccagaggttacgcccatag

SEQ ID NO: 129604 - DNA, 1311 bp, synthetic construct
  misc_feature 1..1311: note = Description of Artificial Sequence: Synthetic coding sequence
  source 1..1311: mol_type = other DNA
atgacctttggcaggagcggtgcagcttccgtcgttctcaatgtgggtggagctagatactctttatctcgggagttactgaaggacttcccactgcgccgggtgtctaggttacacgggtgtaggtcagaacgggacgtgctcgaggtgtgcgatgactacgatagggaacgaaacgaatatttcttcgaccggcactccgaagcctttgggttcatcctgctgtacgtgcgaggccacggcaagctcagattcgcgcccaggatgtgtgaactgtcgttttacaacgaaatgatctattggggcctggaaggtgctcacctggaatactgctgccaacgaaggctggatgatcgcatgtctgatacctacaccttctattccgcggatgagcccggcgtgctagggcgtgatgaggcgcggccgggcggcgctgaagctgcaccaagccggcggtggcttgaacggatgcgccgtacgtttgaagagcctacttcgtcattggccgcccagatcctggcaagcgtgtccgtggtgttcgtgatagtgtctatggtcgtgctctgcgcctcgacgctgcctgattggcgaaacgcagcagctgacaataggtcactggatgataggtcccgatacagtgctggccctggaagggaaccgagcggaattattgaagccatatgtatcggctggttcaccgctgagtgcattgtgagattcatcgtatccaaaaacaaatgcgagtttgtgaagcggccactaaatattatagacctgctcgccattaccccctactatatttccgtcctcatgactgtcttcactggcgaaaattctcaactgcagagggccggagtcacactgcgcgtgttaaggatgatgagaattttttgggtgatcaagctggctagacattttatcgggctgcaaaccctgggcttgacactaaagcggtgctatagggaaatggtaatgctgctagtttttatttgcgtggccatggctatctttagtgccctgtcacagctgctggagcatggtctggaccttgagacctccaacaaggacttcacttccataccagctgcatgctggtgggtcatcatcagcatgactactgtgggctacggggatatgtatccaattaccgtacctggccgaattttgggaggggtgtgcgttgttagtggcatcgtgctgcttgccctgccaattacgttcatctatcactcatttgtccaatgctatcacgagctgaaatttcggagcgctaggtattcacgatcactgtctaccgaatttctaaactag

SEQ ID NO: 129605 - DNA, 1278 bp, synthetic construct
  misc_feature 1..1278: note = Description of Artificial Sequence: Synthetic coding sequence
  source 1..1278: mol_type = other DNA
atgacattcggtcgcagtggcgctgctagtgtcgtcctgaacgttggaggcgcgagatattctctgtcaagagagctgctgaaggatttcccgcttagaagagtgtctcgactacacgggtgccgaagcgaacgggacgtgctggaggtgtgtgacgactatgaccgggagcggaatgaatattttttcgatcggcacagcgaagctttcgggttcatcctgctgtatgtccgaggtcacggcaaactacgattcgcaccccgtatgtgcgaactctcattctataatgagatgatttactgggggctggagggcgcccacttggagtattgctgtcaacgccggttggacgacaggatgtcggacacatatactttttactcggctgatgagccgggcgtactcgggagagacgaggcccgcccagggggagccgaagccgccccgtcgagaaggtggcttgagagaatgcgccgcactttcgaggaaccaacaagttcactcgcggctcagatcttagcctctgtcagcgttgtgttcgtgattgtcagtatggtggtgctctgtgccagtacgcttcccgattggcggaacgccgcagctgacaaccgatcattagacgatcgatccagaatcatcgaagccatttgtatcggctggtttaccgcggagtgtatcgtccggtttattgtttcaaaaaacaagtgtgagtttgtgaagcgccccctgaacataatcgacctcctagccatcaccccatattatatcagtgtgctcatgaccgtgttcacaggcgaaaactctcagctgcaacgtgccggcgtcacacttagggtcctacgcatgatgcgtattttttgggtgatcaaactcgcccgccactttattggcctgcagactctcggcttaacgctgaagaggtgctatcgtgagatggtaatgctgctagtgttcatttgtgtcgctatggccattttttccgcgctgtctcagttgctggagcacggactggacctggaaacatcgaacaaggactttaccagcattccggctgcatgctggtgggtgatcatcagcatgactactgtgggatacggagacatgtatccgatcacagtgccaggaaggatactcggcggagtgtgcgttgtttcagggattgtgctgttggcacttcccataacatttatctatcactcatttgttcagtgttaccacgaattaaagttccgaagtgccaggtactcccggtctttatccaccgagttcctcaattag

SEQ ID NO: 129606 - DNA, 1560 bp, synthetic construct
  misc_feature 1..1560: note = Description of Artificial Sequence: Synthetic coding sequence
  source 1..1560: mol_type = other DNA
atgccaatgccaagtagagacgggggcctgcacccacgtcatcatcattacggcagtcactcgccgtggagtcaattactgagctcaccgatggaaacgccctctattaaggggctttactatagaagggtccgaaaggtcggcgccctggacgcctctcctgtggatctgaagaaagaaatcctgattaacgtggggggaagaagatacttactcccttggagcacgctggatcgctttcctctctctagactgagcaagctgaggttatgtcgaagctacgaggagatcgttcagctgtgcgacgattacgatgaggactcgcaagagtttttctttgatcgcagcccgagtgcttttggggtgatcgtcagcttcctagccgccgggaaactcgtccttttgcaggagatgtgcgcattgtcctttcaggaggaactcgcttattggggaatcgaggaggcgcatctggaaaggtgctgtctgcggaaattgctgcgtaagttggaagagctagaagagttggccaaactgcaccgagaggatgtcctgcggcagcaacgcgaaacgagacggcccgccagccatagctccagatggggattatgtatgaaccgtctgagagagatggttgaaaatccacagagcggattacctggtaaagtttttgcctgtttgtcaattttgtttgtggccactactgcagtctccctctgcgtgagtacaatgccagatttgagagctgaagaagaccaaggggaatgctctagaaaatgctactacatttttatagtggagaccatctgcgttgcatggttctcacttgagttctgcctgcgattcgttcaagcacaagataaatgtcaattttttcaaggccctcttaatataatcgacattctggcaattagcccatactatgttagccttgctgtgagtgaggagccccccgaggacggcgagaggccgtcagggtctagttacctggagaaagtcggactggtgttaagggtcctcagggccctcagaatcctttacgtcatgcgactggcgagacactcgctaggcttgcaaaccctgggcctgacggtgagacgctgtacccgggaatttgggcttcttctgctgtttctggctgtcgccataacactgttttcccccctggtgtatgtggctgagaaagagtcaggcagagtgctggagtttacctccataccagcatcttactggtgggccattatatccatgacgactgtgggatatggagacatggttcctcgatccgtccctgggcagatggtggcgctgtcctctattctcagcggtatattgatcatggcctttcccgccacttccatcttccatactttttcacattcctacctcgaactgaagaaagagcaggaacagctgcaggccagactgaggcaccttcagaatactggtcccgctagcgaatgtgaactgctggacccccatgttgcgtcagaacacgaactgatgaacgacgtcaatgatctcatactggagggacccgctttgcctatcatgcacatgtag

SEQ ID NO: 129607 - DNA, 2970 bp, synthetic construct
  misc_feature 1..2970: note = Description of Artificial Sequence: Synthetic coding sequence
  source 1..2970: mol_type = other DNA
atgaccatggccgggggaagaagaggactcgtggctcctcagaacacattcctggagaatatagttcgcaggagcaatgataccaactttgttctcgggaatgcccagatagtggactggcccatcgtgtatagcaacgatggtttctgcaagctaagcggctatcacagagccgaagttatgcagaagagtagtacttgctctttcatgtacggggagctgaccgataaagatacgatcgagaaggtgcggcagacttttgagaactacgagatgaacagtttcgaaattttgatgtataagaagaaccggactcccgtgtggttttttgtcaagatcgccccaatccgcaacgagcaggataaagtcgtgctgtttttgtgtactttctccgacataaccgcgttcaaacagcccatcgaggacgactcttgtaaaggttgggggaagtttgcgagacttacaagggcactgacgagcagtaggggggtgctccagcaactggcgccctctgtgcaaaaaggcgagaacgtccataaacacagcagactagccgaagttctccagctcggatctgatatcctgccccagtacaaacaggaagcccctaagacccctccccacatcattctccattactgtgtgttcaagacaacttgggactggataatactgatactaacattctatactgctatattggtgccctacaatgtgtcctttaaaaccagacagaacaatgtggcctggctggttgtagatagtattgtcgacgtgatcttcctcgtggatatcgtgctgaatttccataccaccttcgtcggcccagccggcgaggtgatttcagaccctaaactgatcagaatgaattacctgaaaacatggttcgtgatcgacttgctgagctgtctcccatacgatgtcattaatgcattcgaaaacgtggacgaagtgtccgcttttatgggggatcccgggaagattggatttgccgaccaaattcctcctcctctagaaggtagggagagtcaaggaatatcaagcttattttcaagtcttaaagttgtccggctgttgcgtctgggcagagtcgcacgtaagttagatcattacattgaatacggagccgcggtgctggttcttctagtgtgtgtcttcggtctcgccgcacactggatggcgtgcatctggtatagcattggcgattatgaaattttcgacgaggacactaagactattcggaataatagttggttgtatcagttagccatggacatcggaacgccttatcagttcaatgggtcaggctcaggcaagtgggagggaggtccttccaagaacagcgtgtacatcagctctctatacttcaccatgacttctttaacaagcgtgggcttcgggaatatcgcaccttctacagatatcgaaaagattttcgccgttgccatcatgatgatcggctcactactgtacgcgacaatctttgggaatgtaacgacgatattccagcagatgtacgccaatactaacaggtaccatgaaatgttaaatagtgtaagagacttcctgaaactgtaccaggtcccaaagggcctttccgaacgtgtgatggactacatcgtgagcacatggtcaatgagcaggggcatagacaccgagaaggtcctccaaatctgcccaaaagacatgcgggccgatatttgcgtacacctaaaccgaaaagtttttaaggagcatcccgcctttagattagccagcgacgggtgtttaagagccctcgctatggagttccagacagttcattgtgctccaggcgacctgatttatcacgcaggcgaaagtgtagattctctttgttttgtggtcagtgggagtttggaagtaattcaggatgatgaggtcgtggccatactgggtaaaggggacgtgttcggagacgtattctggaaggaagccactttggctcagagctgtgccaatgttcgggccctcacgtattgtgatctccacgtcatcaagagggatgctctgcagaaagtgctggagttctatacagccttcagccattcatttagtcgtaatcttatcctaacgtataatctgcggaagcgaatcgtgttcaggaaaatcagcgacgtaaaacgagaagaagaggagagaatgaaacggaagaacgaggctcccctcatcctgccccccgaccacccggttagaagactctttcagcggtttcgacagcagaaggaggctcggctggcagccgaacgcggaggtagggatttggatgacctggacgtggaaaaaggcaatgtgcttactgagcacgcttcagccaaccactcactggtaaaagcctcagttgtgactgtgcgggaatcacctgcgacccccgtttccttccaggcagctagcacctcaggggtgccggaccacgccaaactgcaggcacccggaagcgaatgcctgggccccaaaggggggggcggcgattgcgccaagcggaagtcctgggctcggttcaaggatgcttgcggcaagagcgaggattggaacaaggtctctaaggcagaatcaatggagacacttccagaacggactaaggcctccggggaagccactttgaagaaaaccgactcatgcgactctggcattaccaaatcagaccttcggctcgataacgtgggtgaggccaggtcgccccaggaccgaagccctatcctggccgaagttaagcattcattttacccaatcccagaacagactctgcaggcgacggtgcttgaagtacgccatgagttaaaggaagacatcaaggctctcaacgcgaaaatgacaaacattgagaagcaactgagtgagatcttgcgcattctgacgtccaggcgctctagtcagtcgccccaagaactcttcgagatttctcgtccccagagtccagaaagcgagcgggacatttttggggcatcctag

SEQ ID NO: 129608 - DNA, 2889 bp, synthetic construct
  misc_feature 1..2889: note = Description of Artificial Sequence: Synthetic coding sequence
  source 1..2889: mol_type = other DNA
atgacaatggccggcgggaggcgcggtctggttgctccccagaacacattcctggagaacatcgtgcgaagatctaacgacactaatttcgtgctgggtaatgctcagattgtggactggcccatcgtctatagtaatgatggattctgcaaattatcaggataccaccgcgccgaggtgatgcagaagtcctccacttgctctttcatgtacggcgagttgactgataaagacacgatagagaaagtgaggcagacattcgaaaattacgagatgaatagtttcgagatcctcatgtacaaaaaaaacagaacacccgtgtggttttttgtaaaaatcgcccctatccgcaatgagcaggacaaagtggtgctgtttctgtgtaccttctccgatatcacagcattcaagcaacctattgaggacgacagctgcaaagggtggggaaagttcgcacgtctgaccagggccttaacttcctctaggggggtcttgcagcagttagcccctagcgtgcagaaaggagagaacgtgcacaagcacagtcggctggctgaagtgctccagcttggctctgacatcctcccccaatataagcaagaagccccaaagacacctcctcatataatcttgcactattgcgtgtttaaaacaacctgggattggattattctcattttgacattttacaccgccatcctggtgccctataatgtatcttttaaaacacggcagaataacgttgcgtggctggtagtggatagtatcgtggacgtcatattccttgtggacatcgtactcaactttcataccaccttcgtggggccagcaggggaggtgattagcgacccaaaactgataagaatgaattacttaaagacatggttcgtcattgacctgctgagttgcttgccttatgacgttataaatgcatttgagaacgtcgacgaaggaatctcctctctgttctcttctctcaaggttgtcagactcctgcgcctggggagagtcgcgagaaaattggatcactatatcgaatacggagcagccgtcctagtgctcctggtttgtgtctttggactagcggcccactggatggcgtgtatttggtatagcatcggtgattatgaaattttcgatgaagatacaaaaaccattagaaataactcctggctgtatcagctcgcaatggatatcgggactccataccagttcaacggaagcggttctggtaagtgggaaggcggcccctccaaaaactccgtgtacataagttctctctatttcaccatgacctccctgaccagtgtcggcttcggcaacatcgcgccatcgactgacatcgagaaaatctttgccgtagccattatgatgatcggttctttgctgtatgccacaatattcggaaacgtcacaactatcttccaacagatgtacgcaaacacgaatcggtatcacgaaatgctgaattccgtgcgggacttcctaaaattatatcaagtgccaaaaggactgtctgaacgggtaatggactatatagtgtcaacatggagtatgtcacgagggatcgataccgaaaaggtgctccaaatttgcccgaaagacatgagggctgatatctgcgttcatttgaacagaaaagtcttcaaggagcatcccgcattcaggctggcgagcgatgggtgcctgcgcgcacttgccatggagttccagaccgtgcattgtgctccgggagatctcatctatcacgcgggcgagagtgtagactcactgtgcttcgtggtgtccgggtccttggaggtcattcaggatgacgaggtcgtggctatcctcggtaagggggatgtgtttggtgatgtgttctggaaggaggcgacgttggcgcagagctgcgccaatgtgagagcccttacatactgcgacttgcatgtgatcaaaagagatgctctgcagaaggtgctggaattttataccgcattcagccactccttctctcggaatctcatcctaacttacaaccttcgcaaaaggattgtgttcagaaaaatatcagatgtgaaacgcgaggaagaggagcggatgaaacggaaaaacgaggcaccactgatcctgccacctgatcatcccgtgcgtagattgtttcagcggttccggcagcaaaaggaggccaggctcgcggccgagcggggaggtagggacctcgacgacctagatgttgagaaggggaacgtactgacagagcacgcttctgccaatcattcactggtcaaggcctcagtggtgacagtacgcgagagccctgccacaccagtgagctttcaggccgcctccacttccggtgttcctgaccacgctaagctgcaggcacctggcagtgagtgtctgggccctaagggcggcggtggcgactgtgcaaaacgcaaatcatgggcccgattcaaggacgcctgtggcaaaagtgaagactggaacaaagtcagcaaggccgagtccatggagacgttgcctgagcgcacgaaagcctcaggtgaagcaaccctgaagaagacagacagttgcgattcaggcatcacgaaatccgacctaagacttgataacgtcggcgaggcgcggagtccccaggataggtcccccatcttggctgaggttaagcatagcttctatcccattccagagcagacactgcaggccactgtactggaggttaggcatgagctgaaggaggacattaaagctctcaatgctaaaatgacaaacatcgaaaaacagctaagcgaaatcctcagaatcctgacatctcgaaggagcagccagtctcctcaggaactgtttgagatctcccgcccacaatctccagaatccgaacgtgatatttttggggctagctag

SEQ ID NO: 129609 - DNA, 3480 bp, synthetic construct
  misc_feature 1..3480: note = Description of Artificial Sequence: Synthetic coding sequence
  source 1..3480: mol_type = other DNA
atgcccgtgcggcggggccacgtcgcccctcagaacacattcctagataccatcatccgcaaattcgaaggacaatcaagaaagtttatcatagccaatgcgcgcgtggagaattgtgctgtgatctactgtaacgacggattttgcgagctgtgtggctactcccgggcggaagttatgcaacgcccctgcacttgtgacttcctgcacggaccacggacacagcgcagagccgcagctcagatagctcaagccctcttaggagcagaggaaagaaaggtggaaatcgcattttatcgaaaggatggatcgtgtttcctgtgcctggtggatgttgtaccagtcaagaatgaagatggggcagtcatcatgtttattcttaatttcgaagtggtgatggagaaggatatggtaggatcccccgctcacgatacaaatcatagaggaccacccacttcttggttggcaccaggccgggccaaaactttcagacttaagttacctgcgcttctggcactcactgcaagggagtcgagcgtgagaagtggaggggcaggtggggccggtgcccctggcgctgttgtcgtggacgtggacttaactcccgccgccccatcatccgagtcattggccttagatgaggttacggccatggataatcacgtagcaggactggggcctgccgaagagaggcgggctctggtgggcccgggttcacctcccagatctgcacctggacagctcccctccccgcgggcccatagtctcaacccagatgcctctgggagctcttgctcacttgcaagaactcggagtagagaaagctgtgcttccgtcaggcgggcatccagcgcggatgacatagaggcaatgagagccggggttcttcctccccctccacgccacgccagtaccggagccatgcaccctttacgcagcgggctgctgaattcaacatcagactccgacttagtcagatacaggactatctctaagattccccagataactctgaattttgtggacctgaagggagaccccttcctagccagtcctaccagcgatcgggaaattatagcccctaagataaaggaaagaacccataacgtcacagaaaaagttacccaggtactgtccctgggcgccgacgtacttcccgaatacaagctgcaggccccgagaattcaccgctggacaatcctgcactacagtccattcaaagcggtatgggattggctgatcctgctgctagtgatctacaccgccgtttttaccccatatagcgctgccttcctgctgaaggagacggaagaaggtccacccgcaacagagtgcggatacgcttgccaacccttggctgtggtagatctcattgtcgacatcatgttcatagttgacattctgattaattttcgcactacttatgttaatgccaatgaagaggtcgtcagccaccctggacgcatagctgtgcactactttaagggctggttcctgatcgatatggtggctgcaatcccatttgacttgctgatctttggctcggggagcgaagaactgatcgggctgctaaagaccgccagactgcttaggctggtccgcgtggccaggaagctggacagatattcggagtacggagccgccgtcctcttcctacttatgtgcacctttgcattaatcgcacattggctcgcctgcatctggtacgccatcggcaatatggaacagccacatatggactctaggattgggtggctccacaatctcggcgatcagatcgggaagccatataatagcagtgggctcggggggccatctatcaaggacaagtacgtgactgcactctattttactttcagttctttgacatcagtcggctttggaaatgtcagtccgaatacaaactccgagaaaatcttctctatttgtgttatgcttatcgggagtttgatgtacgctagtatctttggtaatgtgtcagcgataattcaacggctgtactcaggcaccgcaagataccacacccagatgctcagagtgcgggaatttattaggttccaccagattcctaatcccctacggcagcgactggaggaatacttccagcatgcatggtcctataccaacggaattgatatgaatgccgttttgaaggggttccctgaatgtcttcaggcagatatctgccttcacttgaacaggagcctacttcagcactgcaagccatttaggggcgctactaagggatgcctcagggccttggctatgaagtttaagaccacccatgctccccccggagatacccttgtccatgctggagacctgcttacagctctttactttatcagtcgggggagcatcgaaattctgcgcggcgacgtagttgtggcgatcctgggtaaaaacgatatatttggggagcccctgaacttgtatgcaaggcccggcaagtctaatggcgatgttagagcccttacctactgtgacctgcataagatccatcgtgacgatctattggaagtcttggacatgtaccccgagtttagcgatcacttctggagcagtctggagattacttttaacttacgtgataccaatatgatccctgggtcacctgggtcaactgagcttgaaggtggctttagcaggcagcggaagcggaaactgtccttccgacggcgaacggataaggatacagagcaaccgggggaggtgagcgccctggggccaggaagagcgggagccggcccaagctcccgagggaggcccggagggccgtggggagaatcaccttcaagcggcccatcctcgcccgagagctccgaggatgaaggcccggggcggtcttcctctccactgcggctagtgccattttcttcaccacgcccccccggcgagccacctggcggtgagcctcttatggaagattgtgaaaaatcaagcgacacttgcaatcccctaagcggggccttcagtggagtgagtaatatctttagtttctggggcgattccagaggtaggcagtaccaggaacttcccaggtgtcccgcccctaccccgtctttgctcaacatccccctttcaagtcccgggagacgaccaaggggggacgtagaatcgcgactggacgctctccagcggcagctcaatcgactggaaacgagactgtctgccgacatggctacagtactgcagcttctgcagcggcagatgaccctcgtgccccctgcatattccgccgtcactacccccggaccagggccaacctcgacatccccccttctgccggtgtcccccttgcccaccttgacacttgatagcctctcccaggtaagtcagttcatggcctgtgaggaattaccacctggcgccccagagctccctcaggaaggacctacgcgcagacttagcttacccgggcagctcggcgcgctgacgtcacagcctttgcatcggcatgggagtgaccctgggagctag

SEQ ID NO: 129610 - DNA, 2460 bp, synthetic construct
  misc_feature 1..2460: note = Description of Artificial Sequence: Synthetic coding sequence
  source 1..2460: mol_type = other DNA
atggccgctcctgctgggaaggcatcgcggaccggggctctgaggccacgagcacaaaaggggagggtccgccgcgctgtgcggattagcagcttggtggcccaagaggtgctctcactaggggccgatgtgcttccggagtacaaactccaggcacccaggatacacagatggacaattctgcactacagtccgttcaaggctgtctgggattggctcattctgttactggttatatacacagccgtgtttactccttattcggcagccttcctgctcaaagagacagaggagggcccacccgcaactgaatgcggctatgcgtgtcagccactcgccgtcgtggacttgatcgttgacatcatgtttatcgtggacatcctgatcaactttcgtactacttacgtgaacgctaatgaagaggtggtctctcaccctgggaggattgcagtgcattacttcaagggatggttcctcatcgatatggtggccgctatccccttcgatctgttaatcttcggaagcgggtctgaggagcttattggcctgctcaagactgctcggctgcttcgcctggtgcgagtggcccgtaaactagatcggtattccgagtacggggccgcagtcttgtttttgctaatgtgtacgttcgccctgatcgcccactggttggcctgcatctggtacgccattgggaacatggaacagcctcacatggactctcgcattgggtggttgcacaatctgggtgatcagatcgggaagccatataactcttctgggctgggcgggccatcgatcaaagacaagtacgtcacggccttgtacttcactttcagttcactgacttcagtggggtttggaaatgtttccccgaataccaactcagaaaaaatttttagtatctgcgtgatgcttattggctccctcatgtacgcctcaatctttggaaacgtgagcgccattattcaacggctgtacagcggtacagcgagataccacacgcagatgctgcgtgtgagggaatttatccgtttccaccagattccaaaccctctgaggcaaagactggaggaatactttcagcacgcatggagctacacgaatggtatcgacatgaacgcagttttgaagggctttccggagtgtctgcaggccgatatctgccttcacctgaataggtctctactccagcactgcaagcctttcaggggggcaacaaagggatgcttgcgggcacttgcaatgaaattcaaaactacacatgccccacccggagatacactggtgcatgccggagacttgctgaccgctttatatttcatctcccgtggctcgattgaaatattgcgcggggacgtggtagtggctatcctggggaagaacgacatctttggcgaacctcttaacctctacgcccgacccgggaagtccaacggggatgtgcgagctctcacatattgtgaccttcacaaaattcatcgggatgacttgttagaagtactggatatgtatccagaattctctgaccatttttggagcagtctcgaaataacatttaacctccgtgatactaatatgattcctggctctcctggctcaaccgagttggagggcggcttctctagacaacgaaagcgcaagttgagctttcggcgcagaactgacaaggatacagagcagccgggagaggtatctgccttaggccccggccgagccggcgccggtccgtcctctcgaggccggcctggaggcccttggggcgaaagcccatcctcagggccatcatcccccgaatcatccgaggacgaagggccaggcagatccagctctcccctccgtctggttcccttcagttcgccaaggcctcccggtgaaccccctggaggggagcctctgatggaggattgtgaaaagtcttcagacacatgcaacccactaagtggggcattctccggggtgagtaatattttctcattttggggcgattcccgcgggcgccagtaccaggaactcccacggtgcccggctcctaccccctctcttttgaacatccctctgtcatcaccagggcggcgtccgcgaggcgacgtggaaagtagactggatgctctgcagcgacagctgaatcggctggagacgaggctatcagccgatatggcaactgtacttcagttgttgcaacggcagatgacattagtccccccagcatactcagcagtaactacaccaggccctgggcccacctccacctccccactgctgcctgttagccccctcccgaccctcactctcgatagcctgagccaggtcagccaattcatggcttgcgaggaattaccccccggagcacctgagctgccccaggagggacctacccgaaggttgtccctgcctggtcaactcggtgctctgacatctcagcctctgcatagacatgggtccgaccccggaagctag

SEQ ID NO: 129611 - DNA, 1182 bp, synthetic construct
  misc_feature 1..1182: note = Description of Artificial Sequence: Synthetic coding sequence
  source 1..1182: mol_type = other DNA
atggcggcccccgcaggaaaagcatcacgtactggagctttgcggccccgggcccagaagggtagggtccgccgcgccgtcaggatcagcagcctggtggctcaagaggtcttatctctcggagcggacgtgctccctgaatacaaactgcaagcccccagaatccatagatggaccatcctccattacagtccttttaaggcagtgtgggactggttaatcctgctgctcgtgatttataccgcagtgttcactccatactccgcagcattcctgctgaaagagaccgaagagggacctccggcaaccgagtgtggttacgcatgccagcccctcgcagtggtcgacctcattgtggatatcatgttcattgtagacattctcatcaattttaggacaacctacgtaaacgcgaatgaagaagtggtgagtcaccctggccgcatagcagtgcactattttaaaggctggtttcttatcgatatggttgccgccattccatttgatctactgatctttggttccggcagcgaggagttgattgggttactgaaaacggctcggctcttgcggctagtgcgggtggcacgaaagctagatcgttacagtgaatatggggctgcggttttgtttctactaatgtgcacatttgccctcattgctcattggctggcctgtatctggtatgctatcggaaatatggaacaaccccatatggactcccgcatcggatggcttcacaacctcggcgaccagattgggaaaccttacaactcaagcgggcttgggggtccatcaatcaaggacaaatatgtgaccgccctctactttacgttctcttcattaacatccgtgggattcggcaacgtatcaccaaatactaactccgagaagatattcagcatatgtgttatgctgattggctctctgatgtatgcctcaatcttcggtaacgtttcagcaatcatccagcgcctttacagcggcactgcgcggtaccatactcagatgctgcgcgtaagagagtttattcgcttccaccagatccctaaccctctgcgccaatgttgcgatcacccaggagcttggccccactttcatattcccgcggtggcacgacagcctcccccgcatcctcatcttggcctcgctttcagcggatttcccgtccatggagtttag

SEQ ID NO: 129612 - DNA, 3192 bp, synthetic construct
  misc_feature 1..3192: note = Description of Artificial Sequence: Synthetic coding sequence
  source 1..3192: mol_type = other DNA
atgagcagtcacagcgccggctcctgcttcctttgcctggtggatgtcgtgcccgtgaagaacgaagacggcgcagtcatcatgtttatactgaacttcgaggttgtaatggagaaagatatggtgggcagtcccgctcacgacacgaatcaccggggtccgccaactagctggctcgcacctgggcgggcaaagacctttcgcttaaagcttcctgctttattggctttgaccgcaagggaaagctctgtccgatcgggcggggctggaggcgccggcgcccctggcgccgtggtcgtggacgtcgacctcactcccgccgcgccaagttctgagtccctcgcactggatgaagttacagctatggacaaccatgttgctgggctcggccccgcagaggagcgcagggcattggtggggcccggttcgcctcccagaagcgccccaggtcagcttccttctcccagagcccactcactgaatcccgacgcttccggttctagttgttcattggcccgcaccagatctagagaatcctgtgccagcgtgcgaagagcctcttctgctgacgatatcgaagcaatgcgcgccggggttctccccccaccacccagacacgcctcaaccggtgctatgcacccattgaggtccgggctcctcaactcaaccagcgacagtgacctggtcaggtaccgtaccatcagtaaaattccccagatcactctcaacttcgtcgatctcaagggtgacccgtttcttgcatcaccaacttcagatcgcgagattatcgcccccaaaattaaggagcgcacgcacaatgtgaccgagaaggtgactcaagtgctaagcctcggagctgacgtgctgcccgagtacaaattgcaggcccctaggatccaccgatggactattctccattacagcccattcaaagccgtctgggattggttaattctgctgctggtgatttataccgcagtttttactccatatagtgcagcttttctgctgaaggaaacagaggaagggcctccagcgacggagtgcggctatgcttgccaaccattggccgtcgtcgacctcattgtggacattatgttcatcgttgatatccttattaatttccgaacaacttacgtgaatgcaaacgaggaagtagttagccaccctgggagaatcgcagtccactactttaaaggctggttcctcattgatatggtcgcagctattccattcgatctactgatctttggctctgggagcgaagaactcattggactgcttaaaactgctaggttactgcgtttagtgcgtgtcgccaggaaactggatcggtacagcgaatacggagctgcggttctgttcctgctgatgtgtacttttgccctgatcgcccactggctggcatgtatctggtatgcgattgggaatatggagcagccacacatggattcacgtattggctggctccacaaccttggcgaccaaattggcaaaccttacaactcctctgggctgggaggaccgtctatcaaagataagtacgtaacggccctgtattttactttttccagtctgacgtctgtggggtttggcaatgttagtccgaataccaactcggaaaaaatcttcagtatctgtgttatgctgattggctccctgatgtatgccagtatctttggaaacgtctccgcaataatccagcggctctatagcggaaccgcaagatatcacacacaaatgttacgggtgcgggagttcataagatttcatcaaatacctaacccgctgaggcagagactagaagaatatttccagcacgcatggtcttatacaaacgggattgacatgaatgccgtattgaaggggttcccggaatgcttgcaggctgacatctgtctgcatctgaacaggagcttgctccagcactgcaagccttttcggggggcaaccaaggggtgtctgcgggctcttgctatgaagtttaagacaacccatgccccacccggggataccctcgttcatgctggtgacctcctgactgcgctttatttcatttctcgcggcagtatcgagattctgaggggcgacgtggtcgtggccatccttgggaagaatgacatcttcggagagccattgaacctctacgcacgtcccgggaaatccaacggtgatgtccgggcactaacttattgtgaccttcacaagatccacagggacgacttgttggaagtcctcgacatgtacccagaattttccgaccacttctggagcagcctggagatcacctttaatctccgcgatacaaacatgattcctgggtctccaggatcaactgagctcgaaggtggcttcagccggcaacgaaagcgtaagctctctttccggagaagaaccgacaaagacaccgaacagccaggggaagtgagtgcactcggccctgggcgggctggggccggaccatctagccgggggaggcccggtggcccatggggtgagtcccccagcagtggcccttcctcaccggaatcgagtgaggatgagggccccggacgctcatcaagccccctcaggctggtacccttctcatctcctcgtccacctggtgagccccccggtggcgaacccctgatggaggactgtgaaaaatcttctgacacctgcaatcccctaagcggggctttttcaggggtgtcaaacatcttttctttttggggagattcgcgagggaggcagtatcaggagctgcctcggtgtccagccccaaccccgtccttgcttaacatcccccttagttcaccgggccggcggccaagaggcgatgtagagtctaggctcgatgccctccagcgtcagttgaataggttggagacacgcctttccgccgatatggctactgttctgcagcttctacagcgccaaatgacgctcgtgcccccggcctattccgccgtgacaactccaggtcccggccctacctcgacaagtcccttgctgcccgtcagccccctacctaccctgacgttggattctctgagccaagtgtcccagtttatggcatgcgaggagcttccccccggggcaccagagctgccgcaggagggaccgaccaggaggctcagcctgcccggacagctcggagcactgacatcgcagcctcttcatcgccacggtagtgatcccggctcatag

SEQ ID NO: 129613 - DNA, 2667 bp, synthetic construct
  misc_feature 1..2667: note = Description of Artificial Sequence: Synthetic coding sequence
  source 1..2667: mol_type = other DNA
atgccagtccgccgcggacatgtggcgcctcagaataccttcctggacaccatcatccggaaattcgaaggccagtcgagaaagttcatcatcgcaaatgcgcgggtagaaaactgcgcggttatttactgcaatgacggtttttgcgagttatgcggatactctagagccgaggtgatgcaaagaccttgtacttgtgatttcctccacggacctaggacgcagcgccgcgccgccgcccaaatcgcacaggcacttctcggagctgaagagcggaaagtagaaattgcattctatagaaaggacgggtcgtgttttctgtgcttagtggatgtggtgcccgttaagaatgaagatggtgcagtcatcatgtttatactgaattttgaggtcgtcatggaaaaagacatggttgggtctccggcgcacgataccaaccacaggggacctcctacatcttggctcgcccccgggcgcgccaagacttttcggctcaagcttcctgctttgctagctcttactgcgcgagagagctctgttcggagtgggggggccggcggagcaggagcacccggcgccgtcgtggtggacgtggatttgacgccggccgccccgagctccgaatcgctggctctcgatgaggttaccgccatggacaaccacgtggccggtctcgggcctgcagaggagcggagagctcttgtgggcccaggcagtcctcctcggagtgcgcctgggcagctgccatctcccagagcccactccctgaacccggacgcttctggatcatcatgcagcctggcccgcactcgctcgcgggagagctgtgccagtgtgcgaagggcttcttcggccgatgatattgaggccatgcgtgctggcgtcttaccgcccccccctcggcacgccagcaccggcgctatgcaccctttaagaagtggcctcctgaactctacctcggactccgacctggtgcggtacagaactatcagcaaaattcctcaaataacccttaacttcgtagatctgaagggggatccctttctagcctctccaacaagtgaccgggagattatcgccccaaagattaaggaacggacccacaacgtgaccgagaaggtgacacaagtactgtcactgggagctgacgttctacccgagtacaaactgcaggccccgcggatacaccgatggacaattctgcactattcacccttcaaggctgtttgggactggctaatactcctactggtgatctatactgctgtgttcactccttatagtgcagctttcctgcttaaggaaacagaggagggaccccctgcaaccgagtgcggatacgcgtgtcagccccttgcagtcgttgacctcattgtggatatcatgttcatagtggacattttaatcaacttcagaaccacctatgtgaacgcgaacgaggaggttgtgtctcacccaggacgcattgctgtgcattattttaaagggtggttcctgatcgacatggtcgcagccattcccttcgatctgttgatttttggatctggcagtgaagagctgatcgggttgctgaagacagcacgcctcctgcgtctggtacgtgtggcgcgtaaactggaccgctactccgagtatggagcagcggtgttattcttgttaatgtgcacctttgcactgatcgctcattggctcgcttgcatctggtacgccatcgggaacatggaacaaccccacatggacagtagaataggctggttacacaacttgggggatcaaatcggaaagccgtataatagcagtggtctcggtggcccttccattaaggacaaatacgtcactgctttgtattttaccttctcctccctgacctccgtgggtttcggtaatgtttctcctaataccaactccgaaaaaatcttttctatatgtgtgatgttaattggaagcctgatgtacgcgtccatatttggaaacgtgagtgcaattatacagagactctattccggcacagcaaggtaccacacacagatgttgagagtacgggagttcatccggtttcaccagattcccaacccactgcggcagcggctggaggaatatttccagcatgcctggagctacacgaacggtatcgatatgaatgcagttttgaaaggttttccggaatgtttgcaagcggatatttgtctacacctcaaccgatcactgcttcagcattgcaagccgtttcgcggtgctaccaaggggtgtttacgagccttggcgatgaagttcaagacaacacacgccccaccaggggacactctggttcacgctggggacttgttaacagcactgtatttcatatcccggggaagcatcgagattctgagaggcgacgttgtagtggcaattctcggcatgggctggggcgctggcacagggttagagatgccttcagcagctagcaggggtgcctcactgttgaacatgcagtcattaggcctctggacctgggactgcctgcaaggtcactgggccccattgatccatctcaattccggcccacctagcggcgccatggaaagaagtcctacttggggcgaggctgctgaactctggggaagccacatcctcctcccgttccgcataaggcataagcagaccttgttcgcgtctctgaagtag

SEQ ID NO: 129614 - DNA, 3252 bp, synthetic construct
  misc_feature 1..3252: note = Description of Artificial Sequence: Synthetic coding sequence
  source 1..3252: mol_type = other DNA
atgcccgctatgcgcggactgctggcaccacagaacacattcctcgatacaatcgccactcggttcgatggaacccacagcaatttcgtgctgggaaatgcacaagtggctggcctattcccagtcgtctactgttccgatggattttgtgatcttacaggcttctccagggcggaggtgatgcaacgggggtgcgcgtgctcttttctttatggccctgacacttccgaactggtgagacagcagatacgcaaagccctcgacgaacataaggagtttaaggcagaattgatcctctatcgaaaatccggcctgcctttttggtgtctcctcgacgtcatccctattaaaaatgaaaaaggggaagtggcattgtttctggtgtcgcataaggacatctctgagacgaaaaatcggggcggaccggatcgctggaaggagacaggcggtgggcgaaggagatacggacgagctcgctctaaggggtttaacgcaaaccggaggcggtcaagagcggtactataccatctgtccggacatctgcagaaacaacccaaaggcaagcacaaattaaacaagggggtgttcggcgaaaagcccaatttaccagagtacaaggtggcagccattagaaagtcacctttcatcttgctccactgcggtgctttgcgggccacatgggacggatttatactattggcaaccttatacgtggccgtcaccgtaccatactcagtgtgtgtgagtaccgctagagagccatcggccgcccgaggacctcctagcgtttgtgacctggccgtagaggtcttatttatactggacattgtgctaaatttccgcacaacattcgtgagcaagtccggccaagtcgtgttcgcgccgaaatcaatctgtctacactacgtgactacgtggttccttttagatgtaatcgcagcgttgccatttgacctgctgcacgcattcaaagtgaacgtgtactttggggcgcacctcttgaagacagtgagactgctgcggctgctgaggctgctgccacgtctggaccgttactcccaatactcagctgttgtgctaaccctgttgatggcagtgtttgctctgctcgcccattgggtggcctgcgtgtggttttacatcggccagagggaaatcgaatcttccgagagcgagctcccagagattggctggctgcaggagcttgctcgacgcttggaaaccccctactatctggtggggcgcagaccagccggcgggaatagctcggggcagagcgataattgctcctcatcctcggaggccaacggtaccggactggaactgctcggtggaccctcgctgcggagcgcatatattaccagtttgtactttgctcttagctctctgaccagtgtcggcttcggcaatgtttcagctaatacagacacagaaaaaatctttagcatctgtactatgcttataggcgctctgatgcatgccgtagtgtttgggaatgtgacagctatcattcagcgcatgtacgctcgtagattcctctatcactccagaacccgggacttacgggattacattaggattcaccgcattccaaaaccgctcaaacaacgtatgcttgagtactttcaggccacctgggccgtaaacaatggcatcgataccaccgaactcctccaatcccttccagatgaattgcgcgccgacattgccatgcatctgcataaagaggtgctacagctcccgctgtttgaggccgcaagcagggggtgtctccgcgccttgtcactggctctgagacccgccttttgcacccctggtgaatatttgatccaccagggtgatgctctgcaggctctttatttcgtgtgttctggctcaatggaagtcttgaagggggggactgttcttgctatattaggcaaaggcgatttgataggctgcgagctgcctcgccgggagcaggtcgtcaaggccaacgcagacgtcaagggactcacttattgtgtgctacagtgcctccagctggctggtttgcacgactcactggccctgtaccccgagttcgcccctcgtttttcgcgcggactccggggggagctgtcttacaatctgggcgctggcggtggctcagccgaggtggatacctctagtctgtctggggataatacactgatgtctacgttggaggagaaagagactgatggcgaacaagggcccacggtaagccccgctccggcagacgagccctctagcccgcttctctcccctgggtgtaccagctccagttcagccgcaaaactgctcagcccccggagaacagcgcccagacccagattaggaggaagaggaagacccgggcgtgcgggagccctgaaagctgaagcagggccgtctgccccacccagagcgctggaagggctcagactccccccaatgccttggaacgtgccaccagatttgagcccacgagtggtggacggaatcgaagatggatgtggatctgaccaacccaaattcagttttagagtgggccagagcggacccgaatgctccagctccccctcccctggacctgagtctggcctacttaccgtaccgcacggcccatcagaggccagaaacaccgatacattggacaaactgcgacaggctgttacggaattatccgagcaagtgctccagatgcgggagggattacaatcactccggcaggcggttcagcttgtcctcgctcctcacagagagggcccctgtccccgtgcatccggggaaggaccctgcccagctagcactagtggcctcttgcagcccctgtgtgtcgatactggagctagcagctactgtctgcaacctcctgccggctcagttctgtcaggcacatggccccatccaagacccgggccaccgccactcatggccccctggccatggggaccccccgcttcccagtcctcaccgtggccacgggctaccgccttttggacgagcacatcagacagtgaaccccctgccagtggcgatctatgctctgagccttccaccccggcatctcctcctcccagtgaggaaggggcgcgcacaggtccagccgaacctgtatctcaggccgaggctacatccactggtgagcctccgccaggcagcgggggcctggcactgccctgggatccccattccctcgaaatggtgcttataggctgtcatggctccggaactgtgcagtggactcaggaggagggtaccggtgtctag

SEQ ID NO: 129615 - DNA, 2967 bp, synthetic construct
  misc_feature 1..2967: note = Description of Artificial Sequence: Synthetic coding sequence
  source 1..2967: mol_type = other DNA
atgccaggcgggaagcggggtctggtcgcgccccagaacaccttcttggagaacattgtcagacgtagctctgagtcatcttttttacttgggaatgcccaaattgtggattggccagtggtgtacagcaatgatggattctgtaaattgtcagggtaccatagagcagacgttatgcagaaaagcagcacttgttccttcatgtacggcgagcttactgataagaaaaccatcgagaaagtcaggcagacatttgataattacgagtctaactgtttcgaggtcctcctctacaaaaagaaccgcacaccagtttggttttatatgcagatcgcacctattcgtaacgaacacgaaaaggtggtcctattcctttgtaccttcaaggatatcacactgtttaaacaaccgatcgaggacgatagcactaagggatggactaaattcgcgcggctaacgagagctctcacaaattccagaagtgttctgcagcagctcacccctatgaacaaaacggaagttgttcataagcactcccgactggctgaagtcctgcaacttggctccgatattctgccgcaatacaaacaggaggcccctaaaacacccccccacattattctgcattattgtgcgttcaagactacgtgggattgggtcatcctgatccttactttttataccgctatcatggtgccctataacgtgtcatttaagaccaagcagaacaatattgcttggttggtcctggatagcgtggtggacgtcattttcctagttgacattgtcctgaatttccacacaaccttcgtcggaccaggtggcgaggttatcagcgatcccaaactgatccgaatgaattatctcaagacgtggttcgtcatcgacctcctgtcatgtctgccgtacgatatcattaacgcttttgaaaacgtcgacgaaggcatttctagtctattctccagcctgaaagtggtaaggctgttgcggttagggcgtgtggctcgcaaactggaccactatctggaatatggggctgcagttctagtcctgttggtgtgtgtcttcggactggtggctcattggctcgcgtgcatttggtactcaattggggactacgaggtgatcgatgaagttacgaacaccatccagatcgatagttggctgtatcagctagcactttccattggaactccgtacagatacaacacaagtgcgggcatctgggaaggggggccttctaaggatagcttgtatgtaagctcactatattttacgatgacctcactcactaccataggtttcggcaacattgccccgacaacagatgtggagaaaatgttcagtgtggcaatgatgatggtcggatctctcctgtacgccaccattttcggcaacgtaaccacaatttttcaacagatgtatgctaacacgaataggtaccacgagatgttgaataacgtgcgcgacttcctgaagctatatcaggtaccgaaggggctgagtgaacgagtgatggattacattgtcagtacctggagtatgagcaagggcatcgacacagagaaagtcttgagtatctgccctaaagacatgagagctgacatctgtgtacacctgaacagaaaggtatttaatgagcatccagctttccgtcttgctagcgatggatgcctgagggcactggccgtggagttccagacaatccactgcgcacctggagacctgatttatcatgctggcgaaagcgtagacgctctgtgcttcgtggtgtcaggctcactggaagtgatccaggatgatgaagttgtggcaatccttggaaaaggtgatgtctttggcgatatcttttggaaggaaacaacactggcccacgcttgcgctaatgtccgtgccctgacatactgtgacctccatattatcaaaagggaggccctcctcaaggtgctggacttctatacagccttcgccaactcattctctcgcaatttgaccttgacttgtaacctgcgcaagcggataatctttagaaagatcagtgatgtgaagaaggaggaagaagagcggctgagacagaagaatgaggtgactctttctatccccgtggaccaccctgtcaggaagctcttccagaagtttaagcagcagaaggagttgaggaaccaaggatcaacccagggagaccccgagaggaaccaactccaagtagaatctagaagtctccagaacggtgccagcattaccggtacaagtgtcgtgaccgttagtcagattacccccattcagaccagtctggcttatgtgaagacatcagagtcgttgaagcaaaacaaccgagatgcaatggagctgaagcccaatgggggtgccgaccagaaatgcctgaaagtgaactcccctatccggatgaaaaacggcaacgggaaaggatggctaaggcttaaaaacaacatgggggctcacgaagagaagaaagaagattggaacaacgtgacaaaggccgaaagcatgggattgcttagcgaggaccccaagtcaagcgattccgaaaattctgtcactaaaaacccacttcggaagacagacagctgtgacagcggcattacaaagtctgacttacggttagataaagcaggcgaggctcgttctcccctggaacactctcccatccaggcggatgccaaacaccctttttatccaattcctgaacaggcactccagacaacacttcaggaagttaagcacgaactcaaggaagatattcagctcctgtcctgcagaatgaccgctctggagaagcaggtcgccgagatactaaaaatcctgtctgaaaaaagtgtaccccaggcctcaagccccaagtcgcagatgccattacaggtgccacctcagataccatgccaggacatttttagtgttagccgtccggagtccccagaatctgacaaagacgaaatccacttttag

SEQ ID NO: 129616 - DNA, 1269 bp, synthetic construct
  misc_feature 1..1269: note = Description of Artificial Sequence: Synthetic coding sequence
  source 1..1269: mol_type = other DNA
atgcagaagagcagcacatgcagtttcatgtacggagaacttacagacaaaaaaacaattgaaaaagtgcggcaaacttttgataactacgaatccaattgctttgaagtcctcctgtataagaagaaccggacgcctgtgtggttctacatgcagatcgcgcccattcgaaacgagcacgaaaaagtagtcctcttcctgtgcactttcaaagacatcaccctgttcaagcagcccatcgaggacgacagcacaaaggggtggaccaaattcgcaaggttgaccagagcacttaccaactcccgctccgtcctacagcagctgacgccaatgaataagacggaagttgtgcataaacatagccgactagctgaagtcctgcaattgggatccgacattctgcctcaatataagcaggaggctccaaagactcctcctcacatcatcctccactactgcgcctttaagacaacatgggactgggtcatcctgattctaacgttctacacagctatcatggtcccatacaatgtctcattcaaaactaagcaaaataacattgcgtggctagtgctcgatagcgtagtcgacgtgatctttctggttgacatagtgctgaactttcatacgactttcgtgggccctgggggcgaggttattagtgatcccaaactgatcagaatgaactacctgaaaacctggtttgtcattgacctgctgtcctgcttgccgtatgatatcatcaatgccttcgaaaacgtcgacgaaggaatatcgtctctgtttagctcactgaaagtggttcgactcttacgccttggaagggttgcgcggaagctcgaccattatctcgagtacggggctgccgtgctcgtgctgcttgtgtgtgtcttcgggctggtggcacattggttggcgtgcatctggtactccatcggagactacgaagtgatcgacgaggtcacaaacaccatccaaattgattcatggctatatcaactggccctgagcattggaactccctataggtataatacctcagctgggatctgggaggggggacctagtaaagattcactgtatgtgagttcactgtactttactatgactagtcttaccaccattggcttcggcaacatcgccccaacaaccgatgttgaaaaaatgttctccgtggcaatgatgatggtaggctgcaagtactttaactttttcattgagaactactgctactggcaattcagctggctgcagtcgcagattgggtag

SEQ ID NO: 129617 - DNA, 2199 bp, synthetic construct
  misc_feature 1..2199: note = Description of Artificial Sequence: Synthetic coding sequence
  source 1..2199: mol_type = other DNA
atgcctgtaaggcgaggacacgtggctccgcagaatacgtttctgggcaccattatccggaaattcgaaggacagaataaaaagttcatcatcgcaaacgctcgggtgcaaaactgtgctattatatactgtaacgacggattctgcgagatgacgggcttttccagacctgatgtgatgcagaagccgtgcacctgtgactttctccacggacctgaaaccaagcgacatgacattgcccagattgcacaagccctgctgggctccgaagagcgcaaggtggaggtgacgtactaccacaaaaatggttcaacatttatttgtaatactcatataatccccgtgaaaaaccaggaaggagtggcgatgatgttcattattaactttgagtacgtaaccgacaacgagaatgctgccacacccgagcgcgtgaaccctattctcccgataaaaaccgtaaaccgaaagttctttggatttaagtttccgggattacgggtcctgacctatcgaaaacagagcttgcctcaggaggacccagacgtggtggtgattgatagcagcaaacattccgatgacagcgtggcaatgaagcattttaagtcacctacgaaggagtcgtgttccccctctgaggcagacgacaccaaggcactgattcagcccagtaaatgctccccactggttaatatttctgggcctctagaccattccagccccaagaggcagtgggatagattgtatcccgatatgcttcagtcttcgagccaacttagccattctcggagtagggaaagcttgtgcagtatccgccgggccagttcagttcatgatatcgaggggttcggggtccatcctaaaaatatctttcgggaccgtcacgctagcgaggggccgttcaaccacatcaagagcagccttttgggttcaacttctgacagtaatctaaataaatactcaaccatcaacaaaatcccacaactgacactcaatttttcagaggtgaagacagagaagaaaaactcttccccccccagctctgacaagaccatcattgctccaaaggtgaaagataggacgcacaacgtcaccgaaaaagtgactcaagtcctaagtcttggggcagacgtcctgcctgaatacaagcttcagacaccaagaataaacaagttcactatcctccattactctccatttaaagctgtttgggactggcttattctcttgctggtcatctacacagccatctttacgccctactccgccgcgtttcttctcaacgacagggaggagcagaagcggagagaatgtggttatagctgtagtcctctcaatgtcgtagacttgattgtcgatataatgtttattatcgatatattaattaacttcagaacgacatatgtaaatcaaaatgaggaggttgtgtctgaccccgctaaaatcgcgattcactacttcaaaggttggtttttgatcgacatggttgccgctatccccttcgacctcctgatattcggcagtggatccgatgaaacaaccacactcatcggcttgctgaagaccgccagactgttgaggctggtacgcgtggctcgtaaattggacaggtactctgaatacggggctgccgtgctgatgctgctgatgtgtatatttgctctgatcgctcactggctggcctgtatctggtacgcaatcggaaacgtagaaagaccatatctaaccgataaaatcggctggttggattcacttggccaacagattggaaagcgttacaatgacagcgattcctctagtggaccatcaatcaaggacaagtatgttactgcactgtatttcacctttagttcactaacgtccgtgggattcgggaacgtgtccccaaatactaactcagaaaaaatcttttctatctgtgtcatgctaattggctcactaatgtacgcaagtatctttggcaatgtgagcgccataatccagaggctttatagtggaacagcccgttaccacatgcagatgctacgagtcaaggaattcatccggtttcaccaaatccccaaccccttgagacagcgcctggaggaatacttccaacacgcctggacctacaccaatgggatcgatatgaatatggtttgtatgtctgtattccaaaacgaaagcgcagctggcataattgtgattgcaaagatggaatag

SEQ ID NO: 129618 - DNA, 3591 bp, synthetic construct
  misc_feature 1..3591: note = Description of Artificial Sequence: Synthetic coding sequence
  source 1..3591: mol_type = other DNA
atgcccgtcaggagagggcacgtcgccccgcaaaatacattcttgggcaccatcatacgcaaattcgaagggcagaacaaaaagttcatcattgccaacgcacgggtccagaactgcgcaattatatactgcaatgatgggttctgcgagatgacaggcttcagtaggccagatgtgatgcagaaaccctgcacatgcgattttctgcacggccccgagacaaagaggcatgacattgcacagatcgctcaggcgctactcgggagcgaggagaggaaggtggaagtgacgtattatcacaagaacggctcaacattcatttgtaacacacacattattcccgttaagaatcaggagggggtcgctatgatgttcataattaattttgaatatgtgaccgacaatgagaacgctgcaacccccgagcgcgtgaatccaatcttgcctatcaaaaccgtgaacagaaagttttttggattcaagtttccaggtctcagggtgctgacctatagaaagcagtctctaccccaggaagatcccgatgtggtggtgattgattcatccaaacattctgacgactccgtggcaatgaagcacttcaaatctcccacaaaggagagttgctcaccatcagaggccgatgataccaaggccttaatccagccatcaaaatgctcacctcttgtaaatatctctggcccactcgatcattcgtcccccaagagacagtgggatcggctttacccagacatgctgcagagttcaagccagctttcacactctcggtctagagagtctctctgcagtatacggcgtgccagcagtgtacatgacatagagggatttggcgtccacccaaaaaatatcttccgggaccggcatgcgtctgaggacaacggcagaaacgtaaaagggccgtttaaccatatcaagtcctcactgctggggagtacctcagatagcaacctcaataaatacagtacgattaacaagattccacagctgaccctgaatttttccgaagtaaagaccgaaaagaaaaacagctcaccccctagcagtgacaagacaattatagcccccaaggtgaaggaccggacacacaacgtcacggagaaagttacacaggtcctctcccttggagctgacgtgctccccgagtacaaactgcagactccacgtattaacaagttcacgatcttgcactattcgccattcaaagcagtgtgggactggctgatcctcctgctggttatctacacggcaatttttacaccgtacagcgctgcatttctgctaaacgacagagaggaacagaagaggcgggagtgtggctattcgtgcagccccttgaatgtggtcgacctcattgtggacatcatgttcattatcgacattcttattaatttcaggaccacttacgtgaatcagaacgaagaagtggtgagtgaccctgcaaaaattgccatccactacttcaagggatggtttctgattgacatggtggccgccattccctttgaccttctgatctttgggagcggctctgacgagacgactacactcatcggcctcctgaagacagcaaggcttctccgcctggtacgcgtcgcacgtaagcttgacaggtactccgagtatggagccgcggtgttgatgttgctcatgtgcatttttgcattgattgcccactggctggcgtgtatttggtatgctataggcaacgtggagcggccatacctcacagataaaatcggttggctggacagcttaggtcaacaaatcgggaaacggtacaacgacagtgatagctcttcaggacccagcatcaaggataagtacgtcacggcgctttacttcaccttcagttctctgacatccgtcggctttggtaacgtatcgcctaataccaactccgaaaagatcttctctatctgtgtgatgcttatcgggagtttaatgtacgcctcgatatttggtaatgtgtcagccatcatccagcggctctactccgggaccgcccggtaccacatgcagatgctacgagtaaaggagttcatcagattccatcaaattccaaatcctctaaggcagcggttggaggaatatttccagcatgcatggacctatacaaatggcattgacatgaatatggtcctcaagggattcccggaatgtctgcaggcagatatctgtcttcatcttaatcagacactgctgcaaaactgcaaagcttttcggggggcatcgaaaggttgtcttcgagccctagccatgaaatttaaaacaactcacgccccaccaggagatacactggtacattgtggcgacgttctgactgcgttatacttcctgtccagagggtctatagagatccttaaagatgatatcgtggttgcaattctgggaaagaatgacatttttggtgagatggtgcacttgtacgctaaacctgggaaaagtaatgccgacgtgcgagctctgacctactgcgacttgcacaagatacaacgcgaggatctcttggaggtgttggatatgtacccagagtttagtgatcatttcctaactaacctggagttaactttcaacctaaggcacgagtccgccaaagcagatctgttgcggagccagtccatgaacgactctgaaggcgacaattgcaagctccgaaggaggaaactgagcttcgagagcgaaggagaaaaggaaaattccacgaatgacccagaggactctgccgacacgatcagacattaccagtcaagcaagcgccatttcgaggaaaaaaaaagtcggagctccagcttcattagttcaattgacgacgaacagaagccactattcagtggcattgtggacagctctccaggcattggaaaggccagtggcttggatttcgaagagacagtgcctacctctgggagaatgcacattgacaagagatctcactcttgtaaggacatcacagacatgcgcagctgggagagggaaaatgcgcatccacagccagaagacagttccccatcagcccttcagagagcagcctggggaatcagtgagacggaatccgatctgacttatggagaggttgaacagcggctggatctgttgcaggagcagctgaataggttggaaagccagatgactactgacatccagacaatactccaactgctacagaaacagaccaccgtcgtcccacccgcctacagtatggtgaccgccggatctgagtaccagagaccgattattcagctgatgaggacatcccagcccgaagcttcaatcaaaaccgaccgcagctttagcccttctagccagtgccccgaatttctggacctggaaaagtcaaaactgaagtcaaaagaaagcctgtcctctggcgtacacctcaacacagccagcgaggataatctgaccagcctcctaaagcaggatagtgacttgagcctagagctgcacctgaggcaacgcaagacgtacgttcaccctatcagacacccatctttgccagactcatcactgtccaccgtgggcatcgtcggacttcacagacatgtatccgacccaggattgccaggaaagtag

SEQ ID NO: 129619 - DNA, 1755 bp, synthetic construct
  misc_feature 1..1755: note = Description of Artificial Sequence: Synthetic coding sequence
  source 1..1755: mol_type = other DNA
atggtcgccgaggtgtgttcaatgcccactgccagtactgttaaaaaacccttcgacctgaggtcaaaaatgggaaaatggtgccatcatcggttcccatgttgcaggggcagcgggaaatctaatatgggtacatctggtgaccatgatgacagctttatgaagatgctaagaagcaaaatgggaaagtgttgtagacactgcttcccatgctgccggggaagcggcacatccaacgtaggaaccagcggagaccatgaaaactccttcatgaagatgctacgtagcaaaatgggcaagtggtgctgtcattgctttccctgctgccgcggttcaggaaagagtaacgtgggcgcctggggggactacgatcatagtgcttttatggaaccgcgatatcacataagacgcgaggacttggataagctgcacagggccgcttggtggggcaaggtcccacggaaagacctaatcgttatgctgcgcgataccgatatgaataaaagagacaaagagaagcggactgctctccaccttgcatccgctaacggaaactcggaagtagtccaactgctgctggaccgaaggtgccagcttaacgttttagataataaaaagcggactgcactaattaaggccatccaatgtcaggaggatgaatgcgttctgatgctattagagcacggagcagacagaaacattcctgacgaatatggcaacactgccttacactatgctatttataatgaggataaactgatggctaaggctctgttactctatggcgctgatattgagagcaaaaataaatgcgggttgacgccactattactgggagtccatgaacagaaacagcaagtggtgaagtttctgattaagaagaaagctaatctcaatgtgctcgataggtacggaagaactgcattgatcctggctgtgtgttgtggaagtgcaagcatcgtcaatctgctgcttgagcagaacgtggacgtctcctctcaggacctttctgggcagacggctagggaatacgccgtatcctcccaccatcacgtaatctgtgagttactgagcgactacaaggaaaagcagatgctcaagatttcatcagaaaattccaatcctgaacaggacttgaagctgacttccgaggaagaatcgcagcggcttaaggtcagtgagaactcccagcctgagaagatgtcccaggaacctgagattaataaggactgtgatcgggaggtagaggaggaaatcaagaaacacggatcaaatcccgttgggttgcctgaaaacctcacaaatggggccagcgccggtaatggagacgacggcctcattccccagcggcgctcccgtaagcctgagaaccagcaatttcctgacacggagaacgaagaataccactctgatgagcagaatgacactcggaagcagctgagcgaggagcagaatactggtatctcgcaagacgagatcttgacaaacaagcagaaacagatcgaagtcgcagagcagaagatgaattccgaactttccctgtcccataaaaaggaagaggaccttctgcgggagaattccgtgttgcaagaggaaatcgccatgttgagattggaattggacgagaccaaacaccagaaccaactgcgcgagaacaaaattttggaggaaattgagtccgtcaaagaaaagaccgacaaattgttgagagctatgcagctcaacgaagaggcattaactaagacaaacatctag

SEQ ID NO: 129620 - DNA, 1638 bp, synthetic construct
  misc_feature 1..1638: note = Description of Artificial Sequence: Synthetic coding sequence
  source 1..1638: mol_type = other DNA
atggtcgcggaggccggaagtatgccagccgccagttccgttaagaaacctttcggactgaggtctaagatgggtaagtggtgtagacattgctttgcttggtgcagaggctctggcaagtctaacgtcggaacatccggtgatcatgacgacagcgccatgaagacactgagaagcaagatgggcaagtggtgctgccattgcttcccttggtgcaggggtagcggtaagtcaaacgttggcaccagcggcgaccatgatgactctgccatgaaaaccctgaggtcgaaaatggggaagtggtgttgccattgttttccatgttgccgggggtcggggaagagcaacgtgggaacgtctggcgaccatgatgacagtgccatgaaaaccctgaggtctaaaatgggaaagtggtgctgccactgcttcccttgctgccgtggcagtgggaaaaacaaggtgggcccttggggcgattatgacgactctgccttcatggaacctcgttaccacgtgaggagagaggacctggataagttgcaccgagctgcatggtggggcaaagtgcctaggaaggatttgattgttatgctaaaagacaccgacatgaataagaaggataagcagaagcgtacggccctgcacttagcgtcagcaaatggtaatagcgaggttgttaagttgctgctcgataggaggtgtcagttgaacatcctggacaataagaagcggactgctcttacaaaagccgtacagtgccaggaggacgagtgtgccctaatgctcctggagcacggcaccgaccccaacattcccgacgaatatgggaacactgcgctgcattatgctatctataatgaggataagctgatggctaaagctctgctcctatacggtgccgacatagaaagtaagaataaacacggattaacacccttactactgggcgtacatgagcaaaagcagcaagtcgttaaatttttgattaagaaaaaagctaatctgaatgctttggacaggtatggacggacagccctcatcctggccgtctgctgtggcagcgcctccatcgtatcacttcttctggaacagaacatcgatgtgtcctcacaggacttgagcggacagacagcacgggaatatgcagttagcagtcgtcacaacgtgatctgccagctactgagcgattataaggagaagcaaatcctgaaggtttctagcgagaactccaacccagaacaagacctcaagctgacgtccgaggaagaatcccaacgactgaagggctcggaaaacagtcagcctgaggagatgtcgcaggagcccgagattaacaaagggggagaccgcaaggtggaggaagaaatgaagaagcatggttcgacccatatgggcttccccgagaacctcacgaatggcgccactgccgataatggcgacgacggcctcatccctcctagaaagtcccgcaccccagaatcacagcagttccccgatactgagaacgagcaatatcacagcgacgaacaaaatgacacacagaaacaacttagtgaagaacaaaatacggggatcctgcaggatgaaatccttatccacgaagagaaacagatagaagtggctgagaacgagttctag

SEQ ID NO: 129621 - DNA, 867 bp, synthetic construct
  misc_feature 1..867: note = Description of Artificial Sequence: Synthetic coding sequence
  source 1..867: mol_type = other DNA
atggtcgcagaggccggatccatgcctgccgcatccagcgtcaaaaaaccttttggactgcgttccaagatgggcaaatggtgtaggcactgctttgcctggtgcaggggctctggtaaatctaacgtcggaacttccggagatcacgacgatagcgcaatgaagacactccgttcaaagatgggtaaatggtgctgtcactgctttccatggtgccgcggttccggcaagtccaatgtgggcacgtctggcgaccacgatgactccgccatgaaaaccctcagaagtaaaatggggaaatggtgctgccactgtttcccttgctgtagagggagtggaaaaagcaacgtgggaaccagcggtgaccatgatgacagtgcaatgaagacacttcggtccaagatgggtaaatggtgctgccactgttttccttgctgtagaggtagcgggaagaataaggttggaccttggggcgactatgacgattccgccttcatggagccacggtatcacgtgaggcgggaggacctggataaacttcaccgggccgcctggtggggaaaggttccccgcaaggatcttattgtgatgttgaaagatacggatatgaataaaaaagacaaacagaagagaaccgctctgcacctcgccagcgcaaacgggaactccgaggtggtgaagctcctgctggatagacgctgccagctgaatatacttgacaataaaaaaagaaccgctctcactaaagccgtccagtgccaggaagacgaatgtgctcttatgctgttggaacacggcaccgatccaaacattcctgatgagtatggaaacacagccctgcactatgctatttataatgaggattag

SEQ ID NO: 129622 - DNA, 1527 bp, synthetic construct
  misc_feature 1..1527: note = Description of Artificial Sequence: Synthetic coding sequence
  source 1..1527: mol_type = other DNA
atggtggctgaggcgggatctatgccagctgcgtcttctgtcaagaaacccttcgggctgagatctaaaatgggcaaatggtgccggcactgctttgcttggtgtcgcggctctgggaagtctaacgtagggacgagcggcgaccacgacgactccgcaatgaagaccctgcgctctaagatggggaagtggtgttgtcactgcttcccgtggtgtcgcgggtctggcaagagcaacgtcggcacaagcggtgaccacgacgactctgcaatgaagacattaaggagcaagatgggcaagtggtgttgtcactgcttcccgtgttgtcgcgggtctggaaagaataaggtgggcccatggggcgattacgacgacagcgcattcatggagcccagataccatgttagaagggaggatttagacaaactgcatcgggctgcatggtgggggaaggtgccgcggaaggacctgattgtgatgctcaaggacaccgatatgaataagaaggataaacaaaaaaggacagccctccaccttgcgtcagccaacggcaacagtgaggtcgtgaaactactgctggacaggcgctgccagttaaatatcctggacaataagaagcggacagctctcacgaaggctgtgcaatgccaagaagacgagtgtgctcttatgctgctagaacatgggactgatccgaatatcccagacgaatatggtaataccgctctgcactatgcaatttataacgaggacaaactcatggccaaagccttgctcctttacggcgcagacatcgaaagtaagaataaacacggcctcacaccactgctgctgggtgtccatgagcagaaacaacaggtcgtgaaattcctgatcaagaaaaaagcgaatctgaatgctctcgaccgttatggccgcacagctcttattctcgctgtatgctgtggctcagcaagcatcgtaagtttgctccttgagcagaatatcgatgtgagttctcaggatctgtcggggcagacagcaagagagtatgcagtctccagtaggcataatgtgatttgtcagttactgagcgattacaaagaaaagcagatcttgaaggtctcttctgaaaatagcaaccctgaacaggatctcaagctgacctcagaagaggagtctcagcgtctgaaagggtccgaaaactcacaacctgaagaaatgtcccaggagcctgagataaacaagggcggagaccgcaaggttgaggaggaaatgaaaaagcacggctctactcatatgggctttcctgagaaccttactaatggagcaaccgctgacaatggcgacgatggtttaattccgcccagaaaatcccggacaccagaaagccagcagtttcccgataccgagaatgaacagtatcactcagacgagcagaacgacactcagaagcagctgtccgaagaacaaaatacagggattctgcaggacgagattcttattcacgaagagaaacagatcgaagtcgccgaaaatgaattttag

SEQ ID NO: 129623 - DNA, 954 bp, synthetic construct
  misc_feature 1..954: note = Description of Artificial Sequence: Synthetic coding sequence
  source 1..954: mol_type = other DNA
atgagttgtcaggcctttacctccgctgatacgttcattccattgaactctgacgctagcgccacgctgcctctgatcatgcatcacagcgccgcggagtgcctgccagtctccaatcatgccacaaatgtcatgtccaccgtgccttcaattctctctcttatccagacccccaaatgtctctgcacacacttttccgtgactaccttggggaacactgctacgggacttcactactccgtcccttcatgtcattatgggaaccagccatccacctatggcgtgatggccgggtcactaaccccgtgcctgtacaagtttcccgatcacactctcagtcacggcttcccaccaatacaccagcctctgctggccgaggaccccactgcggcagactttaagcaggagttgcggcgaaaatctaaattagtagaagagcccatcgacatggattctccggagattcgggagctggaaaaattcgctaacgaatttaaggttaggagaatcaagctgggctacacacagaccaacgtcggcgaggcgctagcagctgtgcacggatcggagttctctcaaactaccatatgccgttttgaaaacttgcagctgtcttttaaaaacgcctgcaagctgaaagccattctgagtaagtggctggaggaagccgagcaggtgggcgctctgtacaatgaaaaagttggagccaacgagagaaagaggaagagacggaccacaatcagcattgccgcaaaggatgccctcgaacgccatttcggagagcaaaacaaacccagctcgcaggagattatgcgcatggcggaagaactaaacctcgaaaaagaggttgtcagagtctggttttgcaacaggaggcagcgcgagaaaagggtgaagacgtcactcaaccagtccctttttagcatctcaaaggaacatttggaatgtagatag

SEQ ID NO: 129624 - DNA, 876 bp, synthetic construct
  misc_feature 1..876: note = Description of Artificial Sequence: Synthetic coding sequence
  source 1..876: mol_type = other DNA
atgtcctgccaggcctttaccagtgccgacaccttcattcccctgaattcagatgcttcggctactctacctcttattatgcaccacagcgctgccgaatgtctgccagtgtctaaccacgctactaacgtgatgagcactgcaacaggtctccactactccgtaccgagctgtcactacggaaatcagccgtccacttacggagtcatggcgggctcactcacaccctgtttgtacaagtttccagaccatactctcagccacggtttccccccaattcatcagcccttgctggccgaggatccaacagccgcagacttcaagcaggagttgcgtaggaaatccaaactggtggaggagccaattgatatggacagcccagaaatccgggaactagagaaattcgccaatgagtttaaggtgaggcgtatcaagcttggctatactcagaccaacgttggggaagccctggctgccgttcacggatccgagttctctcaaacaaccatttgtagattcgaaaacctccagttgagctttaagaacgcatgtaagcttaaggccatcctgagcaaatggctcgaagaagcagaacaggtgggtgcgttatacaatgagaaggtgggagccaatgaacgaaaacgtaagcggcgtactacaatcagtatagccgcaaaggacgccctggaaagacacttcggggagcaaaacaagccttcatcacaggagattatgcggatggccgaggaactgaatctggagaaggaggttgtgcgcgtgtggttttgtaacagacgccagagagagaagagagttaaaacatctttgaatcagtcactgtttagcatctcaaaggagcacctcgagtgccggtag

SEQ ID NO: 129625 - DNA, 771 bp, synthetic construct
  misc_feature 1..771: note = Description of Artificial Sequence: Synthetic coding sequence
  source 1..771: mol_type = other DNA
atgctctggcagaagcctacggctccagagcaggccccagcgcctgcaagaccctatcagggagtgcgcgttaaagaaccggtgaaagagctcttgcggcggaagcggggccacgcgtcttctggcgctgcacctgcccccacagcagtggtactgccccaccagccacttgccacctataccactgtcggtccatcttgcctggacatggagggatccgtcagcgctgtgacagaggaggcggccctctgcgcgggttggttgtcacagcccacacccgcgacgctgcaaccgttggccccttggacaccgtataccgaatatgtccctcacgaggccgtcagctgcccttactctgccgatatgtacgtgcagcccgtttgtccctcatacactgtggtagggcccagttctgtcctgacctatgcgtcgccacccttgatcaccaacgtgaccactcggagttctgccactcctgccgtgggccccccactcgaggggccggagcatcaagcacctttgacgtacttcccctggccccagccccttagcaccctgcctacctcaactctgcagtatcagcctcccgcccctgctttaccaggtccccaattcgttcagctgccgatcagcatccctgagcccgtgctgcaggatatggaggacccaaggagggccgctagttctctaacaatagataagttgttgctcgaggaggaagactctgacgcttatgccctaaatcacactctcagtgtggagggcttttag

SEQ ID NO: 129626 - DNA, 1440 bp, synthetic construct
  misc_feature 1..1440: note = Description of Artificial Sequence: Synthetic coding sequence
  source 1..1440: mol_type = other DNA
atggtccactcttccatgggcgcccccgaaatccggatgtcgaagccccttgaggcggagaaacaaggattagacagcccctccgaacacaccgatacagagcgcaacggcccggataccaatcatcaaaatccccagaacaaaacatcccccttcagtgtctcccctacaggcccctcaactaaaataaaggcagaggaccctagcggcgattcagccccggccgcccctctgccacctcagcccgcacaaccacacctcccacaggctcaactgatgctcaccggaagccagttggcaggcgacattcaacagttgttgcagctgcagcagcttgtgttggtccccggccaccatctccagcctccagcccaattcctgcttccacaggcgcagcagagtcagcctggacttctgcccactccaaacctttttcagctgccccagcagacccagggcgctctgctcactagccagccaagggctgggctgccaacccaggctgtaaccagacccacactcccagaccctcacctttcacatccacagcctcccaagtgcctggagcctcctagccatcctgaggagccatctgacctggaggaacttgagcagttcgctagaacatttaaacagaggagaatcaagctcggtttcacccaaggtgacgttggcttggctatgggcaaactgtacggcaacgatttcagccagaccaccatcagccgattcgaggcacttaacctctctttcaaaaatatgtgcaagttgaagccacttctggagaaatggctaaacgacgctgagacgatgtccgtggatagcagcctgccttcacccaatcagttatctagcccatccctggggtttgacggcctgcccggccggcggagaaaaaaacgcaccagcatcgaaacgaacgtgaggttcgcactagagaaatcgttcctcgctaaccagaaacccacttctgaagaaatcctgctgatcgcagagcagcttcacatggaaaaggaggtgataagggtatggttttgtaaccgacgccaaaaggagaagaggattaacccatgttctgctgccccaatgcttccatcacctggaaagccggcttcttatagtccgcatatggtgactcctcaagggggcgcaggcaccctccctttatcacaggcatcttccagcctgagcaccactgtcacaactttaagcagtgccgtcggaacattgcacccctcaaggacagctggaggtggaggaggtggagggggagcagcgcccccactaaactcaattccctctgttacgccacccccacctgctactaccaattccaccaacccttctcctcaagggtcacatagtgcaattgggctgtccggcctgaacccttccacaggacccgggttatggtggaaccctgccccgtatcaaccgtag

SEQ ID NO: 129627 - DNA, 1809 bp, synthetic construct
  misc_feature 1..1809: note = Description of Artificial Sequence: Synthetic coding sequence
  source 1..1809: mol_type = other DNA
atggtccatagttccatgggcgcaccagaaatacgcatgagcaaacccctggaggctgagaaacaggggctggatagccccagcgagcacaccgatactgaaaggaacggacccgacaccaatcatcagaatccacaaaacaaaaccagcccattcagcgtctctcctacggggccgtctacaaaaattaaagccgaagaccctagtggcgactcagctcctgcagcccctctacccccacagcccgctcagccacatctcccacaggcccagctgatgttgaccggttcccagcttgccggagatatccagcaattactccagctacagcagttagtgttggtgccaggccaccaccttcagccccccgcccagttcctgctgcctcaggcccagcaatcacagcctgggttactccctactcctaatctgtttcagctcccccagcagacgcagggagcccttttaactagccagccacgggccggcctcccaacccaggctgtaacacgccccacattgcctgatccccacctgtcccatccccaaccgcccaagtgtctggaaccaccaagccacccagaagaaccctctgacctggaagaactcgaacaattcgcgagaacattcaaacagcggaggattaagttaggtttcacacagggggatgtgggcctggcaatgggaaaactctacggcaatgatttttctcagacgacgatcagtaggtttgaggccctgaatctgtcatttaagaatatgtgtaagttaaagcccctgctggaaaagtggctcaacgatgcggagacgatgtccgtggattctagtctaccttcccccaaccagctgagcagcccgagcctgggatttgatggcttgccgggacgcaggcgcaaaaagaggacatcaatagagaccaacgttagatttgccctggaaaagagctttctggcgaatcagaagccgacaagcgaagaaatactgctgatcgccgaacagctgcacatggagaaagaggtcatcagggtgtggttctgcaatagaagacagaaggagaaacgaattaacccctgttccgccgcccccatgctgccttcccctgggaaaccagcaagttactctccacatatggttaccccacaggggggtgccggcactctgcccttatcccaggcctcttcttcgttatccacaacagtcactacactgagctcggccgtgggaacattgcatccctcacgaacggctggcggcggcggtggcggcgggggcgcagcaccgccgctcaacagcattcctagcgtcactcctccccctcctgccactacaaacagtacgaacccatcgccgcaggggtctcatagtgcaataggcctttctggtctgaatccatccaccggctcgactatggtgggcctttctagtggactgtcgcctgccctgatgagcaacaaccccttggctacaatccaggcgctcgcctccggtggcacactcccattaactagcttggatggtagcggcaaccttgtgcttggggccgccggcgccgctccagggtcaccaggcttggtcacctctcctctgttcctgaaccacgccggtttgccactgttatctacccccccaggggtagggcttgttagcgcagctgcggccgctgtggctgcgtctattagcagtaaatctcctggcctgagtagttcctcctcctcctcttcttctagctccagttccacttgttctgaaacggcggcccagactccaggcggacccggtggcccggaagcaggaagcaaaccagagtag

SEQ ID NO: 129628 - DNA, 1392 bp, synthetic construct
  misc_feature 1..1392: note = Description of Artificial Sequence: Synthetic coding sequence
  source 1..1392: mol_type = other DNA
atggtccatagttccatgggagcaccggagatccgcatgagtaaaccgttagaagctgagaagcagggcctggacagtcctagcgaacacacagacaccgaacggaatggacctgatacaaaccaccagaatcctcaaaacaaaacgagtccattctccgtgtccccaacaggccctagcacaaaaatcaaagccgaggacccttcaggtgatagcgccccggctgcaccattgcctccacagcccgcccagccccacctcccccaggcccagctcatgctgactggtagccagttggcaggagacatccagcaattactccagttgcagcagctggtgctcgtgcccgggcatcacctgcagccgccagcacagttcctgctgccacaggctcagcagtctcagccgggcttgctgcccacacctaatctgtttcagcttcctcagcagacacagggtgcactgctcacaagtcagccacgcgccgggctgccgacacagcctcccaaatgtcttgagcccccgtcacatcctgaggagcccagcgacctggaggaactggagcagttcgccaggactttcaagcagaggaggatcaaactgggattcacgcagggcgacgttggattggctatggggaagttatatggtaatgactttagccaaactaccatctccagatttgaggctcttaacctaagttttaaaaacatgtgtaaactcaaacccctattggaaaagtggctgaacgacgctgagacgatgagtgtggactcgtcactcccctccccaaaccagctcagctccccttcgctcggcttcgacggccttccaggacgcaggcgaaaaaaaaggacctccatcgagaccaacgttaggttcgctcttgaaaaatccttcctggcaaatcagaaacccaccagcgaggagatactactcatcgctgaacagctgcatatggagaaagaagtaataagagtgtggttttgtaacaggcggcagaaggaaaagcgcatcaatccatgctccgccgcacctatgcttccatcaccaggcaaacctgccagctacagccctcacatggtgaccccccagggcggcgctggtactctccctctatcccaagcctcctcatcactgtccacgactgtaaccaccctttcatccgctgttggaaccctccacccatcccgaacagccggggggggtggaggcggcggcggcgcggcccccccgctgaattctatacctagtgtgacacctcctccccccgcgacaacaaacagtaccaatccaagcccacaaggttctcactcagcgatcggccttagcggcctgaatccatctacaggacccggactgtggtggaatccggccccttatcaaccttag

SEQ ID NO: 129629 - DNA, 1425 bp, synthetic construct
  misc_feature 1..1425: note = Description of Artificial Sequence: Synthetic coding sequence
  source 1..1425: mol_type = other DNA
atgggggctccagaaatcaggatgtcaaagccgcttgaggcggaaaagcaaggactggatagtccttctgaacatactgataccgaacgaaacggccctgacactaaccaccaaaacccccaaaacaagacatccccgttcagcgtgagtcccacaggcccgagcactaaaatcaaggcggaagacccatcgggtgactctgctccggccgcgcctctgccacctcagccagcccagccccaccttccccaagcccaactgatgcttacaggatcccagctcgccggcgacatccagcagctgctgcagctccaacaactggtacttgtgcctggccatcatctgcaacctcctgcccaatttttgctgccccaggcccaacagtcacagcccggccttctgccaaccccaaacctctttcaactgccacagcaaacacagggggcactcttaacaagccaaccaagagccggtctgcctactcaggccgtaacccggccaactcttcccgatcctcacttgagccatcctcagccacctaagtgtttggagccaccttctcaccctgaggagccttcagacttagaagagctggagcaattcgccaggactttcaagcagcgcagaattaagctgggctttacacaaggcgacgtgggtctggccatggggaagctgtatggcaatgatttttcccagacaaccatctccagattcgaggcgctcaacctgtcttttaaaaatatgtgcaagctaaagcctctgttggaaaaatggctcaacgacgctgagacgatgtcggtggattcatcactcccttccccaaaccagctctccagtcccagtctcggttttgatggcctacctgggagacgtaggaaaaaaaggacctcaattgagaccaacgtgagatttgcccttgaaaagtctttcctggctaaccagaagcccacctccgaggagattctcctgattgccgagcaactgcacatggagaaggaggtgatcagagtgtggttttgcaatagacggcaaaaagagaagagaatcaatccatgctccgccgcccctatgctcccatccccgggtaaacctgcctcgtatagcccacatatggtaactccgcaaggcggtgcaggaactctgccactcagccaggcttcctcatcactgtccacaacggtgacgacattaagcagtgcagtagggactctgcacccctcccgcacagccggcggcgggggcggggggggtggcgctgcgccgccgctgaattctattccttctgtaactccacccccgcccgcaaccacaaatagcacaaaccctagccctcagggtagccactctgctatagggctctccggtctgaatccatctactggcccaggcctgtggtggaatcctgccccctaccagccttag

SEQ ID NO: 129630 - DNA, 1203 bp, synthetic construct
  misc_feature 1..1203: note = Description of Artificial Sequence: Synthetic coding sequence
  source 1..1203: mol_type = other DNA
atggtgcactcatctatgggtgcacccgagattagaatgtctaaacccttagaggcagaaaagcagggtctggattcacccagcgaacataccgacaccgaacgaaatgggcctgacaccaaccaccagaacccccagaacaagaccagtcccttttccgtgagcccaacaggacccagcactaaaatcaaagctgaagaccccagcggagacagtgctccagctgctccgctaccgccccagcccgcccagccgcaccttcctcaggcacagctgatgctgacaggtagccagctcgctggtgacatccagcagctccttcaattgcagcagctggtgctggtcccgggacaccacctccagccccccgcccagttcctcttgccccaagcccaacagtcacagcctggcttgttgcccactccgaatctcttccagttgccacagcaaactcagggagccttactgacgagtcagccaagggccggtttacctacccaaccccccaaatgtctggaaccacctagccatccagaggagccgagtgacctggaggagttggagcagttcgcaagaacatttaagcagaggaggataaagctgggtttcacgcaaggcgatgtgggccttgcaatgggaaaattatatggaaacgatttttcacaaacgactatctcgcggttcgaggccctgaacctgtccttcaagaatatgtgtaaactaaagcctctgctggagaaatggcttaacgacgcggaaactatgtctgtagatagcagtctcccgtccccaaatcagctgtctagcccctcactggggttcgacggcctgccaggcaggcgccggaaaaagcgtacgagtatagagaccaatgtccggtttgctctcgaaaagtcatttctcgccaaccagaagccaacgtccgaggagatacttctcatcgctgagcaactccacatggagaaagaagtcattcgggtgtggttttgcaaccgaagacagaaagaaaaaagaatcaacccttgctcggccgctcctatgttgccttcgcccgggaagccagcttcttattccccacatatggtgaccccccaagggggtgctggaacattgccactttcccaggcctcgtcttcactgagcactacggcccagactccggccctgaaagccgccacaaggctgtctgcatgccaggcatag

SEQ ID NO: 129631 - DNA, 1404 bp, synthetic construct
  misc_feature 1..1404: note = Description of Artificial Sequence: Synthetic coding sequence
  source 1..1404: mol_type = other DNA
atggtgcacagctcgatgggggccccggagatcagaatgtctaaacctttggaggctgagaagcagggattggactcccccagcgaacacacagataccgaacgcaacgggcctgacacgaatcatcagaatccacagaataaaacaagtccgttctcagtcagccccaccggaccatctactaagatcaaagcggaggatccgagcggtgattcggccccagccgcacctctcccgccgcagcctgcccagccccacctcccccaggcccagctcatgctgaccgggtcccagctagccggcgatatccagcagttgctgcaactccagcagttagtgctggttcctggacaccaccttcagccgccagcccagttccttctgccccaagcgcaacaatcccaaccaggccttctgccaacccccaatctttttcagttgcctcagcaaacacagggtgcgttactgaccagtcagccaagggcaggattgccgacgcaagcggtgactcggccaactctgcctgatccacatctgtctcaccctcaacctcctaagtgtctcgagcccccttcccacccggaggagccatcagatttggaggaactggaacagttcgcaagaacgttcaaacagcgacgaattaaacttggttttactcagggcgatgtagggcttgccatgggcaaactgtatggtaacgattttagtcagaccaccatttctagattcgaagccctaaacctgtcctttaagaatatgtgcaaactgaagcctctactcgaaaaatggctcaatgatgcagaaacaatgagtgtagattcatctctgcccagcccaaatcaactgtccagcccatccctaggtttcgatggtttgcccggcagacgacggaaaaaaaggacgtccattgaaactaatgtgcggtttgccctggagaaaagctttctagcgaatcagaagccaacttccgaagagatacttctgattgccgagcagctacacatggaaaaggaggtgatccgtgtttggttctgtaatagacggcaaaaagagaagagaatcaacccctgttccgctgctccaatgttgccttcccctggaaagccagcaagctactctccacacatggtcactccccagggaggggcaggaactctcccactgagccaggcctcttccagtcttagtacaacggtcacaacactgagcagcgccgtgggtacattgcatcctagtaggacggcagggggaggagggggcggcggcggagccgctcctccactaaactcgatcccttcagtgactccgcctcccccagccacaacgaatagcaccaacccttcaccgcaaggaagtcattccgcgataggactgagcggcctcaatccaagtaccggttag

SEQ ID NO: 129632 - DNA, 1761 bp, synthetic construct
  misc_feature 1..1761: note = Description of Artificial Sequence: Synthetic coding sequence
  source 1..1761: mol_type = other DNA
atggttcactcctccatgggcgcacctgagatccggatgtctaagcccttagaggcggagaagcagggccttgatagtccaagcgaacataccgacacagagcggaacggaccagacaccaaccaccagaatccacagaataagacaagtcccttcagtgtgagcccaaccggcccctcgactaagattaaagccgaggacccatctggagactctgcgcccgcagcgccactgcctcctcaacccgcccagcctcatctcccgcaggcccagctaatgctgaccggtagccagctcgccggcgatatccagcagctactacaactacagcagctggtactcgtaccgggccaccacctccagccccctgctcaattcctcctcccacaggctcaacagtcgcaacccggccttttgccgacccccaacttgtttcaactccctcagcagacacagggggccttgctaacctcccaacctagggccgggctgcccactcagccccccaaatgtcttgagccgcccagccatcctgaggagccttcagacctggaggagctggagcagttcgcccgcaccttcaaacaaaggaggatcaagctggggttcacccagggggacgtggggctggcgatggggaagctgtacggaaatgacttttcccaaacaaccatctccaggtttgaggctctcaatctgagctttaagaatatgtgtaaactgaagcctttgctggagaaatggttaaatgatgccgaaaccatgagcgtggactcctctctgccttccccaaatcaactgagctctccatctcttgggtttgacgggctgcccggaagacgccgaaagaaacgtaccagtatcgaaaccaacgtgcgcttcgccctcgagaaatctttcctcgccaaccaaaaacccactagtgaggagatcctgctgatcgctgagcagctacatatggagaaggaagtcatacgtgtatggttctgcaatagacggcagaaggagaagcgcataaatccctgcagcgcagccccaatgcttccatcccccgggaaacctgcatcctactcaccacacatggtcacccctcagggcggcgctggtaccctgcccctgagtcaggcgtcttcctctttgtcaactactgtcaccactctgtctagcgccgtcggaactctccacccatctagaactgccggggggggtggaggcggggggggggctgcaccccctcttaattccatcccatccgtcacaccgcccccaccagctacgacaaattctacaaatccttccccgcagggcagtcatagtgccatcgggcttagcggactcaatccatcaacaggctctactatggtgggactgagcagcggtctaagcccggctctgatgagcaataaccccctagccaccatccaggctctggcatcgggcggcaccttgcctctcacctcgctggatgggtccggtaacctggtgctgggcgctgcaggggcagcccctggttcccctgggctcgtgacctcccctctctttctcaaccacgccggtctccccttgttgagcactcccccaggagtggggttggtatccgctgccgcggccgctgtcgctgcaagcatttcatcaaagagcccagggctgtcaagttcctctagttcttcttcctcgagcagcagtagtacatgtagcgaaactgccgctcagactccgggtggacccggcggaccagaggccggcagcaaacctgaatag

SEQ ID NO: 129633 - DNA, 1311 bp, synthetic construct
  misc_feature 1..1311: note = Description of Artificial Sequence: Synthetic coding sequence
  source 1..1311: mol_type = other DNA
atggtaaaccttgagtccatgcacaccgacataaagatgagcggcgacgtcgctgatagcaccgacgcacgatccaccctgagccaggtggagcccgggaacgaccgaaatggtctggactttaaccgccagattaagacagaagatctctccgacagcctccagcaaaccctgtcgcaccggccttgccatctgtcacaaggccctgcaatgatgtcagggaatcagatgtctggactgaacgccagcccatgtcaggacatggccagcctgcatcctctgcagcagctggttctcgtaccgggccacctgcagtctgtttcccagtttctccttagccaaacacagcccggccaacaggggctccagcccaatctgttaccattcccacagcagcagagcggtctgctgctgccccagaccggacctgggttggcttcacaggcattcggccacccagggcttccaggaagcagccttgagccccacctggaagcttcccagcacctgcccgtacctaagcatctgccttcctccggaggggccgacgagcccagtgacctcgaggagctagagaagttcgccaaaacttttaagcaacggcggatcaaattagggttcacacaaggggatgtgggcttggccatggggaaactgtacggtaatgactttagtcaaaccacaattagccggtttgaagcattgaatcttagcttcaaaaatatgtgtaagctgaaacccctgctggagaaatggttgaacgacgcagagtcatctcccagcgacccctctgtgagtaccccatcttcctacccgtcactttctgaggtctttggacggaaacggaaaaaacgaacctcaatcgagactaatattcgtttgacacttgagaagaggttccaggacaaccctaaacctagtagcgaggagatctccatgattgctgagcagctctctatggagaaagaggtagtcagggtgtggttttgtaatcggagacagaaagagaagaggattaactgtccagtcgccactccaatcaagccacctgtgtataactcaaggcttgtgtccccttcaggatccctgggacctctgagtgttcctccagtccatagtacaatgccaggaaccgtgacgagcagctgttctcccggaaacaacagtaggccatcaagtcccggatccggactgcatgcctcatctcccaccgcttcccaaaataattcaaaagctgcagtcaattcggccagcagcttcaattcttcagggtcctggtataggtggaatcacagtacttacctgcactag

SEQ ID NO: 129634 - DNA, 1317 bp, synthetic construct
  misc_feature 1..1317: note = Description of Artificial Sequence: Synthetic coding sequence
  source 1..1317: mol_type = other DNA
atggagtctcctaggacagccaagggaggtcgtgacattaagatgagtggagacgtcgctgatagtactgatgcccgctccacgttgagccaagtggagcctgggaatgataggaatggtttagattttaaccgacagattaagacggaggacctgtctgattccctccagcaaaccctatcccacaggccctgccatctttcccaaggtcccgcaatgatgtccggaaatcagatgtccggcctgaacgcttccccatgccaggacatggcatccctgcacccattacaacagctcgtactggtgccaggtcatttacaatccgtttctcaattccttctgtcccaaacacaacccggacagcaggggctccagcctaatttactgcctttccctcagcagcaatccggactgcttttaccgcagacgggtcccggactggcctcccaagccttcggacatccgggtttgcctggatcatcacttgaaccgcacctggaggcttcacagcacttacccgtacctaagcacttgccctctagtgggggggcggatgagccctcagacttggaggagttggagaagttcgccaagacatttaaacaaagaagaataaaattaggattcacccaaggagacgtcggcttagctatggggaagctctatggtaacgatttctctcagaccactatctcccggtttgaagctctgaatctgtctttcaaaaacatgtgtaaactgaaacctctcttagagaagtggctgaacgatgcagagagttctccaagcgatcccagcgtgtccacccccagttcataccctagcctgtcagaggtgttcggacggaaacgaaaaaagagaacgtctattgagactaacataaggctgactcttgagaagcggtttcaggataatcccaagccctctagtgaggaaatcagcatgattgcagagcaactgagcatggagaaggaggtagttcgagtttggttctgcaataggcggcagaaggaaaagcgaattaactgtcccgttgcaaccccgattaaacctccagtgtacaacagtcggctggtgtccccaagcggaagccttggacctctgtctgtccctccagtgcactcaactatgcccggtaccgtgaccagttcttgctcaccagggaacaactctcgccctagtagccccggcagcgggctgcacgcctcttctccgacagcctctcagaataacagtaaagcagccgtcaactccgccagctcatttaacagcagcggaagttggtaccggtggaaccacagcacatatttgcactag

SEQ ID NO: 129635 - DNA, 1356 bp, synthetic construct
  misc_feature 1..1356: note = Description of Artificial Sequence: Synthetic coding sequence
  source 1..1356: mol_type = other DNA
atggcaactaccgcccaatacctgcccagggggccaggcgggggtgcagggggaaccgggccgctgatgcatccggacgcagcggccgcggccgccgccgccgcggcagccgagcgtctccacgctggggccgcttacagagaagtgcagaagcttatgcaccatgaatggctgggagctggcgcgggacatcctgtaggcctagcgcatccccagtggctgccaaccggggggggcggcggaggtgattgggccggcggccctcacctggaacacggaaaagctggcgggggaggcactgggcgcgccgatgatgggggagggggaggaggatttcatgcacgactggtccaccagggcgcagcacatgccggtgcagcatgggctcaagggagcactgcacaccacttaggtcccgccatgtctccctcccctggggcttcgggagggcaccagccccagcctctcggtctgtacgcacaggccgcctaccctggaggcgggggaggcggattagcaggcatgttggcagcgggcggggggggggccgggcccggccttcaccacgcgctgcacgaggatggccacgaagcacagctggagccctctcccccgccacacctcggcgcgcacggccacgcccacggccatgctcatgctggcgggcttcatgcagccgctgctcacctgcaccccggggcgggcggaggcgggagttctgttggagagcatagcgatgaggatgctccatccagcgatgacctagagcagttcgctaaacagtttaagcaaaggagaatcaagctggggtttacgcaggccgacgtcggtctggcactcggaacactctacggcaacgtcttcagccagactactatatgccgctttgaggcactgcagctctctttcaagaacatgtgcaaacttaagcccctgctgaataaatggctagaggagactgactcatcatccggtagcccaactaacctcgacaagatagccgcgcagggacgtaaacgcaagaaacgtacctccatcgaagtaggagtgaagggcgccctggagagccacttcctcaaatgccccaaacccagcgcacacgagattacaggccttgccgactctcttcagctggaaaaagaggtggtccgagtgtggttctgcaaccgcagacagaaggaaaagaggatgactcctgctgcaggcgccggccacccaccaatggacgacgtgtatgcaccaggggaactcggacctggaggcggtggagcttctcccccttctgcaccaccaccaccaccacctgctgcgttgcaccaccaccatcatcacacgttaccaggctccgtgcaatag

SEQ ID NO: 129636 - DNA, 1332 bp, synthetic construct
  misc_feature 1..1332: note = Description of Artificial Sequence: Synthetic coding sequence
  source 1..1332: mol_type = other DNA
atggcaacagcggcctccaatcattactctttgctgaccagttctgccagcatcgtgcacgctgaaccacctggcggtatgcagcagggtgcaggggggtaccgcgaagcacagtctctcgtacagggagactacggcgctctgcagtccaacggccaccctttgagtcatgctcaccagtggatcacagccctgtcccacggcgggggtggtggtggtggaggcggaggcggtggaggaggaggcggaggtggaggcgggggcgatggatccccttggagcacttcccccttaggtcaacccgatatcaaaccctcggtcgtggtccagcagggagggcgaggggacgaactgcatgggcctggcgcattgcagcagcagcaccagcagcagcagcaacagcagcagcaacagcagcagcagcagcaacaacagcagcaacagcagaggcccccacatctggtgcaccacgcagctaaccatcatcccggtccgggcgcatggaggtccgcagcggccgccgcgcaccttccaccgtctatgggcgcctcgaatgggggattgttgtatagtcagccaagcttcaccgtgaatgggatgctgggtgccggaggccagccggccggcctgcaccaccatggactccgagacgctcacgacgagccccaccacgcagaccatcatccgcatccccattcgcatccccaccaacaacctccaccaccgcccccccctcaagggcctcccggccatcccggggcccatcacgatccacatagtgatgaggatactcctacaagtgacgacttggaacagttcgcaaaacagtttaagcagcgtagaattaagctgggctttactcaagcggacgtgggccttgcgttgggaaccctctatggtaatgtcttttcgcagactacgatctgccggttcgaggctctgcaactgtctttcaagaatatgtgcaagctgaaacctttgctgaacaaatggttggaggaggccgattccagttcaggctcacctaccagcatcgacaagatagctgcccaaggaagaaaaagaaaaaaaaggacatctatcgaggtgtctgtgaagggggcactggaaagtcactttctgaagtgtccaaaaccttcggctcaggagataacaagcctagccgactcgctccagctggaaaaggaggtcgtgcgtgtgtggttttgcaacagacgccagaaagaaaagaggatgaccccccctgggggcactctgccaggtgcagaggacgtgtacggcggctcacgagatacacccccacatcacggcgtgcagacacccgtgcagtag

SEQ ID NO: 129637 - DNA, 1131 bp, synthetic construct
  misc_feature 1..1131: note = Description of Artificial Sequence: Synthetic coding sequence
  source 1..1131: mol_type = other DNA
atggctaccgctgcatccaaccactatagcctcctgacctcatccgcctcgatcgtccacgctgagccccccggcggaatgcagcagggcgccggaggctatcgcgaagctcagtcacttgttcagggcgattacggcgccctgcaatcaaacggacatccattatcgcatgcccaccagtggattaccgctttgtcacacggtggggacgggagcccttggtcaacatccccccttggccagcccgatatcaaaccgagcgtggtggtgcagcagggggggaggggtgacgagctgcatggacccggcgccctgcaacagcagcatcagcagcaacagcagcagcagcagcagcagcagcagcagcagcagcagcaacagcagcagcagagacccccacacctggtgcatcacgccgctaaccaccatcctggaccaggtgcctggcgttctgcagccgcggcagcgcatctgccgccttccatgggcgcatcaaacggaggcctcctttacagtcagcctccacctcccccccagggacctcctgggcaccccggagctcatcatgatcctcattccgacgaagatacccccacttcggatgatttggagcagtttgcaaagcagttcaagcagaggcgtatcaagttaggatttacccaagccgacgtgggcctggcgctcggtacgctgtacgggaatgtgtttagccaaaccaccatttgccgcttcgaggcactgcagctcagcttcaagaatatgtgtaagctcaaacctctgctgaacaagtggctggaagaagctgattcaagcagcgggagccctacaagtattgacaagatcgccgcccaaggccggaagcggaaaaaacgcacctccattgaggtgagtgtgaagggtgcccttgagtcacactttctgaaatgtcccaagccatcagctcaggagataacttcccttgccgacagtttgcagttggaaaaagaggtggtgcgtgtgtggttctgcaaccggagacagaaggaaaaaagaatgacaccccccggcgggacactgccgggagccgaggacgtttatgggggtagccgggataccccgccacaccacggagtacagactcctgttcaatag

SEQ ID NO: 129638 - DNA, 1503 bp, synthetic construct
  misc_feature 1..1503: note = Description of Artificial Sequence: Synthetic coding sequence
  source 1..1503: mol_type = other DNA
atggccacggcagcttctaatccgtatctgcccggtaacagcctcctggcggctggttccatagtacacagcgatgccgcaggggccggagggggcggcgggggtggggggggaggcggaggtggtggcgcgggcgggggcggtggcggcatgcagcctggttccgccgccgtgaccagcggcgcatacagaggcgacccctcctcagtcaaaatggtacagagcgacttcatgcagggggctatggctgctagcaatggtggacacatgctatcccacgcacaccaatgggttacagctctcccacacgccgcagccgctgctgcagctgctgccgctgcagctgtcgaggcttcatccccctggtcaggcagcgccgtgggaatggcgggttctccacagcagcctccacaacccccccctcctcccccccaggggcccgacgtcaagggaggagccggacgcgatgatctgcatgcggggactgcgctacatcaccgtggaccaccgcacctcggtccaccacccccacctcctcatcagggacatccagggggttggggcgctgccgccgcggctgctgccgccgccgctgccgcagcggcagcagcccacctgcctagcatggctggcggtcagcaaccccccccccagtctcttctctattctcagccaggaggcttcactgtgaatggaatgctctcggcccctccaggccctggaggcgggggtggcggcgccgggggtggtgcccaatcactcgtccatccgggactggttagaggcgacacgccggaactggctgaacaccaccaccaccatcaccatcacgctcatccacaccctccccacccgcaccacgcacaaggaccgcctcaccacggggggggaggaggaggagccggacccgggttaaactctcacgatccacattccgacgaggataccccaactagcgacgaccttgagcagttcgccaagcaatttaagcagcgaagaatcaagctggggttcacacaagcagatgtggggcttgcactcggcaccctctatgggaacgtatttagtcaaaccaccatttgtaggttcgaagcccttcaattgagcttcaagaatatgtgcaagctcaagccacttcttaacaagtggctggaagaagcagatagtagcacagggtcacccacctctattgacaagatagccgcccagggaagaaagcgaaagaagcgcaccagtatcgaagtgtctgtgaaaggcgctttagagagccacttccttaaatgtcccaagcctagcgcgcaagagataacaaaccttgcggattcccttcagctggagaaagaggtggtgcgtgtttggttttgcaatcgtaggcagaaggagaaacggatgactcccccaggcatccagcagcaaaccccagacgatgtatatagccaggtggggaccgttagcgccgacactcccccccctcaccacgggcttcagacttcggtccaatag

SEQ ID NO: 129639 - DNA, 1086 bp, synthetic construct
  misc_feature 1..1086: note = Description of Artificial Sequence: Synthetic coding sequence
  source 1..1086: mol_type = other DNA
atggccaccgccgcctccaacccgtattctatcctctcttcgacttccctcgtgcatgctgatagtgcagggatgcaacaaggcagcccatttcgcaatcctcaaaaattactccaatccgactatctccagggagtgcctagcaatggacacccgcttggacaccattgggtgacaagtctcagtgacggcggaccctggtccagcaccctggccacctcgccactggatcagcaggacgtgaaacccggcagggaagacttacaactgggtgcaatcattcaccatcgtagccctcacgtggcccaccacagtccccacacaaatcatcccaatgcatggggtgcctccccggccccaaatccttctataacaagctctggccagccgttgaatgtgtatagtcagccaggtttcacagtgtctgggatgctcgagcacggcggactaaccccaccccctgccgcagcatccgctcagagtctgcacccagtgctgagggaacctcctgatcacggggagctgggcagccatcactgtcaggatcactcagacgaagagacccccacgagtgatgagcttgaacagttcgctaagcagtttaaacagcggcgcataaagttgggcttcactcaggccgacgtcgggttagcactggggaccctgtacgggaacgttttttctcaaactaccatctgtagatttgaagggttacagctgtcattcaaaaacatgtgcaaactcaagcccctcctcaataaatggctggaggaggccgattcttccacaggatctcctaccagtattgataaaattgctgcccaaggccggaagagaaagaagagaacgtctatagaggtgtcagtgaagggcgtgctcgaaacccactttctaaagtgtcccaagccagcagcccaggagatatcctccttggcagatagcctgcagctggagaaggaggtggtgagagtttggttctgtaacaggaggcagaaagagaagcggatgacaccaccgggtgatcagcaaccacacgaggtgtactcccacacggtgaagacagatacaagctgccatgatctttag

SEQ ID NO: 129640 - DNA, 1260 bp, synthetic construct
  misc_feature 1..1260: note = Description of Artificial Sequence: Synthetic coding sequence
  source 1..1260: mol_type = other DNA
atgatgtccatgaactctaaacaaccccactttgctatgcaccccaccctgcccgaacacaagtatcctagcctgcactcatcgtctgaggccatccggcgagcatgcctgccaactcccccccttcagtctaatttgtttgcttcacttgacgaaaccctgttggctagagcagaggcattagcggctgtggacattgcagtgtcccagggcaagtcacacccatttaagccggatgctacctatcacacaatgaatagtgtcccttgtacatctactagcactgtgcctctcgctcaccaccaccaccatcaccaccatcatcaagctcttgagcctggagacttgcttgatcacatttcttcgccgtccctggccctcatggcgggagccgggggggccggcgctgctgccggcggaggcggggctcacgatggacctggaggggggggcgggcctggtggaggcggggggccgggaggaggccccggcggcggcggcggtgggggacccggtgggggaggtggcggccccggtggaggtctcctgggtggctcagctcatccgcacccccatatgcatagtcttggtcacctttcccacccagcagcagccgctgccatgaacatgccgtcaggacttcctcacccaggcctcgtagccgctgctgcgcaccatggggctgccgctgctgcggcggctgctgcagccggacaggtggccgccgctagcgccgccgctgctgtcgtcggcgccgccggactggcctcgatctgcgattccgacacagatcccagggaactggaagcttttgccgagaggtttaaacagcggcggatcaaactgggcgtgacacaagcagacgttggctctgccctggccaaccttaaaatccctggcgttgggtctctgagccagagcaccatttgtcgattcgagagcctcaccctgtctcataacaatatgatcgcactgaagcctatcctgcaggcctggctagaggaggcggagggggcgcaaagggagaaaatgaataaacctgaactgttcaatggtggcgaaaagaagcgaaagcggacatctattgccgctcccgagaagaggtccctcgaggcgtacttcgccgtgcagcccaggccaagctcagagaaaattgccgccatcgctgaaaagctggacctgaaaaaaaatgtagtgcgcgtgtggttttgcaaccaaaggcagaaacaaaagagaatgaagttctctgctacctattag

SEQ ID NO: 129641 - DNA, 1911 bp, synthetic construct
  misc_feature 1..1911: note = Description of Artificial Sequence: Synthetic coding sequence
  source 1..1911: mol_type = other DNA
atgaaaaagctccagggagcgcacttgcggaagcccgtgacaccagacctgctaatgacaccatcagaccagggtgacgtagatctcgacgtggactttgccgcccataggggtaattggactggcaagcttgactttctcttaagctgtatcggatattgcgtagggttaggcaatgtttggcgtttcccctacagggcttataccaatgggggcggagccttcctggttccttacttcctcatgttggctatctgtggcattccactgttttttctggagctgagcctcggacagttcagcagcctgggccctctggccgtctggaaaatttcaccgttattcaagggcgctggcgccgcaatgctcctaatagtaggcttagtggccatctactataatatgattattgcatatgttttgttttacctgttcgctagcttgacttctgatctcccgtgggaacactgcgggaactggtggaatacagaactctgtctagagcacagggtgagcaaggacggcaatggtgctctgcctctcaatttgacatgtaccgtctctccttcagaggagtattggtctcgttatgttctgcacattcagggatcccagggtataggaagccccggggagatccggtggaatctctgcctgtgtctgctcctggcctgggtgattgttttcctgtgcattctgaaaggcgtgaagtctagtggtaaggttgtttactttacagcgaccttcccctatctgattcttcttatgctgctcgtgcgaggtgtcactttgcctggagcgtggaagggtatccagttttacttaactcctcagtttcatcacttgctctccagtaaggtgtggatcgaggcagccctgcagatattctactctttgggagtaggcttcgggggcctccttacattcgccagttacaacactttccaccagaacatataccgtgatactttcatcgtgacgctcggcaacgccatcacttctatccttgctggattcgccatattcagcgtcctaggatacatgtcccaagagctcggcgtgcccgtcgaccaggtggctaaagctggccccgggctcgcgttcgtggtctacccacaggcaatgactatgctgcccctcagccctttctggtcgttcctgttcttctttatgcttttgacattgggattagactcacagtttgccttcctggagacaatagtgactgcagtgacagatgaattcccatactacctcaggccaaaaaaagctgtgttctccggtcttatctgtgtggccatgtatctgatgggactgatcttgacaactgacggcggaatgtactggctggtactcctagacgactactctgcttcctttggacttatggtggttgttatcaccacctgcctcgcggttacaagagtttacggcatccagcggttttgtcgggacatccacatgatgttgggtttcaaacccggcctctatttcagggcatgttggttatttctctctcctgcaacccttttagctctgatggtgtatagcatcgtaaaataccagcctagcgaatatggcagctacaggttcccgccttgggccgagttgctgggaatcctgatgggactcctctcttgccttatgatcccagccggaatgctggtagccgtcctgcgcgaagagggtagtctctgggaacgtcttcaacaggcctccaggccggccatggattgggggccttccctggaggagaaccgaacaggaatgtacgtggctaccctcgcagggtcccaatcccctaagccccttatggtgcatatgaggaagtacggtggcattacttccttcgagaatactgctatcgaggttgatcgggaaatcgctgaagaagaggagagcatgatgtag

SEQ ID NO: 129642 - DNA, 798 bp, synthetic construct
  misc_feature 1..798: note = Description of Artificial Sequence: Synthetic coding sequence
  source 1..798: mol_type = other DNA
atgcacttctaccgactattcctgggcgctactcgccggtttctaaatcccgagtggaagggcgagatagacaattggtgcgtgtatgtgctgacctcgctgctgccattcaagatacagagtcaggacatcaaggctcttcagaaagagttagaacaatttgctaagttgctgaagcagaaacgaatcactctgggatatacgcaggcagatgttggcctgactttgggcgtgctgtttggcaaggtattttctcagactacaatttgccgcttcgaggcactccaactctcatttaaaaacatgtgtaaactgaggcctctgctgcagaagtgggtcgaggaggccgacaataacgaaaacctgcaggagatctgtaaggcggagaccctcgtgcaagcacggaaacggaagagaacttccatcgaaaaccgagtcaggggtaaccttgagaacctgtttctgcaatgtcccaaaccgactctgcagcaaatctcccacatagctcaacaactcggtctggagaaagacgtggtgcgagtctggttttgcaacagaagacagaaaggcaagcgaagctcgagtgactacgctcagcgggaggacttcgaggcagctggatctcccttttctggaggacctgtctcattcccacttgccccaggcccccatttcgggacacctggctatggctctcctcacttcaccgccctgtattcttccgtacccttccctgaaggggaggcttttccacccgtgtctgttacgactctaggttcgcccatgcattctaactag

SEQ ID NO: 129643 - DNA, 1083 bp, synthetic construct
  misc_feature 1..1083: note = Description of Artificial Sequence: Synthetic coding sequence
  source 1..1083: mol_type = other DNA
atggctggacatctagcatctgattttgccttctctccccctcctgggggcgggggagatggacctgggggcccggaacctggctgggtggacccgcgcacttggctcagcttccaggggccacctggcgggccaggtattggcccaggggtcgggcccggaagcgaggtctggggaattccaccttgcccgcccccctacgagttctgcgggggaatggcatactgtgggccacaggtgggagtggggttagtgccacaaggaggtcttgaaacaagccaacctgaaggggaggcgggcgtaggcgtggaatcaaactccgacggcgctagcccagaaccttgtactgtaacacccggcgccgtgaagttggagaaggaaaaactagaacagaatccggaagagtcccaggacattaaagctctgcaaaaggaactcgaacagttcgccaagctgcttaagcagaagaggatcacgctgggctatacccaggcagatgtgggcctaacacttggagtcctgttcgggaaagtttttagccagacgaccatttgccgatttgaggccctgcagctgtcgtttaaaaatatgtgcaaattgcgcccccttctgcaaaagtgggtcgaagaggccgacaataacgaaaatctgcaggaaatctgtaaagcggaaacgcttgtgcaggcccgtaaacggaaaaggacctcaatagaaaatagggtccggggcaacctagagaatctgtttctgcaatgtcctaaacctaccttgcaacagatttcacacatagcccagcagttgggcctcgagaaggatgtggtccgggtgtggttttgtaatcggcggcaaaaaggaaagcggagcagtagtgactatgcacagcgtgaggactttgaggcagcgggatcacccttctctggaggaccagtgagctttccactagctccaggccctcatttcgggactcctggctacggttctccccattttaccgcactgtactcatccgtgccattccccgagggagaggcctttccacccgtctctgtaaccacattaggctcccctatgcatagcaattag

SEQ ID NO: 129644 - DNA, 372 bp, synthetic construct
  misc_feature 1..372: note = Description of Artificial Sequence: Synthetic coding sequence
  source 1..372: mol_type = other DNA
atggcgggccacctggcgtccgatttcgcattcagtcctcctcccgggggcggtggcgacgggcccggcggccccgaacccggctgggtagacccaagaacatggctgtctttccaggggcccccgggcggtccaggcataggaccaggagtaggcccaggatccgaggtgtggggcatacctccctgtccacccccatatgaattttgcgggggaatggcgtattgcggaccacaggtaggggtgggattagttccacaaggcggactcgaaacttcacagccagagggcgaagccggggtaggagtcgagaccccaatgggtccaccacgaagtcctgccccacatccgttccccttcccattactgtag

SEQ ID NO: 129645 - DNA, 558 bp, synthetic construct
  misc_feature 1..558: note = Description of Artificial Sequence: Synthetic coding sequence
  source 1..558: mol_type = other DNA
atggccggacacctggcgagtgacttcgcgttcagtcctccaccaggaggcgggggggacgggcctggtggcccggaacccggctgggtcgacccacgcacatggttatcctttcagggaccacccggcggaccagggataggccctggcgtgggaccaggaagtgaggtttggggtatcccgccttgcccccctccatacgagttttgtggaggcatggcatattgtgggccgcaagtgggagtggggctggtgcctcagggcggacttgagacctctcagccagaaggcgaggcgggtgtgggggtggagagtaactcagatggagctagccccgagccatgcacagtgacccctggagccgtgaaattggagaaggagaaacttgaacagaacccagaggaaagccaagatataaaggccctccagaaggagctggaacagtttgctaagcttctaaaacagaagcggatcaccctcggatatactcaggccgatgtccatccaggcgggagtatttgggagggcattcagcccaatgaccacctcccgttgtag

SEQ ID NO: 129646 - DNA, 558 bp, synthetic construct
  misc_feature 1..558: note = Description of Artificial Sequence: Synthetic coding sequence
  source 1..558: mol_type = other DNA
atggcggggcatttggcaagcgatttcgccttctccccaccccccggtggtggcggtgatggcccgggcggacccgaaccgggctgggtagaccctaggacctggctgtccttccagggcccacccggggggccagggattggacctggtgtgggaccaggcagcgaagtttgggggatccctccttgtcctcccccatatgagttttgcggaggaatggcatactgtgggccacaggtgggtgtcggcctggtccctcagggaggcctggagacttctcagccagaaggcgaagcaggcgtgggggtggaaagtaacagcgatggcgcatctcctgagccgtgcacagtgactccaggcgccgtcaaactcgagaaggaaaaactggagcagaacccggaggaatctcaggatataaaggctctgcagaaggagctggagcagtttgccaaactcctcaagcagaagcgcattactcttggatacacacaggccgacgtgcacccgggtgggtctatctgggaggggattcagcccaacgaccacctgcctctctag

SEQ ID NO: 129647 - DNA, 495 bp, synthetic construct
  misc_feature 1..495: note = Description of Artificial Sequence: Synthetic coding sequence
  source 1..495: mol_type = other DNA
atgtgcaaactacggcctctactccagaaatgggtggaagaggctgataacaatgaaaatctgcaggagatttgtaaggccgagacactggtgcaagctagaaagagaaaacgcactagcattgaaaaccgcgtgcgggggaatctcgagaatcttttccttcagtgtcctaaacctactctgcaacaaatttcccacatagcccagcagctggggttagaaaaagacgtcgtgagagtgtggttttgtaaccggaggcagaaaggcaagcggtcttcctccgactatgcccagcgggaagacttcgaagcggccggctctcctttctcagggggccccgtgtcatttcccctcgctcctggacctcacttcggcacaccaggctacgggagcccccacttcactgcattatattcgagtgtaccctttcccgagggtgaagcctttccacctgtgtcagttaccacactgggatcacccatgcacagcaattag

SEQ ID NO: 129648 - DNA, 495 bp, synthetic construct
  misc_feature 1..495: note = Description of Artificial Sequence: Synthetic coding sequence
  source 1..495: mol_type = other DNA
atgtgcaagctgcgtcccctgctccaaaagtgggtggaagaggccgacaataatgagaacttacaagagatctgtaaggcagagactcttgtccaagctcggaagaggaagcggactagtattgaaaacagggtgcgcggtaatctggaaaacctatttctgcagtgtccaaagcctacacttcaacagatcagccacattgcacaacagctgggcctcgaaaaggatgtcgttcgcgtttggttctgcaatcgaaggcaaaaaggtaaaagatcttcatccgattatgcgcaaagagaagactttgaggctgctggctctcccttctctgggggccccgtctcgttccccttggctcctggaccacacttcggtactccaggctacggatctccacactttacagcactgtactcctcggtgcctttccccgagggcgaggctttcccacccgtgtctgttactaccttaggcagtccaatgcactccaattag

SEQ ID NO: 129649 - DNA, 2076 bp, synthetic construct
  misc_feature 1..2076: note = Description of Artificial Sequence: Synthetic coding sequence
  source 1..2076: mol_type = other DNA
atgagcgcattactgcaggatcctatgattgcaggacaggtctcaaaacctttgctcagcgtcaggagcgaaatgaatgctgaactaaggggagaagacaaggcagctactagtgatagcgagttaaacgaaccgctgctcgctccagtagaatcaaacgatagtgaggacacgcccagtaaactcttcggggctcgcggtaaccccgctctgtctgaccccggtaccccggaccagcaccaggcctcccagacacatcctcccttcccagttggcccgcagcctctgcttaccgcccaacagctggcttcagccgtggctggcgtcatgccgggggggccaccagctctcaaccagcctattttaataccctttaacatggccggccaattagggggccaacagggcctggtgctcactttgccaaccgccaacctaacaaacatccagggtctggtggcggccgctgccgcaggcgggatcatgacattacccctccagaatctccaggctaccagctcccttaacagccagttacagcagctacagctgcagttgcagcaacagcagcaacagcaacagcagcagcccccacccagcacaaaccaacaccctcagcccgcacctcaggccccaagccagtctcaacagcaaccactgcagcccaccccgccccagcagccccccccagcttctcaacagcctcctgctcccacgtcccaactccagcaggccccccagccccagcaacaccagccccactcccatagccagaatcagaatcaaccgagcccgacacagcagtctagcagccccccacagaaaccttctcaaagccctgggcatggcctgcctagtcctctgacccccccgaatcccctgcaactcgtgaataaccccttggcctcccaggccgctgcggctgccgctgcgatgtcctccattgcaagctctcaggcattcgggaacgcgctctcgtctctgcagggggtgactggtcagctggtcaccaacgctcaaggccagataattggcaccattcctctaatgcccaaccctggcccctccagccaggcggcctctgggacccagggcctacaggtgcagccgatcacgccccagctgctaacgaacgcccaggggcagattatcgccactgtgatcggtaatcagatcctgccagtgataaacactcagggaatcaccctgtctcctataaagccagggcagcagcttcaccagccgtcacagacgtcagtagggcaggccgcaagtcaaggcaatctcctccacctagctcatagtcaagcctccatgagccagtccccagtccggcaggccagttcgtccagcagcagcagttcatcatccagcgccctttcggtgggacagctggtatcaaatccccaaacggccgctggcgaagtcgacggggtgaacctcgaagagatcagagaatttgcaaaggctttcaaaataagacgtttgtctcttggactgacacagactcaggtcggccaggcactaagtgcaacagagggcccagcatactctcagtcagccatctgccggcacacgattctgagaagtcattttttcctgccacaagaggcacaagaaaacaccattgcttccagtctgactgctaagctcaaccccgggctgctgtaccccgcccgattcgaaaaactcgacataacccctaaatcagcacagaaaataaagccagtcctggagaggtggatggccgaagcagaagccagacacagagcagggatgcagaatctgactgaatttattggaagcgagccaagcaagaaacgtaaaagacggacaagttttactccccaagcgttagaaatcttgaacgcccacttcgaaaagaatactcacccttcagggcaggaaatgaccgagatcgcagagaagctgaactatgaccgagaggtggtgagagtgtggttttgcaacaagcggcaggctctaaagaataccattaagagactgaaacagcacgagccagccaccgcggtgcccctagaacctctgacagatagcttggaggaaaattcctag

SEQ ID NO: 129650 - DNA, 1968 bp, synthetic construct
  misc_feature 1..1968: note = Description of Artificial Sequence: Synthetic coding sequence
  source 1..1968: mol_type = other DNA
atgtctgccttactccaggatcccatgattgccggccaagtttctaaacccctgctgtctgtccggagcgaaatgaacgcggagctgcgcggtgaggataaagccgctacttccgatagtgagcttaatgagcctcttctggctcccgtagaatccaatgattcagaggatactcccagcaaactctttggggcccggggcaatcctgctctgtccgatccgggcacccctgatcagcaccaggcttcccagacccacccaccttttcccgtggggccccagcccctcctgacagctcagcaactcgcgtccgccgtggctggcgtgatgcctgggggcccaccggcattgaaccagccaatcctgattccattcaatatggccggccagctaggaggacagcaggggctagtgctaaccttacctactgctaatctgacaaacatccagggtctggtagccgcggccgcggccggcggaattatgacactaccccttcagaacctgcaggccacgtcatcactgaattctcagctgcaacagctgcaattacagctgcagcagcaacagcagcagcagcagcagcagccacccccatccactaatcaacatccccagcccgccccccaggcgccctcacagagccagcagcagccactacagccaactccccctcagcagccccctcccgcaagccagcagcctcctgcgccgacctctcagctgcagcaggcacctcagcctcagcagcaccagccgcactcgcactcacagaatcagaatcagccgtcccccactcaacagtcatcatccccgccacagaaaccgagtcagtctcctggtcacggtctgccttcaccattgacgccgccgaatcccctccagctggtgaacaacccattggcatctcaggccgccgccgcagccgcagccatgagttctatcgcgagctcacaggccttcggtaacgcactgtccagcctgcaaggcgtgactgggcagctggtgaccaacgcacagggccagatcataggtacaatcccactgatgcctaaccccggcccatcttctcaggccgcctcaggcacacaagggttgcaggtgcagccaatcactccacaactgctgaccaatgcccaggggcagatcatcgctaccgtcatcgggaaccaaatcctaccagtgatcaatactcaaggtatcaccctgagtcccattaaaccagggcagcaattgcatcaaccatcccagacgtccgtgggacaggctgctagtcagggcaacctgttacatctggctcacagccaggcctccatgtcccagagccctgtgcggcaggccagctcctcatcaagttcctcaagctccagttccgccctttccgtagggcagcttgtgtctaatccgcaaacagctgctggcgaggttgacggagttaatctggaggaaatcagagaatttgccaaagccttcaagataagaaggctgtctctggggctaacacagacacaagtcgggcaagcactgtccgccactgagggtccagcctacagccagtccgctatctgccgttttgagaaactggacatcacacccaaaagcgcccagaaaattaagcctgtcctcgagcgatggatggccgaggctgaagcacggcaccgggccggtatgcagaatttgactgagttcattggcagcgaaccttccaagaagcgaaagcgacgaacctcctttaccccacaggccctcgaaatcctaaatgctcattttgaaaaaaatactcacccatcgggtcaggagatgaccgagattgccgagaaactaaattacgaccgggaggtggtgagggtgtggttttgcaacaagaggcaggccctgaagaacaccatcaaacggctaaaacagcatgaacccgcaaccgcagtaccactcgaacccttaactgactcactcgaagagaattcatag

SEQ ID NO: 129651 - DNA, 2076 bp, synthetic construct
  misc_feature 1..2076: note = Description of Artificial Sequence: Synthetic coding sequence
  source 1..2076: mol_type = other DNA
atggaaaaaatctattcaaggggtgaactgcatcactttatagatgggtttaatgaagaaaagagtaattggatgaggtatgtgaaccccgcacacagtcctagagagcagaaccttgccgcttgtcagaatggaatgaacatctacttttacacgatcaaaccaatccctgctaatcaagagctgttagtatggtattgccgtgacttcgcggaaagactccactatccttatcccggagagctaaccatgatgaatctcacgcagacacagagctcgcttaaacagccttcgacagaaaagaacgagctgtgtccgaaaaacgttccgaaaagagaatatagcgtaaaggaaatactgaagctggattctaacccttcaaagggtaaagatctctatcgtagcaacattagccctctcacatccgaaaaggacctagacgacttccggcgcagaggatcccccgagatgccattttatccccgggtggtgtaccctataagagcgcccttgccggaggacttcctgaaggcctctcttgcttatgggatcgagcgacccacctatatcactcgatcacccattccaagcagtacaactccaagtccctcggcccgcagctcccctgatcagtctctcaaatccagttccccgcatagctcccctggaaatactgtctcgcccgtggggccaggctctcaggagcatagggatagttacgcatatctgaacgctagctacggaacagaaggcctgggatcctacccagggtacgcccccctcccgcacctgcctcctgccttcatcccgtcatataatgcccactatcctaaattcctcctcccgccctacggaatgaattgcaacggcctgtcagcggttagtagcatgaatggaatcaacaactttggtctgtttccccggctgtgtccagtttattccaacctacttggaggaggctctctgccccatcctatgctcaaccctacttcactccctagctccctacccagtgatggcgcgcggcgtctgcttcagcccgaacacccacgcgaggttctggtacctgccccgcattctgccttcagcttcacgggtgctgccgcctccatgaaggataaagcgtgtagccccacatccgggagcccaactgctggcacagccgctaccgctgagcacgtagtccagcctaaggcaacttctgctgccatggctgcacctagctccgacgaggcaatgaaccttattaagaataagcggaacatgaccggctataagacactgccatatcccctgaagaaacagaatggcaaaattaagtacgagtgcaacgtctgcgccaaaactttcgggcagctgtcaaacctcaaggtgcatctgagagtgcattccggcgaacgcccctttaagtgtcaaacgtgtaataaaggctttacccagcttgcgcacttgcaaaagcattatctggtacacacgggcgagaaaccacacgagtgtcaggtctgtcacaagcggttctccagtacctctaatctgaaaactcacctccgtctccacagcggcgaaaaaccctaccaatgtaaggtgtgtcccgctaagttcactcagttcgtgcacctgaaacttcataagcgcctccacaccagagaacgtccccacaagtgtagccagtgccataaaaattacattcatctctgtagcctcaaggtgcatctaaagggaaactgtgctgccgcacctgctcctggtctgcctcttgaagatttaactcggattaatgaggagatcgaaaaattcgatatatctgataacgctgatcggttagaggacgttgaagacgacattagcgttatcagcgtggtagagaaggagatccttgccgtcgtccgaaaggaaaaagaggaaaccggcctcaaggtctcattgcaacgcaacatggggaacgggctcctgtcgtctggctgttctctctatgaaagttctgaccttccactcatgaaactccccccctcaaatcctctccccctggtacctgtgaaagtgaaacaggaaaccgtagagccaatggacccctag

SEQ ID NO: 129652 - DNA, 2370 bp, synthetic construct
  misc_feature 1..2370: note = Description of Artificial Sequence: Synthetic coding sequence
  source 1..2370: mol_type = other DNA
atgaagatggacatggaggacgccgacatgaccttatggaccgaagccgaattcgaagagaagtgcacctatattgtaaacgatcatccgtgggattctggggctgacggcggcacatccgtacaagccgaggcctctctacccaggaatttgctgttcaaatatgccaccaacagcgaagaggtaatcggtgtgatgagcaaggagtatatcccaaaaggaacccggttcggcccactgattggtgaaatctacaccaacgacaccgttcccaaaaatgccaacaggaagtacttctggagaatttactcccgcggagagttgcaccattttatcgacggattcaatgaggagaaaagcaattggatgagatacgtcaaccccgcgcattcacctagagaacagaacctcgccgcctgtcagaacggtatgaacatctacttttacacaataaagccaatcccggccaatcaggagctgctggtgtggtattgtagggacttcgcagaacgtttgcactacccctaccctggagaattaaccatgatgaatctcactcagacgcagtcttcccttaaacagccttctactgagaaaaacgagctgtgccccaagaatgtacccaaacgagagtattctgtgaaagagatcctgaaactggactcgaacccatccaagggaaaggatttgtaccgctctaacatttcccccttgacatcagaaaaagatctggatgactttcggcgtcgtggcagccctgaaatgccattttaccctagagtcgtgtaccctattagagcccctctgcccgaagactttcttaaggccagcctggcctacggcatcgagcgcccgacctacattactcgcagccccattccgagctccacgaccccttcgccctccgctcgctcttcacctgaccagagtttgaaaagtagttcaccgcatagcagcccagggaacaccgtttcccccgtcggccctggctcccaggagcatcgggattcgtacgcctacttaaatgcatcatatggcacagaagggctaggcagctacccggggtacgctcccctgcctcatctgccccccgcgttcatcccttcatacaacgcccattacccgaagttccttctgcctccctacgggatgaattgtaacgggctgagcgctgtcagctctatgaatgggataaataatttcggactgtttcccagactgtgtccggtatattctaatctcctgggtggcggtagtctgcctcatccaatgctgaatcccacgagccttccctccagtctgccttctgatggggcgcgccggctgctacagcctgagcatccacgggaggttttagtgccagctccacatagcgctttttcctttacaggggccgctgcttcaatgaaagataaagcctgttctccaacctccggtagcccgacagccggcacagccgcaacagcggagcacgtggtccagcccaaggctacctccgccgccatggcagctccgagttcagacgaggccatgaacttaatcaagaacaagaggaacatgactggatacaaaactcttccctatcctctgaagaagcaaaatggcaaaattaagtacgaatgcaacgtgtgtgcaaaaaccttcgggcagctgtccaacctgaaggtgcatttgcgggtccacagtggagagcgaccttttaagtgtcagacttgcaacaaggggttcacgcaattagcccacctgcaaaagcactatttagtccacactggggagaagccccatgagtgtcaggtttgtcacaagaggttttcaagtacatccaacttgaagacccatctccgcttacacagcggagagaagccataccaatgcaaagtgtgccccgccaaatttactcagtttgttcatctcaaacttcacaaaaggctccacactcgcgaacgaccccataagtgcagtcagtgccacaaaaactatatccatttatgcagcttgaaggttcatctcaaagggaactgtgccgctgcacccgcgcctggcttgcccctcgaggacctcacacggatcaatgaagagattgagaaatttgacatctccgacaacgccgatcgcctggaggatgtggaagacgacatttcagtaatatctgtggtggagaaagagatattggcagtcgtaaggaaagaaaaggaagaaacaggcctaaaagtgtctttgcagagaaacatgggtaacggactgctgtccagcggatgcagtctctacgaaagttccgatctgcctttgatgaaacttcctccctcaaacccactgccactggttccagtaaaagtcaaacaggaaactgtcgaaccaatggatccctag

SEQ ID NO: 129653 - DNA, 2478 bp, synthetic construct
  misc_feature 1..2478: note = Description of Artificial Sequence: Synthetic coding sequence
  source 1..2478: mol_type = other DNA
atgcttgacatctgtctagagaaaagagtgggaacaactctagctgcaccgaagtgcaatagctcaactgtcagatttcaggggttggctgagggtacgaaaggcaccatgaagatggacatggaggacgctgatatgactctatggacagaggccgaatttgaagagaaatgcacctacatagtcaatgaccacccgtgggatagcggcgccgatggcggtaccagtgtgcaggcggaggcaagtctgccacgaaacctcttgttcaaatacgccaccaactcggaggaggttatcggggtaatgagcaaggagtacatccccaagggaacccgcttcgggcctttaatcggggaaatttacactaacgacaccgtacccaagaacgccaatcgcaagtatttttggaggatttactcccggggcgagttgcatcactttatcgacggtttcaatgaagagaaatcgaattggatgcgatacgtcaatcctgcccacagtccccgcgagcaaaacttggctgcgtgccaaaatggcatgaacatatatttctatacaatcaaacctatcccggcaaaccaggaacttctcgtgtggtattgtcgtgactttgccgagcgtctacactatccgtaccccggagagctgactatgatgaacctcacacagacgcagtcaagtttgaaacaaccaagcacagagaagaacgaactatgtcctaagaacgtgcccaagagagaatacagtgtaaaagagatactgaagctggattctaatccgagcaagggaaaagatctttacaggagcaatattagccctctcaccagcgagaaggacctggacgactttcggcgcagaggaagccccgagatgcccttttatcctcgggtggtgtacccaattcgcgctccactccctgaagatttcctgaaggcctctctggcctatggcattgagcggcccacttatattacacggagcccaattccctcaagcaccacaccttccccttccgcgcgctcatcacccgatcaatcactcaaaagcagctcaccccacagctcaccaggaaatactgttagccctgtggggcccggaagccaggagcaccgggactcatacgcatatctgaacgccagttacggtacagagggcttaggatcatacccaggctacgctcccctcccccacctccctcctgctttcattccgtcttacaatgcgcattacccgaaattcctcctgccaccttacgggatgaactgtaacggactttcagccgtgtcctccatgaacggcatcaataatttcggtctgtttccaaggttgtgtcccgtttacagtaatctattaggcgggggttcattaccccaccccatgttaaaccctaccagcttacctagttctctgccctccgacggcgcccgcaggcttctgcagccggagcacccgagggaggtgcttgtaccagccccgcacagcgcattcagtttcaccggcgcggctgcgtctatgaaagacaaagcctgcagccctacatcaggaagtccgacagccggcacagcagcaacagcggagcacgtggtgcaacccaaggctaccagcgcggctatggccgcaccttctagcgatgaggcaatgaatctgatcaagaacaagcgcaacatgaccggctacaagacactaccgtacccgttgaagaaacagaacggtaaaataaagtacgagtgcaacgtgtgcgctaaaactttcgggcagctgtctaacctcaaagttcacctcagggttcactccggcgagcgaccatttaaatgccaaacctgcaacaaaggctttacacagctggcccacctgcaaaagcactacctggtgcatactggcgagaaacctcatgaatgtcaggtctgccacaaacgcttttcatcaacctccaatctgaaaacgcaccttcgtctgcatagcggggagaagccataccaatgcaaggtctgccccgccaaatttacccagttcgtgcacctgaagctgcacaagagactgcacacccgggagaggccccataagtgttctcaatgccacaagaactatatccacctttgcagccttaaggttcacctgaaaggaaattgcgcagccgcccccgccccaggcctgcccttggaagatcttaccagaatcaacgaggagatcgaaaagtttgacatttcggataacgcggacaggctggaagatgtcgaggacgacatctcagtcattagtgtggtagagaaagaaatcctcgcggtcgttcggaaagagaaagaagagaccgggctgaaagtttcgctgcagcgcaacatgggaaacggactactctcgtctgggtgttccctctacgaatcttctgatctccctctgatgaagctcccaccttctaaccccttacccctggttcccgtcaaagtcaaacaggagacagtcgagccgatggatccctag

SEQ ID NO: 129654 - DNA, 192 bp, synthetic construct
  misc_feature 1..192: note = Description of Artificial Sequence: Synthetic coding sequence
  source 1..192: mol_type = other DNA
atgaaaatggatatggaagatgccgacatgacactttggacagaggcagaatttgaggagaaatgtacatacattgtcaatgatcacccctgggatagcggcgcagatgggggaacgtccgtgcaagccgaagcttctcttccgagaaacctcctcttcaaatacgcgactaattccgaggaggttatttag

SEQ ID NO: 129655 - DNA, 2367 bp, synthetic construct
  misc_feature 1..2367: note = Description of Artificial Sequence: Synthetic coding sequence
  source 1..2367: mol_type = other DNA
atgaagatggatatggaggatgctgatatgactttgtggaccgaggccgagtttgaagaaaagtgcacatacatcgttaacgatcacccatgggattcgggggccgacggggggacatccgtccaggcggaggcatcactgccccgcaacctgctcttcaagtatgctaccaactcagaggaagtgatcggcgttatgtcaaaagaatatatcccgaagggtacaaggttcggccccctgattggagagatttacaccaacgacaccgtgcctaagaatgccaataggaagtatttctggagaatctattctagaggggagctgcatcactttatcgacggcttcaatgaagagaagtccaattggatgcggtacgtaaatcccgctcatagcccaagggagcagaaccttgcagcgtgccagaacggtatgaatatatatttttacacaatcaagccaatacctgccaatcaggaactcttggtatggtattgccgcgactttgctgaaagactgcattacccatatcctggcgaacttactatgatgaacttgacccagacccaaagcagcctaaaacaaccaagtacagaaaaaaacgagctgtgtcctaagaatgtccccaagagggagtatagtgtgaaggagatcctgaagttggatagcaatccttctaaaggcaaggacttgtatcgaagcaatataagtcccctgacaagtgaaaaagacttggatgactttagacgccgcggcagccccgagatgccgttctatccacgggtggtgtatcccatcagagctcctctgcccgaagacttcctgaaggcaagcctcgcttacggtatagagcgtcctacctatatcacccgctcccccattccttcgtcaaccacacccagcccctctgcccggtcatctccggaccagtctttgaagtcctctagcccgcattctagcccagggaataccgtgagcccagtgggcccgggttcacaagagcatagagattcatatgcgtatctcaacgcttcctacgggacggagggcttgggaagttatcctggttatgctccgctacctcacctcccgcctgctttcatacctagctataacgctcattacccaaagttcctgctgcctccgtacggcatgaactgcaacgggctgtcagcagtcagctccatgaacggcattaacaactttggactgtttcctcggttatgtccagtgtactctaacctgctgggtggcggctccctacccacgccctgttccaccccactactcccctctagcctgccatccgacggagcacggaggctgctgcagcctgaacaccccagggaagtactcgtgccggctccacattccgcttttagtttcacgggagccgcagctagcatgaaggacaaggcatgttcgcccacttctggatctcccaccgctggaacagccgcgactgctgagcacgtggtacagcctaaagctacaagcgctgcaatggcagccccgagcagtgatgaggctatgaacctgatcaagaataagcggaacatgaccgggtacaaaacactcccatatcctttaaagaagcaaaacggtaaaattaagtacgagtgcaacgtttgcgcaaaaacttttggccagctgtccaatctgaaggtgcatctgcgcgtgcattctggagagaggccattcaagtgtcagacatgtaataaggggttcacacaactggcccacctgcaaaagcactatctggtgcacacaggagagaaaccacacgaatgccaggtatgccataaaagattttcctcaactagcaacttaaagacccaccttcgtctccacagcggagagaagccttaccagtgtaaagtgtgtccggccaagtttactcaattcgtgcatctcaagctccacaaaaggctccatacaagagagcggccgcataaatgttctcagtgccataaaaattatatacatttgtgctccctgaaggtgcacttgaaaggcaactgcgccgccgcacccgcccccgggctgccccttgaagacttgactcgaatcaacgaggagattgagaaatttgacatctctgataatgctgataggttagaagatgtggaagacgacatctcggtgatcagcgttgtggagaaggagattctggctgtggttcgcaaagagaaagaggaaaccgggttaaaggtcagcctgcagcgcaacatgggcaacggcctgttgagttcaggatgctcactatacgaatcaagcgatctgcccctgatgaaactgccccccagcaatcctctacccttagtgccagtaaaagttaagcaggaaaccgtggagccgatggacccctag

SEQ ID NO: 129656 - DNA, 1716 bp, synthetic construct
  misc_feature 1..1716: note = Description of Artificial Sequence: Synthetic coding sequence
  source 1..1716: mol_type = other DNA
atggccctgccacgccccagcgaagcagtcccccaagacaaagtttgctatccacctgagtcgagtccccagaatttagcagcctactacactcccttcccctcatacggccactatcgaaactcattagcaacagtcgaggaagattttcagccattcagacaactagaggccgccgctagcgctgcacccgctatgccgccctttccgttccggatggccccccctctacttagtccgggacttggcctccagcgcgagcctctgtatgacctgccctggtattctaagctgccaccgtggtacccaattcctcacgtgccccgggaggtgccacctttcctgagctcaagtcacgaatatgcaggggcatccagcgaggatttgggtcaccagattattgggggagacaacgaatccggtccttgttgcggtcccgacaccctgatccctccccctcctgctgatgcatctctgcttcccgaaggactacgtacaagtcaattgctgccatgctctccctctaagcaatccgaggatggcccaaaacctagtaaccaggaaggcaaatcccccgcccggttccagttcaccgaggaggatcttcacttcgtgctgtatggggtcaccccttctctggaacacccagcttctctgcatcatgctatctccggactgttggttccccctgatagcagtgggtctgactctctgccccaaactttggataaggatagtctgcagctacctgaagggctttgccttatgcagactgtttttggtgaagtgccacactttggagtgttctgcagcagttttatcgccaagggggtgcgatttggtccttttcagggaaaggttgtaaacgccagtgaggtgaaaacttatggtgacaattccgtgatgtgggagatctttgaggatggccatttgtcccatttcattgatggaaaagggggcaccggcaactggatgagttacgtgaactgcgcgagattccccaaggaacagaacctggtcgcagtgcagtgccagggacacatcttctacgaaagctgtaaagaaattcaccaaaatcaggagctactggtgtggtacggagattgctatgaaaagttcctggacataccagtgtctttgcaagtgactgagccggggaagcaaccatctggaccctccgaggagtccgcagaaggctacaggtgcgaacgctgcgggaaggtgttcacatataaatattatagggataaacacctcaaatacactccatgcgtggacaaaggtgaccgcaaatttccttgttcgctctgcaagcgaagtttcgagaagagggataggctccggatccacattctacacgtgcatgaaaaacacagaccacataaatgctctacctgtggcaagtgcttttcccagtctagtagcctgaacaagcacatgagagtacattctggcgacagaccctaccagtgcgtttattgcacaaagcgctttactgcctcctctatcctccgcactcatatccggcaacattccggagagaagccatttaagtgcaagtattgcggaaaatcattcgcttcccacgcagcacatgatagtcatgtgcgcaggtctcataaggaggacgatggctgcagctgctcaatctgcggtaaaatcttttcagatcaggaaactttctatagccacatgaaattccatgaagattattag

SEQ ID NO: 129657 - DNA, 303 bp, synthetic construct
  misc_feature 1..303: note = Description of Artificial Sequence: Synthetic coding sequence
  source 1..303: mol_type = other DNA
atggcactgcctagacccagcgaagcagtgccgcaggataaggtgtgctaccctcccgaatcttcgccacagaacctcgcagcctattacaccccctttccgtcttacggacattaccgcaattctctggcaacagttgaggaagacttccagccctttagacagctggaagcagctgcctcagcggcccccgctatgcccccgttcccctttaggatggctccccctcttctcagtccagggctgggcctgcagcgagaacctctgtacgacctgccatggtattctaagctgcctccttag

SEQ ID NO: 129658 - DNA, 3831 bp, synthetic construct
  misc_feature 1..3831: note = Description of Artificial Sequence: Synthetic coding sequence
  source 1..3831: mol_type = other DNA
atgagatccaaagcgcgggcacggaaactcgccaagtcggacggggacgtggtcaataacatgtatgagcccaacagggacctattggccagccacagcgcggaagatgaggctgaggactcggctatgtctcccatacctgtggggccaccttccccttttcctacctcggaagacttcacacctaaagagggatccccgtacgaagccccagtttacattccagaggatatccctataccagctgacttcgaactgcgagaaagttcaatccccggagcagggctcggtgtgtgggctaagagaaagatggaagccggcgagcgtttaggaccatgcgtggtggttcctcgcgcagccgccaaagagaccgacttcggctgggaacagatattaactgatgtcgaggtgagcccacaggaggggtgcattaccaagatatccgaggacctggggagcgagaagttttgtgttgatgccaatcaggctggtgccggctcttggctaaaatacataagagtagcctgcagttgtgatgatcagaatttgacgatgtgtcaaatcagcgagcaaatttactacaaggttattaaggacatagagcctggcgaagaactgttggtgcacgtcaaagaaggggtataccctctaggtacagtcccacccggactggatgaggaaccgacgtttcggtgcgatgaatgtgatgagctgtttcagagcaaacttgacctacggcggcacaagaagtacacctgcgggagcgtgggagctgcactttatgaggggttagctgaggagttaaagccagagggcctaggcggaggctccggccaggctcacgaatgcaaggactgcgagagaatgttcccaaacaaatattcgctggaacaacacatggttattcacactgaagagagagagtacaaatgcgaccagtgtcctaaagcgtttaattggaaaagtaaccttattcgacatcagatgtcccatgactcagggaagcgttttgaatgcgaaaactgcgtgaaggtttttactgaccctagtaatctccagcgacacatccggagtcagcacgtaggcgctagggcccatgcatgtccagactgcggtaaaacttttgctactagttcaggccttaaacaacacaagcacatacatagcaccgtgaagccttttatctgcgaggtgtgtcacaaaagttatacacaattctccaacttatgtcggcacaagaggatgcacgccgactgtcggacacagattaagtgcaaggattgcggacagatgttttcaaccactagttctctcaacaagcatcgaaggttttgtgagggtaaaaaccactacacgcctggcggtatcttcgctccaggacttcccctcactcctagccccatgatggacaaagccaagccaagccctagcctgaatcacgcgagcttaggctttaacgagtactttccctcacgcccacatccaggctccctgccctttagcaccgcccccccaacattccctgccctcacgcccggctttccgggcatcttcccaccaagcttgtatcctcggccaccccttttaccacccacatctctcctcaagagtccactcaaccacacacaagacgcaaagcttcctagcccactggggaacccggcgctgccactcgtgtccgccgtgtccaattcctcccaggggactactgccgcggcaggacccgaagaaaagtttgagtctcgtcttgaagattcgtgtgttgaaaagctcaagaccagaagctctgacatgagcgatggcagcgattttgaggacgtcaataccactacaggaacggatctggatactacaaccggcacaggctctgacctggacagtgatgtcgactcagaccctgacaaagacaagggtaagggtaaatcagccgaaggtcagccaaagttcggcgggggcttggcaccaccgggtgcccccaactccgtggctgaggtgcccgtattttatagccagcactctttcttcccacctccagatgaacagctgcttactgctaccggcgccgccggcgactcgataaaggcaatcgcctcaatagcagaaaaatatttcgggccaggctttatgggaatgcaggagaaaaagttaggttcgctgccctatcattctgccttccctttccagttccttcccaattttccacactctctgtatccattcacagacagagccctggctcataatctattggttaaggccgagcccaagtcccctagggacgcactaaaggtaggtgggcctagcgcagagtgtcctttcgacctcaccactaaaccgaaagatgttaaacccattctgccgatgccaaagggtccgagtgcacccgcctccggtgaagagcagcctttagacctctctataggcagccgggctcgcgcgagtcagaatggaggcggcagggaaccccggaaaaaccacgtgtacggggagagaaagcttggagctggcgaaggtctccctcaggtgtgtcctgcaaggatgccacagcagcccccactgcattacgccaaaccaagcccgttcttcatggacccaatctactcccgggtcgagaagcgaaaagtcactgaccctgtaggcgctctcaaggaaaagtatctgagaccatcacccctgctgttccatccgcagatgtccgccatcgagacaatgaccgaaaagctcgagagctttgcagcaatgaaggccgactctggatcttcactgcagccactgccgcaccatccgtttaattttcgatcaccgcctccaaccctgtctgatcccatactccgcaaagggaaggaacgctacacttgtcgctactgtggaaagatattcccgaggtccgcgaacctaactcgacacctgaggactcataccggagagcagccctacagatgtaaatattgcgacaggtccttttccatatcatccaatctgcaaaggcatgtgcggaatattcacaataaagaaaagccctttaagtgtcacctctgcaaccggtgctttggtcagcagaccaacctggaccggcatctaaagaagcacgaacacgagaatgctccagtgtctcagcatccgggagtgttaaccaaccacttgggaaccagcgcctcaagccctacatccgagtccgataaccacgcgctactggacgagaaggaagactcatacttctccgagattaggaatttcatcgctaacagcgaaatgaaccaagctagtacacgaactgagaaacgcgccgacatgcagattgtggatggcagcgcccagtgccctggtttagctagcgagaagcaagaggacgttgaggaagaggacgacgacgatttggaagaagatgacgaagattccttagcgggcaaatcccaagacgacacagtttctccagctcctgagccgcaggcggcctacgaggacgaggaagacgaggaacccgccgccagcctagccgtgggcttcgaccataccaggcgatgtgctgaagatcacgaggggggactgttggcattggaacccatgccaacttttggaaagggattggatctgagaagggcagcagaggaagctttcgaggtgaaggacgtgctaaactcaacattagacagcgaggcgctgaaacataccctgtgtaggcaagccaagaaccaagcttacgcgatgatgctatctctttccgaggacacaccactgcacacgccctcacagggatcacttgatgcttggttaaaagtgactggcgctacctccgagtcaggcgcatttcaccctatcaatcacttgtag

SEQ ID NO: 129659 - DNA, 3831 bp, synthetic construct
  misc_feature 1..3831: note = Description of Artificial Sequence: Synthetic coding sequence
  source 1..3831: mol_type = other DNA
atgcggagtaaggccagggcacgtaagctggccaagagtgacggcgacgtggtgaataatatgtacgaacccaacagagatttactggctagtcactccgccgaggacgaagcggaggattccgcgatgagcccaatcccagtcggtcctcccagtccctttccaacaagcgaagacttcaccccaaaggagggtagcccatacgaggccccagtttacattcctgaggatatcccaataccagccgactttgaactgagggagagctcaattcccggggctgggctgggtgtgtgggcaaagcgcaagatggaggctggggagagactggggccatgcgtggttgtgcctcgtgcagcagccaaggagacagatttcggatgggagcagatattgaccgatgtggaggtgagcccacaggagggttgcatcaccaaaatcagcgaagatctcgggtccgaaaaattttgtgtggacgccaaccaggcaggagctggctcctggctgaaatacatcagggtcgcctgtagctgcgatgatcagaacctgaccatgtgtcagatttctgagcaggtcatttactacaaggtgattaaggacattgaacctggagaagagctcctggtgcacgtgaaagaaggggtgtatcctttaggtacagtccctcccggtctggatgaggagccaacatttcgttgcgacgaatgtgacgagttatttcaaagtaaactcgacctccgacggcataaaaagtatacgtgcggcagcgtgggcgccgccctctatgagggtctggccgaggagctgaaaccagaaggcctgggcggtggtagtgggcaagctcatgagtgtaaagattgcgagagaatgttcccaaataagtactcactggaacaacatatggtcattcacactgaagagagagagtacaagtgcgatcagtgcccaaaggctttcaattggaagagtaacctgatcaggcaccagatgagccatgactcgggcaagcgattcgagtgcgaaaattgcgtgaaagtcttcactgatccttccaatttacaaagacatatccgcagtcagcacgttggcgctcgagcccatgcatgccctgactgtggaaagacctttgcaacctcatcaggcctgaaacagcacaagcatatccactctacagtcaagccctttatttgcgaggtgtgccataagtcgtatactcagttctcaaatctgtgtcggcacaaacgaatgcatgccgactgtagaacccaaatcaagtgtaaggactgtggccagatgttttctacgacttcgagtctgaacaagcaccggagattctgcgaaggtaaaaaccactacacccccggtggcatatttgccccaggcctccctttgactccatcccctatgatggataaagcaaagccctccccctccctaaatcatgcatctctgggctttaacgagtacttcccttcaaggccgcacccaggcagtctgccattctctactgcgccgcccaccttcccagcgctcaccccagggtttccagggatcttcccaccgagtttgtacccccgtccgcccctcttgcctccaacctccctgctgaagagtccgttgaaccatactcaagatgcaaaactcccaagccccctcgggaacccagcactccccctggtgagcgccgtctccaacagctcccaaggtaccactgccgccgcaggccctgaagaaaaatttgaatcccggctcgaagactcgtgcgtcgagaaattgaaaacccgcagcagtgatatgtccgatggctccgacttcgaagacgtaaacacgacaaccggaacagatctcgatactaccacgggcacgggcagtgatctggactcagacgtggattctgaccctgacaaggataagggcaaaggcaagtctgcagagggccagccaaagttcggtgggggcttggcacccccaggtgcaccaaattcagtggccgaggttcccgtattctactcccagcacagtttcttccctccaccagacgagcaacttctcacagccacaggagccgccggtgattctattaaggctatcgcatccatcgcagaaaagtactttgggccaggcttcatgggcatgcaagagaaaaaattgggttccctaccttatcatagtgccttccctttccagttcctccccaatttcccccattcattgtaccccttcacggatagagcacttgcgcacaacctgctggtgaaagccgagccgaagagtcctagagatgcactcaaagtgggcggaccgagcgcagaatgtccatttgacctcacaaccaagcccaaagacgtcaagccaattcttcccatgcctaagggcccgtccgcccctgcaagtggtgaggagcagccgttggatctcagtatcggatcacgcgccagggcaagccagaacggcggcggcagagagccacgtaagaatcatgtttatggcgagcggaagttaggcgctggagaggggctgccccaagtctgtcctgcacggatgccacaacaacccccactacattacgccaagccatcccctttctttatggaccccatttatcgggttgaaaaacggaaggtcaccgatcccgtaggagctctcaaagaaaagtacctgaggccctccccattactcttccacccccagatgagcgccattgagaccatgactgaaaaactggaaagctttgctgcgatgaaggccgattccggaagctccctccagcctctgcctcaccatcccttcaactttcggtcgccgccacctactttgagcgaccctattctgaggaagggcaaggaacggtatacctgccggtactgtggcaaaatattcccccgtagtgcgaaccttactcgccatcttcggacgcatacgggagaacaaccctaccgctgcaaatactgtgaccggtccttctctatctcttccaacctgcaacgacacgtgaggaatattcataataaagagaaaccctttaaatgtcatctgtgtaacaggtgtttcggtcagcagactaacttggaccgtcacctgaaaaagcacgagcatgagaacgcgcccgtaagccagcatcccggcgtcttgacaaaccacctaggtacctcagcttcgtctccgaccagcgaatcagataaccatgctctactcgacgagaaagaagacagctatttttccgagattagaaactttatcgcgaatagcgagatgaaccaggcttcaacgagaaccgagaaaagggctgatatgcaaattgtggacggatctgcccagtgtcccggactagctagcgagaaacaagaagatgttgaggaggaagacgatgatgacctcgaggaagacgatgaagacagtcttgctggcaagtctcaggatgacacggtgagccctgctccggagccgcaagccgcgtatgaggacgaagaagacgaggaacccgccgcttccctggctgttggtttcgaccatacgcgtagatgtgcggaggaccacgaaggcggccttctggctttggagcctatgcctaccttcggcaagggccttgatctgagaagggctgccgaagaggcattcgaggtgaaggacgtgctgaatagcacactagatagcgaagctctcaaacacaccctgtgtcgtcaggcgaaaaatcaggcttatgctatgatgctgagtctgtcagaagacactcctctgcacaccccttctcaaggcagtcttgacgcctggttaaaagtcacaggtgctacgagtgaatctggagcctttcatccgattaaccatttgtag

SEQ ID NO: 129660 - DNA, 3279 bp, synthetic construct
  misc_feature 1..3279: note = Description of Artificial Sequence: Synthetic coding sequence
  source 1..3279: mol_type = other DNA
ttttgtgcttacagtgctaagatctattataaagtcatcaaagatattgaacctggcgaagagctgctggtccacgtgaaagagggcgtttatcccctggggactgtcccgccaggcttggatgaagagccgaccttcaggtgcgacgagtgcgacgaactgttccaatctaaacttgatttgcgtcgccacaagaaatatacgtgcggaagcgtgggagcagcactctacgaagggctcgcggaggaacttaaaccggagggccttggaggcggaagcggacaggcccatgagtgtaaggattgcgagagaatgttccccaacaagtactcgctcgaacagcacatggtgatacacacagaggaacgcgagtataaatgcgaccagtgtccaaaggcctttaactggaaatccaatctgattcggcatcagatgagtcacgatagtgggaagcggtttgaatgcgagaattgtgtaaaagtattcaccgatccttcaaacctccagcggcacataaggtctcagcatgtcggagctcgggctcacgcgtgtccagattgtggtaagacattcgcaacaagtagtggtttgaaacaacataaacatatccactccacggttaagccattcatctgcgaggtctgccataagtcttatacacagttcagcaacctgtgccggcataagcggatgcacgcagactgtcgcacccaaattaagtgcaaggactgtggccaaatgtttagtacgacatctagtctgaacaaacacaggaggttctgtgagggaaagaatcactatactccgggaggaattttcgcaccgggactgccactgacgccctcccctatgatggacaaggccaaacccagtccatccctgaaccacgcctctctgggatttaacgaatactttccttcccgcccacacccgggttctcttccatttagcactgccccacccacttttccagccctcacgccagggttccccggcatatttccaccctccctctacccaagaccccctctcctgcccccaacctcacttctgaagagccctctcaatcacacccaggacgcgaaactcccgtcccctctgggaaatcctgcactccccctggtcagtgcagtgtctaactcctcccaaggcacaactgccgccgctggccccgaagaaaagttcgaatccaggctcgaggactcatgtgtggagaagcttaaaacaagaagcagcgatatgagcgacggcagtgacttcgaagatgtcaatacaacgacaggcacagatcttgacacaaccaccggtacaggctcggacttagatagcgatgtcgactcagaccctgacaaggacaagggcaagggaaaaagcgccgaagggcagcccaagttcgggggtggtctggcgcctcctggagccccaaattccgtggcggaggtccctgtgttttacagccagcattcttttttccctccgccagacgaacaacttctgaccgctaccggcgccgcaggtgatagcattaaggctatcgccagcatagccgagaaatactttggccccggattcatggggatgcaggagaagaaactgggctctctgccctatcattcagctttccctttccagttccttcccaacttcccacactctctctatccttttacggatagggccctcgcccataacctgctggtgaaagccgagccgaagtcacctcgcgacgcactcaaggtcggtgggccttcagccgaatgcccattcgacttgaccacaaaaccaaaagatgtgaaaccaattctgcccatgccaaaggggcctagtgcacccgcatccggggaggaacaacctctcgacctatccattgggtcacgcgcgcgcgcatcccagaatggggggggacgcgagccacggaaaaaccatgtgtatggcgaacgcaagctcggcgcgggagaaggcctgccccaggtgtgtccagcaagaatgcctcagcagccaccactgcactatgccaaacccagtcctttttttatggaccccatttacagtcgagtggagaaacggaaggttacagatcccgtgggcgcactgaaggagaaatatttgcgtcccagtccactgctgtttcacccacagatgtctgcaattgagacgatgactgaaaaactggagtcttttgccgctatgaaggccgatagcgggagctctctgcagccattaccacaccacccttttaactttcgctctccgccccctaccctcagcgaccccatcctgaggaaaggtaaagagcggtacacctgcaggtactgtggtaaaatctttcctcggtccgctaacctcaccagacatctacgtacccacaccggcgaacaaccataccggtgtaagtactgtgaccgcagtttttctattagctccaacctgcagcgccacgtccgaaatatccacaacaaagaaaagccctttaaatgccacttatgcaataggtgcttcggacagcaaacaaatctggataggcacctgaagaaacacgaacatgaaaacgcgcctgtcagccaacaccctggggtgcttacaaatcatctgggaacatctgcaagttcccctacgagcgaatcagacaaccacgcattactggacgaaaaagaagactcttatttctccgagattcggaatttcatagccaattccgagatgaaccaggcctctactcgtacagaaaagagagcagacatgcagatcgtggacggctccgcccagtgtcctggtctagcctcggagaaacaggaagatgttgaggaagaggacgatgacgacctggaagaagatgatgaagactcgttggcaggaaaatcgcaggatgatactgtgtcccccgcccctgaacctcaggctgcgtacgaggacgaagaggatgaagagccagctgcttccttggccgtgggattcgatcacacacgacggtgcgcggaagaccacgaaggagggcttttagcactcgaaccaatgcccactttcggtaaaggtctggatttacgaagggctgcggaggaagctttcgaggtcaaggacgtgctgaacagtacgctggactccgaagcactcaagcatactctctgccgtcaagcaaaaaaccaggcatatgccatgatgttgtcactttccgaggatactcctctgcacactccttcacagggcagcctcgacgcttggctcaaggtgactggggccacttccgagtctggggcattccatcccattaaccacctgtag

SEQ ID NO: 129661 - DNA, 3828 bp, synthetic construct
  misc_feature 1..3828: note = Description of Artificial Sequence: Synthetic coding sequence
  source 1..3828: mol_type = other DNA
atgcggtctaaagcccgtgcaaggaaactggcaaagagtgacggcgatgtcgtcaataacatgtatgaaccaaatcgtgacttacttgcttcgcactcagcggaggacgaagccgaggactctgccatgtccccaatcccagttggtcctccgtcgccgttccctacttcagaggacttcaccccgaaggagggaagcccctacgaagcgcctgtatacatccctgaagacataccaattcctgccgactttgaactgcgagagagtagcatcccaggagcaggcttaggagtttgggccaagcgtaaaatggaagcaggcgagcggttggggccctgcgtcgtggtgcccagggctgccgcgaaggaaacggatttcggttgggaacaaatattaacagatgtggaagtgagtccccaggaggggtgcatcacgaagatcagtgaggacctcggctccgagaagttctgtgtggacgccaatcaggccggcgctggatcgtggctcaaatacattagagtggcctgttcctgcgatgaccagaatctcacgatgtgccagatctccgaacagatctactataaggtgataaaggatattgagccaggggaggagctgctggttcacgtcaaggaaggagtgtacccactgggcaccgtaccaccaggcctcgatgaagagccaaccttccgctgtgacgagtgtgatgaattgttccagtccaagctggatctacggcgacacaaaaaatacacttgcggaagcgttggagccgctctgtatgaggggcttgccgaagagttgaaacctgagggactggggggggggtcaggacaggctcatgaatgcaaggattgcgaacgcatgttccctaataaatatagtctggaacagcatatggtgatccacaccgaagagagagagtacaagtgtgaccaatgtcccaaagcttttaactggaagtccaacctgataagacatcagatgagccacgattccgggaaacgcttcgagtgtgagaattgtgtgaaggtgttcaccgatccatctaaccttcagaggcatatacggtcccagcacgtaggtgctagagcccatgcctgtcctgactgcggcaagaccttcgccacatcctccggcctgaagcagcataaacacatacactctacggttaagccatttatctgcgaagtatgccataaatcctacacacagttttcaaatttatgtagacataaaagaatgcacgccgattgtcgtacccagatcaaatgcaaggattgtggacagatgttctccactacatcttcacttaataagcaccgtcgcttctgcgaaggaaaaaaccactatacgcctggcggaattttcgccccaggtctccctctcaccccgagcccaatgatggacaaagcaaaaccaagtccctcactgaatcacgcctctttggggttcaatgagtacttcccctcacgaccccaccccgggtccctcccattctccacagccccaccaacgtttccagcactgacccccggattccctggcatcttccctcctagtttgtatcctaggcctccccttttacctcccacctccctgctcaagtcgcctctgaatcatacacaagacgctaaactccctagcccactgggcaacccagctctgcctctcgtttccgccgttagcaattcctcccagggcacaacagccgcagccggaccagaggaaaagttcgaatccaggctggaggatagctgcgtggagaagctcaaaactcgctcttcagacatgagcgacgggtcagacttcgaggacgtcaatactaccacagggactgacctcgataccactacaggaaccggatctgatttagacagtgatgtagactccgaccccgacaaggacaagggcaagggcaaaagcgccgaaggccagcctaaattcgggggcgggctggcccccccaggcgctccaaactccgtagccgaagtgcccgtcttttattctcagcactccttcttccccccacctgatgaacagctgctgactgcaactggcgccgctggtgacagcattaaggctatcgcatcgattgctgaaaagtatttcggacccggatttatgggtatgcaggaaaaaaaactgggctccttgccctatcattccgcttttccctttcagttcctgccaaactttccgcacagtctgtaccccttcaccgatcgagcgctagcgcacaacctgctggtcaaggctgagcctaagtctccacgggacgcactgaaggtgggcggcccctccgcagagtgccctttcgacttaaccactaagcccaaagatgtgaagcctattttgccaatgccaaaggggccctcagctcccgcttctggcgaagaacagcctttggatctctccatcgggtcccgggcccgcgccagccagaatgggggcggaagggagccacgaaagaatcacgtgtacggtgaaaggaagttgggggcaggcgaaggattacctcaagtgtgcccagctcggatgccacagcaaccccctctacactatgcaaagccgtcccccttctttatggatcccatatatcgagtagagaaaagaaaggtgactgatccagtcggcgccttgaaggaaaagtacctccgcccatcacctttattgtttcatccacagatgagcgctatagaaacgatgacagagaaattagaatcttttgcggccatgaaggccgattctggtagttccctgcagcccctgccccatcacccatttaattttcgatctcctccccctaccctgagcgaccctatactaaggaaggggaaggaacggtatacttgtcgatattgcggcaaaatctttcctagaagtgctaatttaacacggcatttgaggacacacaccggtgagcagccctatcgatgtaagtactgcgaccgctcgttttccatctcctctaacctacaacggcacgtccgcaacattcacaacaaggagaagccgtttaagtgccatctatgcaaccgatgtttcggtcaacagaccaacctggaccgtcacctcaagaaacatgaacacgagaatgccccagtgagtcaacatccaggcgtattgaccaaccaccttgggacatctgcctcttccccaacgtccgagagtgacaatcacgccttgctggatgaaaaagaggactcatacttctcagagatacgcaatttcatagctaacagcgagatgaatcaggcctcaacacggactgagaaaagagccgacatgcaaattgttgatggcagcgcccaatgccctggtttggctagcgagaagcaggaggacgttgaggaagaagatgacgacgacctcgaggaggacgacgaggattccctagcaggaaagagtcaggatgacacagtgtcacccgctcccgaacctcaagcggcctacgaagacgaggaagatgaagagcctgccgcaagcctggcggtaggctttgatcatacccgacggtgtgccgaggaccatgagggcggattgctggcactcgagccgatgcccacatttggcaagggtctcgacctccgccgagcggccgaggaagctttcgaagtgaaagacgttttgaacagtaccttggactctgaggctctgaagcacaccctgtgtagacaagccaagaaccaggcctatgctatgatgctctctttaagcgaagataccccactgcatactccttcccaaggatcattggatgcctggctgaaagtgaccggcgccacgagcgagtcaggcgctttccatccaataaaccatctgtag

SEQ ID NO: 129662 - DNA, 3771 bp, synthetic construct
  misc_feature 1..3771: note = Description of Artificial Sequence: Synthetic coding sequence
  source 1..3771: mol_type = other DNA
atgagatctaaggccagagctaggaaactggcgaagtctgacggtgacgtggtgaataacatgtacgagccaaatcgcgatctactggcttcacacagtgccgaagatgaagcagaggactccgccatgagccccattccagtcggtccaccttccccgtttcccacatctgaagacttcactcctaaggagggaagtccgtatgaggcacctgtatatattccagaggatatcccaattccggcagattttgagttacgagaaagctcgatcccaggggcaggactgggcgtctgggcaaagagaaaaatggaagcaggagagaggctcggaccctgtgtcgttgtaccacgcgctgcagcgaaagagactgactttgggtgggaacaaatattgactgatgtggaagttagtcctcaagaggggtgcatcacgaagatttctgaggatcttggctccgaaaagttttgcgtggacgctaatcaagccggcgccggcagctggttgaagtacattagggtggcctgtagttgcgatgaccagaatctgactatgtgtcagatatctgagcaaatatattacaaggttatcaaggacatcgagcccggcgaggagctgttagtgcatgtgaaagagggcgtatacccactgggaactgtcccccccggcctcgacgaagaacctacctttaggtgcgatgagtgtgacgaactcttccagtcaaaactggatttgcggcggcacaaaaagtacacgtgcggatcagttggagccgccctctacgagggactggcagaggaacttaaacctgagggtctggggggcggatcagggcaggcccacgagtgtaaagattgtgaacgtatgtttcccaacaagtattcactcgaacagcatatggtcatccacaccgaagagcgggaatacaagtgtgaccagtgtccaaaagccttcaactggaagagtaatctcattcggcaccaaatgagccacgattccggcaaacggtttgaatgcgagaactgtgtgaaagtgtttaccgacccctcaaatctgcagcgccacattcgttcacaacatgtgggagccagggcacacgcatgtcccgactgtggtaaaactttcgcaacatctagcgggttgaaacaacacaagcacattcacagtacagtgaaaccatttatatgtgaggtgtgccacaagtcttacactcaattttctaatttatgtcgccataaacgtatgcatgcagattgcaggactcagattaagtgcaaggactgtgggcagatgtttagtactactagttccttgaataagcatcgaagattctgcgaagggaagaatcactatacgcccggtgggatcttcgcacctggccttcctcttactccctcccccatgatggacaaagcaaagccttccccaagcttgaaccacgcatctctcggatttaatgagtacttcccgtctaggccccatccagggtccctgcccttctccactgccccacccactttccccgcccttacccccggcttccccgggattttcccaccgagcctgtatcctcgaccgcccctgctgccccctaccagcctgctgaagagccccctgaaccatacccaggatgcgaagctgccttcaccactcggcaaccctgccctaccactagtttctgcggtgagtaattcttcacagggcacaactgctgctgctgggcctgaggaaaagttcgagtcaagattggaagatagctgcgtggaaaaactgaaaacccggtcgagcgatatgagcgatgggtctgattttgaggatgtgaatactacaaccggtaccgacctggataccaccacaggaacaggatctgatctggattccgatgttgattctgatccggataaggataaaggtaaaggtaaatccgctgagggacagccaaagtttgggggcggactggcgcctcccggcgcccctaacagcgtggctgaagttccagtgttctattcgcagcattcattctttccccctccagacgagcagctgcttacagctaccggggctgccggggattcgattaaagccattgcatctatagcggagaaatactttggccccggttttatgggaatgcaggagaagaaactcggctctctgccctaccacagcgcgttcccatttcagttccttccaaattttcctcacagcctgtatccgtttaccgaccgcgcactggctcacaacctgctcgtaaaggctgagcctaaatcccctcgtgacgcccttaaagtcggtggcccttctgctgagtgccctttcgatttaacaactaagcccaaagacgtgaagccaatcctcccgatgcctaaaggtccctctgccccggccagtggcgaggaacagcccctggacctatctattgggtcaagggccagagcctcacagaatgggggaggtcgcgagcctcgaaaaaaccacgtttatggcgagagaaaattgggggccggcgagggcctcccacaggtgtgccccgctaggatgccccagcagcctccattgcattatgccaaaccatccccttttttcatggatcccatctatcgcgtggaaaaaagaaaagtgactgatccagtgggtgctcttaaagaaaaatacctcagaccctcacccttactgttccatcctcaaatgagtgcaatcgagaccatgacagaaaagttggaaagctttgccgctatgaaggcagactccggatcaagtttacagcctttgcctcatcaccctttcaactttcggagcccccccccaacattgagcgatccaatactaagaaagggcaaggagaggtacacctgcaggtactgcggaaagatttttcccaggtctgctaatctgactcgtcatctaagaacacacactggagagcagccctatcggtgtaagtactgtgacaggtccttttccatttcgagcaatctgcagaggcatgtgcgcaatatccataataaagaaaagccatttaagtgtcacctttgtaacagatgcttcggacagcagaccaacctagaccgacatttaaaaaaacatgaacatgaaaacgcccctgtctctcaacatcctggagtactgactaatcacctcggaacatccgcaagcagcccaactagcgagtctgataatcatgcattactggacgagaaggaggattcatacttctctgaaattcggaattttatagctaacagcgaaatgaaccaagcaagcaccaggaccgaaaaacgcgcggatatgcagatcgttgatggcagtgcacagtgtcccggactcgcaagtgagaaacaggaggacgtggaggaagaagacgacgatgatctcgaagaggatgacgaagacagcctcgcagggaaatctcaagatgacaccgtgtctcctgcccctgagcctcaggctgcatacgaggacgaggaagatgaagagcccgcggcatccttagccgtaggctttgaccacaccagacgttgcgcagaggatcacgaaggtggattactggccctggagccaatgcccacgtttgggaaaggcctggacctgcggagagctgctgaagaggcttttgaggtgaaggacgtgctgaacagcactctcgattcggaagccctgaaacatacactatgtcggcaggccaaaaaccagggctccctggatgcttggctgaaggtgacaggtgccacatctgaatcaggtgccttccaccctattaatcacttatag

SEQ ID NO: 129663 - DNA, 3255 bp, synthetic construct
  misc_feature 1..3255: note = Description of Artificial Sequence: Synthetic coding sequence
  source 1..3255: mol_type = other DNA
atctactacaaggtcatcaaggatatagagcctggagaagaattgctggtacatgtgaaggagggtgtgtaccctctgggcaccgttcccccagggttagacgaagagcccacattccgatgcgatgagtgcgatgaattattccagtccaaacttgacctacgaaggcacaaaaagtatacatgtggaagtgtcggcgctgcgttgtacgagggactcgctgaggaattaaagcctgaggggctggggggcggctcagggcaagcacatgagtgtaaggattgcgaaagaatgtttccaaataaatattctctcgagcagcacatggttatccacaccgaagaacgggagtacaagtgcgatcagtgtcccaaagcgtttaattggaagagcaaccttattcgtcaccaaatgtcccacgatagtgggaagaggtttgagtgtgagaactgcgtgaaagtattcacggatccatcaaatttgcagcgacacatccggagccagcatgtaggcgccagagctcatgcctgcccagactgcggcaaaaccttcgcgacttcgagtggcttaaaacagcacaagcacatacactccaccgttaagccgtttatttgcgaggtctgccataaaagctacactcagttttccaatttgtgtcggcacaagagaatgcatgctgactgccgcacccagattaaatgtaaagactgcggtcagatgttcagcacgacaagcagcctgaataaacaccgacgtttctgcgagggcaagaaccattacactcccggaggtatatttgcccccggtcttcccctaacacccagcccaatgatggacaaagcaaagccttctcctagcctcaatcacgcctccctgggattcaatgaatatttcccttccaggccccacccaggctctctgccctttagcactgccccaccaactttccctgccttgactccgggctttccaggcatcttcccccctagcctgtaccctaggccacctttactgccacctacctcactccttaagtcccctctgaaccacacacaggatgcaaagcttcctagtcctctcggtaatccggcgctgcctctcgtatccgctgtctccaactccagtcaggggactacagccgcagctgggcctgaggaaaaattcgagtctcgccttgaagacagctgtgttgagaagctgaaaacgagaagttccgatatgagtgatggatcagatttcgaagatgtgaatacgaccaccggaaccgaccttgacactacaactggcaccggatctgacctggacagtgacgtagattctgacccggataaggacaaaggcaagggaaaatctgcagagggacagccaaagtttgggggagggctggcaccccccggcgccccaaactcagttgcagaggtgccagtgttctacagccaacactcattttttccaccgccggatgaacagcttctgaccgccactggggccgctggcgactccataaaagccatagcaagcattgccgagaaatattttggccctggcttcatgggcatgcaagaaaagaagctcggctctctgccctatcactccgccttcccattccaatttctgcccaattttccacacagtctgtatcccttcacagatagagccctggcgcacaacctgctggtgaaggctgagccaaaatccccgcgagacgccctgaaggtgggcggcccaagcgccgaatgccccttcgacctgacaacgaagcctaaagacgttaagccaatcctcccaatgccaaagggaccctcggcgcccgccagcggcgaggagcagcctctggacctgagtattggctcacgggcaagagcgagtcagaacggagggggtcgcgagcctaggaagaaccacgtgtatggcgaaagaaagttgggagctggagaaggtctcccccaagtttgcccagctcggatgcctcaacaaccccccttacactacgcaaagccctctcccttctttatggacccaatctatagagttgagaaaagaaaggtgactgacccagtcggcgcgctgaaagagaaatacctcaggccctcccccctcttgtttcatccccagatgtccgctatcgagaccatgaccgaaaagctggaaagtttcgctgccatgaaagccgacagcggctcttccttacaacctttacctcatcacccctttaatttcaggtcacctccccccaccttgtccgacccaattctgagaaaaggcaaggagcggtatacgtgccgctattgtggaaagatcttccctcgcagcgccaacctcacacgccaccttcggacacatactggagagcagccctatcgatgtaagtattgtgatcgctcctttagcatctccagtaaccttcagcgccacgtgcgcaatatccacaataaagaaaagccattcaagtgtcacctctgtaataggtgctttggacagcaaactaacctcgataggcacctgaaaaagcacgaacacgagaacgcaccagtctctcagcatcctggcgtattgaccaaccacctcgggaccagcgcatccagtcccactagcgaaagcgataaccatgctttgctggacgagaaggaggactcttatttctcagagatacggaacttcatcgcaaattcagagatgaaccaggcgagtacacggacggaaaaacgggcagatatgcagatagtagacggttctgcacaatgccccggcctggcaagcgagaagcaagaggatgtcgaggaagaagacgatgatgatttagaggaagatgatgaggactctctcgctggtaaatctcaggatgatactgtctccccagccccagaaccccaggccgcatacgaagatgaagaagacgaggagccggccgcctccctggccgttggatttgaccacacacgacggtgtgctgaggaccacgaaggcggactacttgcacttgagcccatgcccacatttggaaaagggctggacttaagacgagcagctgaggaggcgtttgaggttaaggacgtactgaatagcaccctggattctgaagccttgaaacacactctttgtagacaggcaaaaaaccaagcctacgctatgatgttgagcctcagcgaagacacgcccctgcacaccccgagccagggatcactggacgcctggctgaaggttaccggcgccacctctgagtccggcgccttccaccccatcaaccacctgtag

SEQ ID NO: 129664 - DNA, 3774 bp, synthetic construct
  misc_feature 1..3774: note = Description of Artificial Sequence: Synthetic coding sequence
  source 1..3774: mol_type = other DNA
atgcggtcaaaagcaagggcccggaagttggctaaatccgacggagatgtcgtgaacaacatgtacgaacctaatcgggatctgcttgcctcacacagcgccgaggatgaagcagaggattccgccatgtcacctatccctgtcggtccaccaagccccttccccacaagcgaagattttactccaaaagaggggtccccatatgaggcccctgtctacatacccgaggacatcccaattccagccgatttcgaactgcgcgaaagctcaatccctggagctggactcggagtgtgggctaaaaggaaaatggaggcaggtgagcggcttggcccctgcgtggtggtgccaagagcagctgcaaaggagactgacttcgggtgggagcagattctaaccgacgtggaggtctcaccacaggaaggatgcattaccaagatatctgaagatctgggcagcgaaaaattttgcgtcgacgccaatcaggccggagcagggagctggcttaagtatatcagagtggcttgttcctgtgatgaccagaatctgaccatgtgtcaaatcagcgaacagatctattataaggtgataaaggatatagaacctggtgaagaacttttggtgcacgtaaaggaaggtgtgtatccactgggaacagttccgcctggcctggacgaggaaccaactttccgctgtgacgagtgcgatgaactgttccagtctaaactcgatttaaggaggcacaagaaatacacatgcggatcagtgggggctgcactgtacgagggcctagccgaggagctgaagccagaaggcctcgggggcggatccggtcaagcacatgaatgtaaagattgcgagagaatgtttcccaataagtatagtttggaacagcacatggtcatccataccgaggaaagggagtacaagtgtgatcagtgccccaaggcgttcaactggaaatcaaatctgattagacaccagatgtcccacgatagcggcaagcgtttcgaatgcgaaaactgcgtgaaggtgtttaccgaccctagtaacctccaacgacacatacgctcccaacatgtgggggctcgagcccacgcctgcccggattgcggcaagacattcgccaccagttcaggactcaagcaacataagcacatccattccaccgtgaagcccttcatctgcgaggtgtgccataagtcttatacccagttctccaacctctgtcgacataagcggatgcatgccgactgcaggacacaaattaagtgcaaggattgtggtcagatgtttagtaccacatctagcctgaacaagcaccggcgtttttgcgaaggcaagaaccactatacgcccggaggcatttttgcccccggcctcccactcacgccaagtccaatgatggataaggcaaaaccttccccaagtctcaatcatgcatccctcgggttcaatgagtacttcccatcccgaccacaccccggcagtctgcctttttccaccgcccccccgacctttccagccctcacccccggtttcccaggtatatttccaccatctctatatcctagacctccactgttgccccccacctctttgctgaagagtccactgaaccacactcaggacgcaaaactgccaagcccactgggaaatcctgccctgccactggtctctgccgtgtcgaatagttctcaagggactacggcagccgccgggcccgaagaaaaatttgaaagtcgcctggaggattcctgcgtggaaaaactcaaaactagaagctcggatatgtctgacgggtccgacttcgaagatgtgaacaccaccacaggaacagatctagataccaccactggtaccggctctgatttggactctgacgtagatagcgaccctgataaagataagggaaagggcaagagtgccgaggggcagcccaagttcggaggtggcctggccccaccaggagcccctaacagcgtagccgaggttcctgtgttctacagtcagcatagctttttcccacctcctgatgagcaactcttgactgccacaggtgccgctggcgacagtatcaaggccattgcctccattgccgagaaatattttggaccaggttttatgggaatgcaggagaagaagctgggctcgttgccttaccacagtgcattcccctttcagtttttgcccaatttcccacatagcctgtatccgttcacggatagagctctggctcacaatcttttagtcaaggcagagccaaaaagtccccgggatgctttgaaggtcggtggcccaagcgcggagtgtccatttgacctcaccaccaagcccaaagatgtgaagcctattttacctatgcccaaggggcccagcgcccccgctagcggcgaggaacagcctttagacctgagtatcgggagcagagctagagcttctcagaatggcggaggccgggagccaaggaaaaaccatgtctatggcgaacggaaactgggcgctggtgaaggactacctcaagtgtgtcctgcccgaatgcctcagcaacctccactccactatgcaaaaccctctcccttcttcatggaccccatatatagtcgcgttgagaaaaggaaggtaaccgatcccgtgggagccctgaaagagaagtatctgcgcccatctcctctgcttttccatcctcagatgagtgctattgagacaatgaccgagaaattggaatcattcgctgccatgaaggccgatagcgggtcaagtctgcagcccttaccccaccacccgttcaattttaggagtccccctcccacgctgagcgatcctatcttgaggaagggtaaagaacggtatacctgtaggtattgcgggaagatctttcccagatccgccaacctaacacggcacctgaggacccatacaggcgagcagccttatagatgtaagtactgtgaccggtccttcagtatttccagtaacttgcagcggcacgtccggaatattcataacaaggagaagccatttaagtgtcacctgtgcaacaggtgtttcgggcagcagaccaacctggaccgacatctcaagaagcacgagcacgagaacgcacccgtatcccaacatcccggcgttctgacaaatcatctcggcactagcgcatcttctcctacaagtgagtcggacaatcacgctctgcttgatgagaaggaagattcctatttctcagagatcaggaacttcattgctaactccgagatgaatcaagcctcaacccgaacagaaaaaagggctgacatgcagatcgtggatggctccgcccaatgtccaggattagcgtcagaaaagcaggaggacgtggaagaggaggacgacgacgatttggaagaggatgacgaggacagcttggctggaaaatcccaagacgacaccgtcagccctgcccccgaaccacaggctgcatatgaggacgaggaggacgaggagccagcggcatccctcgcagtgggctttgatcatacccgacggtgtgctgaggatcacgaaggcggcctgctggctcttgaacccatgccaacgtttgggaagggtcttgacctgcggcgcgcagccgaagaggcctttgaagtcaaggatgtcttaaacagcactctggatagcgaggccctgaaacacacattgtgtcgccaggccaaaaatcaggggtcccttgatgcatggctaaaagtgacaggcgcaacaagtgagagcggtgccttccatcctatcaatcacctgtag

SEQ ID NO: 129665 - DNA, 600 bp, synthetic construct
  misc_feature 1..600: note = Description of Artificial Sequence: Synthetic coding sequence
  source 1..600: mol_type = other DNA
atgagcagtgagaattgtttcgtcgccgagaactcaagcctgcaccccgagagcggacaggaaaatgatgctacctcaccccacttctctacccgccatgagggtagttttcaggtccctgtgctgtgcgcagttatgaatgtcgtgttcatcacgatcctgattatcgccctaatagctctaagtgttggccaatacaactgcccaggccagtatacattctctatgccttctgactcacacgtgagcagctgctcagaagattgggtgggctaccaaaggaagtgctacttcataagtactgtgaagcggagttggacaagtgcgcagaatgcatgctccgaacatggcgcaacactcgctgttattgactcagaaaaagatatgaactttctcaaaagatacgccgggcgtgaagaacactgggtcgggctcaagaaagaaccggggcatccatggaaatggagtaatggtaaggagttcaataattggttcaacgtgactgggtcagataaatgcgtgttccttaagaacacggaggtcagttcaatggaatgcgaaaagaatctctattggatttgcaacaagccttataagtag

SEQ ID NO: 129666 - DNA, 228 bp, synthetic construct
  misc_feature 1..228: note = Description of Artificial Sequence: Synthetic coding sequence
  source 1..228: mol_type = other DNA
atgcaccaccggatgaatgaaatgaatcttagtcccgtgggaatggaacaattaacaagcagcagtgtctcaaacgcattgcccgttagcggctcacacttaggcctggccgctagccccacgcatagcgccattcccgctcccggcttgcccgtcgccatccccaatctgggccccagcctgagcagtctgccctctgccctctcgctgatgctcccgatgggatag

SEQ ID NO: 129667 - DNA, 1893 bp, synthetic construct
  misc_feature 1..1893: note = Description of Artificial Sequence: Synthetic coding sequence
  source 1..1893: mol_type = other DNA
atgctggggatgtatgtgcctgaccggttctcactgaagtcctcacgcgtccaagatggaatgggcctttacacagcccgcagggtgaggaagggagaaaagtttggccctttcgccggcgaaaaacgaatgccagaggacttggacgagaacatggactatagactcatgtgggaagtccggggctccaaaggcgaggtactgtatatcctggacgctaccaatcctcggcactcaaactggctccgctttgtacatgaggccccatcgcaggagcagaagaacttggcagcaattcaggaaggagagaatatcttctacctcgctgtggaggacattgaaactgacacagagctgctcatcggctatcttgattccgatatggaggccgaagaggaagaacagcaaatcatgactgtcatcaaggagggcgaggtggaaaattcccgccggcagtctacagctggtagaaaagaccgcttggggtgtaaggaggattatgcatgccctcaatgtgagtcatcttttactagcgaagatatcttggcagaacatctccagactctgcatcaaaagccaactgaggagaaggaattcaaatgcaaaaactgtggcaaaaagttcccggtcaagcaggccttacagagacacgtgctccagtgtactgcaaagtcatcattgaaggagagttctcgcagtttccagtgtagtgtctgcaactcttcttttagcagcgcatcgagctttgaacaacaccaggagacatgcaggggggacgccagatttgtgtgtaaagccgatagttgtggaaaaagactcaaatccaaagacgcgctgaaacgccatcaagagaatgttcatactggtgaccccaaaaagaaacttatatgtagtgtttgtaataagaagtgctctagtgcgtcctctctgcaggagcaccggaagatacacgaaatcttcgactgccaagagtgcatgaagaaattcatttctgctaaccagctcaaacggcatatgatcactcattcagaaaagagaccctacaactgcgagatatgtaataagtcttttaaaaggctcgatcaggtgggagcccataaagtaatccattccgaggacaagccatataaatgcaaactgtgcggcaaaggttttgcccataggaacgtgtacaagaaccataaaaaaacccatagcgaagaacgaccttttcagtgcgaggaatgcaaagctctgttccggacgcccttctccctgcagcggcacctactgatccacaatagcgagcgcaccttcaagtgtcatcactgtgacgccacttttaaaaggaaagatactctgaatgttcacgtgcaggtagttcacgaacggcacaaaaagtaccgctgtgagttatgtaataaggcctttgtcaccccgagcgtgttgcgcagtcataagaagacacacacaggggaaaaggaaaagatctgtccttattgtggacagaagttcgccagcagcggaaccctccgggtgcacattaggtcccacactggcgaacggccctatcagtgcccatattgtgagaagggattctcaaaaaacgacggattgaaaatgcacatacggacccacacgcgagagaaaccctacaagtgcagcgaatgcagtaaagcattttctcagaagcgaggtctggacgaacataaacgaacgcatacaggtgagaaacccttccagtgtgacgtgtgtgatctagccttttccctcaagaagatgctgatccgacacaagatgacccacaaccccaaccgcccacttgctgagtgccagttctgccacaaaaagtttactcggaacgattatctcaaagttcacatggataacattcatggggtagccgattcttag

SEQ ID NO: 129668 - DNA, 336 bp, synthetic construct
  misc_feature 1..336: note = Description of Artificial Sequence: Synthetic coding sequence
  source 1..336: mol_type = other DNA
atgttaggcatgtatgtgcccgacaggttttctttgaaaagctcacgggttcaggacggcatgggactctacacagcacgtagggttcggaagggcgaaaaattcgggccatttgcaggagaaaagcgcatgcctgaggatctcgacgagaacatggactaccgtctcatgtgggaagttcgtggcagtaagggcgaggtcctgtatatcctggacgctaccaatccgcggcatagcaactggctgcggtttgtgcacgaggcccccagccaagagcagaaaaacctggcggcaatccaggacaaaaatctcggccccgcagagtggaggggatag

SEQ ID NO: 129669 - DNA, 1800 bp, synthetic construct
  misc_feature 1..1800: note = Description of Artificial Sequence: Synthetic coding sequence
  source 1..1800: mol_type = other DNA
atgttgggcatgtatgtgcctgacagattctccctcaaatcatctagggtgcaggacggcatgggcttgtacaccgcgaggcgtgttagaaagggtgagaaatttggccctttcgccggtgagaagagaatgccagaagatctggacgagaacatggattacagacttatgtgggaagtacggggctccaagggtgaggtgctttatattctggacgccaccaaccctcgccactccaattggctgcgatttgttcatgaggcccccagccaggagcagaagaatctggccgccatccaggaaggggagaacattttctatttggctgtcgaagacatcgaaaccgatacggagttgctaatcgggtatttagactccgacatggaggccgaggaggaagaacagcagataatgacagtaatcaaagaaggagaggtggagaactctcgaaggcagtctacggccggtaggaaggataggctcggctgtaaggaagattatgcgtgtccccagtgtgagtcttctttcacctcagaggatatactcgctgagcacctccagactctacatcagaaacctaccgaggagaaagaatttaagtgcaagaactgcggaaagaaattcccagtgaagcaggccttacagaggcacttcgaacagcaccaggagacatgtcggggggacgctaggttcgtgtgtaaagccgattcctgcgggaagcggctcaagagcaaggacgcgctgaagaggcaccaggaaaatgtgcacacaggagaccctaagaaaaagctcatttgttcggtgtgcaacaaaaaatgcagcagcgcatcatcacttcaggaacataggaaaatacatgagatttttgactgccaggagtgcatgaaaaagtttatttccgccaatcagctgaaaagacacatgatcacgcactccgaaaaacggccctataattgtgagatttgcaacaagtcctttaagcgccttgatcaagtgggcgcccacaaagtgattcactccgaggataagccatataagtgtaagctctgcgggaagggtttcgcacatagaaacgtctacaagaatcacaaaaagactcactccgaagagaggcctttccagtgcgaggaatgcaaagccctgtttaggacccccttctctctacagaggcaccttctgattcacaacagcgagaggacattcaagtgccatcactgtgacgccacattcaagaggaaggacaccctgaacgtgcacgtacaggtggtgcacgaacgccacaaaaagtaccggtgcgaactgtgtaataaagcttttgtcacgccatccgtgttgaggagccacaaaaaaactcacacgggggaaaaggaaaagatttgtccctactgtggtcagaaatttgccagctcaggcacattgcgagtacacatcagaagccacactggggaacggccttatcagtgcccttactgtgaaaagggcttcagtaagaatgacggcctgaagatgcacattcggactcacacgcgggagaaaccgtacaagtgctcagagtgttctaaagcttttagccagaaaaggggactcgacgaacataagaggacccatacaggagagaagccatttcagtgcgacgtctgcgatttggcgttctccttgaagaaaatgctcatacgtcataaaatgacgcacaatcctaataggcccctggctgagtgccaattctgccacaaaaagttcacccgcaacgattacttgaaggtccacatggacaacatccacggcgtggccgactcctag

SEQ ID NO: 129670 - DNA, 1506 bp, synthetic construct
  misc_feature 1..1506: note = Description of Artificial Sequence: Synthetic coding sequence
  source 1..1506: mol_type = other DNA
atgctcggcatgtacgtgcccgaccgattctccctgaagtcaagtcgagttcaagacggcatggggctgtatactgctcggcgcgtcagaaaaggtgagaagttcggcccattcgccggcgaaaaacggatgccagaggacttggacgagaatatggactataggcttatgtgggaggtgcgtggctccaagggtgaggtgctgtacattctggatgccacaaacccccgccatagcaactggctgcgttttgttcacgaagctcccagtcaggagcagaaaaatctcgccgcaatccaagaaggggagaacatcttttacctcgcagtggaggatatcgaaacagacaccgagctgctcattggatatctggattctgatatggaagcagaagaggaggagcaacagatcatgacggtcataaaggaaggagaggtcgaaaactcaaggaggcagagtaccgctgggcgcaaggaccggcttggatgcaaggaggattatgcctgcccccagtgtgaaagttcttttacttccgaagacatccttgcagagcacctccagacacttcaccaaaaacccacagaagaaaaagagtttaagtgtaaaaactgcggcaagaaatttccagtgaaacaggccctacagcgacacttcgagcagcaccaggagacctgccgcggcgacgccagattcgtgtgtaaagctgactcctgtggaaagcgattaaaatccaaggacgccctcaagaggcatcaagagaatgtgcacactggagatcccaaaaaaaagctgatttgctctgtatgcaacaagaagtgcagctccgcaagtagcttgcaggagcacaggaaaattcacgagatctttgattgccaggaatgcatgaagaagtttattagcgctaaccaactaaagcggcacatgattactcatagcgaaaaaaggccctataactgtgagatttgtaacaagtcattcaagcgactcgaccaggtgggcgctcacaaggtgatccattctgaggacaaaccgtataagtgcaaactgtgcgggaaggggttcgcacaccgaaatgtgtacaaaaaccataagaagactcacagcgaggagcgccctttccagtgcgaggagtgcaaagctttattcaggacccctttctccctgcaacgacatcttttgatacacaatagtgaaagaacatttaaatgccaccattgtgacgccacattcaagcgcaaagacaccctcaacgtccatgtgcaggttgtccatgaaaggcacaagaaataccgctgtgagctctgcaacaaggctttcgtgacaccctccgtcttacggtcccacaagaagacccataccggcgagaaggaaaaaatatgcccatattgcgggcagaaatttgcttcgagtggcacactgcgggtccatatccgctcccatacaggtgaggccgtccaggtgcttcgggtgcagcagggcctgcagcccgaggccaggccaggctag

SEQ ID NO: 129671 - DNA, 1227 bp, synthetic construct
  misc_feature 1..1227: note = Description of Artificial Sequence: Synthetic coding sequence
  source 1..1227: mol_type = other DNA
atgtgtcagaatttcttcattgatagctgcgcagcccacggccctccaacttttgtaaaagattcagccgtcgacaagggccatcccaaccgttccgccctgtctttaccccccggtctccgtataggaccctccgggattcctcaagctgggctgggcgtctggaacgaggctagtgatttgcccttaggccttcacttcggaccctatgaaggccggattactgaagacgaagaagccgctaataatggctactcctggctgatcaccaagggtagaaattgctacgagtatgttgacggcaaggacaaatcatgggccaattggatgaggtacgtgaactgcgctagggacgatgaagagcagaaccttgtggcgttccagtatcaccgtcagatcttttatcgcacatgtagagttataagacctggctgcgagcttctggtgtggtatggagacgagtacggccaggaactcggcataaagtggggtagcaagtggaagaaagagctcatggccgggagggaacctaaacctgagattcacccgtgcccctcttgctgcttagctttttctagccagaaattcctaagtcagcacgtcgaaagaaatcatagctcccaaaattttcctggaccctcagcccggaaactgctgcagcccgaaaatccctgccccggcgatcaaaatcaagaacagcaatatcctgatccccactcccggaatgacaagactaaaggtcaggaaattaaagaaaggtctaaactcttgaacaaaagaacctggcaaagagagatttcgagggccttttctagtccacctaaggggcaaatgggctcttgccgcgtagggaagaggatcatggaggaggagtcaagaacaggacaaaaggttaaccctggtaacactggtaaacttttcgtgggcgtcggcatctcaagaatcgcaaaagttaaatacggagagtgcgggcaaggcttttcggttaagtctgacgtaattactcaccaacgaacccacacaggagaaaagccttacgtgtgccgcgagtgtggccgaggtttcagctggcagagcgtactattgactcaccaaaggacacacaccggagagaagccgtacgtatgtcgcgaatgtggccgcgggtttagccggcagtcagttttgctcactcaccagaggacacacaccggtgagaaaccctacgtgtgccgggaagacgaatag

SEQ ID NO: 129672 - DNA, 2685 bp, synthetic construct
  misc_feature 1..2685: note = Description of Artificial Sequence: Synthetic coding sequence
  source 1..2685: mol_type = other DNA
atgtcgcctgaaaagtcacaggaagaatctccggaagaggacacagagcggaccgaacggaaacctatggtaaaggatgcgttcaaggatatatcaatttatttcacgaaagaagagtgggctgagatgggcgactgggaaaagacacgatatagaaatgtcaaaaggaactataatgccctcataacaatcggtctgagggctactaggccagcgttcatgtgccaccgtcgacaagcgatcaaactgcaagtggatgacaccgaagacagcgatgaagagtggacaccccgacaacaggtcaaacctccttggatggcactgcgagtcgagcaaaggaaacaccagaagggaatgcccaaagcgtctttttccaacgaatcgtcattgaaagagttgagcagaacggccaatctcctcaatgcctcgggttctgagcaagcccagaaacctgttagcccaagtggcgaagccagcacctcaggccagcattccaggctgaaactggagctgcgaaagaaagagacagagagaaagatgtatagtctgagggaaagaaaagggcatgcctacaaggaagtgagcgaaccacaggatgacgattacctttattgtgagatgtgccaaaatttcttcattgacagttgtgctgcccatggccccccaaccttcgttaaggattccgctgtagataagggacatcctaatcgctctgcactgagcctgccccctggcttaagaatcggaccttcaggcatcccccaggccggactaggagtatggaacgaagcctccgatcttcccttgggtctccattttggcccctatgaagggcgcattactgaagatgaggaagctgccaacaatggctactcttggctcatcactaaaggtagaaactgttatgaatacgtcgacgggaaagataagtcctgggccaattggatgaggtacgtaaactgcgcaagggacgatgaggagcagaacctggtagcttttcagtaccatcggcagatcttttatagaacctgcagggtgattcgccctggatgcgagcttctcgtgtggtatggcgatgagtatggacaggaactggggattaaatggggatccaaatggaaaaaagagttgatggctgggcgagagcctaaacccgaaattcacccatgtcccagctgttgtctcgctttttcttcacaaaagtttcttagccagcacgttgaacgcaaccactcgtcccaaaactttcccggccctagtgcgcgaaaactgcttcagccagagaatccatgtccaggtgatcaaaaccaagagcagcaataccccgaccctcacagccgaaatgacaagactaaaggacaagaaattaaagaaaggagtaaactgttaaataagcgaacctggcaacgagagataagtcgggcattcagtagcccccctaaaggtcagatgggtagctgcagggttggtaaacgaatcatggaggaggaatcaaggaccggccaaaaggtcaacccaggcaataccggcaaactcttcgttggcgtaggtataagtcgcatcgcgaaagttaagtacggcgagtgtgggcagggattctctgtgaaaagcgacgtcattacccaccaacgcacgcacacaggtgagaagctctacgtctgcagggagtgtggacgcggattttcttggaagtcccatcttttgatccatcagaggattcacaccggtgagaagccttacgtttgcagagaatgtggccgcggctttagttggcagtcagtgctcctaacacatcagaggacccataccggggaaaagccttatgtctgtcgggagtgcggccgcgggtttagtcggcagagtgtcctcttgacccaccagcggcggcatacaggggaaaagccatatgtgtgccgcgagtgcggccgcgggttctcccgtcagagcgtattacttactcaccagcgtcgccatactggcgagaagccatatgtgtgcagggagtgcggtcgtgggttcagttggcagagcgtcctccttacccaccagcgcacacataccggtgaaaagccctacgtctgccgcgagtgtggtcggggtttttcctggcagtcggtgctgttgacacaccagcggacacatactggcgagaagccctatgtttgcagagagtgcggccgaggtttcagtaacaaatcacatctcttgcgacatcagaggacccacacaggagagaagccatatgtgtgtcgggaatgtgggcgagggtttagggacaagtcccatctattacgccatcagagaacgcacactggggagaagccctacgtctgccgcgagtgcggtcgcggttttagggacaagtctaatcttctatcacaccagcgaacacataccggtgaaaaaccatacgtgtgtagagaatgtggacggggtttttccaataaatcccacttactcaggcatcagcggacacacaccggagaaaagccttacgtgtgccgggaatgtggacggggcttccgcaataagtcccacttgctcagacatcagagaacccacaccggagaaaagccttatgtttgccgggaatgtgggagaggtttctcagatcggtcctcgctctgttaccaccagcgtactcacacaggtgaaaagccttacgtgtgtcgtgaagatgagtag

SEQ ID NO: 129673 - DNA, 303 bp, synthetic construct
  misc_feature 1..303: note = Description of Artificial Sequence: Synthetic coding sequence
  source 1..303: mol_type = other DNA
atgtcccccgaaaagtctcaggaagaaagccctgaggaggatactgaacggaccgaaagaaagcctatggtgaaagatgcattcaaggatataagcatctatttcacaaaagaggagtgggccgagatgggggattgggagaaaactcggtatcggaatgtgaagaggaactacaatgcgttaatcacaattggcctgagagcgacgaggccggcctttatgtgccatcgccgccaagccattaaactgcaggttgacgataccgaggactcagacgaagagtggaccccccgtcagcagtag

SEQ ID NO: 129674 - DNA, 537 bp, synthetic construct
  misc_feature 1..537: note = Description of Artificial Sequence: Synthetic coding sequence
  source 1..537: mol_type = other DNA
atgtcagaagtgcgactgccccctttacgggccttggacgactttgtcctcggtagcgcccgtcttgctgcccccgatccttgcgaccctcagcgttggtgtcacagggtgatcaataacctcttgtattatcagacaaactacctgctgtgtttcggtatagggctcgccctagcaggatacgtcagacctcttcataccttgttgtctgccctggtcgttgccgtggccctcggcgtgctggtgtgggccgccgagactcgcgccgccgtacgccgctgcaggagatcacaccccgccgcttgtctggctgcagttttagcagtcggtctgctggtcctgtgggtggctgggggggcgtgcaccttcctgttctctatcgccggtcccgtgctgctgatcttagtgcacgcctccctcagattgcggaatctcaagaacaagatcgaaaataagattgagagtatcgggttaaagcgtaccccaatgggactgctgctggaagcactgggccaggagcaggaggcagggtcctag

SEQ ID NO: 129675 - DNA, 846 bp, synthetic construct
  misc_feature 1..846: note = Description of Artificial Sequence: Synthetic coding sequence
  source 1..846: mol_type = other DNA
atggccggcacttggctattactactcctggcgctgggctgcccagctctgcccactggggtcgggggaacaccattcccctccctcgctccacccattatgcttttggtcgacggaaagcagcagatggttgtcgtttgtttggtcctagatgtagccccccccggactcgattcccccatttggttttcggcaggtaacggcagcgctttagacgccttcacatacggcccttcccccgctaccgatggtacatggaccaaccttgctcatctgtctcttcctagcgaggagctggctagttgggaacccttagtctgccacaccggccccggggctgaaggccattcgaggtcaacgcagccgatgcacctctccggggaagcatcgacagcccgaacttgtccacaggagcccttaagaggaactccaggaggagcgctgtggttgggggttctgagacttctcttattcaaactgctactttttgatttgttgctgacctgctcttgcctgtgcgaccctgccggccctctcccttcccccgcgacgactactcgactccgagcccttggaagccatcgactgcaccccgctaccgaaacagggggacgcgaagccacaagcagcccccgccctcaaccaagggatcgaagatggggcgacaccccccccggtcgcaagcccgggagccctgtttggggagagggcagctatctgtccagttaccccacctgccccgcccaggcctggtgctcgcgttccgcactgcgggccccatccagttcccttggcgccttctttgccggcgatctcccgcctcctctccaagcaggcgctgcctag

SEQ ID NO: 129676 - DNA, 384 bp, synthetic construct
  misc_feature 1..384: note = Description of Artificial Sequence: Synthetic coding sequence
  source 1..384: mol_type = other DNA
atggccgctacctcccctggaccttgggtaagtagcccaacccaccgctcgtgcttcctacccttcctcacaaggggatgccacaaccgggtatgggcagcacaccctttcctattgtggccccatcaatcttgttgttggtggatggagagctccagatggtggtggtcagcctggtccctgatgctgcatcctctggctttgaccgctccaggccggaagcccgggtcaccagtttggggagaggggagctacctctctagttacccaacttgcccagcccaggcttggtgctcaaggtccgccctgcgtgccccttctagcagcctcggcgccttctttgcaggagatctgccccccccattgcaggccggagcagcctag

SEQ ID NO: 129677 - DNA, 771 bp, synthetic construct
  misc_feature 1..771: note = Description of Artificial Sequence: Synthetic coding sequence
  source 1..771: mol_type = other DNA
atggcaggtacgtggctcctcttattgctcgcactgggctgtcccgctttgccaactggtcccgtttccttcccctcaagtcccgaagcagctaccactggacctatttggttctcagcaggtaacgggtcagctctggatgccttcacatacgggccgtcacctgctacggacggaacttggacaaatctcgcgcatctgagcctgccttccgaggaattggcatcctgggagccacttgtttgccatacgggaccaggcgccgagggccattctcggtctacccagcccatgcacctctctggagaggcatctacggctcgcacttgcccacaggagcccctgcgaggcacaccggggggggccctgtggctgggtgtattgcggctgctgctctttaaacttctcctgtttgacctcctcctcacttgtagctgcttgtgcgacccagcaggacccctccccagccccgcgaccaccactaggcttagggctctgggcagtcaccgcctccacccagcaaccgagacaggtggacgagaagctacctcaagtccccgtcctcagccacgagaccgacgctggggggatacccctcccggtaggaagcctgggtcacccgtgtggggcgaaggtagctacctgagctcatacccaacttgtccagctcaggcctggtgctccagatccgccctccgcgcccctagttcaagcttaggtgcgttctttgcgggggatttgcccccccctttgcaggctggagcagcctag

SEQ ID NO: 129678 - DNA, 525 bp, synthetic construct
  misc_feature 1..525: note = Description of Artificial Sequence: Synthetic coding sequence
  source 1..525: mol_type = other DNA
atggccggcacatggctgctgctgctgctggctctgggatgtcccgccctgcccacaggagaagcaagcacagcccggacctgtcctcaggaaccgctccgagggacacccggcggagccttgtggcttggcgtgttgagactgctgctctttaagttacttctcttcgatctgctgctgacctgcagctgcctctgcgaccccgccggccctttaccaagtccagcaacgactaccaggcttcgcgcattggggagtcataggctgcatccggcaactgagaccgggggtagggaggccacttcaagtccaagaccacagcctagagatcggcggtggggcgatactcctcccggcagaaagccagggtcacccgtatggggcgagggttcatatctgagctcttaccccacctgcccggcgcaggcctggtgttcccgtagtgcactgagggcaccttcttcctctctgggagccttcttcgccggcgatctgccacctccattacaggccggagccgcttag

SEQ ID NO: 129679 - DNA, 438 bp, synthetic construct
  misc_feature 1..438: note = Description of Artificial Sequence: Synthetic coding sequence
  source 1..438: mol_type = other DNA
atgtcatgggccccggtactgctgatgctttttgtgtactgcactggttgtggcccacagcctgttcttcaccaacccccagctatgtcaagcgcactcggcacgaccatacggctaacgtgtaccctgcgtaacgaccatgacattggagtatactccgtctactggtatcagcagcggccaggtcatccgccccgcttcctcctccggtacttcagccaaagtgataagtcccaaggcccccaggtgcctcctcggtttagtgggagcaaagatgtggccaggaataggggctatctatcaatcagcgaactgcagcccgaggatgaagccatgtactattgtgccatgggcgcccggagctcagagaaggaggaaagagagcgagagtgggaggaggagatggagcccaccgccgctaggacccgcgtgccctag

SEQ ID NO: 129680 - DNA, 372 bp, synthetic construct
  misc_feature 1..372: note = Description of Artificial Sequence: Synthetic coding sequence
  source 1..372: mol_type = other DNA
atggcttgtagatgcctctccttcctccttatggggacattcctgagcgtgagtcagacagtcctggcacaacttgacgccctgttagtgtttcccggacaggtcgcccagctatcctgtaccctgagtccccaacatgtcaccattcgcgattacggggtgagctggtaccagcagcgagccggaagtgcaccgcggtatctgctgtactaccgttcagaagaggaccatcacagaccggctgatattcccgacagattcagcgcagctaaggatgaagcccacaacgcatgtgtgttgaccattagtcccgtccagccagaagacgatgcagattattactgctctgtgggctatgggtttagcccctag

SEQ ID NO: 129681 - DNA, 513 bp, synthetic construct
  misc_feature 1..513: note = Description of Artificial Sequence: Synthetic coding sequence
  source 1..513: mol_type = other DNA
atggacgagcaaccccgactcatgcatagccacgccggcgtagggatggctgggcatccaggccttagtcagcacctccaggacggcgcaggaggaaccgaaggggagggcggtaggaagcaggacattggtgacatccttcagcagatcatgacaatcactgatcagtctctggacgaagcccaggcccgaaagcacgcactgaattgtcaccgtatgaagcccgctctgttcaatgtactgtgcgagattaaggagaagacagttttgtccatacgcggtgctcaggaggaggagccaacagatcctcaactgatgaggctggacaatatgctcctggccgagggtgtggccggccccgaaaaaggcggtggatccgccgcggcggcagctgctgctgctgcaagtggcggcgcagggtcagataattcggtcgagcactccgactatagagcaaaactgagccagatccgccagatctatcatacagagctggagaagtatgaacagtag

SEQ ID NO: 129682 - DNA, 1044 bp, synthetic construct
  misc_feature 1..1044: note = Description of Artificial Sequence: Synthetic coding sequence
  source 1..1044: mol_type = other DNA
atggacgaacagccccggctgatgcattcccacgccggggtgggaatggccgggcatccaggactcagccagcatctgcaggacggggctggtggaaccgaaggggagggaggcagaaagcaagatataggcgacattctgcagcagattatgaccattaccgatcagagcctggacgaagcccaagcaagaaagcacgccctcaactgtcataggatgaaaccagcactattcaatgtgctgtgtgagatcaaggagaagaccgttctttcaattcgcggggcgcaggaagaggagcccacggatccacagctgatgagacttgacaacatgttactcgccgagggagtggccggccctgagaagggtggaggatctgcagccgccgcagccgctgcagccgcttccggtggcgccggaagcgacaattcagtggagcattcggattaccgcgccaaattaagtcaaattcgccagatctaccatacagagctggagaaatacgagcaggcttgcaatgagttcaccacacacgtgatgaacctcctaagagaacagagccggacccggcccatttccccgaaggagatcgagagaatggtgtcaatcattcatcggaaatttagctctatccaaatgcagctgaagcaatccacatgcgaagcggtgatgatcctgcgctcaaggttcctcgatgcacgacgcaaaaggcggaattttaacaagcaggccaccgaaatactgaatgagtacttctacagccatctttcaaacccctacccctcagaggaggctaaagaggagctggctaaaaaatgcggaattaccgtcagccaagtgagcaattggttcggaaataagcgcatccgatataagaaaaacataggcaagttccaggaggaggccaacatttacgccgctaagaccgctgtcaccgcaactaatgtgtctgcccacggtagtcaggccaacagcccatccacaccgaactccgcagggggctatccaagtccttgttatcagccagatcgtaggatccagtag

SEQ ID NO: 129683 - DNA, 1044 bp, synthetic construct
  misc_feature 1..1044: note = Description of Artificial Sequence: Synthetic coding sequence
  source 1..1044: mol_type = other DNA
atggatgaacagccccgacttatgcattcccacgcaggcgtcgggatggcgggacaccccgggctatctcagcatctacaggatggtgccggtggtacagagggcgaaggaggccgcaaacaggacattggagatatcctgcagcagatcatgactattacagaccagtccctggacgaggcccaggccagaaagcacgcactcaattgccacaggatgaaacctgcactcttcaatgtcctgtgcgagatcaaggagaaaaccgtcctaagtattcgcggcgcccaggaggaggaaccaaccgacccacaattgatgaggctggataacatgctcctggccgagggagttgcaggcccagaaaaggggggcggcagcgcggcagctgcagccgctgccgctgctagtggtggtgccggcagcgacaattccgtggagcattccgattaccgggctaaactatcccagattagacagatataccacaccgagctggagaagtacgaacaggcttgtaatgaattcactacccacgttatgaaccttctgagagagcagtcccgcacaaggccgatctcccccaaagagattgagagaatggtctcaatcatccacaggaaattttcctctatacagatgcagctgaagcagagcacttgcgaggctgtcatgatcttgcgctccaggtttctggacgcacgccggaagcggagaaattttaacaagcaggccactgagattctgaatgagtatttttactcgcacctttccaacccttacccctcagaagaagctaaggaagagctagcaaagaaatgtggcatcaccgtatcacaggtgtccaactggttcggaaacaagcgtattagatacaagaaaaatatagggaaattccaggaagaagccaacatctacgctgctaaaaccgcggtcaccgccacaaatgtgagcgcccacggatcacaggccaatagtcctagcaccccaaattctgccggtggatatccttccccttgctaccagcccgatagaaggattcaatag

SEQ ID NO: 129684 - DNA, 1293 bp, synthetic construct
  misc_feature 1..1293: note = Description of Artificial Sequence: Synthetic coding sequence
  source 1..1293: mol_type = other DNA
atggatgagcagcctcgcctgatgcactcgcatgcaggggttgggatggctggacaccctggactcagtcagcacctgcaggatggtgctgggggtacagagggcgagggaggacgaaagcaggacatcggagatatactgcagcagatcatgaccattaccgaccagtctctggatgaagcacaagctcgaaaacacgccctcaactgtcatcgtatgaaacccgcgttgttcaacgtgctctgtgagattaaggagaagaccgtcctgagcattcggggagcccaagaggaagagccgactgacccacaacttatgcgactggacaacatgctcctggcggaaggagtggccggacctgagaagggggggggctctgcagccgctgcagctgctgctgctgccagcgggggagctggctccgacaactccgtggagcactctgactaccgggctaaactcagccaaatccgacagatttatcataccgaattagagaagtacgagcaagcgtgtaacgagtttactacccatgtcatgaacttgttgagggagcagagccgaaccagaccgatcagtccaaaggagatcgagagaatggtgagtattatccatcgaaaattctcctctatccagatgcagctcaaacagagtacttgtgaggctgtgatgatattgaggagccgctttttggacgccaggcgcaagcgcaggaattttaataagcaggccactgagattttgaatgagtatttttattcgcatctgtcaaacccatatccaagcgaagaagccaaggaggaacttgccaagaaatgtgggatcacagtgtctcaggtttctaattggtttggcaataagaggatacggtacaaaaagaatattggaaagttccaggaagaggccaatatctacgcagctaagacggcggtcaccgcaacaaacgtatccgcacacggctcgcaggctaattcaccatctaccccaaacagcgcagggagctctagtagttttaatatgtctaatagcggggacctgtttatgagcgtgcagtctctgaatggagacagttatcagggcgcccaagttggggccaacgtccagagccaggtggatacccttcggcacgtcatcagtcagacaggaggctattctgacggcttggccgccagccaaatgtattctcctcagggaatctcagcaaatgggggatggcaggatgccactacaccctcttctgtaacctcacccacggagggccccggttcggtccacagcgacaccagcaattag

SEQ ID NO: 129685 - DNA, 978 bp, synthetic construct
  misc_feature 1..978: note = Description of Artificial Sequence: Synthetic coding sequence
  source 1..978: mol_type = other DNA
atgcgcctagacaacatgctcctcgctgaaggggtcgctgggcccgagaagggcggcggttctgccgccgcggccgcagcagcagcggccagtggtggagccggatcagacaactccgttgaacacagcgattatagagccaagctgtcacagattcgtcaaatctaccatacagagttagagaagtatgaacaggcgtgcaacgagtttaccactcatgttatgaacctactgcgggagcagagcaggaccagaccaatctccccgaaggagatagagagaatggtctctatcattcacagaaaattctctagcatccagatgcaactcaagcaaagcacttgtgaggccgtgatgatcctccgcagcagatttttggacgccaggcgtaaacgcagaaactttaataaacaggcaacggagatcctcaacgagtacttctatagtcacctgtcaaacccctacccgtccgaggaggcaaaagaggagttggccaaaaagtgtggaattaccgtgtctcaggtgtcaaactggttcggaaacaagcggatccgttacaaaaaaaacatcgggaaatttcaggaagaggcaaatatttacgcggcaaaaaccgctgtaacggccaccaacgtgagcgcacatggctcgcaagccaattcccccagtacccccaattccgccggtagcagctcctcctttaacatgtcgaactctggcgacttattcatgagtgtgcagagcctgaacggtgatagctatcagggagcacaggtaggggccaacgtgcagtcacaagtggacactctgcgccatgtgatctctcagaccgggggatacagcgatggcttggccgcctctcagatgtatagccctcaaggtataagtgctaatggcggctggcaagatgcgactaccccctcatctgttacctcccctaccgaaggacctggaagcgtccattccgatacgtccaattag

SEQ ID NO: 129686 - DNA, 1113 bp, synthetic construct
  misc_feature 1..1113: note = Description of Artificial Sequence: Synthetic coding sequence
  source 1..1113: mol_type = other DNA
atgctcctggtctttttcgtcctgtggacttgctccttggctctgctagcctcttcccagtctccacctccaccgtgcgcctctgttctttccatacggggcgcccaggaagaggagcctacggatccccagctgatgcggcttgataacatgctcttagctgaaggagtcgcaggacccgagaagggagggggcagtgctgccgcggccgcggccgctgccgcttccggcggcgccgggtcagataattctgtggaacacagtgactatcgggcgaaactctctcagattaggcagatttatcacaccgaactggaaaaatatgagcaggcctgtaatgagtttacgacacatgtcatgaatctgctcagagaacagtctcgcactcgtcccattagccctaaagaaatagaaagaatggtctccattatccatagaaaattcagtagcatccaaatgcagcttaaacagagtacctgtgaagccgtgatgatcctacgtagccgatttttagatgcccgtcgaaaaaggcgtaacttcaacaagcaagccaccgagatactcaatgagtacttttattctcatctgtccaacccctaccccagtgaggaggctaaagaggagctggcaaagaagtgtgggatcactgtgtcccaggtgtctaactggtttggtaataagagaatccgatataagaagaacattgggaagttccaggaggaagccaatatttatgcggccaagacggccgtcacagctaccaatgtcagcgcgcacggatctcaggctaatagccccagcacccccaatagcgccgggtctagcagttcgttcaatatgtccaatagcggcgaccttttcatgagtgtgcagtctttgaatggagattcctatcaaggcgcccaggtgggagccaacgtccagtcgcaggttgatacactgaggcacgtcatttcccagacaggaggatactccgatggccttgccgctagtcagatgtattcccctcagggcatctctgcaaacggcgggtggcaagatgccacaactcccagcagcgtcaccagtcccacggagggcccaggtagcgtgcactctgacacctctaattag

SEQ ID NO: 129687 - DNA, 1263 bp, synthetic construct
  misc_feature 1..1263: note = Description of Artificial Sequence: Synthetic coding sequence
  source 1..1263: mol_type = other DNA
atggacgaacagcccaggcttatgcacagtcacgccggtgtaggcatggctgggcatcccggtctcagccagcacctgcaggacggggcagggggaaccgagggtgagggcggcaggaagcaagacattggagacatcctgcaacagatcatgactatcactgatcaatcgttagacgaggcacaggctcgtaagcacgcattgaactgccaccgtatgaagccggccctgttcaatgttctctgtgagatcaaggagaagactgtactgtctatccggggtgctcaggaggaagagccaactgatccccagctcatgaggctcgataatatgctgctcgcagaaggagtggctggaccagaaaagggtggtgggtctgctgcagcagccgcagccgccgcggccagcggaggtgctgggtcagacaattcagtggagcacagcgactaccgagctaaactgtcccagatcagacaaatatatcatactgagctggagaagtatgagcaagcgtgcaacgagttcacaacccacgtcatgaatctgttgcgggaacagagccggactaggcccatctccccaaaggaaatcgagcggatggtgagcattatccatcgcaaattcagtagcattcagatgcagctgaagcaatctacttgcgaggccgtcatgatcctgagatcgcgcttccttgacgctaggcgcaaaagaaggaatttcaacaagcaagccactgaaattctcaacgaatatttctatagccacctctccaatccgtacccgtctgaagaggccaaggaggaactggccaaaaaatgcgggattaccgttagccaggtgagcaactggtttggtaataagcgaattcggtacaaaaagaacataggcaagttccaggaagaagcaaatatctatgccgcaaaaaccgccgtcacggccaccaatgtgtccgcccatggaagccaggcgaactctccgtctaccccgaattcagccggatcctctagttctttcaatatgtcgaattccggagatctatttatgtccgtgcagagcctgaatggggattcatatcagggcgcccaagttggagctaatgtgcagagccaagtggacacacttcggcacgtcatctctcagaccgggggctactccgacggccttgccgccagccagatgtactcgccacaaggaatatcccaccttccacgccatcccaggcaggcccactatcactttagattgccgacatggcatccgtag

SEQ ID NO: 129688 - DNA, 906 bp, synthetic construct
  misc_feature 1..906: note = Description of Artificial Sequence: Synthetic coding sequence
  source 1..906: mol_type = other DNA
atgcgactggacaacatgctgctggcagaaggggtcgctggacccgagaaaggcggaggttcagctgctgctgcagccgctgctgccgctagcggaggcgccggctctgacaactccgttgaacactccgactatcgagccaagttgagccagatccgccaaatctatcacacagagctggagaagtacgaacaggcctgcaatgagttcacaacacatgtgatgaatctcctgcgcgaacagtcgagaacgcgaccaatatcacctaaagagatcgagcgcatggtgtccataatccatcgtaagttttcatcaatccaaatgcagttaaagcagtctacctgtgaggcagtgatgatcctgagatctaggtttctggacgcacgcaggaagcgccggaattttaataaacaagcaaccgagattttgaacgaatacttttatagtcatcttagtaatccatacccgagcgaggaggctaaagaggaactcgcgaagaagtgcggtatcaccgtgtcccaggtgtccaactggttcggaaacaagagaattcgctacaagaaaaatattgggaagttccaggaggaggctaatatctatgccgccaaaacagccgttaccgctactaatgtgtcagcccacggctctcaggctaactcgccgagcactcccaactcagccggatcctccagtagctttaacatgagcaacagcggagatctcttcatgtccgtccaaagtttaaatggagactcttaccaaggcgcccaggtgggcgccaatgtccagagccaggtggacacacttagacacgtcatcagccagaccggaggatactcagacgggttggcagcctcacagatgtatagcccacaaggaatctcagaaatcgcgagaacgtactag

SEQ ID NO: 129689 - DNA, 1020 bp, synthetic construct
  misc_feature 1..1020: note = Description of Artificial Sequence: Synthetic coding sequence
  source 1..1020: mol_type = other DNA
atggacgaacagccccgacttatgcacagccacgcaggcgtaggaatggccggacaccccggtctgagccagcacttacaggatggagccggagggacagagggcgaaggcgggcgcaagcaagacattggggatatcctacaacagataatgacaattactgaccaatctttagatgaagcgcaggctcgtaaacacgcacttaactgccaccggatgaagccggctctatttaacgtgctatgcgagattaaagaaaagacagtcctgtctatcagaggagcacaagaagaagaaccaaccgatccccagttgatgcgcctggataatatgcttctggcggaaggcgtcgccggcccggaaaaggggggagggagtgcagccgctgctgcagccgctgccgcctccggaggtgccggctccgataactccgtcgaacactctgactaccgggccaagctgagtcagattcgacaaatataccacaccgaattagaaaagtacgaacaggcttgcaacgaattcacaacccacgttatgaacttactgcgcgagcagagtagaacacgccccatatcaccaaaggagatcgagcgtatggttagtatcattcaccgtaagttttcctctatccaaatgcagcttaagcagagcacctgcgaagccgtgatgatcctgcgctctcgattcctcgatgcaagaagaaagaggaggaacttcaataaacaagccaccgagatcctgaacgagtatttttattcacatctctccaatccataccccagcgaagaggccaaggaagaactagccaaaaagtgtgggattacggtctcacaggttgatacccttaggcatgttatatcacaaactggagggtactcggatgggctagcggcatcccagatgtattccccccaggggatctccgctaacggtggctggcaggacgccacaaccccttcttcagtcaccagcccgacagaggggccaggatctgtccacagcgacactagcaattag

SEQ ID NO: 129690 - DNA, 978 bp, synthetic construct
  misc_feature 1..978: note = Description of Artificial Sequence: Synthetic coding sequence
  source 1..978: mol_type = other DNA
atgcgccttgataatatgctcctcgcggagggggtcgccggtccagagaaagggggtggcagcgccgctgctgctgccgccgctgccgcctctggcggcgccggatcagacaacagcgtggaacattctgattacagggcaaagctgtcacagattagacagatctaccacaccgaactggagaaatacgagcaggcctgcaacgaattcacaactcacgtgatgaatttactcagagagcagtctcgcaccaggccaatctctccaaaggagatcgagcggatggtcagcataatccatcgaaaattttccagcatccagatgcagctcaagcagagtacatgcgaggcggtcatgattctccgctctcgatttctggatgctcgcagaaagcgcagaaatttcaataaacaggctaccgagattttgaatgagtacttctactcgcatctgagtaatccctacccatcggaggaggccaaggaagagctcgccaaaaaatgtggtattaccgtgtcacaggtgtccaactggtttggaaacaagagaattcgatataagaagaacatcgggaagttccaggaggaggccaacatttacgctgctaaaaccgcagtgaccgccactaacgtctcggcacacggctcccaggctaacagtccttctacacccaattcagccggaagtagctcttcctttaatatgtccaatagcggggacctgtttatgagtgtacagtcacttaacggagactcatatcagggggcacaggtaggcgctaatgtccagtcccaggtggataccctacgccacgttatctctcagacaggcgggtatagtgatgggcttgctgccagccaaatgtattctccgcaaggaatctccgccaacgggggatggcaagacgccacaacaccttctagcgtgacctctcctacagagggccctggctcggtgcattcagataccagcaactag

SEQ ID NO: 129691 - DNA, 978 bp, synthetic construct
  misc_feature 1..978: note = Description of Artificial Sequence: Synthetic coding sequence
  source 1..978: mol_type = other DNA
atgcgtctcgataatatgcttctcgccgagggcgttgcagggcccgagaagggaggcggaagtgcagccgccgctgccgccgccgccgctagtggaggggccggcagtgataatagtgtcgaacactccgattatcgtgccaagctgtcacagatccgtcaaatttatcacactgagctcgagaaatatgagcaggcttgcaacgaattcaccacccatgttatgaacttgctccgggaacaatccaggactaggccaatttctcctaaagaaattgaacggatggtgtcgattattcatcggaagttttctagcatccaaatgcagttgaagcagagcacgtgcgaggctgtgatgatcctccgtagcaggtttctcgacgcgaggaggaaaaggcgaaactttaacaagcaggccactgaaatcctgaacgagtatttctactcccatttatctaatccatatcctagcgaagaggctaaggaggagctggccaagaaatgtggcattacagtgtctcaagtgtccaattggttcggcaataagcgtatcaggtacaaaaagaatattggcaagtttcaggaagaagcaaatatttatgccgcgaagacagcagtcactgccacaaatgtgtcagcccacggctctcaagctaatagcccctccacaccaaacagcgctgggtcctcttcctcctttaatatgtccaattctggcgacctgttcatgagcgtacaaagcctgaatggagacagctaccagggcgcccaggtcggcgccaatgtgcagtcacaggttgatacccttcgtcacgtcataagccagaccggcggttacagtgacggcctggccgcttcacagatgtactctcctcagggaatctcagctaacggaggatggcaagacgcgacgacgcctagctcggtgacatcaccaaccgagggtcccgggtcagtccactccgacacgagcaactag

SEQ ID NO: 129692 - DNA, 1293 bp, synthetic construct
  misc_feature 1..1293: note = Description of Artificial Sequence: Synthetic coding sequence
  source 1..1293: mol_type = other DNA
atggacgagaggctgctgggaccaccacccccaggaggcggccgggggggtctgggtctggtgagtggcgagcctggaggaccaggtgaacctccagggggcggagacccgggaggggggtcaggcggggtccctgggggacggggtaaacaagacataggggacatcctgcagcaaatcatgacaatcactgaccagtcgctcgatgaggctcaggccaaaaagcatgccctcaattgtcaccggatgaagcccgcccttttctctgtgctatgcgagattaaggagaagactggcctcagtattaggtcatcccaagaggaggagcccgtggacccccagctgatgagactcgacaatatgttattggcggagggcgtcgccggtcccgaaaaaggcggtggctctgccgctgcagccgctgcagcagccgcatccgggggaggagtctctcccgataacagtatagagcattccgactaccgcagtaagctggctcagatccggcatatctaccactccgagctggagaagtatgagcaagcgtgtaacgagttcaccacccacgtcatgaatctcctgagagagcaaagccgcactcggcccgttgcccctaaggagatggagcgcatggtctcaataattcaccgaaagttctcagctatacagatgcagttgaagcagtctacctgcgaagccgtgatgatactgcgctccagatttctagatgcccgcagaaagcgtcgcaatttctcaaagcaggccacagaggtgctgaacgagtacttttacagtcatctgtccaacccttacccctccgaggaggcgaaagaagagctggccaaaaagtgcggtatcactgtgtctcaggtctctaattggttcggcaacaagaggatccgctataagaaaaacatcggaaaattccaagaggaagccaacatctacgctgttaaaactgcagtgagtgtgactcagggagggcactctagaacatcttccccaactccccctagctctgcaggaagtggcggctccttcaacctatctggaagtggcgatatgtttctgggtatgccgggcctgaatggcgatagctatagcgcatcgcaggtggagtctttgaggcattctatggggcctggcgggtacggcgacaatttaggcggcggccagatgtatagcccacgcgagatgcgggcaaacgggtcgtggcaagaagctgtcacaccctctagtgtcacaagtcccactgaaggcccggggagcgtgcactccgacacatctaactag

SEQ ID NO: 129693 - DNA, 1293 bp, synthetic construct
  misc_feature 1..1293: note = Description of Artificial Sequence: Synthetic coding sequence
  source 1..1293: mol_type = other DNA
atggacgagcggctactgggtcctccacccccaggtggagggcgcggcggccttggactcgtgtcgggagagcccggaggccctggcgaaccacctggcggtggagacccgggcggcggaagcggtggcgtccccgggggcagaggcaagcaggacattggtgatattctgcagcagatcatgacaattacagatcagtccctggacgaggcccaagccaaaaagcatgctttgaactgtcataggatgaagcctgccttgttttccgtcttatgcgagattaaagaaaagactgggctctccatcaggtcgtctcaagaggaagaacccgtagatccccagttgatgaggctcgacaacatgctgttagctgagggagtcgccggcccagaaaagggcggcgggtccgcagctgccgcggctgctgccgcggctagcggagggggggttagcccagataacagcatagagcacagtgactaccgctcaaaactggcgcagatccgtcatatttatcactccgagctcgaaaagtacgagcaggcctgtaacgagtttactacccacgtgatgaatctcttgcgcgagcagagccgtacgcgccccgtcgcacctaaagaaatggagaggatggtgagcatcatacacagaaagtttagcgccattcagatgcagttgaagcagagcacttgtgaggctgtgatgatcttacgctcgcgctttttggatgcgcgtcgcaagaggagaaatttttctaaacaggccacagaagtgctgaatgagtacttctatagtcacttgagcaacccatacccctcagaagaggccaaggaggagctggccaaaaaatgtggtatcactgtctcacaggtgtccaattggtttggcaacaaacgcatccgctataagaaaaatattggcaagttccaagaggaggctaacatctatgcagtgaaaacagcggtcagcgtaacacagggagggcactcacgcactagctctccaacaccaccctcttcagcgggctctggaggaagctttaacttatccgggagcggtgacatgttccttggaatgccgggactgaatggagactcttactctgcctcccaggttgagagcctgaggcactcaatgggaccaggaggctacggagacaacctcgggggagggcagatgtattccccccgagaaatgcgagcaaacggatcttggcaagaggcagttacaccttcctctgtcacatctccgaccgagggcccaggctctgtgcactcagatacatccaattag

SEQ ID NO: 129694 - DNA, 1293 bp, synthetic construct
  misc_feature 1..1293: note = Description of Artificial Sequence: Synthetic coding sequence
  source 1..1293: mol_type = other DNA
atggacgagcgcctactgggaccacctccccctggcggcgggcgtggtggactaggacttgtgtccggagagccaggcggtccaggcgagccgcccggaggtggcgacccaggaggaggctccgggggggtgccaggcggccgggggaaacaggacattggcgacatactccaacaaatcatgacaatcacggaccagagcctggacgaagcccaagcgaagaagcatgctctcaactgtcaccggatgaagccagcactgttttccgtgttatgtgaaattaaagagaagacggggctgtcaatccgcagttcccaggaggaagagcctgtcgacccacagctgatgaggctggacaacatgttgctggcggagggggtggcaggacccgaaaagggcgggggatcagcagcagctgctgcggccgccgccgcctccggcgggggcgtgtcccccgataactcaatcgaacattccgactatagatctaaactggcccagatccgccacatttaccattctgagctcgaaaagtatgaacaagcatgcaacgagtttaccacacacgtcatgaatttgctgcgcgagcaaagtagaacaaggcccgtggctcccaaggagatggaaagaatggtgagtattattcatcgtaagttttctgccattcagatgcagctcaaacaatcgacttgcgaagcagtgatgatcttgcggagtcggttcctggatgctaggcgtaaacggaggaacttcagcaagcaggctacagaggtgctaaacgagtatttttactcccaccttagtaacccatatccctccgaggaggccaaagaggagctggctaagaagtgtggaatcaccgtgtcacaggtcagcaactggttcggcaataagaggatcagatacaagaaaaacattgggaagtttcaggaggaagctaatatctatgctgtgaaaacggctgtttctgtcacacagggcggccacagtcgcaccagttccccgacccccccaagcagcgcaggttcaggaggaagtttcaacctctccggttctggagacatgttcctggggatgcctgggttaaacggcgatagttatagtgccagtcaagttgagagcctccgacactccatgggcccaggtggatatggcgacaatctgggaggaggccagatgtactcgcccagagagatgcgggctaatggaagttggcaagaggccgttactccatcaagtgtcacaagtcctacagagggacctggatcggtgcatagcgataccagcaattag

SEQ ID NO: 129695 - DNA, 1293 bp, synthetic construct
  misc_feature 1..1293: note = Description of Artificial Sequence: Synthetic coding sequence
  source 1..1293: mol_type = other DNA
atggacgaaaggctattggggcccccaccaccgggcggaggtagagggggcctgggcctggtgagcggggagcctgggggaccaggagaaccccccgggggaggagatccgggtgggggcagcggaggggtgccaggtggacggggcaagcaggacatcggagatatacttcagcagatcatgaccatcactgatcagagtctggatgaggcccaggctaagaagcacgctttaaattgtcaccgaatgaaaccagccctattcagtgttctgtgcgaaatcaaagaaaaaacaggtctgtccatccggagttctcaggaggaggaacccgtggacccccagctcatgaggctggataacatgctcctcgcagagggcgtcgcgggccccgaaaaaggcggaggaagcgcagcggcagcggccgccgcagccgcttccggaggaggcgtgagccctgataactctatcgagcatagtgactataggtccaagttggcacagatacgccacatttaccattctgagttggagaaatacgaacaggcgtgcaacgaatttacgacacacgttatgaacctgttgcgggagcagagccggacccgcccggttgccccaaaggagatggagcgaatggtgtccataatccaccgcaaattcagcgctatccagatgcagctcaagcagagtacatgcgaagccgtcatgattttgagaagtcggttcctcgatgcccgacggaaacgccgtaacttctcgaagcaagctaccgaagtactcaacgagtatttctacagccacctgagtaatccatatccgagtgaagaggctaaagaggagttagcaaaaaaatgcggaattaccgtctcacaggtatccaattggttcggtaataagcgcatcaggtacaaaaagaacatagggaaattccaggaggaggctaatatttatgccgtgaagaccgccgtttcagtgacccagggaggccacagccggacgtctagcccaactcctccttcttctgccggctcaggcgggagtttcaatctgagcggatctggtgacatgttccttggcatgccagggctgaatggagatagctattccgcatctcaagtggagtctcttcggcacagcatgggaccaggcgggtatggggacaacctgggcggcggacagatgtactcgcctagagagatgagggccaatggatcttggcaagaggctgtcacgccatcatcggtgacatcgccgacagagggccccgggtcagtgcactctgatacatcaaactag

SEQ ID NO: 129696 - DNA, 1293 bp, synthetic construct
  misc_feature 1..1293: note = Description of Artificial Sequence: Synthetic coding sequence
  source 1..1293: mol_type = other DNA
atggatgagagattgttaggtccacccccccccggcggcgggcgcggtggactgggattagtgtcaggcgagcctgggggacctggcgaacctcctggcgggggggatcccggaggagggtcgggtggcgtgcccggtgggagaggtaagcaggatattggcgacatcctgcagcagatcatgaccatcacagatcagtccttagacgaagcacaggctaaaaaacatgctcttaactgccacagaatgaaacctgcactattctccgtgctgtgcgagatcaaagaaaaaacaggcctgtcaatcagaagcagccaggaggaggaacccgtcgaccctcagctgatgcggttggacaatatgctgttggcggaaggggttgctgggcctgaaaaggggggcggtagcgccgctgccgccgctgctgcagctgcctccggcgggggcgtttccccagacaattcaatcgaacacagcgactatcgcagcaagttggcccagatccgtcatatttatcacagcgagctcgaaaaatacgagcaggcttgtaatgaattcacaacacacgttatgaatctcttacgcgaacaatccagaacaagacccgtggcaccgaaagagatggaaagaatggtctcgatcatacacaggaaattttccgcaattcagatgcaacttaagcagtccacttgtgaggccgtaatgatattgaggtccaggttcctggatgcgagacgcaagagacgtaacttttcgaaacaggccacagaagtgctgaacgagtacttttactcccacctcagcaacccttatccttctgaagaggctaaggaggagctggctaagaaatgtggtataactgtaagccaagtttccaactggtttggtaataagcggattcgctataaaaagaatatagggaagtttcaagaggaggccaacatctacgcagtgaagacggcagtatctgttacccagggtgggcattccagaacatctagcccaactcccccctcttcagcaggcagcggcggctcttttaacctgagtggaagcggcgatatgttcctcggtatgcccggcctgaatggagactcatacagcgcttcacaggttgagagtttgcgccactctatggggccagggggatatggcgacaacctgggcgggggccagatgtactcccctcgcgaaatgagagccaatggtagctggcaagaggccgtcaccccttcttctgtaacgtctcctactgaggggcccggctctgtgcattcagacacaagcaattag

SEQ ID NO: 129697 - DNA, 1293 bp, synthetic construct
  misc_feature 1..1293: note = Description of Artificial Sequence: Synthetic coding sequence
  source 1..1293: mol_type = other DNA
atggatgaacgccttctggggcccccccctcctggtggcggcaggggaggactgggactggttagcggcgagcctggaggcccaggcgagcctcctggggggggcgatcccggtggtgggagcggcggggttccaggcggccgaggcaagcaagacataggagatatccttcagcagatcatgacaattaccgaccagagcttggatgaggctcaggccaaaaagcacgcactcaactgtcaccgcatgaagccagctcttttctctgtcctgtgtgagatcaaggagaagacgggactctcaataagatcgtctcaggaagaggaacccgtcgatccacagctcatgcgtctcgacaacatgttactggctgaaggagtggcaggacctgaaaagggcggtggcagcgccgctgccgctgcagccgctgctgcttcaggcggcggtgtgtcccctgacaactccatcgaacactccgactaccgtagcaagcttgcgcagattcgccatatctatcactcagaactggagaagtatgagcaggcttgcaatgagtttactacgcacgtgatgaaccttctaagggagcagagtagaacccggcctgtggcccctaaggagatggaacgaatggtgagcatcatccatcggaagttctccgcgatccagatgcagctgaaacagtccacatgcgaagccgtgatgatactgaggtctaggtttcttgacgccagacgcaaacggcgtaactttagtaagcaggctaccgaagtgctgaacgagtacttttacagtcacctttcgaatccttaccctagcgaagaggccaaagaggaactagccaagaagtgcggcatcacagtgagtcaggtatccaactggtttggcaataagcgcattcgctataaaaaaaatatcggcaaattccaagaggaagccaacatctacgccgtgaagactgccgtgagcgtcacccagggggggcactcgcgaacctctagccccaccccaccgagttctgctggaagtggcgggagcttcaacctatctgggtctggcgacatgttcctggggatgcccggtctgaatggggatagctactccgccagtcaagtggagtcgctcagacacagcatgggtccagggggctacggggataatctgggtggaggtcagatgtatagccccagggagatgcgtgccaacggatcttggcaagaagctgttactccatcaagtgtcacatcgcccactgagggcccaggatctgttcattccgacacttccaactag

SEQ ID NO: 129698 - DNA, 1293 bp, synthetic construct
  misc_feature 1..1293: note = Description of Artificial Sequence: Synthetic coding sequence
  source 1..1293: mol_type = other DNA
atggacgaaaggctcctggggccgccacctcccggaggcggccgaggcggtctaggcctggtatctggagagcccggcggaccgggagaacccccaggcggtggcgatccagggggcggcagtggaggcgtccctggaggcagaggaaaacaggatatcggggatattttacaacaaataatgactattaccgatcaatcgcttgatgaggctcaggccaaaaagcacgccctgaactgccaccgcatgaagccagccctgtttagcgttctgtgcgaaatcaaggagaagaccggtctttcaattcggtcaagccaggaagaggagcccgtggatccccagctcatgcggctggataacatgctattagcagaaggggtggccggtccagagaaaggaggcggatccgccgccgccgcagcagccgcagccgcatcaggtgggggggtcagccctgataattccatagaacattctgactacagatctaaattagctcagatccgccatatctaccacagcgagctggagaagtacgagcaggcgtgtaacgagttcacaacacacgtgatgaacttactacgcgagcagtctaggaccaggcccgttgctcccaaagagatggagaggatggtctccatcattcatcgcaaatttagcgccatccaaatgcaactgaagcagtctacctgtgaggctgttatgattttaagaagccgctttctggatgcacgtcgaaagaggcgaaacttttctaagcaggcgaccgaagtgctgaacgaatacttctactctcacctcagtaacccatacccctccgaagaggcaaaggaagagctagcaaagaaatgtggcatcacagtaagccaggtcagcaactggtttggaaacaagcggatccgctacaaaaagaacatcggaaaatttcaggaagaggccaatatctatgcggtgaaaacagccgtgagcgtcactcagggcggccatagtcggactagctcccccacacccccctccagcgcggggtccggagggagctttaacctcagtggttctggcgatatgtttctcggcatgcctggcctgaatggagatagttactcagcctctcaggtggaatccctccggcactctatgggaccaggaggctacggggacaatttggggggtggacagatgtactcgccccgggagatgagggctaacggttcttggcaggaggccgtcaccccctccagcgtgacctctccaaccgaaggccctgggtcggttcacagcgatacctctaattag

SEQ ID NO: 129699 - DNA, 1392 bp, synthetic construct
  misc_feature 1..1392: note = Description of Artificial Sequence: Synthetic coding sequence
  source 1..1392: mol_type = other DNA
atggacgagcgcctgctgggcccccccccaccagggggaggcaggggcggacttggactggtgtccggagaacctggtgggcccggggaacctcctggcggaggcgacccaggaggggggagcggaggggtgcctggtggcagaggaaagcaagacatcggtgacatccttcagcagatcatgacgatcactgatcaaagtctggatgaggctcaagcgaagaagcacgccttgaattgtcatcgtatgaagcctgcgctgttttccgttctgtgtgaaattaaggagaagacaggtctgtcgattaggagttcacaggaggaggaacctgttgacccccagctcatgagactcgacaacatgttactggctgagggggttgcaggccctgaaaagggcgggggatcggcagcagccgcagctgcagccgctgccagcggaggaggcgtgagccctgataattcaatcgaacatagtgactacagatcgaaactggctcaaatccgacacatctaccactctgagctggagaagtacgaacaggcttgtaacgaattcacaacacacgtgatgaacctcttgagagagcagtcccgcactcgacctgtggccccaaaagaaatggaacggatggtcagtatcattcatcgaaaattctctgcaattcagatgcagttgaagcagtctacatgcgaggccgtgatgatcttacgatcaagattcctcgatgcaaggagaaaacgtcggaatttctctaaacaggcaacagaggtgctcaacgagtacttttactcgcacttatccaatccctacccgagtgaggaggcaaaagaggagttggctaagaaatgtggcatcacggtttcccaggtcctctggcgactgagagaggagctctccggaaaagtgcatgcatctcaattgggcgcggtcgtttcaaactggttcggcaataagcgaatccgctataagaagaacatcggaaagtttcaggaggaagctaacatttatgccgtgaaaaccgccgtgatcatagccgagcgagggccttttggcgttcggggaacagaattaagtctgccttcgttacctcctcaaggctctgggggcagctttaacctgtccggttccggagacatgttcctgggcatgccaggcctgaatggcgactcctacagtgccagtcaagtcaggtgtcctagccctctgcaggtcgagtcccttaggcactctatgggacccggagggtatggcgataacttgggtggtggtcagatgtactcaccaagggagatgcgagctaatggctcctggcaggaggctgttacaccgtctagcgtcactagccccaccgagggcccaggcagcgtacatagcgacacatcgaattag

SEQ ID NO: 129700 - DNA, 1392 bp, synthetic construct
  misc_feature 1..1392: note = Description of Artificial Sequence: Synthetic coding sequence
  source 1..1392: mol_type = other DNA
atggacgagaggttactcgggccacctcccccaggcgggggaaggggggggctggggttagtatctggggaacccggcggccctggggaacccccaggaggcggtgatcccggtggggggtccggaggcgttccaggtgggagggggaaacaggatattggcgacatcctccagcagattatgaccattaccgaccagtcactggacgaggcccaagcgaaaaagcatgcacttaattgccatcgtatgaaaccagccctcttctccgtactatgtgagattaaagagaagacaggtctgagcatccgaagctcgcaggaagaggagccggtggatccccaactaatgagattggataacatgcttctggcagaaggcgtggccgggccagaaaagggggggggaagcgctgccgccgccgctgcggcagccgcctcaggtggcggtgtctcgccagataatagcattgagcattcagattatcgctccaaactcgcccaaattagacatatatatcatagtgaactggagaagtatgagcaagcatgtaatgagttcaccacgcatgtgatgaatctgttgcgggagcagagccggacaagaccggtggctcccaaggagatggaaaggatggtcagcataatacaccgaaagttcagcgcgatccagatgcagcttaagcaaagtacatgcgaagccgtgatgatactgagatccagattcctagacgctcgacgaaagcgccgcaacttctctaaacaggccaccgaggttctgaatgagtatttttactcacatttatctaatccgtacccatctgaggaggccaaagaagagcttgcaaaaaagtgcggaatcactgtgagtcaagtgctttggagattaagagaagagctgtcaggaaaggtccacgccagtcaacttggcgccgtcgtgagcaattggttcggaaacaaacgaataagatacaagaaaaatatcggtaagttccaagaggaggccaacatttatgccgtgaagacagccgtcattattgcagaacgcggtcccttcggagtaagaggaactgagctgagcctcccaagtctacctccccagggctccggaggtagtttcaatctttctggttccggagatatgttcctgggaatgcccggccttaacggtgacagctactcagcctctcaggtgcggtgccccagcccgcttcaggtcgaatctctccgacatagcatgggcccaggtggctacggagataacctgggcggaggacagatgtactccccgcgcgagatgagagcaaacggcagttggcaggaagctgtcaccccttcctcagttacaagccctacagaaggacctgggagtgtgcactcagacacatcaaactag

SEQ ID NO: 129701 - DNA, 1317 bp, synthetic construct
  misc_feature 1..1317: note = Description of Artificial Sequence: Synthetic coding sequence
  source 1..1317: mol_type = other DNA
atggatgaaaggctcctgggtccgcccccaccagggggggggagaggaggacttgggctcgtcagcggcgaacctggcgggccaggcgagccccctggcggcggggacccaggtggtggaagcgggggggtgccagggggaagaggcaagcaggatattggcgatatcctccaacagattatgactataactgatcagagtctggacgaggcacaggctaagaagcacgcacttaactgccaccgaatgaaacccgcgttgtttagcgtgttgtgcgagatcaaagaaaagaccggcctgagcatccggtcttcccaagaagaggagccggtcgacccgcagcttatgaggctggataatatgctgctagccgaaggagtggctgggcctgaaaagggaggtggcagtgccgcggcagcggccgccgcggctgcaagcggtggcggtgtatcccccgataactcgatcgaacattctgactacagaagcaagctcgcacagatcaggcacatctatcattccgagctggagaagtacgaacaagcttgtaatgagttcactacgcacgtgatgaacctgctgcgcgagcaatcgcgaacccggcctgtggcccctaaagaaatggagcgcatggtttccattatccatcgaaaattctccgccattcagatgcaactgaagcagagcacttgcgaggctgtgatgatcctccgcagtaggttcctggatgcccgcaggaagcgtaggaacttcagcaagcaggcaacagaggttcttaatgagtacttctactcccatcttagcaatccatatccctccgaggaggctaaggaagagctggccaagaagtgtggaataacagtgtctcaggtttccaactggttcgggaacaagcggatccgatacaagaaaaatattgggaagtttcaggaggaggctaacatatacgctgtaaagacagcagtctcggtcacacagggaggacactcccgtacttcgtcacccaccccaccttcatcagccggctccggcggctctttcaacctgtctgggtccggcgatatgttcctaggcatgcccggtctgaacggggacagctatagtgcctcccaagtccggtgccccagccctttacaggtggagtcccttcggcacagtatgggtccggggggatacggagataacctcggaggcggccagatgtattcacctcgcgagatgcgggccaatggatcttggcaggaggccgttacccccagcagtgtcacttctccaactgaaggtcccggttcggttcactccgataccagcaattag

SEQ ID NO: 129702 - DNA, 1317 bp, synthetic construct
  misc_feature 1..1317: note = Description of Artificial Sequence: Synthetic coding sequence
  source 1..1317: mol_type = other DNA
atggacgaacgcctgctgggtccaccaccacccggcggaggccggggtggtttgggactggtctccggcgaacctgggggccccggagaacccccaggcggaggtgacccagggggcggatccggcggtgtgccagggggaaggggaaagcaggatattggagatatcctacaacagattatgactatcacagatcagtcactggacgaggctcaagccaaaaagcatgcattgaattgccacagaatgaagcccgctctgttttcagtactgtgcgaaattaaagaaaaaactggactgtcgattagatcctctcaagaagaggagcccgttgatcctcagttaatgaggctggacaacatgctgctggcggagggcgtggctggccctgagaaaggcggcggaagtgccgccgccgctgcagctgcggccgcaagtggaggaggcgtctctccggacaactctatcgaacattccgattaccgctctaaactggcccagatccgccatatttatcacagtgaactcgagaaatacgaacaagcatgcaatgaatttacaactcacgtaatgaacctgctgagggaacagagccgcactagaccagtcgcccctaaagaaatggaaaggatggtttctattatacatcggaagttcagcgccatccaaatgcagttgaagcagtcgacctgcgaggcagtgatgattttgcgttcacgcttccttgacgcccgaaggaagcgcaggaacttttctaagcaggccaccgaggtactgaacgaatacttttattctcatctaagcaatccgtatccgagtgaagaagcaaaggaagaattagccaaaaagtgtggtattacagtgtcccaagtcagcaattggttcgggaacaagcggatcagatacaaaaaaaacattgggaaatttcaagaggaggcaaacatttatgccgtgaagaccgcagtctccgtgactcagggcggacattctcggacctccagccccacgcctccatcttcagctggctctggcggttcctttaacctcagtgggagcggcgacatgttcctcggcatgcccgggctgaatggggattcctattcagcttcccaggtccgctgtccgtcgccgttgcaagtagagtcactgcggcattccatgggaccaggtggatacggggataatctaggaggcggccaaatgtactcccccagagaaatgagggccaatggcagttggcaggaggcagtgacaccttcttcggttacgagtcctaccgaaggtcccggctccgtccacagtgacactagcaattag

SEQ ID NO: 129703 - DNA, 1392 bp, synthetic construct
  misc_feature 1..1392: note = Description of Artificial Sequence: Synthetic coding sequence
  source 1..1392: mol_type = other DNA
atggacgaacggctgctgggcccccctcccccgggaggcggtagaggaggactgggccttgtgtcaggcgaaccagggggtcctggcgaaccaccaggaggcggtgatccgggcggcgggtcaggcggtgtgcctggcggacgcggcaagcaggacattggagacatcctccagcaaattatgaccatcactgaccaatctctggacgaagcccaagctaagaaacatgcccttaactgccatagaatgaagcccgcccttttctctgttctctgtgaaatcaaggaaaaaacaggtcttagcattcgaagctcccaagaggaggagcctgtggatccacaactcatgcggctggacaacatgctattggcagaaggagtggcaggccccgagaagggcggtgggagtgccgccgcagcggctgccgcggctgcttctgggggaggagtgtctcccgacaactcaatcgagcatagcgattaccgatctaagttggctcagataagacatatctaccattcagaactcgagaagtacgaacaggcctgcaatgaatttaccacccatgtcatgaacctgctgcgagaacagtcccggacacgtcccgttgccccaaaggagatggagcggatggtctccatcatccaccggaagtttagcgccattcagatgcagctgaagcagtccacctgcgaagcggtcatgatcctccgctcaagattcctggacgcgagacgaaagcggcggaacttctcaaagcaagctactgaggttttaaatgagtacttttattcccacctgagcaacccttacccttccgaagaggccaaggaggaactggccaaaaagtgcggcataaccgtctcacaggtcctgtggcgtctgagggaggagctgagtggtaaggtgcacgccagtcaactgggtgctgtggtaagcaactggttcggaaacaagcgtatccgctataagaaaaatataggaaaatttcaggaagaagctaacatttacgccgttaagaccgccgtgataatagccgaaaggggtcctttcggggtcagaggaaccgagctgagtctgccaagcttgcctccacagggttctggtgggtcttttaacctgtcaggaagtggggatatgtttttgggcatgcccggccttaatggcgactcctatagcgcgagccaagttaggtgcccttctccactgcaggtggaaagcctgaggcactccatgggtcccggcggttacggagacaatctggggggaggccagatgtattcaccacgcgaaatgcgcgccaatggtagttggcaggaggcagtcaccccttcgtccgtcacttccccgacagagggtcctggaagtgtgcactccgacaccagcaattag

SEQ ID NO: 129704 - DNA, 1392 bp, synthetic construct
  misc_feature 1..1392: note = Description of Artificial Sequence: Synthetic coding sequence
  source 1..1392: mol_type = other DNA
atggatgagagactgctgggtcctcctccccctggaggcgggcgcggaggactgggcctcgtctctggggagcccggtgggcccggggaacctcctggcggtggggaccccggcggtggatcagggggcgtgcctggagggagaggtaagcaggatattggcgatatcctgcagcaaatcatgacaattacagatcaaagcctggacgaggctcaggctaaaaagcacgccctgaattgtcaccggatgaaacccgcactgttctccgttttgtgtgaaattaaagagaagaccggcctctctataaggagctcacaggaggaagagccagttgatccccaactaatgcgcttagacaatatgctactggctgagggagtagcaggacctgagaagggcgggggcagcgctgccgctgccgccgcagccgcagccagtggcggcggggtttctcccgataatagtattgaacatagcgactatcggtccaagctggcccaaatcagacacatttatcattctgagctggaaaagtatgagcaggcttgtaatgagttcaccacccacgtcatgaacctgttacgtgagcaatccagaacccggcctgtggcgccaaaggaaatggagcggatggttagtattatacaccgcaaattctctgcgatccaaatgcagctgaaacagtccacctgtgaggcggtgatgatcctgcgtagccgctttctggacgcccggcggaagcgtaggaacttttcaaagcaggctacagaggtattgaatgaatacttctatagccacctctctaacccatacccgagcgaggaagctaaagaggagttggccaagaaatgcggcatcacagtttcacaggtcctttggagattacgggaggagcttagcggtaaagtacatgcctctcaactaggggctgttgtttccaactggtttggcaataagagaatccgatataagaagaacatcggaaagtttcaggaagaggccaatatttatgccgtgaagaccgccgttataattgcggagaggggcccttttggcgtgagaggcacagagctgtccctgccaagtctgcctccacagggaagcggcggttctttcaacctgtctggatctggcgacatgttccttgggatgcctggcctgaacggtgatagctatagcgcaagtcaggtccgctgtccgagtccactgcaggtcgagtccctgaggcactctatgggcccaggcggatatggagacaacctgggcggcggccagatgtacagtccaagggagatgagagccaatggctcatggcaggaggcggtgacgccgtcaagcgtaacatcacctaccgaggggccgggctcagtccatagcgatacgtcaaactag

SEQ ID NO: 129705 - DNA, 1332 bp, synthetic construct
  misc_feature 1..1332: note = Description of Artificial Sequence: Synthetic coding sequence
  source 1..1332: mol_type = other DNA
ggggcggagcagggcggtgggctaagagctcccccccagctctggacaaatggctactggggaagacccctccaggccggggccggcggcttgggcttggtctcaggcgaacccgggggtccgggggaaccaccaggcggcggggaccccgggggaggttccggtggcgtgcccggaggcagaggcaagcaggatattggagatattttgcagcagattatgaccatcacagaccagagcctggacgaagcgcaggccaaaaagcacgctctgaactgtcatcggatgaaacccgccttgttcagcgtcctctgtgaaataaaggagaaaaccggactttcaatccgctctagccaggaagaggaaccggttgaccctcaactgatgagactcgataacatgctgctcgctgaaggcgtagcagggccagagaaaggaggaggatcagccgctgctgccgctgccgctgctgctagcggaggcggcgtgtcaccagacaatagcattgaacactcagattataggagtaagctagcgcaaatccggcacatttatcactctgagctggagaaatatgagcaggcgtgtaatgagttcactacacatgtaatgaatctgctccgagagcagtcgcggaccagacccgtggcgcctaaagagatggagcgcatggtgtccatcattcatagaaaattcagtgctatccagatgcagttgaaacagagtacctgtgaagcagtgatgatcctgcggtcacgctttctggatgctaggagaaagcgacgtaatttcagcaaacaggccacagaggtcctcaacgaatacttttactcacacttgtccaacccataccctagcgaagaggctaaagaggaactggccaaaaaatgtggtataacagtgagtcaggtgagtaactggtttggcaataagcgaatccggtacaaaaagaacattggtaagttccaagaggaggccaatatatacgcggtcaaaacggcggtgagcgtaacccaggggggacactcacggacatccagtccaacgcctccttcatctgcgggttcaggcgggtcattcaacctaagcggatctggggatatgttccttgggatgcctggcctcaacggagacagctattctgctagtcaggtggagtcactgcgacactccatggggcctgggggatatggggacaacctaggtgggggccagatgtattcccccagagaaatgagggcgaacgggtcctggcaggaagctgtgacaccaagctccgtgacatctccaaccgaagggccagggagcgtgcatagcgacacaagcaactag

SEQ ID NO: 129706 - DNA, 1332 bp, synthetic construct
  misc_feature 1..1332: note = Description of Artificial Sequence: Synthetic coding sequence
  source 1..1332: mol_type = other DNA
ggggctgagcaaggcggagggctccgcgccccccctcaattgtggacaaatggttactggggccgtccccttcaagcaggagcaggtggattgggcctggtctccggggaaccagggggtccgggggagccgcctggcggcggggatccaggcggagggtcaggcggggtgcccggagggagaggaaaacaggatatcggggatatcttgcaacagattatgacgataaccgaccaatccctagatgaggcacaggctaaaaaacacgccctgaattgtcacaggatgaaacccgcattattcagtgtgttatgtgagattaaggagaagacggggttgtccatcaggagctcacaggaggaggaacctgttgatccccagctcatgcgtctggataacatgctcctggcagaaggagtcgctggccctgagaaggggggaggcagcgccgccgcagccgccgccgccgctgcctcaggtggcggcgtctctcccgacaattccatcgaacactctgactatcggtcaaagcttgcacagatcaggcacatctaccatagtgagctggagaaatacgaacaggcctgcaatgagtttactacacacgtcatgaacttgctacgagaacagtcccgaacccggcccgtggcacctaaagagatggagaggatggttagcattatccacaggaaattcagcgcaattcagatgcagttgaaacaaagcacgtgcgaagctgtgatgattttgcgttcccgcttcttggacgccaggcgcaaacgtcggaattttagcaagcaagccactgaagtgctgaacgagtacttctatagtcacctgtcaaatccctatccaagcgaggaggcaaaagaggaactagctaaaaaatgtggcatcacagtatctcaggtgagcaactggtttggtaataagagaatcaggtacaagaagaatataggcaagttccaggaggaggctaatatatacgcagtaaaaaccgcagtatccgtgactcagggcggacactcacgtacgtccagtccgactcctccttcttctgcggggtcaggtggctccttcaatttaagcggtagcggagacatgtttctcggtatgcccggactgaatggcgattcttactctgcctctcaggtggaaagtctgcgccattccatgggacccggaggctacggcgataatctcggcggggggcagatgtactcacctagggagatgagagctaacggatcctggcaagaagcagtcacccccagcagtgtgacttcaccaactgagggccctggcagcgtgcatagcgatacaagtaactag

SEQ ID NO: 129707 - DNA, 1317 bp, synthetic construct
  misc_feature 1..1317: note = Description of Artificial Sequence: Synthetic coding sequence
  source 1..1317: mol_type = other DNA
atggatgagaggctgttgggacctcctcccccgggaggaggtcggggaggcctgggactggtgagtggcgaaccgggcggacctggggaaccaccaggtggcggtgaccctgggggaggttctgggggggtgccaggagggaggggaaagcaggatatcggggacatcctgcaacagattatgactatcacggatcagagccttgatgaagcgcaggcaaaaaagcacgcgctgaattgtcatcgcatgaagcccgcccttttcagtgtactgtgcgaaataaaggagaagaccggtctgagtatacggtcatctcaggaggaagaacccgtggatcctcagctgatgaggctggataacatgttgctggcggagggagtggcaggaccggagaagggaggtggatctgcggccgctgctgctgccgctgcggcaagcggagggggagtgtcccctgataactcaatagaacactcagactataggagcaagctggcacaaatacggcatatttaccactccgaacttgagaagtatgagcaagcatgcaacgaattcacaacccatgtcatgaatcttttgcgggagcagtcacgtactcggcccgtggctcccaaggaaatggagcggatggttagtataattcatcggaaatttagcgccatccagatgcaacttaagcagtctacgtgcgaggcagtgatgatcctgcggagccgcttcctggacgccaggcggaagaggaggaatttcagcaaacaggcaacggaggtcctcaatgaatatttctacagccatctctctaatccataccctagcgaggaggcaaaggaagaactggccaaaaaatgcggaattactgtctctcaggtatccaactggtttggcaataaaagaatcagatataagaagaacatcggaaaattccaggaagaggcgaatatctacgccgttaaaactgccgtctccgtgacccagggcggccactcccgcacctcctcaccaactcctccatcatccgcaggctcgggcggatcgtttaacctgagcggatctggggatatgttcctggggatgcccgggctgaacggagactcttactctgccagtcaggtgcgatgtccgagcccactccaggttgaaagtttgagacattctatggggccggggggctacggggacaaccttggggggggccagatgtactcaccgcgagaaatgagggccaatgggagctggcaggaagctgtcacacccagttccgtgaccagtccaacagaaggcccaggttccgtgcattctgatacctccaattag

SEQ ID NO: 129708 - DNA, 1380 bp, synthetic construct
  misc_feature 1..1380: note = Description of Artificial Sequence: Synthetic coding sequence
  source 1..1380: mol_type = other DNA
atggacgagcgtttactaggccccccccctccaggaggtggtagaggaggacttggactggtgtctggcgaacccggcggccctggtgagccccccggcggcggcgatcctgggggcggctcaggaggcgtaccaggcggtcgagggaaacaggatataggcgatatattacagcagattatgactataactgaccagagcctggacgaggcacaggcaaagaagcatgcactgaactgccaccgaatgaagcctgcactctttagtgtgctctgcgaaattaaggagaagacgggcttgagtatccgctcgtcccaggaggaggagccagttgacccccagttgatgcgtctggataatatgctgctggctgagggggtagcaggtccggagaagggtggaggttcagctgctgcggccgctgccgccgccgcctctggtggaggcgtgagccctgacaactcaattgaacactccgactacaggtctaagctggctcagattagacacatttaccatagtgagctcgagaagtacgaacaggcttgcaacgagtttaccacacatgtgatgaatctgttgagggagcaatcacgtactagaccggttgccccgaaagagatggagcggatggtgtctatcattcacagaaaattcagcgctattcagatgcaacttaagcagagtacttgtgaagccgtaatgatcctgagaagccggttccttgacgcgaggagaaaaagaagaaacttcagcaagcaggcaacggaggtgctgaacgagtacttctattcccacctctccaatccatacccatcagaagaggcgaaggaagagctcgcaaaaaagtgtggtatcacagtctcccaagtgttatggcggctgagagaggaactgtctgggaaagtgcatgcctctcagctgggtgcggtagtgagtaattggttcggcaataaacgcattagatacaaaaaaaacatcgggaagttccaggaggaggctaatatttatgcagtgaagaccgctgtgagcgtgacacagggtggccacagcagaacatcatcgcctacacctccatccagtgcgggctcgggaggcagctttaacctgtctggttccggtgacatgttccttgggatgccgggattaaatggggactcatactcagctagccaagtgaggtgtcccagtcctctgcaagtagagtctctgcggcacagcatggggcctggtgggtatggagacaacctgggagggggacagatgtactccccacgagaaatgagagcgaacgggtcgtggcaggaagcagtcacccctagcagcgtgacatctcctacagaggggcctgggtcagttcattccgatacctctaattag

SEQ ID NO: 129709 - DNA, 1332 bp, synthetic construct
  misc_feature 1..1332: note = Description of Artificial Sequence: Synthetic coding sequence
  source 1..1332: mol_type = other DNA
ggggctgagcagggcggcggacttcgagctcctcctcagctttggactaacggatactgggggagaccactgcaggctggcgctggtggcctgggattggtgtccggtgagccaggggggcccggtgaaccccccggtgggggggacccaggtggtggttcaggcggagtgcccggagggaggggaaaacaggatataggggacatcttacagcaaatcatgacaattaccgatcaatcactggatgaggcacaggccaagaagcatgcgttgaattgtcacaggatgaagcccgcccttttttccgtgctgtgcgagataaaagagaagaccgggctgtctatccggtcctctcaggaggaagagcctgtggatccccaactcatgagactggataatatgcttttggcagagggagtagctgggcccgaaaagggaggtgggagcgccgcggccgctgccgccgctgctgccagcggaggtggcgtctcacccgataacagtatagagcattccgactaccgcagtaaactggctcagatccgccacatatatcactcggagctggaaaaatatgagcaagcctgtaacgagtttaccacgcatgtgatgaacctgttaagggagcagtctcggacaagaccagtggcacccaaggagatggaacgcatggtgtcaattattcaccgaaagttcagcgctatccagatgcagttaaagcagtccacatgtgaggccgtaatgatccttaggagcagattccttgatgcaagacgcaaacggcggaatttcagcaagcaggcgactgaagtactaaacgagtacttttactcacacctgagcaatccttatccttcagaggaggctaaggaggaactggcaaagaagtgtggaatcacagtatcacaggtctccaactggtttgggaacaagcgaatcaggtataaaaaaaacattggaaagtttcaggaagaggctaacatctacgccgtcaagacagcggtgagcgtcactcagggagggcacagccgtaccagttcacccaccccaccctcctctgcagggagcggtggctcattcaatctcagcggatccggcgatatgtttctgggcatgcccggacttaacggcgactcctatagtgcaagtcaggttgaatcactgcggcactcaatgggacctggaggctacggagataacctgggagggggtcagatgtattcaccgagagagatgcgagcaaacggttcctggcaggaagccgtcactccgagttcggtcacatctccaactgagggaccggggtctgtccacagcgatacctccaattag

SEQ ID NO: 129710 - DNA, 1317 bp, synthetic construct
  misc_feature 1..1317: note = Description of Artificial Sequence: Synthetic coding sequence
  source 1..1317: mol_type = other DNA
atggatgaaaggctcctagggccgccaccaccaggcggaggtcgcggcggcctaggcctagtgagcggagagcctggcggtccaggcgagccccccgggggcggggacccaggagggggttccgggggtgtcccaggaggacggggtaaacaggacatcggggatatactacaacaaatcatgaccatcaccgatcagtcactggacgaggcacaagccaaaaaacacgccctcaactgtcatcgaatgaaaccagccctgttctctgtgctgtgtgaaattaaggagaagaccgggctatcaatccggtcaagccaggaggaggagccagtagatccccagctgatgagactggacaacatgcttttggccgaaggggtggccgggccagagaagggcggcggatctgcggcagcagccgcagcagcggcagccagcgggggtggtgtgagtcccgataatagcattgaacacagcgactaccgctccaaattagcccagataaggcatatttaccacagtgagctcgaaaaatacgaacaggcttgcaacgagtttactacgcacgtcatgaacctacttagggaacaatctaggactcggcctgtggcgcccaaggaaatggagcgaatggtaagtatcatccaccggaaattcagtgctatccagatgcagctgaaacaatcaacctgtgaggcagtgatgatcctgcgttcccgatttctggatgcccggcggaagcggaggaacttcagtaagcaggctacggaagtgctgaatgagtatttctactctcacctgagtaatccttacccttccgaagaagcaaaagaggagctcgctaaaaagtgtggcattaccgtctctcaggtctctaattggtttggaaataaacgcatccgatataagaaaaacataggaaaatttcaagaagaggcgaatatctatgctgtgaagacggccgtgagcgtgacccaaggaggccacagccgtactagctcccccacccccccgtcgtcagctggcagcggaggatcattcaacctgtctggatcaggggacatgttccttggcatgccaggcctgaatggggacagttattccgcaagccaggttcgctgcccctctccactccaggtcgaatccttgagacatagtatgggccctggaggatatggtgataacctcggaggggggcagatgtactcgccacgcgagatgagagccaatggctcctggcaggaggccgttactccctcttctgtcacaagtcctaccgagggccccggtagtgtccattctgatacgtccaattag

SEQ ID NO: 129711 - DNA, 1317 bp, synthetic construct
  misc_feature 1..1317: note = Description of Artificial Sequence: Synthetic coding sequence
  source 1..1317: mol_type = other DNA
atggatgaaagactcctcggccctccacctcccggtggcggacgtgggggcctgggactggtgagcggcgagcccgggggcccaggagagccccccggcggtggcgatcccggggggggctcaggaggggtgccaggaggacggggaaagcaggacattggggacatcctccagcaaatcatgacaatcaccgaccagagcctggacgaggctcaggctaaaaagcatgccctgaactgccacagaatgaaacctgccctgttctctgtcctttgcgagattaaggaaaaaacggggctcagcatcaggagttcacaggaggaggagcccgtggacccccagctcatgagactggataatatgctcctggctgaaggtgtcgctggccccgagaaaggcggaggttccgccgcagccgccgcggctgccgccgcctccggagggggtgtgagcccagataactctattgagcactcagattacagaagtaagctcgcccagatccgacacatataccattctgaactggaaaaatatgagcaggcatgcaacgagttcacgactcatgttatgaatctgctgagggagcagtccaggactcggcccgtcgcgcccaaagagatggagagaatggtctcgattattcaccgcaaatttagtgccatccagatgcaacttaaacaaagcacttgtgaggccgtcatgattcttcgcagtagattcctcgacgctagacggaagcgccgtaacttcagtaaacaggctaccgaagtgctcaatgaatatttctattcacacctatccaacccatacccgagcgaggaagcaaaggaggagctggccaaaaaatgcggtatcacagtgagtcaggttagcaactggttcggcaacaaaagaatccgatataagaaaaacatcggaaaatttcaggaggaagccaatatctacgcagttaagacagcggtcagcgtcacccagggcgggcatagtcgtacgagctctcccacccctccctcctccgccggttccggaggaagtttcaacctctcggggagtggtgatatgtttctcggcatgcctggcctgaacggtgacagttatagcgccagtcaggtgaggtgtccgtctcccctgcaggtggagtctttgcgtcactctatgggccccggaggatacggtgacaaccttggaggcggacagatgtacagcccacgcgaaatgagggccaacggatcatggcaggaggccgtgacgcccagcagtgtgacgtcgcctaccgagggccccggcagtgtgcacagcgatacctcaaactag

SEQ ID NO: 129712 - DNA, 1332 bp, synthetic construct
  misc_feature 1..1332: note = Description of Artificial Sequence: Synthetic coding sequence
  source 1..1332: mol_type = other DNA
ggggccgaacagggagggggcttgcgcgcaccaccccagctctggacgaatggatactggggcaggccgctccaagctggggctggtggcctaggactagtgtccggagaacctggcggcccgggtgagcctccgggcgggggagacccaggcggcgggagcggaggtgtacccggcggccgtggcaagcaggacataggagatattctgcagcaaataatgacaatcacagatcagagcctggatgaagcccaggccaaaaagcacgccctgaattgtcataggatgaagcccgccctcttttccgtgctttgcgagatcaaggagaagacaggcctcagcatcagaagttcgcaagaagaagaacctgtggatcctcagctgatgaggcttgacaacatgctgctggcggagggcgtcgccggtccggaaaaggggggaggctccgccgctgcagctgcggcagcagccgcaagtggggggggcgttagtcccgataactccatagagcacagcgattaccgatctaaactggcccaaattaggcatatttatcattctgagctggaaaaatacgagcaggcctgtaacgaattcaccactcacgtgatgaacctgctaagagagcagagtcggacccgacccgttgctccaaaagaaatggagcggatggtgagtattattcatcgaaaattctccgccatacagatgcagctcaagcagtcgacgtgcgaggccgtgatgatcctgcgctcgcgcttccttgacgccaggcgcaagcgccggaactttagcaagcaagcgaccgaggtgctgaatgaatacttctattcacacctgagcaatccatacccttccgaggaggccaaagaagagctggccaaaaaatgtggcatcacagtgtctcaggtgtcaaattggtttggcaataagcgaatacgctacaaaaagaatatcggaaagtttcaggaagaagccaatatttatgctgtgaagaccgccgtgtccgtgacgcagggggggcactctagaacctcctcaccgactccaccttcctccgccggatccggagggagtttcaacctgtctggctcaggagatatgttcctggggatgcccggtctcaacggggattcgtacagcgcctctcaagttgagtcgcttcggcactcaatgggtccggggggttacggggataacctgggtgggggacaaatgtactccccccgcgagatgagagccaatgggtcttggcaggaggcagtgaccccaagtagcgtgacttcccccacagagggtccaggttcagtgcactccgacactagtaactag

SEQ ID NO: 129713 - DNA, 1392 bp, synthetic construct
  misc_feature 1..1392: note = Description of Artificial Sequence: Synthetic coding sequence
  source 1..1392: mol_type = other DNA
atggatgaacgactcctcggcccccccccaccaggaggcggacgtggcggcttggggcttgtctccggtgagcctggcggtcccggagaacctccagggggaggagatccgggggggggttcagggggtgtaccaggaggtcggggtaaacaggacataggcgacattctgcagcagattatgaccattactgatcagtctctcgacgaggcacaggctaaaaaacatgccttaaattgtcatcgcatgaaacccgctcttttcagcgtactatgtgaaattaaggagaagaccgggctttcaataaggtccagtcaggaagaggaacctgttgatcctcaacttatgcgcttagataacatgctcctcgctgagggagtcgctggtccagagaagggtgggggaagtgctgcagcagctgcagccgctgcagctagtggtggaggtgtatcaccagataactctatagagcatagtgattaccgctctaagctggcccagatacgtcatatctatcactccgaactggagaagtatgagcaggcatgcaatgaattcacaacacacgttatgaacctcttgagagaacagtcaagaacccgtcccgtggcaccaaaggagatggaacgcatggtgtctattatccacagaaagttctccgccatccaaatgcagctgaagcaatcgacctgcgaggctgtgatgatccttagaagccgcttcctggacgcccgcaggaagagaagaaacttcagtaagcaggccactgaggtgctgaacgagtatttttactctcatctgtcgaacccttaccccagcgaagaagctaaggaggaattggccaagaagtgcgggatcaccgtgtcacaggttctttggcggctacgcgaagaactgagtggtaaggttcacgcttcgcaactgggggccgtcgtgtccaattggttcggcaacaaacgcattcggtataaaaagaacattggaaagtttcaggaagaagccaatatctacgctgtgaagacagccgtaatcatcgctgagagggggccctttggggttaggggcactgaactgtcactgccgtctctccctccccaggggagcggtggaagctttaatctgtccggtagcggagatatgttcctcggaatgcctgggctcaatggagatagttacagcgcatcccaagtgcgctgcccctccccgctccaggtggagagcctccgacattccatgggtcccgggggctatggggacaatttgggcggaggacaaatgtactccccgcgcgagatgcgcgcaaacggcagctggcaggaagctgtaaccccaagcagcgtgacttctccaaccgaagggcctgggtctgtgcattcagacaccagcaattag

SEQ ID NO: 129714 - DNA, 1332 bp, synthetic construct
  misc_feature 1..1332: note = Description of Artificial Sequence: Synthetic coding sequence
  source 1..1332: mol_type = other DNA
ggcgctgagcaaggtggcggcttgagggcacctccacagctgtggaccaacggctactggggcagaccccttcaggcaggcgccggtggactcggccttgtgtcaggcgagcctggtgggccaggagagcccccaggcggtggggatcctgggggcggcagcggcggcgttcccggcggccgaggtaaacaagatattggagatattctgcaacaaataatgacaataaccgatcaatcattggacgaagcacaggccaagaagcatgcccttaactgccatcgcatgaaacctgcactgttctccgtgctgtgcgagataaaggaaaagaccggactgagtatccgctcaagccaggaagaagaaccagtcgaccctcaactgatgaggttggacaacatgcttttggctgaaggcgtggctgggcctgaaaaaggtggcgggagcgccgctgccgcagcagcagctgccgcatctggcggcggcgttagcccagacaactcaatcgagcacagcgactatcgctcaaagctggctcagatacgacatatttaccacagcgagctagagaagtatgaacaggcatgcaatgagttcacaactcacgtcatgaacttattacgtgaacagtcccgcacaaggccagtggctccgaaggaaatggagaggatggtgagcattatccacagaaaattttcggctatacaaatgcagctcaagcagtctacatgcgaggcagtcatgattctgcgaagcaggtttctcgatgctcgtcggaagaggcgcaactttagcaagcaggccaccgaagtcctgaacgagtacttctactctcatttgagcaacccgtacccctctgaggaagctaaggaagagttagccaaaaagtgtggcatcacagtcagccaggtgtcgaattggttcggcaataagaggattagatacaaaaagaacatcggcaagttccaggaggaggcaaacatctacgctgtcaagactgccgtctctgtgactcaagggggacattccagaacaagcagcccaacaccgccgtcatctgcaggcagcggaggctcctttaatctgagcggatctggcgacatgttcctggggatgccaggattaaatggtgacagttacagtgcatcgcaagtggaatccctccgacactcaatgggcccggggggctatggcgacaacctgggaggagggcagatgtattctcctagggaaatgagagcaaacgggagttggcaggaggccgtgactcccagctccgtcacatcacccactgaaggaccagggtctgtccactcagatacgagtaactag

SEQ ID NO: 129715 - DNA, 1332 bp, synthetic construct
  misc_feature 1..1332: note = Description of Artificial Sequence: Synthetic coding sequence
  source 1..1332: mol_type = other DNA
ggagctgaacaggggggcggcctgcgcgccccaccacagctgtggacaaatggctactgggggcgaccactccaagcgggggctggcggcttgggtttggtcagcggtgagcctggtggtccgggcgaacccccaggtgggggcgatcctgggggcggctctggaggcgtccccggggggagagggaagcaggatattggggacatcttgcagcaaataatgacgatcaccgatcagtccttagatgaggcacaggccaaaaaacacgctcttaattgccaccgaatgaagcctgcccttttcagcgtcctgtgcgaaattaaagagaaaacaggactgtcgattcgatcatcgcaggaggaagagcccgtagatccacaattgatgcggctcgataacatgctcctggcagagggggtggccggcccggaaaaaggagggggttcagctgcagccgctgctgctgctgccgcgtcggggggtggagtgagtccagataactcgatcgagcacagtgactaccgaagcaaattggcccagattaggcatatataccactcagagctggaaaagtacgagcaggcatgtaatgagttcactacacacgtgatgaatctcctgagagagcagtccagaacccggcctgtggctccaaaggagatggagaggatggtatctataatccaccgcaaattctctgcaattcagatgcagttgaagcagagtacttgcgaggccgtgatgattctgagaagtcgcttcctggacgcaaggagaaagaggaggaatttcagcaagcaagcaaccgaggtcttgaatgaatacttctattcgcatctgagcaatccctatccatctgaggaggctaaggaagaacttgccaagaaatgtggtatcactgtcagccaggtgtccaattggttcggcaataaacgcattcggtacaagaaaaatattgggaagtttcaagaggaggcaaacatatatgccgtgaagacagcggttagcgtcacacagggagggcatagtcggacaagttccccgacgccacccagcagtgctgggagcggcggctctttcaacctgtcgggcagcggcgacatgtttctgggcatgcctggcctgaatggagatagttactcagcaagtcaggtggaatccctgaggcactccatgggccctggcggctacggcgataacctgggaggcggacaaatgtacagccccagggaaatgagagccaatggaagttggcaagaggcagtgactccttcatccgtaacgagccccaccgagggacccggctcagtgcattccgatacttccaattag

SEQ ID NO: 129716 - DNA, 1056 bp, synthetic construct
  misc_feature 1..1056: note = Description of Artificial Sequence: Synthetic coding sequence
  source 1..1056: mol_type = other DNA
atggacgaccagtcgaggatgcttcagactctggccggggtaaacttggcgggccacagcgtgcaaggaggcatggcgctgccaccaccgccgcacggtcacgagggggccgatggggacggccggaaacaggacattggcgacatcttacaccagattatgacgataacagaccaatcgctggatgaggctcaagcaaaaaagcacgccttgaattgtcatagaatgaagcccgcactgttcagcgttctatgtgaaattaaagagaaaacaggattgagcatcaggggggcccaggaagaagaccctcccgaccctcagctgatgagacttgacaacatgctgctggctgaaggggtaagcggacccgaaaagggaggaggctctgccgccgctgctgcagctgcggctgcgagcgggggcagctccgacaactctatagagcactccgattaccgtgctaaacttacccagatccggcaaatttaccatacagaactagagaagtacgagcaggcgtgcaatgagttcactactcacgtgatgaacctcctgagggagcagtctaggacacggcctatctctccgaaagaaatcgaacgtatggttggcataatccatagaaaattctcctccatccagatgcagctaaagcagagcacgtgtgaggcagtgatgattctgcgaagcagatttctggacgcgcgccggaagagaaggaatttttccaagcaggccactgaaatcctgaacgaatatttctactctcacttaagtaacccctatccatcagaggaagccaaggaggagctcgccaagaaatgtagcatcactgttagtcaagtttccaattggtttggcaataagcggatccggtataaaaagaacatcgggaagttccaggaggaggcaaacctatatgccgctaaaacggctgtgaccgctgcccacgctgtagccgccgccgtgcagaataaccagaccaatagccctacaacacctaatagcgggggataccccccctcctgctatcagtccgatggcagactgcagtag

SEQ ID NO: 129717 - DNA, 762 bp, synthetic construct
  misc_feature 1..762: note = Description of Artificial Sequence: Synthetic coding sequence
  source 1..762: mol_type = other DNA
atgaacctcctcagagaacagtctaggaccagacccatttcacccaaagagatcgagcggatggtcggcatcatacacaggaagttcagctccatccaaatgcagctaaagcaatccacttgtgaagccgtgatgatccttcggtccaggttcctcgacgctaggcggaagcggaggaacttcagtaagcaggccacagaaattctgaacgaatatttctattcccacttaagcaatccatacccttccgaggaagctaaggaggaactagccaaaaagtgtagcattaccgttagccaggtcagtaattggtttggcaataaacgtatacggtataagaagaatattggcaaatttcaggaagaggccaacttgtacgcagccaaaacagccgtgaccgctgcgcacgccgttgcggccgctgtgcaaaataatcagaccaattctcctactactccgaactcaggaagcagcggcagcttcaacctgcctaactcaggggacatgttcatgaacatgcaatctttgaatggagactcataccaggggtcgcaggtcggcgccaatgttcagtctcaggtggatacattgcggcatgtgattaaccaaaccggtggatacagtgatggactgggagggaatagcctttattctccacataacttaaatgcgaacgggggctggcaagacgctacaaccccttcatccgtgacttcccctaccgagggccctgggagcgtgcacagcgataccagtaattag

SEQ ID NO: 129718 - DNA, 1368 bp, synthetic construct
  misc_feature 1..1368: note = Description of Artificial Sequence: Synthetic coding sequence
  source 1..1368: mol_type = other DNA
atggacgatcagtcgcggatgctccagacccttgcaggcgtaaacctggcgggccatagcgtccaggggggcatggcccttccaccaccaccgcatgggcacgaaggcgcggacggggatgggagaaaacaggatatcggcgacatcttacatcagattatgactataacagatcagagtttagacgaggcccaggccaaaaagcatgcattaaattgtcaccggatgaaacctgccctgtttagcgtgttatgtgaaattaaggagaaaacaggactttcaatccgcggcgcacaagaggaggaccccccagatcctcagcttatgaggctggacaacatgctgctggcagagggagtgtctggcccagaaaaggggggtggaagtgcggccgctgcggccgcagccgcggcctcggggggaagtagcgacaattcgattgagcactcagactatagagcaaagctgacccaaattagacagatttaccatacagaactggagaaatacgagcaggcctgcaatgaatttaccactcatgtgatgaatctcctgcgtgagcagagccgcacccgccctatatctccaaaggaaattgagagaatggtgggcatcatccacagaaagttttcctcaatacagatgcagttgaaacagtctacctgtgaagctgtgatgatcctgagaagcaggtttttagacgctcgccgcaagagacgaaatttcagcaagcaggcgaccgagatactgaatgagtacttctacagccatctctcaaatccctacccaagtgaagaggccaaggaagagctcgctaagaagtgcagcatcacagtgtcacagagcctggtcaaagatccaaaggagcgcggcagcaaggggtccgatattcagcccacttccgtggtgtccaattggttcggcaacaagcgcatcaggtacaagaagaacataggtaagtttcaggaggaggcaaacctgtatgcggcaaagaccgcagtgactgctgctcatgcagtagcggcagccgttcagaataaccaaaccaacagccccactacccccaattcgggaagcagtggcagctttaatctcccaaattctggagacatgttcatgaatatgcagtctttgaacggggactcctatcagggatcccaagtgggcgccaatgttcagtcccaggttgatacactccgacacgtgatcaatcagacaggtggatacagcgacggattgggaggcaatagtctgtactccccacacaatctgaatgccaacggcggctggcaggatgctaccaccccaagttctgtgacatcgccaaccgaaggccccggaagcgtacattccgatacctccaattag

SEQ ID NO: 129719 - DNA, 1305 bp, synthetic construct
  misc_feature 1..1305: note = Description of Artificial Sequence: Synthetic coding sequence
  source 1..1305: mol_type = other DNA
atggacgaccagtcccgaatgctgcagactctggcgggtgtaaatctcgccggtcatagtgttcagggaggcatggcgctgcctcctcccccccacggccacgagggagccgatggtgacggcaggaagcaggacatcggggatattctccaccagattatgaccatcactgaccaaagcctggacgaagctcaagccaagaaacacgctctcaattgccacagaatgaaacccgcactcttttcagtcctgtgcgagatcaaggagaagactggcctgtctattaggggggcgcaggaagaggatccacctgatccgcagttgatgcgattggacaatatgctcctggccgaaggcgttagcggccccgagaaagggggaggatccgctgctgcagctgctgccgccgctgccagtgggggaagcagtgataattcgatcgagcactctgattatcgagccaaactcacacagatacgtcagatctaccacacggagctggaaaaatatgagcaggcctgtaatgaatttacaacccatgttatgaatctcctgcgagagcagtctcggacacgacccatatcacctaaggagatcgagcgcatggttgggattattcatcgtaagttcagcagtattcaaatgcagttgaaacagtctacctgcgaagctgttatgatcctcaggtcacggttcctggacgcacgcagaaagcgacgcaacttcagtaaacaagccacagagatcctaaatgaatacttttacagccatttgagtaatccatacccctccgaggaggcaaaggaggagctcgccaagaagtgcagtatcacagtatctcaggtgtccaattggtttggcaataagagaatcaggtataaaaagaacatcggaaagtttcaggaagaggctaacctctacgcagccaaaacggccgtcaccgctgcccacgctgtagccgccgccgttcagaataaccagacgaattctcctactaccccaaatagtggcagttccgggagctttaaccttcccaacagtggtgatatgtttatgaacatgcagtccctcaatggcgactcctaccagggcagtcaggtgggcgcaaacgttcagtcccaggtcgatactctgaggcatgttattaaccagacaggcggctatagcgacggactggggggcaattccctctacagtccacacaatctgaacgctaatggcgggtggcaagacgcaacaactcccagctctgtgacctcccccacggaagggccaggatctgtgcacagtgatacttccaactag

SEQ ID NO: 129720 - DNA, 789 bp, synthetic construct
  misc_feature 1..789: note = Description of Artificial Sequence: Synthetic coding sequence
  source 1..789: mol_type = other DNA
atgagggggctgagcatcagaggagcccaggaggaagatccacccgaccctcagctcatgagactcgataacatgctgttggcggaaggcgttagtggaccagagaaaggtggaggcagcgcggcagctgccgctgccgccgctgctagcggcggctcgtccgataattcgatcgagcattcagactaccgagctaagctcacacaaattcgccagatctatcacactgagttagaaaaatacgaacaggcctgcaacgagttcaccacacacgtgatgaacctgttgcgggagcaatcaagaacgcgcccaataagcccaaaggaaatcgagcggatggttggtattattcatcggaagtttagtagcattcagatgcaactgaaacagtcaacgtgcgaagctgtgatgatcctgaggtcacgcttcttggatgcacggaggaaaagaagaaacttctccaaacaggccacagaaatactgaatgagtatttctattcacacctgtcgaatccgtatccttcggaggaggccaaggaagaactggcaaagaagtgcagcatcacagtgtcccaggtgtcaaattggtttggcaacaaaagaatccgatataagaagaacataggcaaattccaggaggaggctaacctttacgccgcgaagaccgctgtcacagctgcccacgccgtcgcagcagcagtacagaacaatcagacaaactcccctacaacccccaactccggaggctacccgccctcatgttaccagtccgacggtagactccaatag

SEQ ID NO: 129721 - DNA, 1080 bp, synthetic construct
  misc_feature 1..1080: note = Description of Artificial Sequence: Synthetic coding sequence
  source 1..1080: mol_type = other DNA
atgaaacctgccctgttctctgttctgtgtgagattaaagaaaagactgggctctccattcgcggagcacaagaagaggacccacctgatccacagcttatgagactggacaacatgttgctggctgaaggggtgagcgggcctgaaaagggcggcgggagcgctgccgcggctgccgctgctgccgctagcggcggctcatcggataatagcatcgaacacagtgactatcgcgcaaagctgacccagatcagacagatctatcacacagagttggaaaagtacgaacaggcatgcaatgagttcacaacacatgtgatgaacttgctgcgggagcagtcgaggacaaggccaatctcccccaaggagatcgaacggatggtgggcattattcaccgaaagtttagcagcatccagatgcagctgaagcaatcgacgtgtgaggcggtgatgatcctccgcagccggtttcttgatgctagacggaaaagaagaaatttctccaagcaagccacggaaatccttaatgagtacttctactctcatctgagcaatccatacccgagtgaggaggccaaggaggaactggctaaaaaatgctctataacagtgtcacaagtgagcaactggttcggcaacaaacgaattcgctacaagaaaaacatcggaaaatttcaggaggaggctaacctttacgccgccaagacagcagttacagcagcacacgctgtagccgccgcggtgcagaataatcagaccaatagtcccaccacacctaattctggctcatctgggagcttcaatctgcccaactcaggtgacatgtttatgaatatgcagtcactgaatggagatagctatcaagggtctcaggttggagcgaatgtgcagagccaagtcgacacacttaggcatgtgatcaaccagacaggtggctactccgacgggctcggggggaactctctgtactccccgcacaacctgaatgcaaacggtggctggcaggatgccactactccgtcttctgtaacaagcccgacagagggaccaggttctgttcatagcgatacaagcaactag

SEQ ID NO: 129722 - DNA, 1530 bp, synthetic construct
  misc_feature 1..1530: note = Description of Artificial Sequence: Synthetic coding sequence
  source 1..1530: mol_type = other DNA
atggagaggaggcgattgtgggggagtattcagagcaggtacatctcaatgtcagtctggacatcccccaggcggcttgtggaactggcagggcagagcctgttgaaggatgaggctctcgcaatcgccgccctggaactcctgcctagagagttattccctccactattcatggcggcatttgatggtcggcattctcagacgctgaaagcaatggtgcaagcctggcccttcacatgtctcccgcttggcgttctaatgaaaggccagcatctacatcttgagacatttaaagctgtattggatggactggacgttcttctggcccaagaagttagaccccgtcgatggaagctgcaggttcttgacctccggaaaaactcacatcaggacttctggaccgtgtggagtggtaatcgggcatctctctacagcttccccgaaccagaagctgcacagccgatgaccaagaagagaaaggtcgacggcctgagcacagaggctgaacagccctttattcccgttgaagtgcttgtggatctattcctcaaggagggtgcctgcgatgagctctttagttacctcattgaaaaggtgaagcggaagaagaacgtgttgcgtctttgctgtaagaaattgaaaatattcgccatgcccatgcaagatattaagatgatactgaagatggtgcagcttgactctattgaggatctggaggtgacttgcacatggaagcttcccactctggccaagtttagcccttatttgggccagatgatcaatctgcgccgtttgctgttaagtcatatccatgctagttcctacatcagtcccgagaaagaggagcaatacattgcacagtttacttcccagtttctctccctgcagtgcctacaagctctgtacgtcgacagcctgttctttctacgaggacgtctcgaccagctgctacgacatgtaatgaatcccctcgagaccttgagcattacaaactgtcgcttgtctgagggcgatgtgatgcacctctcccagtctccttccgtctcgcagctgagcgtgttgagtttaagcggcgtcatgctaacagatgtgtcaccagaacctcttcaggccttgcttgagagagcatccgcaactcttcaggacctcgtgttcgacgaatgcggaatcacagatgatcaattattggccctgttgcctagcctgtcccattgtagccagctgactaccctttccttttatgggaattctatcagcatatccgccttacagagtttattgcagcacctaatcgggttgtcgaacctgactcatgtcctttaccctgtgcctctcgagtcttatgaagatatccacggtacccttcacctggagcgcctcgcttatctgcacgcccgcttacgcgaactgttatgtgagctgggacgtccctcaatggtttggttgagtgctaatccctgcccccactgtggggataggacattctacgatcctgaaccaattctgtgtccctgcttcatgccaaactag

SEQ ID NO: 129723 - DNA, 1530 bp, synthetic construct
  misc_feature 1..1530: note = Description of Artificial Sequence: Synthetic coding sequence
  source 1..1530: mol_type = other DNA
atggagagacgtcggctgtgggggagtatccaatctcgatacattagtatgagcgtatggacatcacctcgccgactggtcgagctggcggggcaatcactgctgaaggacgaagccctcgctatagctgccttggaactcttgccccgcgaactgtttccacctctgttcatggccgccttcgatggccgacattctcagacactgaaagcaatggttcaggcatggccctttacttgcctaccactgggcgtcttgatgaagggtcagcatctccatctggaaaccttcaaggcagtgctggacggactcgacgttctgctggcacaagaagtccggccccgcaggtggaaactccaagtcctggatctacgtaagaactcacaccaggatttttggaccgtgtggtcaggtaaccgagccagcctgtactcatttcctgaaccggaggccgctcagcctatgactaaaaaaaggaaggtagatgggctgagtactgaggcagagcagccgtttatacctgtggaagtgctagtcgacctattcctaaaggagggagcctgtgatgaactcttctcttatctcatcgaaaaggtgaagcgaaaaaaaaacgtgctcaggctatgctgtaagaaattgaaaatctttgctatgcctatgcaggatattaaaatgatcctgaaaatggtgcagttggactccatagaggacctggaggtgacctgcacctggaagctccccactcttgctaaattttcgccttatctgggacagatgattaacctgagaagactgctgttgtcccacatccacgcctcttcttacatttcacccgaaaaagaggagcagtacatcgcccaatttaccagccaatttctcagcttacagtgccttcaggctctgtacgtcgactctttattcttcctgagggggaggttggaccaactgctccggcacgtcatgaatccgcttgagactctgtccattactaattgtcgcttgagcgaaggagatgttatgcacctgagtcaatcccctagtgtgagccagctcagtgtcctatcactgtcaggagttatgcttaccgatgtgtcccctgagcctcttcaagctctcctcgaaagagcaagcgcgactctccaagatttagtattcgacgagtgtggcattacggatgatcagttgctggccctcctgcccagtctgtctcactgtagccagctgacaacgcttagtttctacggaaacagtattagtattagtgctctccagtcactcttgcagcacctgatcgggctctccaatctcactcacgtgctctatccagtgcccctggagtcttatgaagacattcacggaacattacacttggagaggctggcatacctgcatgccaggcttcgagagctcctatgtgagcttgggcggccaagcatggtctggctcagtgccaacccgtgccctcactgcggggataggacattctacgatccggagcctattttgtgtccatgcttcatgcccaattag

SEQ ID NO: 129724 - DNA, 1530 bp, synthetic construct
  misc_feature 1..1530: note = Description of Artificial Sequence: Synthetic coding sequence
  source 1..1530: mol_type = other DNA
atggaacgcaggcgtttgtggggcagcatccagtcccggtatattagtatgagcgtgtggacgtcgccaagaaggcttgtggaactagccgggcagtcactcctgaaggatgaagcgcttgctatagccgcacttgaactgttaccgcgagaactgttccccccgctcttcatggcggcttttgacgggaggcatagtcagacactgaaggctatggtccaagcctggccatttacgtgccttcctctgggagtgctgatgaaaggacagcacttacatctcgaaaccttcaaggccgtgttggacggccttgacgtgcttctggcacaggaagtcagacctaggcgatggaaactccaagttttggatctaagaaaaaatagccatcaggatttttggacagtctggtccggcaatcgtgcctccctttactcattcccagaacccgaagcagctcagcccatgacgaagaagagaaaagtcgatgggctttccacagaagcagagcagcctttcattccagtcgaggtgctggtcgatctctttctgaaagagggggcttgtgacgagttgttctcttatctgatcgagaaagtgaagagaaaaaaaaatgttctgcggctgtgctgtaaaaagctcaagattttcgcaatgccaatgcaggacatcaaaatgattcttaaaatggtccagctagattctattgaggacctggaagtcacttgcacatggaaattgccgaccctggcgaagttttctccctatctggggcaaatgattaatctccggagattgttgctgagccatattcatgcatccagctatatatccccagagaaagaagaacagtacattgcgcagttcactagtcaattcctttctcttcaatgtttgcaagctctttatgtggactcccttttcttcctccgaggccggctggaccagctgctgcgacacgtgatgaaccccctcgagaccttgtcaatcaccaactgtagactgagcgagggagatgtgatgcacctatcccaatcaccatcagtcagccagctgagcgtcctgagtttatcaggcgtcatgcttacggacgtttccccggaacccctgcaagccctgctcgaacgggcatcggcaactttacaggatcttgtctttgatgagtgcggcatcaccgatgatcaacttttggccttgctgccaagcctgtcccactgctctcaattgaccacattgagtttctacggcaacagtattagcatcagtgctcttcaatcactactccagcacttgatcggcttatctaacctgacccacgtgttataccccgttccgctcgagtcttacgaggatatacacggaactttgcacctcgagcgactggcgtacttacacgctagactgagggagctgttatgtgagctcggaagaccgtcaatggtttggctcagcgccaacccatgtcctcactgtggagaccgcaccttctacgaccctgagccgattctttgtccttgttttatgcctaactag

SEQ ID NO: 129725 - DNA, 261 bp, synthetic construct
  misc_feature 1..261: note = Description of Artificial Sequence: Synthetic coding sequence
  source 1..261: mol_type = other DNA
atggagagaagaagactatgggggagtatccagtccaggtatataagtatgtcagtatggactagtcctcggaggctggtcgagcttgctggacagagcctcctgaaagacgaagcgctggctattgccgcgctggagctgttgccgagggagctgttcccccctctttttatggcggcctttgacggcaggcactcacagaccctgaaggccatggtccaggcatggccattcacatgtttgcctttaggagtgttgtag

SEQ ID NO: 129726 - DNA, 1530 bp, synthetic construct
  misc_feature 1..1530: note = Description of Artificial Sequence: Synthetic coding sequence
  source 1..1530: mol_type = other DNA
atggagcgcaggcgtctgtggggttcaatacagtcccgctatatttcaatgtcagtatggacatcacctcggaggctagtagaactggccggacagagtctgctcaaggatgaagccctggccatagctgcactggagttgctccctagagaactttttccacctttgttcatggctgcctttgatggacgccacagccagacgctgaaggcaatggtgcaggcctggcctttcacatgtttgcctcttggggttttgatgaagggccaacacttgcacctggagaccttcaaggcggtgttggatgggctcgatgtactgctggctcaggaggtgcgtcctaggagatggaagctccaggtactggacctcagaaagaattcgcatcaggacttttggacagtatggagcggaaacagagcaagcctgtatagttttcctgagccagaagccgcccagccgatgacgaaaaagcgaaaggtggatggtctgtccaccgaagccgaacagcctttcatcccggtggaagtcctagtcgacctgttcctgaaggaaggtgcatgcgacgagctgttcagttatctcatcgagaaggttaaaaggaagaagaatgtgctgagactctgttgcaagaaactgaagatcttcgccatgcccatgcaggatatcaagatgattctaaagatggtgcaactcgattcaatcgaagacctggaggttacatgcacctggaaactgcctacattagcgaaattctctccctatctcggccagatgattaacctgcgccgccttctgctttctcatattcacgcttccagctacatcagtcccgagaaggaggaacagtacatcgcacagtttacgtcccagttcttatcactccagtgcttgcaggcgttgtacgtagacagtctgtttttcctacgggggaggctggaccaattacttaggcacgtgatgaatcctttggaaaccttaagcatcacaaactgtcggctaagcgagggggacgttatgcacttgtctcagtcaccttccgtgagtcagctgtccgtcttatcactaagcggcgttatgctgactgatgtttcgcctgagcccctccaggctttgttggaacgtgcttcagccaccctccaggatctcgttttcgatgaatgcgggattaccgatgaccaactcttggcccttctcccgtctttgagtcactgctctcagttgacgacgttgagcttctacggcaacagcattagtatctccgctctgcagtccctgttacaacatctcattggcctgagcaatctcacacacgtattgtaccctgtgcccctcgagtcgtatgaagacattcacgggactctgcacctggagcggttggcatatctccacgcgagactgcgcgagctgctgtgtgaattaggcaggccttctatggtttggttaagcgccaacccgtgtcctcactgtggagaccgtacgttctacgaccccgagccaatactgtgtccatgttttatgcctaattag

SEQ ID NO: 129727 - DNA, 348 bp, synthetic construct
  misc_feature 1..348: note = Description of Artificial Sequence: Synthetic coding sequence
  source 1..348: mol_type = other DNA
atggagagaagacgtctatgggggagcattcagtcgcggtatatttccatgagtgtgtggacctccccaaggcgtctagtcgaactcgccggccaatcactgctgaaggacgaggccctcgccatcgccgctctggagttgctcccgcgcgagctgttccctcctcttttcatggccgccttcgatggacgccactcccagacccttaaggctatggtgcaggcctggcctttcacgtgcctccccttgggtgtcttgatgaaaggccaacatctccacttggagacctttaaagcagttttggacggattggatgtactcctggcccaggaagtgcggccacggtag

SEQ ID NO: 129728 - DNA, 459 bp, synthetic construct
  misc_feature 1..459: note = Description of Artificial Sequence: Synthetic coding sequence
  source 1..459: mol_type = other DNA
atggaaagaaggcgtctttggggtagcattcagtcgcgttatataagcatgtccgtgtggacatcgcccagaagactagtggagctggccggtcagagcttactcaaggacgaagccctcgctattgctgctctggagctgcttccgcgggagctttttcctcctcttttcatggcggcctttgacgggcggcattctcagaccctcaaagcaatggtgcaggcgtggccgttcacctgcctcccactgggtgtactgatgaagggacaacaccttcatctcgagacgtttaaggcggtcctggacgggctcgatgtgttgctggcacaagaagtaaggccaagacggtggaagctccaggtgctggacttgcggaaaaacagccaccaggatttctggacggtgtggtccggaaaccgtgcctccctctatagcttccccgaacccgaagccgcttag

SEQ ID NO: 129729 - DNA, 1482 bp, synthetic construct
  misc_feature 1..1482: note = Description of Artificial Sequence: Synthetic coding sequence
  source 1..1482: mol_type = other DNA
atgagcgtctggactagccctagaaggctcgtagagctggccgggcaatcactgttgaaggatgaggcgttggccattgccgcactggagctcctgcccagggagcttttcccccctctatttatggctgctttcgacggaaggcactcccagaccctcaaagctatggtgcaagcttggcctttcacttgtctgcccctcggcgtgctgatgaagggtcagcacttacacttagaaacatttaaagccgtgctcgacggtctggacgtgctcctcgcacaggaggtgagaccacgtagatggaagctgcaggtactggacctgcggaaaaatagtcaccaggacttctggaccgtctggtcgggaaaccgggcgtcactgtattcctttcctgagcctgaggcagctcaacccatgaccaagaagaggaaggtagatggactctcgactgaagctgagcaaccatttattcctgttgaagtgctggtcgacctcttcttgaaggagggagcctgtgatgagctgttctcctacctgatagagaaagttaaacggaagaaaaacgttttgcgtctgtgctgcaagaagctcaaaatcttcgccatgcccatgcaggacatcaagatgatcctgaagatggtgcagcttgactcgatcgaggacctggaggtcacctgtacttggaagctgccaacccttgcaaagttttccccgtatctgggccagatgatcaacctgagaagactcttgttgtctcacatccatgcatccagctatattagccccgaaaaggaagaacagtacattgctcagttcacaagccagtttctctcactgcaatgccttcaagccctgtatgtggattcattgttttttctgagggggcggttggaccaactcttacgacacgtcatgaaccctttagaaaccctgtccatcactaactgcagactctcagaaggtgacgtgatgcacctcagtcagagcccatcagtgagtcagctgtctgtactatctctgagcggggtcatgttgaccgacgtgtccccagagcccttgcaggctctgctggaacgcgcttcagctaccctgcaggatctggtgtttgatgaatgtgggatcaccgacgatcagctgttggccttgctcccctccctgagccattgctctcaactcacgaccttaagtttctatggcaactctatcagcatttctgccttacagtccctactccagcacctgatagggctcagcaatctaacccacgtgctgtatcctgtaccgctggagtcctacgaggacatccatgggaccctgcacctggaaaggctggcatacctgcatgcgcggctcagagagctcttatgtgagttaggtcggccaagcatggtgtggctttctgccaatccctgcccccactgtggtgatcgcacgttttacgaccccgagccaattctgtgtccgtgctttatgcccaattag

SEQ ID NO: 129730 - DNA, 606 bp, synthetic construct
  misc_feature 1..606: note = Description of Artificial Sequence: Synthetic coding sequence
  source 1..606: mol_type = other DNA
atggagcgcaggcgactctggggatcaattcaaagcaggtatatttcaatgagcgtgtggacttctcctagacgcctcgtggagttggcgggccagtccctactgaaggatgaggcgttggccatcgccgccctggaactcctgccccgggaactgttcccaccgctatttatggccgccttcgatgggagacattcccaaacccttaaggctatggtgcaggcatggccatttacttgcctccccctcggggtgctcatgaagggacaacacctgcacctggagacctttaaagcggtcttggatggcctcgacgtgctcctggcccaagaagtgcgcccccgtcgctggaaactgcaggtgctcgatctgagaaagaactcccatcaggacttttggacagtgtggtccggtaaccgcgcaagcctatactcttttccagagcctgaggccgcacaacctatgacaaaaaaaaggaaggttgacggactgagcaccgaggctgaacagccctttatcccagtcgaggttctcgtcgacctgttcctgaaagagggcgcttgtgatgaactgttctcatatttaattgagaaggtgaaaagatag

SEQ ID NO: 129731 - DNA, 1482 bp, synthetic construct
  misc_feature 1..1482: note = Description of Artificial Sequence: Synthetic coding sequence
  source 1..1482: mol_type = other DNA
atgtccgtctggactagcccgaggcgcctggtggaactcgccgggcagtcgctgttgaaggacgaggccctggcaatcgccgccttagaactgcttccccgagagctctttccgcctctgttcatggccgctttcgatggccggcacagccagactctgaaggcaatggtgcaggcatggccattcacctgtctgcccctcggtgtcctcatgaaggggcagcatctgcacctggagacctttaaagccgtcctggatggcttagatgttctccttgcgcaggaagttaggccgaggcggtggaaactgcaggtcctggacctgaggaaaaatagccaccaggacttctggacggtgtggtcgggtaacagagcaagcctatactcgttcccagagccagaggctgcccagccaatgacgaaaaaaaggaaggtagacggcctgtccaccgaggccgagcagccatttattcctgtcgaggtgctggttgacctatttctgaaagagggggcctgcgatgagcttttcagctatctcattgagaaggtcaagaggaagaagaacgttctgcgactgtgttgtaagaaattgaaaatttttgctatgccaatgcaggacataaagatgattcttaagatggtgcagctggattcaattgaggacctggaggtgacatgcacctggaagctgcccacattggcaaaattttctccttatctgggccaaatgattaatcttcggcgtctgctgcttagtcacatacatgcatccagttacatcagcccagaaaaggaggagcagtacatcgctcagtttacatctcagtttttgtcactgcagtgcctgcaggctctttatgtcgactccctgttcttcttaaggggccgcctcgatcagctcctgcggcacgtgatgaatcctttggagactctgtccataaccaattgtagattgagcgagggcgacgtgatgcacctctcacagtcgcctagtgtctcccagctatccgtgctctctcttagcggagttatgttgacagatgtgtcacccgagccactccaggctcttcttgaaagggccagcgcaactctgcaagatctggtgtttgacgaatgtggtattaccgacgaccagctgttagctctgctaccatctctgtctcactgcagccagcttactacactgtccttttacgggaatagcatctcaatttctgctctgcagtcactgttgcaacacttgataggactgtccaatttgactcacgtgctgtatcctgttcctctcgagagttacgaggacatccatggaacattgcaccttgagcggttagcgtacctccacgccagactacgcgagctgctgtgtgagctcgggaggccaagcatggtgtggctttcagcaaatccttgtccccactgtggggatcggactttttatgatccagagcccattctgtgcccctgttttatgccaaattag

SEQ ID NO: 129732 - DNA, 1530 bp, synthetic construct
  misc_feature 1..1530: note = Description of Artificial Sequence: Synthetic coding sequence
  source 1..1530: mol_type = other DNA
atggagcggcgcaggctgtggggctccattcagtctcggtacattagtatgagtgtgtggacgagtccccgaagactcgtcgagctcgctggccagtcgctcctcaaggacgaagctctggcgatagcagccctcgagctcttgccgcgcgagctgtttcctcccctttttatggctgcattcgacggccgtcatagccagaccctgaaggcaatggtgcaggcatggccttttacgtgcttgccattgggcgttctaatgaaggggcaacacctgcatctggaaacattcaaagcggtgctggatgggctcgatgttctgcttgcacaggaggtgcggccgcggcggtggaaactccaagttttagatcttcgcaaaaactcacaccaggacttttggactgtgtggtccggaaatcgcgctagtctgtacagcttccctgagcctgaggctgcccagccaatgaccaagaagagaaaggtcgatgggctgtctacggaggccgaacagccatttatccctgttgaagttttggttgatctgttccttaaggagggcgcttgtgacgagctgtttagttatctgatagaaaaggtgaaaaggaaaaagaacgtgctaagactgtgttgtaaaaagctgaaaatttttgccatgcctatgcaagacattaaaatgatcctcaaaatggtgcagctggattctattgaagatctggaggtcacatgtacgtggaagctccccacactggcaaagtttagcccgtatctgggccagatgataaacctcaggagattgcttctctcgcatatacatgcctcctcgtatattagcccagaaaaggaggaacagtatatagcacagttcactagccagttcctctctctccagtgccttcaggctctgtacgtggatagtttattttttttgcgcggccgcctcgaccagttgctgaggcacgtcatgaaccccctagagaccctgagtataacaaattgccggctttctgagggagatgttatgcacctcagtcagtccccatcggtgtcacaactgtcggtcctatcactaagcggcgtcatgctgaccgatgtatccccggaaccgctccaggcgttgctggagcgagcaagcgcgacattgcaagatctggtgtttgacgaatgtggtatcactgacgaccagctcctggcactgctgccctcactttctcactgctctcagctgactacactgagcttctacggcaacagcatatctatctcagccctgcagagcttattgcagcatcttattgggctctccaacctgacccatgtgctgtaccctgttccattagagtcctatgaggacatccacgggaccttgcacctcgagcggcttgcctaccttcacgcccgattgagagaattactgtgcgagttgggtaggcctagcatggtgtggttgtctgccaatccgtgcccccactgtggagacaggacgttctacgatcctgaacccatcctgtgtccctgttttatgccaaactag

SEQ ID NO: 129733 - DNA, 369 bp, synthetic construct
  misc_feature 1..369: note = Description of Artificial Sequence: Synthetic coding sequence
  source 1..369: mol_type = other DNA
atggccgcccccgtggacctggaactgaagaaagctttcacagagctgcaagccaaggtgatagacacccaacagaaagtgaagcttgcagatatccagatagaacagctgaatagaacgaagaagcacgcgcacctcaccgacaccgagatcatgaccctcgtcgacgaaacaaacatgtacgaaggcgtggggaggatgttcattcttcagtcaaaggaggccatccattctcagctgctggagaagcagaagatcgccgaagagaagatcaaggaactcgaacagaagaaatcctatcttgagagatctgtgaaagaagccgaagacaacatccgtgagatgctcatggcacgcagagcgcaatag

SEQ ID NO: 129734 - DNA, 465 bp, synthetic construct
  misc_feature 1..465: note = Description of Artificial Sequence: Synthetic coding sequence
  source 1..465: mol_type = other DNA
atggcggaaaacagcggacgcgccggcaagtcttcaggctctggtgctgggaaaggcgccgtctctgccgagcaggtcattgcgggtttcaatcgcctcaggcaggagcaacgggggttagcctctaaggcagccgaactcgagatggagctgaatgaacactctcttgtgatcgatacccttaaggaggtcgatgaaacacggaaatgctatcgaatggtgggcggagtcctggtggagcgaactgtcaaagaagttcttccagctttggagaataataaggaacagatacagaagatcatcgagaccctgactcagcagctgcaagccaaaggaaaggagctcaacgagttccgagaaaaacataatataaggctcatgggggaggacgagaagccggccgccaaagagaatagtgagggagctggggccaaggcctccagcgctggcgtattagtgtcatag

SEQ ID NO: 129735 - DNA, 405 bp, synthetic construct
  misc_feature 1..405: note = Description of Artificial Sequence: Synthetic coding sequence
  source 1..405: mol_type = other DNA
atggccgccacaatgaaaaaggcagctgcagaagatgtgaatgtcacattcgaagaccagcaaaagatcaataaattcgcgcgcaatacatcacggatcaccgaattaaaagaggaaatcgaggttaagaagaagcaattgcagaaccttgaagatgcatgcgacgatatcatgctggccgatgacgactgccttatgataccgtaccagattggcgatgtctttatcagccacagtcaggaggagacacaggagatgctggaggaggcaaaaaaaaacctccaggaagaaatcgacgcattagagagtcgggtggagtccattcagagggttctcgctgatttaaaagtgcaactgtacgctaagttcggtagtaacatcaatctggaggctgacgagagttag

SEQ ID NO: 129736 - DNA, 465 bp, synthetic construct
  misc_feature 1..465: note = Description of Artificial Sequence: Synthetic coding sequence
  source 1..465: mol_type = other DNA
atggcacagagtatcaatataactgagttgaatctacctcagctggaaatgttgaagaaccagttggatcaggaagtggagtttcttagcacttccattgcccagctcaaagtcgtgcagacaaaatacgttgaggccaaagattgcctgaacgttctcaacaagtccaacgagggaaaggagctcttggtgcctttgacatcttcaatgtacgttcccgggaaactgcacgacgtggaacacgtactcatcgacgtgggaaccggttactatgtcgagaagacggcggaggatgcgaaggatttttttaagcgaaaaattgacttcctgaccaagcaaatggaaaagatacagcccgcacttcaggagaaacacgctatgaagcaggccgtcatggaaatgatgtcccagaagattcagcagctgacagcgctgggcgctgcccaggctaccgctaaagcgtag

SEQ ID NO: 129737 - DNA, 330 bp, synthetic construct
  misc_feature 1..330: note = Description of Artificial Sequence: Synthetic coding sequence
  source 1..330: mol_type = other DNA
atggctcagagcatcaatattacagagcttaatttaccccagctggaaatgttgaagaaccagcttgaccagatgtatgtgcccggtaaactccacgatgtggaacatgtgttgattgacgtgggcacagggtactatgtggagaagactgcagaggatgctaaagacttctttaagaggaaaatagacttcctgacaaagcaaatggaaaaaattcagccagctttgcaggagaagcacgccatgaagcaggctgtaatggagatgatgtcacagaaaattcaacagttgaccgccctgggtgctgctcaggctaccgctaaggcctag

SEQ ID NO: 129738 - DNA, 465 bp, synthetic construct
  misc_feature 1..465: note = Description of Artificial Sequence: Synthetic coding sequence
  source 1..465: mol_type = other DNA
atggcccagagcattaacatcaccgagcttaacctcccgcagctggagatgttgaagaaccagctggatcaggaggtcgagttcctctccacgagcattgcacaactgaaggtcgtgcagacgaaatacgttgaggccaaggactgtctcaatgtcctgaacaagagcaacgaaggaaaagaactgttggtgcctctgactagctccatgtacgtgcctgggaagctccacgacgtggagcacgtgctcattgacgttggtacaggctattatgtggagaaaacagctgaggatgcaaaggactttttcaagcgaaagatagatttcctaacgaagcagatggaaaagatccagcccgctctccaggagaagcacgccatgaagcaggccgtcatggagatgatgtcgcaaaaaatccagcaactcactgcactgggagcggcgcaagctactgcgaaggcctag

SEQ ID NO: 129739 - DNA, 1281 bp, synthetic construct
  misc_feature 1..1281: note = Description of Artificial Sequence: Synthetic coding sequence
  source 1..1281: mol_type = other DNA
atgggcacactcagtgcacctccctgcacccagaggatcaaatggaagggtctgcttctaaccgcctcattacttaacttttggaacctcccaaccacagcacaggttactatagaagccgagccaactaaggtcagtgagggaaaggacgtcctgctgttagttcacaaccttccccaaaatctgacagggtatatctggtacaaagggcagatgcgtgatctctaccactacatcaccagctacgttgtagatggcgagatcatcatttatggcccggcatattcaggaagggagaccgcttactcgaatgccagtctcctgatccaaaacgtgaccagagaggacgccgggagctacacactccacattatcaaaggagacgatgggaccaggggggtgaccggacggtttactttcaccttacatctcgaaacccccaagccttccatatcttcatctaatttaaacccacgcgaaactatggaggccgtaagtctgacttgcgaccccgagacgcctgatgcctcttacctctggtggatgaacggacaatctctccccatgacccactctttgaagctgtctgagaccaatagaactctcttcctgttgggcgtaacaaaatatactgccggaccctacgaatgcgaaattaggaatccagtgagtgcttcccgttctgatccggtgaccttgaacttattgcccaaacttccgaaaccttacatcacgattaacaacctgaaccctagagagaataaggatgtactgaacttcacatgtgaaccgaaaagtgaaaactatacttacatctggtggcttaatggacagtcactgcctgtcagtccccgcgtcaaaagaccaattgagaatcgaatcttaattctccccagtgtgactagaaacgagacgggtccctaccaatgcgagatccgggatagatacggcggtatcagaagcgaccctgttactttaaacgttctgtacgggccggacctacctcggatctatcccagctttacatattatcgctctggagaggtactctatctgtcctgttctgccgattccaaccccccagctcaatattcgtggaccatcaatgagaagttccagctgccagggcagaagctgttcattaggcatataacaacaaagcacagcgggctgtatgtttgctcggtacgcaatagcgccacaggcaaggaatcttctaagtctatgacagtggaagtttctggcaaatggattcctgcctccctggccatcggcttttag

SEQ ID NO: 129740 - DNA, 432 bp, synthetic construct
  misc_feature 1..432: note = Description of Artificial Sequence: Synthetic coding sequence
  source 1..432: mol_type = other DNA
atggggacacttagcgcgccaccctgtacccagcggatcaaatggaagggactccttcttactgcgtccctgcttaacttttggaatctgcctactaccgctcaagtcaccatcgaggctgaaccgactaaagtttcggagggaaaggatgtcttgttactagtacataatttaccacagaacctcactggatatatttggtataagggacaaatgcgcgacctctatcattatattactagttatgtcgtggacggggaaattataatatacggaccggcctattcgggcagagagactgcttatagtaatgctagccttttgatacagaacgtcacccgcgaggatgccggaagttataccctccatatcatcaagggggacgatggtaccagaggggtaacgggcaggtttaccttcactctgcattag

SEQ ID NO: 129741 - DNA, 1287 bp, synthetic construct
  misc_feature 1..1287: note = Description of Artificial Sequence: Synthetic coding sequence
  source 1..1287: mol_type = other DNA
atgggaaccctgagcgcgccaccttgtactcaaaggattaaatggaaaggtttattgctgaccgcatccctgctcaatttctggaacctaccaaccaccgcacaggtcactatcgaagctgagcccacaaaggtttctgagggcaaggacgtgctcctgctggtgcacaacctccctcagaatctgacaggatatatctggtacaagggccagatgagagatctttatcactatattaccagttatgtggtggatggtgagattataatctatggtccggcctattcaggccgggagaccgcatactccaacgcgtcattgttgatccagaatgttacaagggaagacgccggcagttacaccttacacatcatcaaaggcgatgacggcaccagaggggtgaccggcaggtttaccttcacgctccacttggagacccccaagccatctatctcatcgtctaacctgaatcctcgagagactatggaagccgttagtttaacttgcgatcctgaaacacccgacgctagctacctttggtggatgaacgggcagagcctgccgatgacgcattccctgaagctcagtgaaacaaaccgaaccctgtttttactgggagtcaccaaatacactgctgggccatatgaatgtgagattagaaaccccgtgtcagcttcacgttcagatccggtgacgttgaatttactgcctaagctgccaaagccatatattaccatcaataacttgaaccctagggagaataaggatgttctgaattttacctgcgagcccaaatcagaaaactacacatatatctggtggcttaatggacagagtctccccgtgtctcctcgtgtgaaaaggcccatcgaaaatcgaattctgatcctgccatccgttactcgaaatgagactgggccttaccagtgcgagatcagagatcgttatggaggaatccgttctgaccctgtcaccctgaatgtgctgtacggaccagacttacctaggatctacccatctttcacgtattaccggtccggtgaagtcctctacctgagctgcagcgcagattcaaatccaccagcccagtacagctggactattaacgaaaaattccaactgcccggccaaaagctattcattaggcatattaccactaagcatagcgggttgtatgtgtgtagtgtgcggaacagtgccaccggtaaagagtcatccaagtccatgaccgtcgaagtgagtgcatattcctcctcaattaactatactagtggaaataggaattag

SEQ ID NO: 129742 - DNA, 1260 bp, synthetic construct
  misc_feature 1..1260: note = Description of Artificial Sequence: Synthetic coding sequence
  source 1..1260: mol_type = other DNA
atgggcaccttgagtgctcccccttgtacacagagaatcaaatggaagggcctcctgcttacagctagtctgcttaacttttggaatctccccaccacggcacaggtgaccattgaggccgagccgacaaaggtgagtgaaggtaaggacgtcctgctgctggtgcacaatttgccccagaatctcactggatacatatggtacaagggacaaatgagggatctgtaccactacataacctcctacgttgtcgatggggaaataattatttatggtcctgcctactccgggagggagacagcctattccaatgcttccctgcttatccaaaacgtgacaagggaagatgccggaagctacacactccacatcatcaagggtgacgacggtactcgcggagttactggcagattcacatttacgctgcacctggaaacaccgaaaccctcaattagcagttccaatctgaaccctagagagacaatggaggctgtgagtctcacttgtgacccagaaacgcctgacgccagctacctctggtggatgaacggtcaatctcttccaatgactcactcactgaagctgtctgagaccaatcggaccctctttttgcttggagtcactaaatacaccgccggaccctatgagtgtgagatccgtaaccctgtgagtgcttcccgctctgacccagtgactttaaacctgttgcccaaattgcctaaaccctacattactataaacaacttgaatccacgcgagaacaaagatgtcctcaactttacctgcgaaccaaagagtgagaactacacttatatctggtggctgaacgggcagagcttgccagtgtccccacgtgttaagcgacctatcgagaaccggattttgattctccctagtgtaactagaaatgagactggcccctaccagtgcgaaattagggatcgctacggcggcatccggtctgatcccgtgactctgaatgttctatatggtcccgaccttcctagaatttacccaagcttcacatattaccggtcaggtgaagtgctttatttaagctgttctgccgattccaacccacccgcccaatattcttggaccatcaatgaaaagttccagttgcccgggcagaaactgttcatccgtcatataaccacgaagcacagcgggttatatgtctgttccgtgcgtaattcagcaacagggaaagagtcttccaaaagcatgaccgtggaagtatcagattggacagtgccctag

SEQ ID NO: 129743 - DNA, 1254 bp, synthetic construct
  misc_feature 1..1254: note = Description of Artificial Sequence: Synthetic coding sequence
  source 1..1254: mol_type = other DNA
atggggacgctttctgccccaccttgcacacaacgtatcaagtggaaggggctgctgcttacagcatccctactaaacttctggaacctccccacaaccgcacaggttacaattgaagctgagccgacaaaggtgtcggagggtaaagacgtgctcctcctggtgcataacctgccacagaatttgaccggatatatttggtacaagggacagatgagggacctctaccactatatcacctcctatgtcgtcgatggagaaatcattatatacggccccgcctactcagggcgggagacagcctattctaacgcgtccttgcttatccagaatgtaacccgagaggatgccgggtcatataccttgcatattattaaaggggacgacggaaccagaggagtaaccgggcggttcactttcaccttgcacctggagactcctaagcccagcatttcatcctctaatcttaatcctagagaaacgatggaagccgtctctctaacctgcgatcctgagactcctgacgcaagctacctctggtggatgaacggccagtcactgccaatgacccacagtctgaaattatctgaaaccaacaggacactgttcctcctcggtgtaactaaatacacagccgggccttacgagtgcgagattcggaatccagtttccgcctccagatcagacccagtgactctcaacctcctgcccaagctgccaaaaccatacatcaccatcaacaacctgaatcccagagagaacaaagacgtgctgaattttacctgcgagcccaagtcagagaactacacatatatttggtggctaaacggccaaagcctgccggttagccctcgcgttaagagacccattgagaatcgaatactcattctgccttcagttacacggaacgagacaggcccttaccagtgtgagatccgtgaccgctacggcggcatcagatcagacccagtgactctgaatgtgttatacgggcccgatctgccccggatctacccatcgtttacatattatcgctccggcgaagtgctgtacctcagctgctccgctgatagcaacccaccggcccagtactcttggactatcaatgagaaatttcagctgcctggtcagaagctatttatccggcacattacgactaaacacagcgggctgtatgtgtgcagcgtgcggaatagtgcaacaggtaaagaatctagcaagagtatgaccgtggaggtttcagaggcactctag

SEQ ID NO: 129744 - DNA, 642 bp, synthetic construct
  misc_feature 1..642: note = Description of Artificial Sequence: Synthetic coding sequence
  source 1..642: mol_type = other DNA
atgggccccctgtccgcccccccttgtaccgaacacatcaagtggaagggcctgctattgacagtggaaacccccaaacctagcatctcttctagtaacctgaaccccagggaagctatggagacagtcattcttacttgcaaccctgaaacacctgacgctagctacctttggtggatgaacggccagagcttacccatgacgcaccggatgcagctgagcgaaacaaaccggacactgttcctgttcggcgttactaagtatacagcaggaccctatgaatgcgaaatttggaactctggttctgccagccggagcgatcccgtcacacttaacctgctgcatgggcccgacttgccacgtatctttccctctgtcacttcatattatagcggcgagaacctcgaccttagttgctttgccaattctaatccacccgcacagtactcctggactatcaatggcaaatttcagctgagcgggcagaagttgttcataccccagatcactcctaaacacaatgggctttacgcctgtagtgcacggaactctgccacaggcgaggaatcttctacctctctgaccattagggtgatagcccctcctggactgggaacttttgcctttaacaacccaacctag

SEQ ID NO: 129745 - DNA, 1008 bp, synthetic construct
  misc_feature 1..1008: note = Description of Artificial Sequence: Synthetic coding sequence
  source 1..1008: mol_type = other DNA
atgggcccactgagtgccccgccttgcaccgaacatattaaatggaagggccttctgctgaccgcgttgttgttgaatttctggaacctacccaccaccgcacaggtcatgatcgaggctcagccccctaaagtttcggagggaaaagatgtcctactccttgtgcataacctgccccagaatctcactggctacatttggtacaagggccagatccgagacctctaccattatatcacttcctacgttgtggacggccagatcataatttacgggccggcctactcgggaagagaaaccgtgtactctaatgcctctctgctgatacagaatgtcacgagggaggacgccgggagttacacacttcacatcattaaacgtggcgacggcacaagaggcgtgaccggctacttcaccttcactctgtatctggagaccccgaaaccatccatttcttctagcaacttgaaccctcgcgaagccatggagaccgtgatacttacctgcaatccagaaacgccagatgcttcctacctttggtggatgaatggacagtccctgccgatgacacatcgcatgcaacttagtgagaccaaccgcaccctgttcctgttcggagtgaccaaatacactgctggtccatatgaatgcgaaatttggaacagtggatcagcttcaaggtccgaccccgtcacattgaatctgctccacggccctgacctacctcgcatatttccctcagtgacatcttactacagtggtgagaaccttgatctgtcctgtttcgctaattccaatccccccgctcagtattcttggaccattaatgggaaattccaactgtctggccagaagctttttattccccagatcacaccaaagcataacggcctgtacgcttgctcagcgcgcaatagcgccaccggcgaggagagctctacgagcctgactattagagtgatcgctcctcctgggctcggaacattcgccttcaacaaccccacttag

SEQ ID NO: 129746 - DNA, 1008 bp, synthetic construct
  misc_feature 1..1008: note = Description of Artificial Sequence: Synthetic coding sequence
  source 1..1008: mol_type = other DNA
atgggcccgctgagcgctcctccgtgtacagagcacatcaagtggaagggcctgctgctaactgctctgctgctgaacttctggaatttgccaaccactgcccaggtaatgattgaggctcagccacccaaagtaagtgaaggcaaggacgtgctgctgctagttcataacctgccccagaaccttaccggttatatatggtacaaagggcagataagggatctctaccattatatcacaagttacgtggtggatggccagataatcatctacggaccagcgtactcgggaagagagacagtttactccaatgcctccctgttgatccagaacgtaacacgagaggatgctggcagttacactctgcatattattaaacggggagatggcacacggggcgttaccggatattttacatttacattgtacttggagacccccaagccgtcaatttccagctcgaatctgaatccaagagaagccatggaaaccgtgattcttacttgcaatccggaaactccggacgcctcctacctatggtggatgaacggacaaagcctgcccatgacacataggatgcagctgagtgaaaccaacagaaccttgttcctattcggagtaaccaagtatactgcagggccctacgaatgtgaaatttggaatagtgggagcgcatctaggagcgaccctgtgaccttgaatttattgcatggccccgatctgccgaggatctttccgtcagtcacatcctactacagtggagagaacttggatctgtcgtgctttgcaaattctaatcccccagcgcagtatagctggaccattaatggtaagttccagctctccggacagaagttgtttatccctcagattacgccgaagcataatggtttgtatgcctgtagcgctagaaatagcgcgaccggcgaagagtcctcaacgtctctgacaattagagttattgcgcctcctggattgggcacctttgcttttaacaacccaacatag

SEQ ID NO: 129747 - DNA, 642 bp, synthetic construct
  misc_feature 1..642: note = Description of Artificial Sequence: Synthetic coding sequence
  source 1..642: mol_type = other DNA
atggggcccctttcggccccaccctgtactgagcatatcaagtggaagggtctgctgctgactgtggagacacccaagccaagcatctcttcgagtaacctcaatcccagagaagccatggaaacagtcatccttacctgcaaccccgaaacgccagatgctagctacctctggtggatgaacggccagtctttacccatgactcaccgcatgcagctttctgagacaaacagaactctgttcttattcggagtgaccaaatacactgcagggccttacgagtgtgaaatctggaacagtggatccgcctcaagatcagatccagtgaccttaaatctcctccacggccccgacttacctcggattttcccttccgtgacatcttactactccggggaaaatctggacctgagctgcttcgcaaatagcaatccacccgcacaatactcgtggactataaatggtaaatttcagctgagcggccagaagttatttattccacagatcacaccaaagcacaacgggctgtacgcctgctcagcccggaactcggccacgggagaggaatcttcaacaagtttgaccatccgagttatagcaccacctgggctgggcacattcgcattcaacaacccaacttag

SEQ ID NO: 129748 - DNA, 1008 bp, synthetic construct
  misc_feature 1..1008: note = Description of Artificial Sequence: Synthetic coding sequence
  source 1..1008: mol_type = other DNA
atgggacctctttccgctcctccttgcaccgaacacattaaatggaaaggcttgctggtgacagcttcgttgctgaatttttggaatctgccgactaccgcgcaggtaaccatcgaggctcagccccctaaagtaagcgagggcaaagacgtcctgctccttgttcataatctgccacagaatctgactggttatatctggtataagggccagattagagatctatatcattacatcacatcctatgtggtggacggccagattatcatttatgggcctgcctattctgggagagagacagcttattctaacgccagcttgcttatccaaaatgtgactagggaagacgcgggctcttacaccctccatattatcaaaagaggggacggtacccggggggtgacaggatacttcacattcaccctatacctggagactcctaagccgtccatctctagctctaacctaaacccaagagaggctatggaaactgtcatcttgacatgcgaccccgagaccccagacacatcttaccagtggtggatgaatgggcaaagccttccaatgacgcaccgcttccagttatcagagaccaaccggacactttttctgttcggtgtgacaaagtatacggctggcccatatgagtgcgaaataaggaacagtgggtccgcctcgaggtccgatccggtaacactaaatctgcttcatgggcccgatttaccacgaatccaccctagctacaccaattaccgttctggagacaacctgtatctgtcatgctttgccaactccaacccgccagcacagtactcttggacgattaacgggaagttccagcagagcggacagaatctcttcatcccccagatcactactaagcattccggtctgtacgtctgcagtgttcgaaactccgctactggcgaggaatccagcaccagcctgactgtgaaggtaagtgcaagcactcggatcggtctgctgccactgttgaacccaacttag

SEQ ID NO: 129749 - DNA, 1008 bp, synthetic construct
  misc_feature 1..1008: note = Description of Artificial Sequence: Synthetic coding sequence
  source 1..1008: mol_type = other DNA
atgggaccattaagtgcccctccttgtaccgaacacatcaaatggaaagggctgctcgtgaccgcaagcctcctgaacttctggaaccttccaacgacagcccaggtcacaatcgaagcccagcctcccaaagtgagtgaaggcaaagatgtgttgttgctcgttcacaacctgccacagaatttgacggggtatatttggtacaagggccaaatccgggacttgtatcattatatcacttcatacgtggtggacggccagatcataatctacggacctgcctactctggccgagagaccgcttatagcaacgccagtttgctgatacagaacgtcacccgcgaggacgcgggatcatatacactccatataatcaaacggggggatggcacacgcggcgttacaggatactttacattcaccctttatctggaaactcctaagccctctatatcaagttctaatttgaatccacgagaagcaatggaaaccgtaattttgacttgcgaccccgagactccggatacatcctatcaatggtggatgaatggccaatccctaccaatgacccataggtttcagttgtccgagaccaacaggaccctcttcctgtttggcgttactaaatacacagctgggccttatgagtgtgagatcaggaactctggatcagcttctagaagcgacccagttaccttaaatctgctccacggccctgatctgccccggattcaccccagctatacgaactatcgatcaggggataatctgtatttgtcgtgtttcgctaactctaacccaccagctcagtattcatggactataaacgggaagtttcagcaatctggtcagaacctgtttattccgcagattactaccaagcatagcggcctgtatgtctgctcagtcagaaatagtgccacaggcgaggaatccagcaccagcctcaccgtgaaagtgtcagcctctactcggattggtttacttccactcctgaatcctacgtag

SEQ ID NO: 129750 - DNA, 1008 bp, synthetic construct
  misc_feature 1..1008: note = Description of Artificial Sequence: Synthetic coding sequence
  source 1..1008: mol_type = other DNA
atgggacccctgagcgcaccaccttgcaccgagcacattaaatggaagggcctgctcgtgactgctagtcttcttaacttttggaacctgccaaccacggctcaagtaacaattgaggctcaacctcctaaggtgtctgagggcaaggacgtgcttctcctcgtccacaacctccctcagaacctgacaggatacatttggtacaaggggcagatccgggatttataccactatattacctcatacgtggtggatgggcagattatcatctacggccctgcttatagtggccgtgaaacggcctattccaacgcatccttgctaatccaaaacgtgacgagggaggatgcaggatcttacactctgcacattatcaagaggggagacggcactcgcggggttactggatatttcactttcaccctttatctcgagacccctaagccctccatcagcagttctaaccttaatcccagggaagctatggagactgttatcctcacctgtgaccccgagaccccagacacctcttaccagtggtggatgaatggacagtcacttccgatgacgcacaggttccagctgtctgagaccaatcgtaccctctttttgtttggggtgacaaaatatacggccggcccatatgagtgcgagatcaggaatagcgggagcgcttctcggtccgatccagtgacattaaaccttttacacggacctgatctgccacgaatccatccatcctacacaaactacaggagcggcgacaatctgtacctgagttgtttcgcgaattcaaacccccctgcgcagtactcgtggactattaacggcaaatttcagcaaagcgggcagaacctcttcattccccagatcacaacaaagcacagcgggctgtacgtttgctcagttcgaaactccgcaacaggagaggagtcatccacctcactcactgtaaaggtttccgcctctacccggatcgggctcctgcccctgctgaatcccacctag

SEQ ID NO: 129751 - DNA, 1287 bp, synthetic construct
  misc_feature 1..1287: note = Description of Artificial Sequence: Synthetic coding sequence
  source 1..1287: mol_type = other DNA
atgggaccccttagcgcacctccatgcactcagcgcattacttggaagggcctgctgcttaccgctttattgctcaacttttggaacttacctactactgcgcaagtgactatcgaggccgaacctacaaaggtatcaaagggcaaagacgttctgcttctggtgcacaacttaccacagaacctcgccggatacatatggtacaaaggtcagatgaaggacctgtaccactatatcaccagctacgtggtggatggacaaattatcatttacggacctgcgtactctggccgtgagactgtctatagcaacgcaagcctgctgatacagaacgtgacacgtgaagacgcaggctcttacactctccatatcgtgaagagaggggatggcacacgaggcgagactggccattttacttttacactatatctcgagacgcccaaaccctccatcagctcctctaatctctaccccagagaggatatggaggcggtgagcctgacgtgtgacccagagacccccgatgcttcatacctgtggtggatgaacggccagtcactgccaatgacacactcacttcagctgtctaagaataagcggactctgtttctgttcggcgtcaccaagtacaccgcgggaccttatgagtgcgagattagaaaccccgttagtgccagcagaagcgaccctgtgacgctgaatctgctgcccaaactcccaaagccatatatcaccatcaataacctgaacccgcgcgagaacaaagatgttctggcttttacatgcgaacccaaaagtgaaaactatacatacatctggtggttaaatggacagagtctgccagttagcccccgggttaaaaggcctatcgagaatagaatcttaatcctgcccagcgtcacgcgaaacgaaactggcccctaccagtgcgaaatccaggatcgctatggagggatccggtcttacccggtgactctcaacgtcctctacgggcccgacttacctagaatctacccgtccttcacctactaccactccggtgagaacctctatctgtcatgctttgctgactccaaccctcccgcagagtactcttggacaataaatggaaagttccaactaagcggtcagaaactcttcatcccccaaatcactacaaagcacagcggactctatgcgtgttccgtcaggaatagcgctactggaatggagtcatccaagtccatgacagtaaaggtgtctgccccatcaggcacgggccatctgcctgggctgaatccgctttag

SEQ ID NO: 129752 - DNA, 981 bp, synthetic construct
  misc_feature 1..981: note = Description of Artificial Sequence: Synthetic coding sequence
  source 1..981: mol_type = other DNA
atggggcccttatctgcacctccctgcacacagcgaattacgtggaagggggtgcttctgactgcatctctgttgaacttttggaacccccctacgacagcgcaggtgacaatcgaggcacaaccacccaaggtatccgagggcaaagatgtcttgttgcttgtgcataatctccctcagaacctggcgggatatatctggtataaaggtcagatgacctatctatatcattacatcacatcgtacgtggtggatggccaacgaattatatacggccccgcgtactcaggacgagaaagggtgtatagcaacgcttctctactaatccagaatgtaactcaggaagatgcgggctcttatactctgcacattatcaaacgccgggatggtaccgggggcgttaccggccattttacctttacattgcatctggaaacacccaagccctcaatttcaagctctaatttgaacccccgcgaagcaatggaagccgtcatcctgacatgcgatccggcaacacctgcagcttcctaccagtggtggatgaatggtcagagtctgccgatgacccacagactacagctttctaagactaaccggaccctgtttatcttcggggtcacaaagtatattgcaggaccatacgaatgcgagatccgaaaccccgtgagcgcctctcgctccgatcccgtgacccttaacctactgcacggaccagatttaccatccatctacccttcttttacctattaccgtagcggcgagaatctgtatctgtcgtgctttgctgagagcaatcctcgcgcccaatatagctggacaatcaacggtaagttccagctcagtggacagaagctctccatccctcagataacaactaagcactcgggcttgtacgcttgtagcgttcggaacagcgcgacaggcaaagagagtagtaaaagcatcacggtaaaggtgtcagactggattctaccttag

SEQ ID NO: 129753 - DNA, 1260 bp, synthetic construct
  misc_feature 1..1260: note = Description of Artificial Sequence: Synthetic coding sequence
  source 1..1260: mol_type = other DNA
atgggtcccctgagcgccccgccttgcactcagagaatcacttggaaaggggtgcttctgacagcttccctgctgaacttctggaatcctcctacaacagcccaggtgacaatcgaggctcagccccccaaagtgtctgagggcaaggatgtgctgctgctcgtgcacaacctcccacaaaacttggctggctacatctggtacaagggacagatgacttatctgtaccactatatcaccagctatgtagtggatgggcagagaataatctacggaccagcctattccggacgggagagggtgtacagtaatgcatctctgctcatccaaaatgtgacccaggaagatgctggttcatacaccctgcacattatcaaaaggagggacggaaccggtggcgttaccgggcactttaccttcacactgcacctcgaaacgcccaagccctcaatcagctcatcgaacttgaaccctagggaagccatggaagcagtgatcctaacgtgcgaccccgccacgcccgccgccagctatcaatggtggatgaacgggcaatctctgcctatgacccatcggctccagctcagcaagaccaatcgaacgttattcatcttcggggttactaaatacatagctggaccctacgagtgtgagatccgaaaccctgtcagcgcatcccggtctgacccggtaactctgaacctcctgcccaaactctcaaagccctatatcacaatcaacaatttgaacccacgagagaataaggacgtgctgacctttacatgtgagccaaagtcaaaaaattacacttatatctggtggctgaacggccagagtctgcccgtgtccccgcgtgtcaaaagaccgatagagaaccgtattctgatcctgccgaacgtcacccgcaacgaaaccggcccttaccaatgcgaaatccgcgacagatacggcggcatccgttccgaccctgttaccctgaacgtattgtatggtcccgaccttcccagtatatacccctcttttacatattaccgaagcggggagaatctgtacctctcatgctttgcagagtccaatcctagagcccagtactcttggacaataaacggcaagtttcagctgagtgggcagaagctgagcatcccacagatcaccacaaagcactctggattatacgcatgcagtgtccggaatagtgctacaggcaaagagagtagcaaaagcattactgtcaaagtgagcgactggatactgccttag

SEQ ID NO: 129754 - DNA, 981 bp, synthetic construct
  misc_feature 1..981: note = Description of Artificial Sequence: Synthetic coding sequence
  source 1..981: mol_type = other DNA
atgggacctttgtccgcccctccttgtacccaacgcattacatggaagggtgttctattaacagcttctctactgaatttctggaacccgccaactactgcccaggtgaccatcgaagctcaaccgcccaaagtttcagaaggtaaagacgtcctgctcctggtgcataacttgccacagaacctggccggctacatctggtataagggacagatgacctatctgtaccactatatcacgtcctacgtcgtcgatggccagcggattatttacggccccgcatactcaggcagagagcgggtgtactctaatgctagcctcttgatccagaacgtcacacaggaagacgccggttcttacaccctgcatattatcaagcgacgggatgggaccggtggcgtgaccgggcactttacctttacactgcatccaaagctgtccaaaccttatattactatcaataatcttaatccccgcgaaaataaagacgttcttacctttacctgtgagcctaaatcgaagaattacacctacatttggtggttgaacggacagtcactcccagtttcgccgcgggtgaagcggcctatagaaaacaggatcctgatcttacctaacgtaaccaggaacgaaaccggaccctaccagtgcgagattcgtgaccgctacggcggcattcgatcagaccctgtgactctaaatgtgctttacgggccagaccttcctagcatctacccaagttttacttactacagaagcggagagaatctttacctcagctgtttcgccgaaagcaacccacgcgcccagtacagttggacgatcaacggaaagttccagctctctggtcagaaacttagcattcctcagattacaactaaacattcagggctgtatgcttgttccgtgcgcaactctgcgaccggcaaagaatcctcaaaatccattaccgtgaaggtgtccgactggatcctgccctag

SEQ ID NO: 129755 - DNA, 1008 bp, synthetic construct
  misc_feature 1..1008: note = Description of Artificial Sequence: Synthetic coding sequence
  source 1..1008: mol_type = other DNA
atgggaccgctgagcgcccctccttgtacccaacacatcacctggaagggactgctgttgaccgcctccttactgaacttttggaatcttcctattaccgctcaggttaccattgaggccctgcctccaaaagtatccgaaggtaaggatgtactcctactcgttcacaatcttcctcagaatctcgccggttacatctggtacaaggggcagctcatggacctatatcattacatcacaagctacgtggtggacggccagataaatatctacggcccagcctatactggacgtgagactgtctactcgaatgccagcctgctcattcagaatgtgacacgggaggatgccggtagttacacactgcatatcatcaaacgaggcgaccgaacaaggggggtgaccgggtactttaccttcaacctgtatctgaaactgcccaagccctatatcacaatcaataattctaagcctcgagaaaataaggacgttctggcctttacatgcgagccaaagagcgagaactatacctacatttggtggcttaatggtcaatctctcccagtctctcccagagtgaagaggcctattgaaaaccgcatcctcattctcccctcagtgactagaaacgaaacaggtccctacgaatgtgaaattcgcgacagagatggagggatgcggagtgatcccgtgaccctgaacgttctgtacggccctgatcttccgagcatttacccttcttttacgtactatagaagtggtgagaacctctacctctcctgctttgcagaaagcaacccaccagcagaatatttttggacaatcaatggcaaattccagcagtcaggccagaaactgagcattccccaaattacgactaagcaccgcggtctttatacgtgttccgttaggaacagtgccaccggaaaagagtcctcaaaatccatgaccgtggaggtgagcgccccatccggcatagggcggctgcccctgctgaaccccatttag

SEQ ID NO: 129756 - DNA, 1008 bp, synthetic construct
  misc_feature 1..1008: note = Description of Artificial Sequence: Synthetic coding sequence
  source 1..1008: mol_type = other DNA
atgggccccttaagcgcgcctccatgcactcagcacatcacctggaaaggacttcttcttactgcctctttacttaatttctggaatctgcccatcaccgcacaggtcaccatcgaggccctccctccgaaggtttctgaagggaaagacgtgctgctgctcgtgcacaatctgcctcagaatctggctggctatatatggtataagggtcagctcatggatctgtaccattacattacttcctacgtcgttgacggccagatcaatatctacggtcctgcatacaccgggcgggaaacagtctactcaaatgcctccttgctcatacagaacgttaccagagaggatgccggaagctacaccctgcacatcatcaagaggggcgatcgcaccaggggagtgactgggtactttacctttaacctgtaccttaaactgccaaagccctacattactattaataactccaagcccagagaaaataaggatgtcctggcttttacatgcgagcccaaatccgagaattatacctatatctggtggcttaatggacagagcctgcccgtatccccacgggttaaacgaccaattgagaatagaattcttatcctaccaagcgttactcggaacgagacggggccctacgagtgtgagatccgggatagggacggcggcatgaggtccgatccggtaaccctcaatgttctctacggacccgacctcccatccatttatcctagctttacttactatcgcagtggcgagaatttatatctcagttgtttcgcagaaagcaatcccccagccgaatacttctggactatcaatggaaaatttcagcaaagcggtcagaaactttcgattccacagataacgactaaacacagaggcctgtacacctgcagtgtccgcaactctgccaccgggaaggaatctagcaaatccatgacagtcgaagtgtccgccccaagcggcattgggcgtctgcctctactgaatcctatttag

SEQ ID NO: 129757 - DNA, 1008 bp, synthetic construct
  misc_feature 1..1008: note = Description of Artificial Sequence: Synthetic coding sequence
  source 1..1008: mol_type = other DNA
atgggcccactgagcgctccaccctgcacacaacacatcacttggaaaggactactcctgaccgcttcacttctgaatttctggaatttgccaataaccgcccaggttactattgaggctcttccccccaaagtgtcagaggggaaggacgttttgctattagtgcacaatctacctcagaatcttgccgggtacatttggtacaagggacagcttatggatctctatcattatatcacctcgtacgtggtggatgggcagataaatatctacggaccggcctacactggacgggagaccgtgtactcgaacgccagccttttaattcagaacgtcactcgggaggacgccggctcctacactctgcacattatcaaaaggggggaccgcactagaggggtcacagggtattttacattcaacctctatcttaaacttcctaagccctacataacgattaacaattcaaaacccagagaaaataaggatgtcctggcttttacatgtgagccaaaatccgaaaactacacctatatttggtggttaaatggacagagcttgccggtaagtccacgcgtgaagcgcccaattgagaatagaatcctgattttgccatccgtcacgaggaacgaaaccggcccctacgagtgtgagatccgagatagggatggaggtatgagatccgaccccgtgacacttaatgtgctttacggaccagacctaccctctatttacccatcattcacgtattaccggagcggcgaaaacctatatctgtcgtgcttcgcagagtccaacccgcctgcagagtatttctggaccattaatggtaaattccagcagagcggacagaaactgtcaatcccacaaatcactaccaaacatagggggctctatacatgttccgtgcgcaattctgccacgggaaaagaaagcagcaagagtatgacggtcgaggtgagcgccccgtccggcatagggaggctccccctgctgaatccaatttag

SEQ ID NO: 129758 - DNA, 1275 bp, synthetic construct
  misc_feature 1..1275: note = Description of Artificial Sequence: Synthetic coding sequence
  source 1..1275: mol_type = other DNA
atgggaccactgtctgctcccccctgtacgcagcacattacctggaaaggactattgcttaccgcctctctgctaaacttttggaatctgcctaccacagctcaggtgattattgaggccaagccgccaaaagtttcagagggaaaagatgtgctactcttagtccataatcttcctcagaatctcaccgggtacatctggtacaaggggcagatgactgacctgtaccactatattactagttacgtggtccatggccagatcatctatgggcccgcgtacagcggccgcgagaccgtgtattcaaacgcgtcactgcttattcagaatgtcacgcaggaggatgctggatcgtacacccttcatattatcaagcgaggggacggaacaggcggcgtcaccggctactttaccgtaacactttactcggagacccctaagccgtctatctcttccagcaacctcaatccccgagaagttatggaagcggttcggcttatctgtgatcctgaaacacctgacgctagttacctgtggctcctcaatgggcagaacctgcccatgacacacagactgcagctatcgaagaccaaccggaccctctatctcttcggggtgactaaatacattgcaggcccctacgagtgcgagattcgaaaccctgtaagtgcctcaagaagtgacccagtgaccttgaatcttctgcctaaactgcccatgccatacatcaccatcaacaatttgaacccccgggaaaagaaggatgtgttagcttttacctgcgagcctaaaagtcgaaattacacatacatctggtggctcaacgggcagagcctccctgtgagcccccgcgtgaagagacctatcgagaaccgaatcttgatcctgccttccgtcacccggaacgaaactggtccttaccagtgcgagattcgggacagatatgggggtatccgtagtaacccagttactctgaatgtcctatacggcccagacttacctcgcatctaccccagcttcacctactatcgaagcggtgagaatcttgatctctcttgtttcgccgatagtaatcctcctgctgaatattcgtggacgatcaatggcaagttccagctgtctgggcaaaagctgttcattccccagataacaaccaaccactctgggctttatgcttgtagcgttagaaattccgccacgggaaaagagattagcaagtcaatgatcgtgaaagtctctggaccttgtcacggcaatcaaactgagtcccactag

SEQ ID NO: 129759 - DNA, 1308 bp, synthetic construct
  misc_feature 1..1308: note = Description of Artificial Sequence: Synthetic coding sequence
  source 1..1308: mol_type = other DNA
atgggtcccctgtctgcgccgccttgcacacagcacatcacatggaaaggactgctccttactgcctccctgcttaatttctggaatcttcccaccacggcccaagtgattattgaggccaaacctcccaaggtctcagagggcaaggacgtgctgttgctcgtccataatttgccacagaaccttaccggatacatctggtataaaggtcagatgactgacctgtatcactacattacatcatacgtggttcacgggcaaatcatctacggccctgcatactcgggtcgggagaccgtgtatagcaatgcatccctgctgatccagaacgtgacccaagaggatgctggctcatatacgcttcacattattaagagaggggatgggacaggcggtgtcactgggtatttcacggtgaccctctatagcgaaactccgaagccctccatatcgtcctccaatctcaacccccgcgaagtgatggaggccgtgaggctcatatgcgaccctgaaacacccgatgcatcatacctttggcttctcaatggacaaaatctgcctatgacccatcgcctgcagttgtctaaaaccaatcgaacactatatctgttcggtgtcacaaaatatattgccggcccttacgagtgtgaaattcgcaaccctgtgagcgcatcacgttctgaccccgtgacacttaatctcttgcctaaactgccaatgccttatataaccattaataacctgaaccctagagagaaaaaggatgttctggccttcacttgcgagccgaagtccagaaactacacgtatatatggtggctcaacggccagagtcttcccgtgtcacccagagtcaaaaggcctattgagaatcgcatacttattttgccaagcgtaacaaggaatgaaaccggaccttaccagtgcgaaatcagagacaggtacggcggaattagatccaacccagttacactgaatgtgctctatggaccagatctccctcgtatctaccctagttttacctattatcgctctggggagaacctcgatttatcatgctttgcagactcaaatccgccagcagaatactcttggaccatcaacggtaagtttcagctttctggtcagaaactgtttattccgcagatcactaccaaccactccgggctgtatgcatgctcagtgagaaattctgccacaggaaaggaaatctctaagagtatgatcgtgaaggtgtctgaaaccgcctctccgcaagtaacatatgctggccctaacacatggttccaggagattctgctcctgtag

SEQ ID NO: 129760 - DNA, 606 bp, synthetic construct
  misc_feature 1..606: note = Description of Artificial Sequence: Synthetic coding sequence
  source 1..606: mol_type = other DNA
atgggcggcgatgaaaatcggggggtcacaggtcactttacctttaccttgtacctggaaaccccaaaaccttcaatcagcagcagtaaactcaacccaagagaggctatggaggccgtcagtcttacctgcgatccggagaccccagacgcatcttacttatggtggatgaatggccagtcactaccaatgtcccacagactgcagctgagcgagaccaatcggactctgtttctcctcggggtgactaaatatacagctggaccctacgaatgtgagattcggaatcccgtatctgcctcacgatctgacccttttactctcaatctgcttcatggccccgacctgccaaggatttatccctcatttacttactaccggtcaggcgaagtcctgtacctctcttgcagtgctgactctaacccgccagcccagtatagttggacaattaacgggaagtttcagctctctggacagaagctctttattccacagatcactaccaagcatagcggattatacgcctgtagcgtacgcaactcagcaaccggaaaggaaagcagtaagtctatgactgttaaagtgagtgactggacccttccatag

SEQ ID NO: 129761 - DNA, 1281 bp, synthetic construct
  misc_feature 1..1281: note = Description of Artificial Sequence: Synthetic coding sequence
  source 1..1281: mol_type = other DNA
atggggttgctgtccgctcccccatgtacgcagagaatcacctggaagggcctactgctgactgcttcccttctgaatttttggaatccccctaccacggcgcaggttactattgaggcacagccaacgaaggtgtctgaagggaaggatgtcctgttactcgtgcataatttgcctcagaacctgaccggatacatatggtacaagggtcaaattagagacctttatcattatatcacttcttatgtagtggatggtcaaataatcatttacggacctgcctattcaggccgggagacaatttactcaaacgcatccctgctaattcagaacgttacacaggaggatgccggttcttacacactacacattattatgggcggggacgagaatagaggagttacggggcattttacctttacgttgtaccttgagacacccaagccaagcatcagctccagcaagctcaacccgcgcgaggccatggaggccgtgtccttgacctgcgatcccgaaacacccgatgcttcctatctgtggtggatgaatggccaaagcctgccgatgtcccatcggctccaacttagcgagacgaacaggaccctgttcctgctaggggtgacaaagtatacagccggcccctacgagtgcgagatcaggaaccctgtgtcagcgagtaggagcgacccttttaccctaaatcttttaccaaaactgccaaaaccttacattaccataaataacttaaaaccaagggagaataaagatgttctgaacttcacatgcgagcctaaaagtgagaattatacatacatttggtggctgaatgggcagtccctacccgtatcccccagagtcaagaggccaattgagaaccgcattctcatactcccgagcgtcacgcgaaatgagactggcccatatcagtgcgagatcagagaccagtacggcggcattcgctcttatccagtgacactcaatgtcctgtatgggccagacctcccacgcatatatccttcatttacctattataggagcggggaggtcctttatctgtcatgctcagctgattctaatcctcccgcacagtattcatggactataaatgggaaatttcaattaagcggacagaagttatttatcccccaaattaccacaaaacactccggcttgtatgcatgttccgtgcgtaattccgccacaggtaaggagagctccaaatctatgacagtaaaagtctctgggaagcgtattccagtgtccttagccatcggaatctag

SEQ ID NO: 129762 - DNA, 717 bp, synthetic construct
  misc_feature 1..717: note = Description of Artificial Sequence: Synthetic coding sequence
  source 1..717: mol_type = other DNA
atgagccacaggctgcagctctccgaaacaaatcggacccttttcctattaggtgtgacgaaatacacagcgggcccttatgaatgtgagattcggaacccagtgtctgccagcaggtctgaccccttcacactcaatttgctgcccaaactccctaagccctacattactatcaacaatctgaagccgcgcgagaataaggatgtgcttaacttcacctgcgagccgaaatctgagaactacacctacatttggtggctgaacgggcagagtctgccggtcagtccgcgcgtgaaaagaccaatcgaaaatcggatattgatccttcccagtgttacaaggaacgaaacagggccatatcagtgcgaaatacgcgaccagtatgggggcattcgatcttatcccgtcactttaaacgtgctctacggtcccgacttaccacgtatctacccttctttcacctattatagatcgggtgaagtgctgtatctgtcctgcagcgccgacagtaatcctccagcccaatactcatggacaatcaatgggaagtttcaactgagcggccaaaagttgttcatcccgcagattaccacaaagcatagcggtctgtacgcttgtagcgtaaggaactccgccaccgggaaagagtcatccaaaagcatgacagtgaaagtctctgcctatagttccagtatcaactacaccgccgtctactag

SEQ ID NO: 129763 - DNA, 1260 bp, synthetic construct
  misc_feature 1..1260: note = Description of Artificial Sequence: Synthetic coding sequence
  source 1..1260: mol_type = other DNA
atgggtctcctttctgccccaccttgtactcagcgaatcacgtggaaaggactgctcctcactgcctcattactaaatttttggaaccctccaactacggcacaggtgaccatagaagcacagcctaccaaggtgtcagagggaaaagatgttctgctgcttgttcacaatctgccgcagaacttgaccgggtacatatggtacaagggtcagattcgggatctgtatcattacatcactagctatgttgtggatggacagataataatctacgggcccgcttacagtgggagagagacgatttatagtaatgcttcactgctgatccagaatgttacgcaagaagacgccgggtcttacacactccatatcatcatgggcggtgacgagaaccgcggagttacgggtcattttacattcacattgtatttggaaaccccaaaaccctcgattagcagttcaaagctcaaccccagagaggcaatggaagcagtctcgcttacatgcgatcccgagacacctgacgcttcatacctgtggtggatgaatggccaatctttgccgatgtcccaccgattgcagcttagcgagactaatcgaacactatttctgcttggagttacgaagtacaccgctggaccttatgaatgcgaaatccgtaatcctgtcagcgcatcccgatcggacccattcacgctcaacctcctgcccaaattacccaagccatacatcactattaacaacctgaagcctcgcgagaataaggacgtgctcaatttcacgtgtgagccaaaatcggagaactatacatatatttggtggttgaatggtcagtcactgccagtgtcacccagggtgaagcggccaattgaaaacaggatactaatcctaccctcggtgactcggaatgaaaccggcccgtaccagtgcgagatccgagatcagtacggtggcatacgctcctatccggtgacactgaacgtgctgtacggaccagacttgcctcggatttacccttccttcacctactacaggtcaggagaggtcctgtatttgtcatgcagtgctgattcaaacccaccagcccaatacagctggacaattaatgggaagttccagttgagcggccagaagctgtttatcccccaaattactaccaaacacagcggcctgtatgcctgcagcgtacgcaactccgcgaccggcaaagagtcttcaaagtccatgacagtaaaagtatctgattggaccctgccttag

SEQ ID NO: 129764 - DNA, 894 bp, synthetic construct
  misc_feature 1..894: note = Description of Artificial Sequence: Synthetic coding sequence
  source 1..894: mol_type = other DNA
atgggactactgtctgccccaccatgtactcagcggattacatggaaaggcctgttgttaacggtggagacaccaaaacccagcatttccagctcaaagctcaaccccagggaagcgatggaagcagtgagtcttacttgcgatccagagacaccagacgcgtcttatttatggtggatgaatggccagtctctgccaatgtcacacagacttcagctgagcgagacaaataggaccctttttttactgggggtcaccaaatacaccgctgggccatatgagtgcgagatccgcaaccctgtgtctgcatccagatcagacccctttacgctcaatctgctgcctaagttgcccaagccttatatcacgataaataatctaaagcctcgcgaaaacaaggatgtgttgaacttcacttgtgaaccgaagtcagaaaattacacttacatatggtggctgaacggacaatctcttccagttagccctcgcgtgaaaagacccatcgaaaacaggatcctgattctgcctagtgtcacaagaaacgagaccggcccgtatcagtgtgagataagggaccagtatggagggatcaggtcgtatccagttaccctaaatgtgctttatggccccgacttgcctagaatctatccttcattcacttactatcggagcggcgaagtcctctacctttcatgcagcgccgacagcaacccacccgcgcagtattcgtggactataaatgggaaattccaactctctggccagaagctgttcattcctcagattacgactaaacattctggcttatacgcgtgttcggtgcgaaactctgccacaggtaaagagtcctctaagagcatgactgttaaagtgtcagactggacactaccttag

SEQ ID NO: 129765 - DNA, 1209 bp, synthetic construct
  misc_feature 1..1209: note = Description of Artificial Sequence: Synthetic coding sequence
  source 1..1209: mol_type = other DNA
atgggccccctgccagcgccaagttgcacccaaagaattacatggaagggcctgttactgacagcttcattactcaatttttggaatccgccgacaacagctgaggtgacaattgaagcgcagccgcccaaggtgtctgagggcaaggatgtgctacttctggtccataatctgccgcaaaatctgcccggctacttttggtataagggtgagatgactgatctctatcactatatcatttcctacattgtggatggcaaaatcatcatctacgggccggcctatagcggacgggagacagtgtactcaaatgccagcctcttgatccaaaatgtgacccggaaggacgcgggcacatacaccctgcatatcataaagcgaggggatgagacacgggaggagatcagacacttcactttcactctctacctggagactccaaagccttatatctcctcttccaacctcaacccacgcgaggctatggaagctgtgcggttgatatgcgatccggagacactcgatgctagctatctatggtggatgaacggccagtctttacccgtcacccataggctgcaattgagcaagacgaacaggactctatatctgtttggagtgaccaagtatatcgccgggccctatgaatgtgaaatacgaaatcctgtgtcagcatccagaagcgatcctgttacactgaacctgctgcacggaccagatctcccaagaatttacccatccttcacctactatcggagtggtgaaaacttggacctgagctgttttaccgagtccaatcccccagctgagtacttctggacaattaatggtaaatttcagcagtctggtcagaagctgtttatccctcaaatcactaggaaccatagcggcctgtacgcctgcagcgtgcataactccgctacggggaaggaaatcagcaaatccatgacagtaaaggtgtccggaaagtggattccggcttccttagctgtaggcttttacgtggaaagcatatggctttccgagaagagccaggagaacatttttatacccagtctgtgccctatgggcacctcaaagagtcagatcctactgctgaaccccccaaatttatctctgcagaccctcttttcgctgttcttctgcttcctgatggctgaccttgtgagtggccttaagaaagtcggccggggattgtaccaaccgtag

SEQ ID NO: 129766 - DNA, 1281 bp, synthetic construct
  misc_feature 1..1281: note = Description of Artificial Sequence: Synthetic coding sequence
  source 1..1281: mol_type = other DNA
atgggcccactccctgccccaagttgtacacagcgaatcacgtggaaaggcttgctgctcactgcatcactcctcaacttctggaatccaccaacaactgcggaggtgacaattgaggcccagccccccaaggtgtccgaggggaaagacgtgctcttgctagtgcacaatctgccacagaatttgcccggatacttctggtataaaggcgagatgacagacctttaccactacattatatcttacattgtggatggtaagattattatctacggtccagcatattccggtcgcgagacagtgtatagcaatgcttcactgttgatccaaaacgtaactcgaaaggatgccggtacatacacactgcacatcatcaaaagaggagacgaaactagagaggagattagacacttcaccttcacactctacctggagacccccaagccatatatttccagttcaaacttgaaccccagggaagctatggaggcagtccggctcatttgtgatccagagaccttggacgctagctatctgtggtggatgaacggccagtctttgccagtcacccatcggctgcagctcagcaagaccaatcgtacgctgtatcttttcggtgtgaccaaatacatcgcgggcccatacgaatgcgagatcagaaaccctgtatcagcttcccggtctgatcccgtcaccttgaacttactccctaagcttcctatcccgtatataaccattaacaacttgaatcccagagagaataaggatgtgcttgctttcacatgtgagcctaagtccgagaactacacttatatctggtggcttaacgggcagtcactgccagtatcccctggtgttaaaagacctattgaaaaccgcatactgattctacccagcgtgacaagaaatgagaccggcccttaccaatgcgagatacgagatagatacggcggtctgaggagcaatcccgtgattcttaacgtgctgtacggtccagacctacccagaatctatccctcgttcacctattaccgttccggcgagaacctggatctctcatgttttacagagtccaatccacccgccgagtatttttggactattaacggcaaattccaacagtctgggcagaagctctttattccccagatcaccaggaaccacagcggcctctatgcctgttctgtacacaattccgctactgggaaggagatttccaaatctatgactgtgaaggtgagtggaccatgccacggagatctgactgagtcacagagttag

SEQ ID NO: 129767 - DNA, 723 bp, synthetic construct
  misc_feature 1..723: note = Description of Artificial Sequence: Synthetic coding sequence
  source 1..723: mol_type = other DNA
atggggcccctgcctgctccatcttgtacacagcgaattacttggaaaggtctgctcctgactgctagtctcttgaatttctggaacccccctactacagcagaagtcactatagaggcacagccacccaaagtttcagaaggaaaagacgtattgctgctcgtgcacaatttgccgcaaaatttgcccggctacttctggtacaagggagagatgacagatctctaccattacattatttcttatatcgttgatggaaaaatcatcatatatggaccagcctatagtggaagggaaacagtgtactcaaacgccagcctgctgatacagaacgttacccgtaaagacgccggaacgtataccctgcacatcatcaaaaggggggacgagaccagagaagagatcagacacttcaccttcaccctatattacgggcccgatctccctcggatttacccttccttcacgtactataggagcggggaaaatttggatctatcctgtttcaccgagtctaacccccccgccgagtacttctggacgattaatggcaagtttcagcagtctggccagaaactctttattccacagatcacccggaaccactccggactgtacgcatgtagcgttcacaactctgccaccgggaaagagatttccaagtctatgacggtcaaagtctctggtccatgccacggggacctgacagagtcacagagctag

SEQ ID NO: 129768 - DNA, 1164 bp, synthetic construct
  misc_feature 1..1164: note = Description of Artificial Sequence: Synthetic coding sequence
  source 1..1164: mol_type = other DNA
atgggccccctgccagctccctcctgcacccagcgaatcacctggaaggggctgctcctaacagcctcgctcctgaatttctggtacaaaggagagatgacagacctttatcattatatcattagctatattgtcgatggaaaaatcatcatctacggtcccgcctacagcggcagagagaccgtatacagcaatgcgtctcttctgatccagaatgtcacccgcaaagacgccgggacgtatactctgcatatcatcaagcgtggggacgagacacgcgaagagatccgtcactttacctttacactgtacctggaaacaccaaagccctacatttcctctagcaatctgaatccacgggaggctatggaggctgtacggttgatctgtgacccagaaacacttgatgccagctatctgtggtggatgaacggtcaaagcctgccggtgacgcaccgcttgcagttaagcaaaacaaatcggacgctgtatctgtttggcgtgacgaaatacatcgccgggccatatgagtgtgagatccggaaccctgtcagtgcttctcgctcagatccagtcacgcttaatctgctccctaagcttcccatcccatacattacgattaacaatttaaatccaagggagaataaggacgtcctagcgttcacttgcgaaccaaaaagcgagaactacacctacatctggtggttgaacgggcaatccctcccagtctctccaggagtcaaacgacccatcgagaacaggattctgatcttaccatcagtgacgcgcaatgagaccggtccgtaccagtgcgaaatccgcgaccgatacggaggactgagaagcaacccagtgatcttgaatgtcctgtacggccccgacctaccacgcatctatcccagtttcacgtattaccggtcaggcgagaatctcgatctttcttgcttcaccgagagcaatccccctgcagaatacttttggacgatcaacggcaaattccaacaaagtggccaaaagctttttataccccagatcacaagaaaccattccggtctgtacgcttgttccgtgcacaatagtgccacgggaaaagagatttccaagtccatgactgtgaaggtgtcaggcccatgccatggtgacttaaccgaaagtcagtcctag

SEQ ID NO: 129769 - DNA, 1002 bp, synthetic construct
  misc_feature 1..1002: note = Description of Artificial Sequence: Synthetic coding sequence
  source 1..1002: mol_type = other DNA
atgggacctttgcccgcccccagctgcacccagcgcattacgtggaagggactactgctgaccgcaagcctgctcaacttttggaacccacctacgactgctgaagtgacaatcgaggcacaacctccgaaggtgtccgaaggcaaagatgtgcttctgttggttcacaatctcccccagaacctccccggatacttttggtacaaaggcgaaatgactgatctatatcattacataattagctacatagtggacggcaaaataattatctacggtccagcttattccggtagagaaactgtttactcaaatgcctcacttttgatccagaacgtgacacgcaaggacgcgggcacttacacactgcacatcatcaaacgcggcgacgagactagagaggagatcaggcactttactttcacattgtatagcaagctccctataccttatataaccattaacaatctcaaccccagagagaacaaggacgtcctggctttcacatgcgaacccaagtctgaaaattacacatatatttggtggttgaacggccagagccttcctgtatcacctggcgttaagagacccatagaaaaccggatcctgattctcccaagtgttacccgcaacgagacaggtccctatcaatgtgagattagggaccggtacggagggctgcggtcaaatccagtgatcttaaatgtactgtacggacccgacctccctaggatttatccatctttcacatattataggtcgggagagaatttggatttgtcctgctttaccgaaagcaaccctcccgccgagtacttttggacaatcaacggcaagttccaacagtcaggacagaaactttttattcctcaaattactcgtaaccacagtggcctgtacgcctgtagcgtgcacaacagcgcgaccggcaaggaaatttctaagagtatgaccgtgaaagtctccggaccctgccacggggatctcacagagtcccagtcttag

SEQ ID NO: 129770 - DNA, 1032 bp, synthetic construct
  misc_feature 1..1032: note = Description of Artificial Sequence: Synthetic coding sequence
  source 1..1032: mol_type = other DNA
atgctgctgctaaaaaagcacaccgaagacatttcttcggtatacgaaattagggagcgcctgggctcaggtgcatttagtgaggtggtcttagcccaagagcgggggagcgctcacctggtagctctgaagtgtatacctaaaaaggcactgcgggggaaagaagctctggttgagaacgaaatagccgtgctgcgccgcattagccacccgaatattgtggccctcgaggacgtccatgagtctccaagtcacctgtacctggccatggaactagttactggaggcgagttattcgatagaattatggagaggggatcctacacggagaaggatgcaagccatctggtgggacaggtcctgggcgctgttagttatctccatagcttaggaatagtccaccgcgacttaaagcccgaaaacctgctgtacgctacaccctttgaggattctaaaattatggtttcagatttcggcctgtccaagattcaagctggtaacatgctcggcactgcgtgcggcacacctggctatgtggcccctgaattgctggaacaaaaaccatatggcaaggccgttgacgtctgggctttaggcgtcatcagctatatattgctgtgtggctatcctccattctacgatgaatcggaccccgaactgtttagccagattctgcgcgccagttatgagttcgactcaccgttctgggacgatatttccgaatccgcgaaagactttatccgccatctgttagagagggaccctcagaagcgttttacctgccagcaggcactccgacatctatggatcagcggcgacacagccttcgatcgtgacatcctcgggagtgtgagcgagcagatccggaaaaattttgccagaacccactggaaacgggcatttaatgccacgagttttttgcgccacatccgcaagttaggccagatccctgagggcgaaggggccagtgaacaaggcatggctcggcacagtcacagcggcctccgagccgggcagccccccaagtggtag

SEQ ID NO: 129771 - DNA, 1101 bp, synthetic construct
  misc_feature 1..1101: note = Description of Artificial Sequence: Synthetic coding sequence
  source 1..1101: mol_type = other DNA
atgctcctcctgaagaaacataccgaagacatcagctccgtgtatgaaatccgagagcggttaggctcaggagcatttagcgaggtggtcctggcacaggagcgtgggagcgcccacctcgtggcgctgaaatgcatccccaaaaaggccctgcggggcaaagaagccttggtggaaaatgagattgctgtgttgcggcgcattagccatccaaacatcgtcgcactggaagacgtccatgaaagtcccagccatctgtacctggctatggagctggtgacagggggagagctattcgacagaataatggagagggggtcctataccgagaaagatgcatcccacctggtgggccaggttttaggtgccgtgagctatctgcactctctgggcattgttcacagagaccttaagcctgaaaacctgttgtacgcaacacccttcgaagacagcaagataatggtgtctgattttggactgtctaagattcaggccgggaacatgctagggacggcctgcggtacgcccggatatgccgaacccgtaacactgagcgggatggccgcatgcgttcctgtgagggcaagcgtgtgtctttggccgccagcccctgagcttttagagcagaaaccgtatgggaaggctgttgatgtctgggccctgggcgtgatcagctatatccttctgtgtggataccctccattctacgatgagtccgatccagagcttttctcccagatcttgagagcatcttatgagttcgattcccctttttgggacgatatctcagaatccgccaaagatttcattcgacacctccttgagcgcgatccccagaaaaggtttacttgccagcaggccctgaggcatctctggattagtggcgacaccgcttttgatcgtgatatcctgggctcagtaagtgagcagattcgcaagaattttgctagaacccactggaaaagagcttttaatgctacatccttcttgcggcacattagaaaactgggtcaaattccggagggcgaaggcgcttcagaacaaggtatggctcggcattcacattcaggccttagagctggtcaaccacctaagtggtag

SEQ ID NO: 129772 - DNA, 1083 bp, synthetic construct
  misc_feature 1..1083: note = Description of Artificial Sequence: Synthetic coding sequence
  source 1..1083: mol_type = other DNA
atgtggaggagagtgtgtggcggattggccggccgacgcccttctggtgatatgctgctcctgaagaaacacacggaggatatatctagcgtttatgagatacgtgagcgattgggatctggtgctttctccgaggtggttttggcacaagaaaggggctctgctcacttagtggccttaaagtgtatccctaaaaaagccctcagaggcaaggaggcacttgtggagaacgagatagccgttcttagaagaatcagccatcccaatatcgtggctctggaagatgtgcacgaatctccaagccacctgtacctggctatggaactggtcaccggtggcgagctgtttgatcggataatggaaaggggcagctacactgagaaggatgcttcccatctcgtaggccaagtgctgggcgccgtcagctatttgcattccttgggcatcgttcatcgggatttgaagccggagaatttgctttacgctactccgtttgaggactccaaaatcatggtttccgattttgggctgagcaaaatccaggcaggcaacatgctcggcactgcctgcggcacgccggggtatgtggcaccagagctcctcgagcagaaaccttacggaaaagccgttgacgtatgggctctgggggtgataagctacatactattgtgcgggtatccaccattttatgatgaatccgatcccgagctcttctcccagatccttcgcgcttcatatgagtttgacagtccattttgggacgatatcagtgaatccgcaaaagactttatccgacacctgctggagagggatccccagaagcgcttcacttgccagcaggcactgcggcatctatggatcagcggtgacacagctttcgatcgggacatcctcggtagcgtgtccgaacagattaggaagaattttgcaaggacccactggaaacgagctttcaatgccacaagctttctccggcacattagaaaattgggccagattccagaaggggagggcgcttccgagcaaggcatggccagacatagccatagtggactgagggcagggcaaccccctaagtggtag

SEQ ID NO: 129773 - DNA, 1032 bp, synthetic construct
  misc_feature 1..1032: note = Description of Artificial Sequence: Synthetic coding sequence
  source 1..1032: mol_type = other DNA
atgctgctgctcaaaaagcatactgaggacataagctctgtgtatgagattcgggaacgactcgggtcaggagcctttagcgaggttgtgttagctcaggagagaggatccgcacacctcgtagccttaaaatgtattcctaagaaagcgctaaggggaaaggaagcactggttgagaacgaaatcgcagtcctaagaagaatctctcatccaaatatcgtggcactagaggacgtgcacgaatcaccaagccatctctacctggcgatggaactagtaactgggggcgagttgttcgatagaatcatggaacgcggaagctacactgaaaaggatgcatcccacctggtgggccaggttctgggggctgtgtcctatcttcactccctaggcatcgtacatcgcgatctaaaacccgagaacctactctacgccacaccttttgaggatagcaaaatcatggtctcggacttcgggctgagtaaaatccaggctggtaatatgctgggaacagcctgtggtacgcctggatacgttgcgccagaacttttggaacagaaaccctatggcaaggccgtggatgtttgggcactgggcgtcatcagctacatactgctgtgtggttatcctcccttctacgatgagtcagatcccgagctgtttagtcaaatcctgcgcgccagttatgagttcgattcccctttctgggatgacatcagtgaatctgccaaagactttatccgccatcttttggaaagagacccgcagaagaggttcacttgccaacaggctcttagacatctctggatctcgggtgatacagcattcgatcgagacatactcgggtctgtgtccgagcaaatcagaaagaacttcgccagaacccattggaagcgggccttcaacgcgacttcttttttaaggcatatcaggaaattaggccagatccctgagggcgaaggagctagcgagcaaggcatggctcgccactctcattccgggcttcgcgccggccagccacctaaatggtag

SEQ ID NO: 129774 - DNA, 1101 bp, synthetic construct
  misc_feature 1..1101: note = Description of Artificial Sequence: Synthetic coding sequence
  source 1..1101: mol_type = other DNA
atgctcctgcttaagaaacacaccgaggacattagctccgtgtacgagatcagggaaaggctgggatcaggggcattcagtgaggtcgtcctcgctcaagagagaggttctgcccacctcgtcgcgttgaagtgcattcccaagaaagctctccgtggcaaggaggcgctcgtggaaaatgaaattgccgtcctcaggaggatcagtcaccccaacattgtggccctggaagatgtgcacgagtcaccatcccatctgtacttagctatggaattagttacgggcggagaactgtttgataggattatggagcgaggatcttacacagagaaagatgcctcgcatcttgtgggccaggtgctgggggcagtgtcatacctgcatagcctcggtatagtccatagggacctgaaacctgaaaatctgctgtatgcaacgccattcgaggatagtaaaatcatggtgtcggattttggcctctctaagatccaagccggtaacatgctggggactgcctgtggcacacccggatacgcagaaccagtgactttgtccggtatggccgcatgcgtccctgttagggcatctgtgtgcttatggccacctgcaccagaactgctggagcagaagccatacggcaaggccgtggacgtctgggccttgggggtgataagttatatcttgttatgtggctatcctcccttttatgacgaatcagaccccgagcttttttcccaaattctgcgcgcctcctatgagttcgactcacccttttgggacgacatttctgagagtgccaaggactttattagacacctgttggaacgcgacccccaaaaaagattcacatgtcagcaagccttgcgacacctgtggatctccggcgatacagcctttgacagggatatcttgggaagcgttagcgaacagatccgaaagaacttcgcaagaacacactggaaacgggcgtttaatgccacctccttcctgcgacatatcaggaagctcggccagatcccagaaggggaaggggcatccgaacaaggaatggcaaggcacagtcattcaggactgagggcaggacagccccctaagtggtag

SEQ ID NO: 129775 - DNA, 132 bp, synthetic construct
  misc_feature 1..132: note = Description of Artificial Sequence: Synthetic coding sequence
  source 1..132: mol_type = other DNA
atgctccttctgaagaaacacacagaggacatttcatccgtgtatgaaatacgggaaagactcggctccggtgccttcagtgaagtggttctagcccaggagcgggggagtgcacaccttgtcgctctctag

SEQ ID NO: 129776 - DNA, 675 bp, synthetic construct
  misc_feature 1..675: note = Description of Artificial Sequence: Synthetic coding sequence
  source 1..675: mol_type = other DNA
atgttacttctgaagaagcatacagaggatatcagttctgtgtacgagattagggaaagactcggaagcggcgctttttccgaggtggtgcttgcccaggaacgaggttccgcccatttggtggccctgaagtgtatcccgaagaaggctctgcgagggaaagaagccctggtggagaacgagatcgctgtccttaggcgtatatcccacccgaatatcgtggcactggaggacgtacatgagagtccctcacatctttacctggctatggaacttgtgactggtggtgagctcttcgacaggattatggaaaggggaagttacaccgaaaaggacgcctctcacctcgtgggccaagtcctgggcgctgtgtcctatttgcattccctgggtattgtgcaccgggaccttaagcctgaaaaccttctatatgccaccccgtttgaagactcaaaaattatggtgtcagatttcggcctgtctaagatacaggcaggcaacatgctgggaacggcttgcggcacccctggatacgtggccccagaattactggagcagaagccttacgggaaggcagtggacgtctgggccctcggggtgatctcttatattttgctttgcggttatcctcctttttatgatgagtctgaccccgagctattttcccaaatttag

SEQ ID NO: 129777 - DNA, 132 bp, synthetic construct
  misc_feature 1..132: note = Description of Artificial Sequence: Synthetic coding sequence
  source 1..132: mol_type = other DNA
atgctgcttttgaaaaagcatacggaagacattagcagcgtgtacgagatccgagaaaggctaggttccggggccttttctgaagttgtattagcccaggagagaggttctgcccaccttgttgccctgtag

SEQ ID NO: 129778 - DNA, 132 bp, synthetic construct
  misc_feature 1..132: note = Description of Artificial Sequence: Synthetic coding sequence
  source 1..132: mol_type = other DNA
atgctcttgctgaaaaagcacactgaagatatttcaagcgtttacgagatccgagaaaggctcggttccggcgcattctcagaagtcgtattggcgcaggagaggggttcagcacacctggtggctctctag

SEQ ID NO: 129779 - DNA, 261 bp, synthetic construct
  misc_feature 1..261: note = Description of Artificial Sequence: Synthetic coding sequence
  source 1..261: mol_type = other DNA
atgcttctactgaaaaaacacaccgaagacatcagtagtgtctacgagatcagagagcgcctcggcagcggagccttctctgaggttgttctggcacaagagaggggttctgcacacttggtggccctgaagtgtatacctaagaaggctctgcgtgggaaggaagctctagtagaaaacgagattgctgtgttgagaagaatcagtcaccctaatatcgttgccctcgaggatgttcacgaatctccatcccatctgtag

SEQ ID NO: 129780 - DNA, 246 bp, synthetic construct
  misc_feature 1..246: note = Description of Artificial Sequence: Synthetic coding sequence
  source 1..246: mol_type = other DNA
tgaatttcgggtgataccgcattcgatagggacattctgggtagcgtgagtgagcagatcagaaagaatttcgccaggacccactggaagcgggcattcaacgccacttcattcttgcgacacatccggaaactgggtcagatcccagagggagagggagcaagtgagcaaggaatggcccggcactcccattccggcggaccccagggactgagcttcttgcatgggtgctgtgttcttaggtag

SEQ ID NO: 129781 - DNA, 681 bp, synthetic construct
  misc_feature 1..681: note = Description of Artificial Sequence: Synthetic coding sequence
  source 1..681: mol_type = other DNA
atgctcctccttaaaaaacacacagaggatatctcttctgtgtacgagattcgggagcgtctgggctctggcgccttctcggaggttgtcttagcacaggaacggggcagcgcacatttggtcgcgttgaagtgcatcccgaaaaaggcactccgagggaaggaggcccttgtcgagaatgaaatagctgtgttgcgccgcatcagccaccctaacatagttgctttggaagacgtgcacgaaagtcctagccacctgtacctagccatggagttggtaacaggaggcgagctgttcgataggatcatggagagaggctcttacacggaaaaggacgccagccaccttgtgggccaagtgctgggcgccgtttcgtatttacacagtctggggatagtgcacagggatctgaaacccgagaacctcctgtacgccacaccttttgaagactccaagataatggtaagcgactttggcctgtctaagattcaggcagggaacatgctggggactgcttgcgggacacccggctacgttgcccctgagctgctggaacagaagccctatggaaaagcggtggatgtgtgggcgctaggggtcatctcatatatcctcttgtgtggttatcctcctttttacgacgaatccgatcccgagttattcagccaaatactcagatag

SEQ ID NO: 129782 - DNA, 1281 bp, synthetic construct
  misc_feature 1..1281: note = Description of Artificial Sequence: Synthetic coding sequence
  source 1..1281: mol_type = other DNA
atggaagcagcttttgggcaagtcgccgggtccgcttgccctagaagaggcggagagggtagagactggaaggcggagtcccttgccgatctgtggcccaagtcttctcctggagacagccatcggtggtgtaaggggccgggtgccggcccagccggacctcagctgcgggaggccgcccgcgcatccagcggccttggaggaggagggagacatcccagcagaattccagccattgcactgcaagatatgttgttgctcaagaagcatacagaggacatctcctcggtgtacgagatacgggagaggctaggctctggcgcgttctccgaggtcgtgctcgcgcaggagagaggcagtgcccacctggttgcattgaagtgtattcccaagaaagccctgcgaggaaaagaagctctggttgagaacgagatcgcggtgctgcgccgaatcagtcatccaaacatagtggctctggaagatgtccacgagtctcccagtcacctgtacctagccatggagctggtgactggcggcgagttatttgatcggatcatggaaagggggtcctacactgagaaagacgcttcccacttagtcggacaggtactgggtgccgtgtcttacttgcactctcttggaattgtacaccgggatctgaagcccgagaatctgctgtatgctaccccctttgaagactccaaaatcatggtcagcgattttgggctgagcaagatccaggcagggaatatgttgggtacggcttgtggcacacccgggtatgtggcacctgaactgttagagcagaaaccctatggtaaggcggtcgacgtgtgggccctaggagtcatctcatacatcctgctgtgcggctatccaccgttttatgacgaatcagatccggaacttttctcacagatcctgagagcaagctatgagtttgattcacccttctgggacgatatcagtgaatctgctaaggacttcatcaggcacttgctcgagagggatccacagaagcgtttcacctgtcagcaggctctgcggcacctctggatctccggagatactgcttttgacagggacatcttgggttcagtttctgaacagattcggaagaattttgctagaactcattggaaacgggcttttaatgccacatcgtttctgcggcatattagaaagctgggtcagattccagagggtgagggagcatctgagcagggcatggcaaggcacagccactccggtttgagggccggccagccaccgaaatggtag

SEQ ID NO: 129783 - DNA, 132 bp, synthetic construct
  misc_feature 1..132: note = Description of Artificial Sequence: Synthetic coding sequence
  source 1..132: mol_type = other DNA
atgctccttcttaagaaacatacagaagacatttccagcgtatacgagatacgggagagactgggaagcggcgccttctccgaagtggtcctggctcaggaaagaggttctgctcatctcgtggccttatag

SEQ ID NO: 129784 - DNA, 4884 bp, synthetic construct
  misc_feature 1..4884: note = Description of Artificial Sequence: Synthetic coding sequence
  source 1..4884: mol_type = other DNA
atgagactttggagttgggttctgcatctcggtctgctgtccgccgccctcgggtgcggcttggcggagaggccacgacgcgcccgtagagacccacgcgcaggcaggcccccgcgacccgcagccgggccagccacctgcgcgactcgagccgccaggggccgaagggccagtccgcccccaccacccccccccgggggagcctgggaagcggtccgagtgccacgacgtcgacaacagagggaagccagaggggccacagaagagcctagtccaccatcgcgagctctgtattttagcgggcgcggtgaacagttgaggctgagggccgatctcgagttacctagagatgcctttactctgcaggtgtggttgcgcgcagaaggcgggcagcggtcacccgctgttattacaggcctatatgataaatgctcctacattagcagggataggggctgggtggtggggattcacacgatctccgatcaagataataaagacccaagatatttttttagcttgaaaactgacagagccaggcaagtaacaactatcaacgcccatcggtcctacctaccaggacagtgggtctatctcgccgctacatacgacgggcagtttatgaagttatacgtaaatggggcccaggtggccacctccggcgagcaggttggtgggatcttttcccccctgactcaaaagtgcaaggtgctgatgttaggggggtctgccttaaaccacaattacagaggctatattgagcactttagcttatggaaagtggcaagaactcagagagaaattctatctgatatggagactcacggcgcacacacagctctgccccaacttctgctgcaggaaaattgggataatgttaagcacgcttggagcccgatgaaggacggctcctcccccaaggtggagttctctaacgcccacggattcttactggataccagcctggaaccaccgctatgcggccagaccttgtgtgacaatactgaggtgatcgcatcctataatcagctgagctcatttcggcagcctaaggtcgtgcgctatcgggtagtgaatctctatgaggatgatcataaaaatccgactgtgacaagagagcaggtagattttcaacatcaccagctggccgaagccttcaagcagtacaatatcagctgggagctggacgtcctcgaggtctctaatagttcccttcgcagacggctcatcctggccaattgtgatatctcaaagataggcgacgaaaattgtgaccccgagtgtaaccacacacttacgggccatgacggtggagattgtcgtcacctgaggcaccctgcatttgtgaaaaaacaacataacggggtgtgtgacatggattgtaattatgagaggtttaactttgacgggggcgaatgttgcgaccccgaaatcaccaacgtcacccagacatgctttgatcctgacagtccgcaccgcgcctatctcgatgtcaatgagctcaagaatattctaaagctggatggctctacacacctgaatatattctttgctaaatcgtcggaggaggagttagcaggagttgctacttggccatgggacaaggaggcattaatgcatttaggcggcatcgtgctgaacccttctttttacggaatgccaggacatacccataccatgatccatgagattggacatagtctggggctctaccatgtctttcgaggcatcagtgaaattcagagttgctccgacccttgcatggagactgaaccatcatttgagaccggtgatctgtgcaatgacaccaatcccgctcctaagcacaagagctgcggcgaccccggtcctggaaacgacacttgcggttttcatagcttctttaataccccatacaataatttcatgagctacgctgacgacgactgtacagactcattcacacctaatcaagttgcccgcatgcactgctacctcgatctcgtgtatcagggttggcagccgagccggaagccagcccccgtcgcgctcgcaccccaagtgctgggacatacgacagatagcgtcaccctcgagtggttccctccaatcgatggccattttttcgaacgtgagctcggctccgcctgccatctctgtctggaaggtcgtatcctcgttcaatacgcgagcaacgcctcatctccgatgccgtgctcaccttcggggcattggtccccccgggaggccgaaggtcatccggatgtggagcaaccatgcaagtcttccgtgcggacatggtctccgaattctgctgttaatccacatacagtgccacccgcttgccccgagccacaaggctgctatctggagctagagttcctctaccccctggtacccgagtctcttaccatatgggtaactttcgtgagtacagactgggacagctccggcgccgtcaacgacatcaagctcctcgctgtttccggaaaaaatatcagcctgggcccccagaacgtcttttgtgatgtgccccttactattcgcctgtgggatgtcggcgaggaggtttacggcatccagatttatacactggacgagcacctggagatcgatgcagctatgctgactagtaccgccgatactccactttgcctacagtgcaagcccctgaagtacaaggtggtgagggatccaccactgcaaatggacgtggcatctattctgcaccttaaccggaaattcgtggatatggacctcaacctcggatccgtgtatcaatactgggtgattacgatctcggggactgaagagtccgaaccttcgcctgcagttacatacattcacgggagcggctactgtggcgatggcattatccaaaaagaccagggggagcaatgtgacgatatgaacaaaattaatggggacggctgcagcctgttctgcagacaagaagtgagctttaattgcatcgacgaaccatcaaggtgttacttccacgacggcgatggagtctgcgaggagtttgaacagaaaacaagcattaaagactgcggcgtttacacgccacagggatttctcgatcaatgggcttctaacgcctctgtgtcccatcaggatcagcagtgtcctggatgggtgattatcggccagcccgcagcttcacaggtctgcagaacgaaagttatcgacctgagcgaggggatctctcagcatgcttggtatccctgtaccattagctatccctattcccaactggctcagactacgttttggctcagggcctattttagccagcctatggtcgccgcagccgtgatcgttcatctggtgacagacgggacttactatggagatcaaaaacaggagaccatcagcgtccagcttcttgacaccaaggaccagtctcacgacctgggcctccacgtgctgtcttgccgcaacaatcctctcattatcccagttgttcacgatttatcccagcctttctaccactcacaggcagtcagggtaagcttcagctctccattagttgccatctcaggggtggcgctgcggtctttcgataatttcgatcccgtgactctctcctcctgccaaagaggagaaacctactcccccgcggagcaatcttgtgtccactttgcctgcgaaaagaccgattgtccagaactcgctgtcgaaaacgcatctcttaactgctcaagcagtgaccggtaccacggtgcccagtgtaccgtgtcctgcagaaccgggtatgtcctccagatccggcgagatgatgagctgataaaaagtcagacaggcccttcggttaccgttacatgcacagaggggaaatggaataaacaggtggcctgcgagcctgtggattgttctatccctgatcaccatcaggtttacgcggctagcttttcttgcccggagggcacgacctttgggtctcagtgtagttttcaatgtaggcaccccgcccagttaaaaggcaataatagcctactgacttgcatggaggacgggctgtggagcttcccagaggcactctgtgagctgatgtgcctcgcaccacctcctgtgcctaacgccgatttgcaaacagctcgctgccgggaaaacaagcataaagtgggcagcttctgcaagtataagtgcaagccagggtaccacgtgcctgggagctctcggaagagtaaaaagcgtgcctttaagacccaatgtacccaggacggcagctggcaggagggggcatgtgttcctgtgacctgtgatcctccccctcctaagttccatggtctctatcagtgtacaaacggctttcaatttaactcagaatgcagaatcaaatgcgaagattctgatgccagccaagggctgggatctaacgtcatccactgccggaaggacgggacttggaacggctcatttcatgtctgtcaggaaatgcagggacaatgctcggtcccgaacgagctgaattccaacctaaagttacagtgccccgatgggtacgcgataggctccgagtgcgcaacttcctgtttggaccataactctgaaagtataattctgcctatgaatgtgacggtaagagatataccacactggctgaacccaacgagggtagagagggtcgtttgtacggcggggttaaaatggtatccacaccctgccctgatccattgtgtgaagggttgtgagccgttcatgggggacaactactgcgacgccatcaataatcgcgcattctgtaactacgatggtggagactgttgtacttctacagtgaagaccaaaaaagttacccctttccctatgagctgcgacctccagggcgattgtgcctgccgcgaccctcaggcccaggagcacagtcgaaaggacctgaggggttacagccacggctag

SEQ ID NO: 129785 - DNA, 1701 bp, synthetic construct
  misc_feature 1..1701: note = Description of Artificial Sequence: Synthetic coding sequence
  source 1..1701: mol_type = other DNA
atggattgcaactacgagagattcaatttcgacggcggagagtgctgtgacccggagattacaaatgtgactcagacttgtttcgatccagatagcccccatcgcgcatacctagacgtgaacgagttgaagaatattctcaaactggacggcagcacgcacctgaacatcttttttgcgaagtcatcagaagaggaattagcaggggtcgccacctggccttgggataaagaagctctcatgcacctggatgatgactgtactgacagcttcacacccaatcaggtcgcccgcatgcattgttatttggacctagtctaccagggatggcagccatcccgcaagcctgccccagttgcattggctccccaagttttaggccatacaaccgactcggtgacacttgagtggttccctcctattgacgggcatttttttgaaagggagctcggctctgcctgccatctgtgtctggagggtaggattttagtccagtacgcttctaacgccagctcacccatgccatgctctccctctggtcattggagccctagagaggctgagggtcatcccgatgtcgagcagccctgtaagtcttcagtacggacatggtcaccaaactccgccgtcaaccctcacacagttccacctgcttgccccgaaccacagggatgttatctcgaacttgagttcctgtaccccctcgtgcccgagagcctgaccatatgggtgacctttgtgtcgacagattgggacagtagcggggcagtcaacgacattaaactccttgctgtgtccggtaaaaacatcagtttaggccctcagaacgtgttttgcgacgtgccgctgactatcaggctctgggatgttggagaggaggtttatgggattcagatatataccctggatgagcacctggaaatcgacgcagccatgctgaccagcacagcagatactcctctgtgtcttcagtgcaagcctctgaagtacaaggtggtcagggatcccccgctccagatggatgtggcgagtatcctccacttaaatcggaaattcgtggatatggatcttaacctaggatcggtgtaccagtattgggtcattactattagcggcactgaggaaagcgaaccatctcctgcagtaacgtacatacacggcagcggttactgtggggatggcatcatacagaaggatcaaggagaacaatgcgacgacatgaataagattaatggggacgggtgtagcttgttctgtcgccaggaggtttcgttcaactgcattgatgaaccctcaaggtgctactttcacgacggggacggcgtgtgtgaggaattcgagcaaaagacttctattaaggattgcggcgtgtatactccgcagggcttcctggatcagtgggcctcaaatgcttccgtgtctcaccaggaccagcagtgtcccgggtgggtaatcatcggtcagccagcagcctcccaagtctgtcgtactaaagtcatcgatctgagcgagggcatctccgcctgcctggttccattgcatcaccagctgcccatctttccggcggggtcagatcatttcctggccccaggggtcttttttagtacgaacggctgcagaagctgccattgccctcccggagatgggtgggacattctttggggacctaaggcaggcgatcatcaacgcgcggctgcctag

SEQ ID NO: 129786 - DNA, 1998 bp, synthetic construct
  misc_feature 1..1998: note = Description of Artificial Sequence: Synthetic coding sequence
  source 1..1998: mol_type = other DNA
atgaacaaaataaacggcgatggatgttctctgttttgtcgtcaggaggtttccttcaattgcatcgacgaaccgtcccgctgttatttccatgacggagatggcgtttgcgaggagttcgagcagaaaaccagcatcaaagactgcggtgtctacaccccacagggctttctggaccagtgggccagtaacgcatcagtcagccatcaggaccaacagtgcccagggtgggtaattattggccagccagcagccagtcaagtgtgccgcacaaaagtgatagatttatcagaagggataagtcaacatgcgtggtatccctgcactatcagttacccgtacagccagctggcccagactacattttggcttcgggcctatttctcacagcctatggtggcagccgccgttatcgtccacctggtcaccgacggaacctactacggggatcagaagcaggaaacaatctctgtccagctgctagatacaaaggatcagtcccatgacttgggtctccacgtcctgagctgccgcaacaatccactcataattcctgtggttcacgatctttctcaaccgttttaccactctcaggccgtacgcgtctcttttagctccccactcgtagccatttctggcgtggctcttaggtcattcgacaacttcgacccagtgacactcagctcttgtcagcggggggagacctactcccctgcggagcaatcatgcgtgcacttcgcttgtgagaaaaccgattgcccagagctcgcggttgagaacgcctcgctcaactgctcttcctcggatcgctaccatggggcccagtgtacagtttcgtgcagaactggctacgtgctgcagatcagacgggatgatgagctcatcaaatcccaaaccgggccctccgtgactgtaacttgcactgaaggaaaatggaataaacaggtcgcctgcgagcctgtcgattgttctatccctgaccaccaccaggtgtatgccgcatcgtttagctgtcctgagggaactacctttggatctcagtgttctttccagtgtcgccaccccgcccaactcaaaggcaataattccctcctgacttgcatggaagatggtctttggtccttcccggaggcgctgtgtgagctcatgtgccttgcgcctccacccgtgcctaatgccgacttgcagaccgctcgatgtcgcgaaaataagcacaaggtcggatcgttctgcaagtacaagtgtaaaccaggatatcatgtgcccgggtccagccgcaagtccaagaagcgagccttcaaaacccaatgtacccaagatggaagctggcaggagggtgcatgtgttcctgtcacctgcgacccccccccaccaaagttccatggtctctatcagtgcactaatggcttccagttcaacagtgagtgtcggataaagtgcgaagactctgatgcatcccaggggctggggagcaacgtgatccactgccgaaaagatggaacttggaacggcagctttcatgtgtgccaggagatgcaagggcagtgcagtgttccaaatgaacttaatagcaacctcaaactgcaatgccctgacgggtatgcaattggctctgaatgcgcgacgagctgtctggatcataactccgaatccatcattctccccatgaatgtgactgtgcgcgatatccctcattggctgaaccctaccagggtggagcgggttgtgtgtacagccggcttaaaatggtatccccatcccgcattaattcactgtgtcaagggctgtgaaccttttatgggcgacaattactgtgacgcgatcaataacagggctttttgcaattatgatggtggagattgttgcacatccaccgtcaaaactaaaaaagtgacaccattccccatgagctgtgacttacaaggtgactgcgcctgccgggatccccaggcccaagagcactcccggaaggacctcagaggatactctcacggctag

SEQ ID NO: 129787 - DNA, 4449 bp, synthetic construct
  misc_feature 1..4449: note = Description of Artificial Sequence: Synthetic coding sequence
  source 1..4449: mol_type = other DNA
atgcgtaaggaccggctgctacatctctgcctggtgctactgcttattctcctcagcgcctctgattcaaattcaacggaaccacagtatatggtgctggtgcccagcttattacataccgaagctccaaagaagggctgcgtgttgctgtctcacttaaatgagactgtgacagtgtccgcctctctcgaatcagggcgtgagaaccgttcacttttcactgacttagtggcagaaaaagacctcttccactgcgtcagtttcactctgccccggataagtgcgtcctctgaggtcgctttcctctcaattcaaattaagggtcccactcaggactttaggaagaggaatactgtcttagtcctgaacacacagagccttgtgttcgttcagacagataagccaatgtacaagcctggccaaacagtgagatttcgggtggtaagcgtcgacgagaactttcgcccgcgcaatgagcttatcccattgatctacctggagaatccaaggaggaacaggatcgcacagtggcagtccctgaaactggaggcgggtatcaatcaactcagttttcctttgtcaagcgaacccatccaggggagctacagggtggtggtccagacagagagcggagggcgtatccagcacccctttactgtggaggaatttgttctccctaaatttgaggttaaggtccaggtccctaagatcatctccatcatggacgagaaagttaatataaccgtgtgcggtgagtacacttacggaaagccagtgcccggcctagctaccgtgtccctgtgccggaaactgtctcgagtgttgaattgcgataagcaggaagtatgtgaggaattcagccagcagttgaactccaatggatgcattacacagcaggtacatacaaagatgctccagataaccaataccggcttcgagatgaaattgcgggtggaggcacgaatcagagaggagggtaccgatctggaagtcactgcgaaccgcattagcgagatcactaacattgtgagtaaactgaaattcgtgaaggtggacagccacttcaggcaaggcattccctttttcgcccaggtgctgctggtagatggcaagggcgtgcccatcccaaataagctattcttcattagcgtgaacgacgcaaactactattcaaatgcgaccaccaacgagcagggcttagcccagttctccattaacaccaccagcatttccgtgaacaagctgtttgtgcgcgttttcacagtgcatccaaacctgtgctttcactatagctgggttgctgaagaccaccagggcgcacaacatactgccaatagagtgttctcactttcaggtagctacatccaccttgaacctgttgcaggaacactgccttgtggacacacggaaactattaccgcccactacaccttaaacaggcaagccatgggggagttatcagagttatcttttcactatctgataatggcaaagggagtgatagttagatctggcacccatacactgccggtcgagtctggtgatatgaaaggctctttcgctttgtcttttcctgttgagagtgacgtggcccctatcgcaagaatgttcatttttgcaatactgccagacggcgaggtggtgggcgattctgagaaatttgagattgaaaactgcctcgccaacaaagtcgatctctcattctcacccgcccagtctcctcccgcatcacatgcccatctacaggtggcagccgcgccgcaatcactctgtgcgctgcgggctgtggaccaatccgtcctgttgatgaagcccgaagccgaactgtcagtaagtagcgtctacaacttgctcactgtgaaagacctcactaattttcccgataatgtagaccagcaggaagaagaacagggtcactgccctcgcccgttctttatccacaatggcgctatctatgtgcccttgagctcgaatgaggctgacatatacagttttttgaaaggcatgggcctaaaagttttcaccaatagtaaaatccgaaagccaaaaagttgtagcgtcattccaagcgtctccgccggcgctgtcggacaggggtactatggtgccggactgggcgtggtggagcgcccctatgtaccccagcttgggacatataatgtaatcccactgaataacgagcaatcaagtgggcctgtccctgagacagtccgttcgtatttccctgagacttggatctgggagttggtggctgtgaatagcagtggcgtggctgaggtaggcgtgactgtccccgacacgattaccgagtggaaagccggcgcattctgtctgagcgaggatgctggcctgggcatatcaagcactgctagtctaagagcctttcagccttttttcgtcgagctcacaatgccctattccgtgatacggggcgaagttttcactctgaaggcaacagtcctaaattatctgccaaaatgcatacgagtcagcgtgcagctgaaggcctcccccgctttcctggcctcgcagaacaccaagggcgaggagtcttattgtatttgtgggaacgagagacagaccctgtcatggaccgttacaccaaagaccctgggaaacgtgaatttctccgtcagtgccgaggctatgcagtccctagagttgtgtgggaatgaagtggtagaggtccctgaaatcaagcgaaaagatactgtgatcaagacgctcttggtggaagcagaaggaatcgagcaggagaaaaccttttcgagtatgacatgtgcgtcaggcgctaatgtgtccgagcaactgtctctgaagctgccaagtaatgtggtgaaagagagcgcccgggccagctttagcgtgctgggagatatcctagggtcagccatgcaaaatatacagaacctgctacaaatgccgtacggctgtggggagcagaacatggtcctgttcgctccaaatatctatgttctgaactatttgaacgaaacacaacagctcacccaagagatcaaggccaaggccgtcgggtatctgattaccggctaccagaggcagctgaactataagcaccaggatggtagttatagcaccttcggcgaaagatacggcagaaatcagggaaatacatggctcacagccttcgtgctgaagacctttgctcaggcaagaagctacattttcattgatgaggctcacatcactcagtctctgacatggctctcacagatgcaaaaagataatgggtgctttaggagctccgggtcccttctgaataacgctataaaagggggtgttgaagacgaggcaaccttgtcagcatatgtcacaatagcactcctagaaataccattgccagtaacgaatccaatcgtgcggaatgccttattttgtctggaatctgcttggaatgttgctaaggaggggacccatgggagccacgtttatactaaagctctcttggcgtatgcattcagcctgctggggaagcaaaatcagaacagggaaatcctgaactccttggacaaggaagcagtaaaggaggataatttggtgcactgggaacggccccagcgcccgaaggcacccgtgggacacctctaccaaacccaggcgccctcggctgaagttgagatgacaagctatgtgctgctggcttatttaacagcccagccagccccaacctccggggatttgacctcggcaaccaatatcgtgaagtggattatgaaacaacagaacgcccagggagggttttccagtacccaggatactgtcgtggcgctccacgccctctcccgctatggggctgctacttttacgaggacagaaaaaactgcacaggtaaccgtccaggattcacagacattctctactaacttccaggtcgacaacaacaacctccttctcctgcagcaaatttctttgcccgaactacctggagagtatgtcatcaccgtaaccggggagcgatgcgtgtatctacaaacatctatgaaatacaatattctccccgaaaaagaagattcaccattcgcactgaaagtccagactgtacctcaaacttgtgacggacataaagctcacacgagcttccagatttcactgacaatcagttatactggcaaccgccccgcttctaacatggtcattgtggatgtgaaaatggtgtccggctttatcccactgaagcccactgtcaagatgcttgaaaggtcttcttcagtctcaaggactgaagtgagcaataaccacgtcctcatctacgtcgagcaggtgactaatcagaccctttctttctcttttatggtcctccaggatatacctgtcggtgatctcaaacccgccattgtgaaggtttatgactattacgaaactgacgagtctgtggtagccgagtacatcgcgccctgcagcacagacaccgagcatggaaatgtatag

SEQ ID NO: 129788 - DNA, 3807 bp, synthetic construct
  misc_feature 1..3807: note = Description of Artificial Sequence: Synthetic coding sequence
  source 1..3807: mol_type = other DNA
atgtctgaaagctaccgcagaacaacattcccagtcaggtttcgtgtcgtcagcgtggatgagaacttcaggccacggaacgaactgatcccgctgatttatcttgagaacccaaggagaaaccggattgctcagtggcagtccctgaaattggaggctggcatcaaccagcttagttttcccctgagctctgaacctatccaaggtagttaccgcgttgtggtccaaaccgagtcaggtggtagaatccagcacccattcactgtggaagagttcgttctgcccaagtttgaggtgaaagttcaggtgccgaaaattatcagtattatggatgaaaaggtgaacatcaccgtctgcggcgagtatacctacgggaagcccgtgcccggtctggcaaccgtgagcctgtgccgcaaactgtcccgggtcctgaactgcgacaagcaggaggtatgtgaggagttcagtcagcagcttaacagcaatggatgtattacacagcaggttcacactaagatgttgcagatcactaacaccggctttgagatgaagttgcgcgtcgaggccagaataagggaggagggaaccgacctcgaggtgacagcaaatagaatatctgagatcaccaatatcgtgtccaaactcaagttcgtcaaggtggatagtcacttcaggcaaggcattcctttcttcgcacaggtgctccttgttgatgggaagggagttccaattccaaacaagttgttttttatttcggttaacgatgcaaactactacagtaacgctaccacgaacgaacaaggcctggcccagttttctatcaacaccacaagcatttcggtgaataagctcttcgtgcgggtcttcactgtccaccccaacctgtgcttccattattcatgggtcgcagaagaccaccagggcgctcagcacacagccaatagggttttctccctgagtggaagttacatacacctggagcccgtagcaggtactcttccttgcggacataccgagaccataaccgcgcactatactctgaacagacaggctatgggagagctctctgagttatcctttcattatctgattatggctaagggcgtgatcgtccgctctgggacccatacactgcctgtggagtctggcgacatgaaagggtcctttgccctgagttttccggtggagtcagatgtcgctcccatagccaggatgtttatcttcgcaatcctgcccgatggggaggtggttggggacagcgaaaagtttgaaatcgagaattgcctggccaacaaagttgacctgtccttttcccctgcccagagcccccccgccagccacgcccacctgcaggtggcagccgcaccccaatccctctgcgctttgcgtgccgtggaccaatctgtcctgttgatgaagcccgaagccgagctgtcagtgtcatctgtatacaacctcctgacggtgaaggatctcaccaacttcccggataacgtggaccagcaggaggaagaacagggacactgcccaagaccgttttttatacataatggagcaatttacgtgcctctttcttcgaatgaagcagacatttactcattcctcaagggaatgggactgaaggtctttaccaattccaaaatccggaagcccaagagctgtagcgtgattccctccgtgagtgccggggccgtcggccagggatattacggagctggcctgggtgtcgtcgaaaggccatacgtcccgcaattaggcacctacaatgtcatcccgctaaacaatgaacagtcgtccggacctgtgcctgaaaccgtgagatcttacttcccagagacctggatatgggaactggttgcggtcaattcatcgggggtggctgaggtgggggtgaccgtgcccgacacgatcaccgaatggaaggctggcgccttctgcctttcagaagacgctggcctcggaattagctccactgcttccttacgcgccttccaaccctttttcgtggagctgacgatgccgtactcggtaatccgaggcgaggtctttaccctcaaagccacagtgttaaattacctgcccaagtgcataagggccgagggaattgaacaagaaaagactttttcctcaatgacatgcgcctctggggccaatgttagtgaacagctgagcctgaagctaccctctaatgtggtgaaagagtcagctagagcgagcttttctgtgctaggcgacattttggggtccgctatgcaaaacatccaaaacctgctgcaaatgccctacggctgtggggaacagaacatggtactgttcgcacctaatatttatgttctgaactacttaaatgagacccaacaactaacacaggagataaaggcgaaagctgttggatatctcataactggataccagcggcagcttaattacaaacatcaagatggctcctactccacattcggagagaggtacggcaggaaccagggcaacacttggttgaccgcctttgtgctgaaaactttcgcacaggccagaagttatatatttattgacgaagcccacattacccagagcctgacctggctcagccagatgcagaaggacaacggctgctttagatcctccggatctcttttaaataacgcaataaagggcggcgtggaggatgaggccaccctctcagcgtatgtgactatcgctctgctggaaatccctctccccgtgactaatcctatcgttcggaatgctctcttttgtcttgaaagtgcgtggaatgttgccaaggaggggacccacggctcacatgtgtatactaaagcacttttggcctacgccttttccctccttgggaaacagaaccagaacagagagatcctaaattctctggataaggaggccgtaaaggaggataatttggtacattgggagcgcccacagagacctaaggcgcccgtaggtcatctataccaaacacaggctccatcagccgaagtggaaatgacgtcttatgtcctgctcgcgtatctgacagctcagccagcaccaacaagcggtgacctgacaagtgctactaacatcgtgaagtggataatgaagcaacagaacgctcagggtggatttagcagcacacaagacactgtcgtggcactccatgcattgtctagatacggcgccgccacatttactagaacagagaaaactgcacaagtgacagtgcaagattcacaaacattcagcacaaactttcaggtggataataataaccttctgctgttgcagcagatcagcctacctgagctccccggcgagtatgtgattactgttaccggtgagaggtgcgtgtacctccagaccagcatgaagtataatattcttccagagaaagaggacagcccctttgcgcttaaagtgcaaaccgtaccccaaacttgtgatggccacaaagcccacacatcctttcaaatctcgttgactatatcatacaccggcaacaggccagcttctaacatggtgatcgtcgacgtaaaaatggtgtctgggtttataccgctgaaacccacagtgaagatgttagagcggtcttcatctgtgtcgcgcactgaggtgtctaacaatcacgtgctaatctacgtcgagcaggtgaccaatcaaaccctcagcttctcctttatggtgctgcaagacatccccgttggggatctgaaacctgccatagttaaggtgtacgactactacgaaacagacgaaagcgtggttgcagagtacatcgccccatgtagcaccgacaccgagcacggcaacgtctag

SEQ ID NO: 129789 - DNA, 660 bp, synthetic construct
  misc_feature 1..660: note = Description of Artificial Sequence: Synthetic coding sequence
  source 1..660: mol_type = other DNA
atggttaagtatttcctagggcagagcgtgctccgctcttcatgggaccaggtgtttgctgccttttggcagcgttaccctaacccctactcaaagcatgtcctgacagaggatatcgttcatagggaggtgacaccagaccagaagcttctctcacgacgcttgctcaccaaaacaaacagaatgccaagatgggcggagagactgttccccgctaacgtggcccacagcgtctacgtacttgaagactcaatcgtggatccacagaaccagactatgactacctttacttggaacatcaaccacgccagacttatggttgttgaggaacggtgtgtctactgcgtgaactctgataattcgggttggacggaaatcaggcgtgaggcatgggtgagcagcagcctcttcggggtgtctagggctgtacaggagtttggacttgccagattcaaaagcaacgtaacaaagactatgaaggggttcgagtacatattggcaaaactgcagggggaagcccctagcaagactcttgtggagaccgcaaaggaagcgaaggaaaaggctaaggagaccgccctggcagcaactgagaaggctaaagatctggcaagcaaagccgccactaaaaagcagcagcagcagcagcaattcgtgtag

SEQ ID NO: 129790 - DNA, 1770 bp, synthetic construct
  misc_feature 1..1770: note = Description of Artificial Sequence: Synthetic coding sequence
  source 1..1770: mol_type = other DNA
atgagttctagttattggagtgagactagcagtagcagttgtggcacccagcagctgccagaggtgctacagtgccaaccccagcattaccactgctaccaccagtctagtcaggcccagcagcctcctgagaagaacgtagtatacgaacgagttcgcacatatagcggacccatgaacaaggttgtacaggctctggatccatttaactcacgggaggtcctcagcccattgaaaacaacttcaagctaccaaaaccttgtttggtccgatcacagccaggaactacacagcccaactctgaaaatctccacctgcgcgcctagcaccttgcacattacacaaaataccgagcaggaactgcattcgccaaccgtcaagctgacaacatatccacagacaaccatcagaaaatacgtggttcagaacccagagcaggaacccctctcccaattcctgagagggtcacacttttttcccgggaacaatgttatttacgagaagacaatcagaaaggtcgagaagctaaataccgatcagggctgccaccctcaagcgcaatgtcaccaccacattatccagcagccgcaggttattcactccgcgcactggcagcaacctgattcaagccagcagatacaggccatcacagggaataaccctattagcacacatattggaaacgagctgtgtcactctggctcgagccagatttgtgagcaggtgatcattcaagatgatggcccagagaaactggatcctcgatattttggcgagctgctggcggacctcagtcgcaaaaacactgacctctatcattgcctgctggagcacttacagagaatcgggggatcaaaacaggacttcgaaagcactgatgagtccgaggacatcgagagcctcattccaaaggggctgagcgaatttacaaaacagcagattagatatattctgcaaatgagaggcatgtccgacaagtccctgcgtctggtcctcagcactttctctaatattagagaggagttgggacacttgcagaacgacatgacatcccttgagaatgacaagatgcggcttgagaaagatctgagcttcaaggacacgcagctcaaagagtacgaagaattactcgcctcagttcgagccaacaaccaccagcagcaacagggacttcaggacagttcatccaagtgtcaggccctcgaagagaataacttgtcacttagacacacgctgtccgatatggagtatcgcctaaaggaactcgaatactgtaagcgcaacctggagcaggagaaccaaaatctgcgcatgcaagtgagcgagacatgcaccggcccaatgctgcaggccaaaatggatgaaattggcaatcactacaccgagatggtaaagaacctgcgcatggagaaggatcgtgagatttgtaggctccgctcacagcttaatcagtaccataaagacgttagtaagcgggaaggctcctgttctgattttcaattcaagcttcacgaacttaccagcctgctcgaggagaaggattcccttatcaaacggcaaagcgaggagctgtcaaagcttagacaggagatctatagttcccataaccagcctagcacgggcggcaggacaaccatcactactaagaaatatcggacacaatacccaatactgggcctactctacgacgactatgaatatatccccccaggatccgagactcaaactatagtcatcgagaagactgaagataagtatacttgtccatag

SEQ ID NO: 129791 - DNA, 921 bp, synthetic construct
  misc_feature 1..921: note = Description of Artificial Sequence: Synthetic coding sequence
  source 1..921: mol_type = other DNA
atgtctagctcttattggtcagaaacatctagcagttcttgcggcacacagcaactgcctgaggtcctccagtgtcagccacagcactatcactgctaccatcaaagttcacaagctcagcagcctccggaaaaaaatgtggtttatgaaagggtgagaacatattccgggcccatgaataaggtagtgcaggcccttgacccattcaacagccgagaagtgttgagccctctcaagaccaccagttcttaccaaaacctggtgtggagcgatcactcgcaagagctccattcgcccactctgaagatttccacctgtgccccctctacattgcacataacgcagaacacagagcaagagctgcattctcctaccgtcaaactcactacctacccacagacaactatcaggaagtacgtagtccagaatcctgaacaggaacccctcagccaattcctgagaggctcacacttctttccaggcaataatgtgatttatgagaagaccattcgcaaagtggaaaaactgaacacggatcaagggtgccatcctcaagcccaatgccaccaccatattatacagcaaccccaggtgattcactctgcacactggcaacagcctgacagcagtcagcagattcaggcaattacgggaaacaacccaatctcgacacacataggcaatgagctgtgccattccggttcatctcagatatgcgagcaagttatcatccaggacgacggcccggagaaactggacccccgatatttcggtgaactgctggctgacctgtctcgcaaaaataccgacctctaccactgcctgctggaacacctccagcgtattgggcgcaaacagtccttgagctctacctacaccattaggcacggaattcagacaaaaagaaccgggatattatag

SEQ ID NO: 129792 - DNA, 1788 bp, synthetic construct
  misc_feature 1..1788: note = Description of Artificial Sequence: Synthetic coding sequence
  source 1..1788: mol_type = other DNA
atgagtagttcctattggtcagagacttcttcctcaagctgtggaacccagcagttacctgaggtgcttcaatgccagcctcagcactaccactgctaccaccaaagctctcaagctcagcagccacctgaaaagaatgtagtctatgagcgagtgagaacttatagcggccccatgaacaaggttgtacaagcgctcgatcctttcaatagtcgtgaagtgctctccccactgaaaacaacttcgagctaccaaaatttggtatggtcggaccacagccaagagttgcactctcctacccttaagatcagtacatgtgccccctcgaccctccatataacccaaaatactgaacaggaattgcactccccaaccgttaagcttactacatacccacaaaccactatccgcaagtatgtggttcagaatcctgagcaggagccattgtcgcagtttctcagaggcagtcatttttttcccggcaacaacgtcatctatgagaaaaccatccgtaaggtggagaagttgaacacagatcaaggctgtcatcctcaggcccaatgtcatcatcacatcatccagcagcctcaggttatacactccgcgcactggcagcagcccgattcaagccagcaaatccaggcaattacaggcaacaacccaattagtactcacatcggtaatgagctctgtcatagcggatccagccagatctgtgagcaggttatcattcaggacgacggaccagagaagctcgatccccggtacttcggtgaactgctagcagatctttcaagaaagaacacagatctttaccattgcctccttgagcacctgcagaggattgggggctcaaagcaggattttgagtccaccgacgagagtgaggacattgaatctctcatccccaagggccttagcgaatttacaaagcagcagattaggtatattcttcagatgcgtgggatgagcgacaaaagcttgcggctggttctgtctaccttctcgaatatccgtgaggaactcgggcatctccagaatgatatgacgtccctggaaaatgacaaaatgcggctcgagaaagacctgagctttaaggatacacaactgaaagagtacgaggagctgttggcgtctgtgagggcgaataatcatcagcaacaacagggattgcaggactccagttccaagtgccaggccttggaggagaacaatttgagcctcaggcatactctctccgacatggagtacagactcaaagagctagagtactgtaagcgaaaccttgaacaggaaaaccagaatcttaggatgcaggtatcagagacttgcactggtccaatgctccaagccaagatggacgagattggcaatcactataccgagatggtaaaaaatctgcggatggaaaaggatcgtgagatctgcaggttgagatcacaactcaatcagtatcacaaggacgtgtccaagcgagaggggtcgtgttcggacttccaattcaagctccacgaactaacatcattgttagaagagaaggattctttgattaagcgccagtctgaagaactaagcaagttacggcaggaaatttactcttcccacaaccagcccagtacaggaggacgcaccaccattacaacaaagaaatatcggactcagtatcctattctcggacttctatacgatgactacgagtatataccccccgggagcgagactcagactatagtgattgagaagacagaggataaatacacttgcgtgagctcactcggtcacttttag

SEQ ID NO: 129793 - DNA, 921 bp, synthetic construct
  misc_feature 1..921: note = Description of Artificial Sequence: Synthetic coding sequence
  source 1..921: mol_type = other DNA
atggcatctaggtggtggcggtggaggcgcggctgttcttggaaacccgcagccaggtctccgggacctgggtctccgggcagggcaggtcccctaggcccttccgctgccgctgaggtgagagcccaggttcaccgccgcaaaggccttgatctgagccagattccctatataaatcttgtgaagcaccttaccagcgcttgtcccaatgtttgtcgtatcagtcgcttccatcacaccacccctgattccaagacgcacagcggcgaaaagtatactgatcctttcaaattagggtggagggacctgaagggcctctatgaggacataagaaaggaactgctgatctcaacgtccgagctgaaggaaatgtctgagtattatttcgatggaaagggcaaagcattcaggccaattatcgttgcccttatggctcgggcctgcaacatccatcacaacaactctaggcatgttcaagcctctcagcgagccatagctcttattgcggaaatgattcatacggcttccctcgtgcatgatgacgttattgacgatgcttcctcaagaagaggcaagcacaccgttaataaaatctggggcgaaaaaaaggcggtcttagccggagacctgattctaagcgctgccagcattgctcttgccaggatcggcaacactacagttatctcaatcctcactcaggttattgaagacctggtccggggcgagttcttgcaattgggttcaaaggagaatgaaaacgaaagattcgctcactacctggaaaagacctttaaaaaaaccgcctctctgattgcaaatagttgtaaggcggtctttccaaggaatgaatgctacgatcacgccactgtccagttcgcgtggcggtgtcgacaatcaagcaccgtgtgtacgactgaatag

SEQ ID NO: 129794 - DNA, 1248 bp, synthetic construct
  misc_feature 1..1248: note = Description of Artificial Sequence: Synthetic coding sequence
  source 1..1248: mol_type = other DNA
atggcctcacgctggtggcgctggagacgggggtgctcttggaagccagccgcacgttcaccaggacccggctcacccggcagggcggggcctttggggcccagcgccgcagcagaagtccgcgcccaagtgcatcgacgcaaggggttagatttgagccaaatcccttacatcaaccttgtgaaacatctgaccagtgcctgtccaaacgtctgccgtatctccaggttccatcacacaacacccgactctaaaacccactcaggcgaaaagtacaccgacccgttcaagctgggttggagggacctgaaaggtctttacgaagatattaggaaggaattgctcatcagcactagcgaactcaaggagatgtccgaatactactttgatggtaaggggaaggcttttagacctatcattgtggcccttatggcaagggcatgtaatatacaccacaacaactctcgtcatgtacaggcctctcaacgcgctattgctctgatcgctgaaatgatccacaccgcctctctggtgcatgacgacgtgattgacgatgcaagctcacgccgaggcaagcacaccgtgaacaagatttggggcgagaaaaaggccgtgcttgccggagatcttatactatcagcagcatcaatcgcccttgcaagaatcggtaatactacagtgattagcatcctcacccaggtcattgaggatctggtgcgcggcgaatttctgcagcttggctccaaggaaaatgaaaatgaacgattcgcccattatctcgaaaagactttcaaaaaaacagcctcattaattgcaaatagctgtaaagctgttagcgtgctgggctgcccagaccccgttgtccacgagatcgcgtaccagtatggaaagaacgttggcattgcattccagctgatcgatgacgtgctggactttaccagctgctccgatcagatggggaagccaacctctgccgatctgaaactaggtctcgccacggggcctgtgctgtttgcatgtcagcagttccctgagatgaatgcgatgattatgagacgtttcagcttaccaggggacgttgatcgagcacgccaatacgtgctacagagtgatggcgtccagcaaacaacctatctggctcaacagtattgccatgaggctatcagggaaatttctaagctgaggccctcccccgagcgcgatgctcttatccaattaagtgaaattgtgctcacacgcgataagtag

SEQ ID NO: 129795 - DNA, 1131 bp, synthetic construct
  misc_feature 1..1131: note = Description of Artificial Sequence: Synthetic coding sequence
  source 1..1131: mol_type = other DNA
atgcccgcccatgtgcacagaaggaaaggcctagaccttagccaaattccatatatcaatctggtcaaacatctgacttctgcttgcccaaatgtgtgccggataagtaggtttcaccacactacccccgattcaaagacccactccggagagaaatatactgacccattcaaactcggatggcgggacttgaagggcctctacgaagacattcgaaaggaattgctgatatctacatcagaattgaaggagatgagtgagtactattttgacggcaaagggaaagcctttcgccctatcatcgtagccctcatggctagggcctgcaatatccatcataataattcacgacatgtgcaagcttctcagcgggcaatcgccttgattgccgaaatgattcataccgccagcctcgtgcatgacgatgttattgacgacgcttcttcacgcagaggcaaacataccgtgaataagatttggggggagaagaaggccgtactggcaggagacctaatactttccgcagcatcaatagctttagctcggattggcaacaccacagttattagcatcttaacgcaggttatcgaagatctggtcaggggcgaattccttcaactcgggtctaaagaaaatgaaaacgagcggttcgcgcactacctggagaagacattcaagaaaacggcatctctcatcgcaaacagctgcaaggctgtctccgtactggggtgtcccgatcctgttgtgcacgaaatcgcctaccagtacggtaaaaacgttggcattgccttccagttaatcgatgatgtcctggattttacctcctgcagtgatcagatgggaaagcccacaagcgccgatctgaagttggggttggccactgggcccgtgttatttgcgtgccagcagtttcctgaaatgaacgccatgatcatgcgcagattttcgctgccgggtgacgtggatcgcgcccgacagtacgtcctccaatcagacggggtccaacagaccacttacctcgcccagcagtattgccacgaggcaattcgggaaatcagcaagctacggccatcccccgaaagagacgctcttatccaactgtccgagatcgttctaaccagggacaaatag

SEQ ID NO: 129796 - DNA, 723 bp, synthetic construct
  misc_feature 1..723: note = Description of Artificial Sequence: Synthetic coding sequence
  source 1..723: mol_type = other DNA
atgaattttcggcaactcctgttgcatctgcctcgctatttgggtgcaagcggttcgccgcggagactctggtggagtcccagcctggataccataagcagtgtgggctcgtggcgagggcggtcgtcaaaatccccggcgcattggaatcaggtggtctccgaagcagagaagatcgtggggtaccccacctcctttatgtccctacgctgcctgctctcagatgagctgagcaacatcgcgatgcaggtgaggaagctagtcggtactcagcatccactcttgactactgctagagggctagtgcatgatagctggaattcacttcaactaagaggcctagtggttcttctcatctctaaggccgcgggccctagctctgtcaacacttcttgtcaaaactacgacatggtaagtggcatttattcttgccagaggagcctcgcagagatcaccgagctgatccacatagccttactggtacatcgaggaattgtaaaccttaacgagctgcagtcttcggatggcccccttaaggatatgcagttcggcaataagatcgcaattctgagtggagactttctgctggcaaatgcatgcaacggactcgctctattacaaaacaccaaatcctttagcttcaatggtcccattgccatttaccaaatgggggactgcgagagcgcatggattctatccaagcacccccgcgccctttcttag

SEQ ID NO: 129797 - DNA, 270 bp, synthetic construct
  misc_feature 1..270: note = Description of Artificial Sequence: Synthetic coding sequence
  source 1..270: mol_type = other DNA
atggagttggcaaagcatgatgccgaagtccagaacatggcgttccaatatggcaagcatatggcaatgtcacataaaatcaatagcgatgtgcagccattcatcaaggagaaaacatctgattccatgacgtttaacctgaattctgcccctgtcgtcttgcatcaggaattccttggccgtgatctgtggattaagcagataggggagagcagctctacagaagttcaactcagtaatttccagcaaatgctgctcagcacactgtag

SEQ ID NO: 129798 - DNA, 1200 bp, synthetic construct
  misc_feature 1..1200: note = Description of Artificial Sequence: Synthetic coding sequence
  source 1..1200: mol_type = other DNA
atgaattttcgccaactgcttctacatcttccacgttacctaggcgcttccggaagccctcgcaggctgtggtggtctccatctcttgatactatctcctcagttggatcctggagaggtcgtagctccaagtcgcccgcacattggaaccaggttgtatcagaagctgaaaagattgtggggtatcccacatcatttatgagtctcagatgtctgctgtcggacgagctgtcgaacatcgccatgcaggtgaggaagctcgtcggaacacagcatccgctgctgacaaccgccagaggcctcgtccacgatagttggaactcattgcaattgaggggtttggtggtcctcctgatctcaaaggccgccggaccttcttcagtcaatactagctgtcaaaactatgatatggtgtctgggatttacagttgccaacggtctctggccgagatcactgaattgattcacattgcattactggtgcacagaggtattgtgaatcttaacgagctccagtcctccgatggtcccctgaaggatatgcagtttggcaataagatagctatcctgtccggggattttcttctggcaaacgcctgtaatggattagcccttctgcagaacaccaaggtggttgaacttttagctagtgcgctcatggatctcgtccagggggtataccatgaaaattccacctccaaggagagttacattaccgacgacatcggaatttcaacttggaaagagcagacctttttatcacatggggccctgctggctaaatcctgtcaggcagccatggagctggcgaaacacgacgcggaggtgcagaatatggcattccagtacggaaagcatatggctatgtctcacaaaattaactctgacgtccagcccttcattaaggaaaaaacatctgattccatgactttcaatctcaacagcgcccctgtcgtgctccatcaggagttcctcggaagggacctgtggataaagcagattggcgaggcacaggagaaaggccggctagattatgctaagctgcgcgagaggatcaaagctgggaagggcgtgacatccgccatcgatttgtgcaggtatcatggaaacaaagcgctcgaggctctggagagctttcctcccagcgaagctagatctgccttagagaacattgtgttcgctgtcacacgcttttcctag

SEQ ID NO: 129799 - DNA, 243 bp, synthetic construct
  misc_feature 1..243: note = Description of Artificial Sequence: Synthetic coding sequence
  source 1..243: mol_type = other DNA
gtccagaatatggcctttcagtacggaaaacatatggcaatgagccacaagattaacagcgacgtgcagcccttcattaaggagaaaacaagtgacagtatgacctttaacctgaactcggcacctgttgttctacaccaggagttccttggcagggatctgtggatcaagcagataggtgagtcttcatccactgaggtacaactctcaaacttccaacagatgctcttgtccactctgtag

SEQ ID NO: 129800 - DNA, 894 bp, synthetic construct
  misc_feature 1..894: note = Description of Artificial Sequence: Synthetic coding sequence
  source 1..894: mol_type = other DNA
atgaattttcggcagctcttgttgcaccttccccgatatcttggggcatcaggttccccaagacggctgtggtggagcccaagcctagacaccatcagctctgtgggatcgtggagaggtaggagctccaagagccctgctcactggaaccaagtggtgagcgaggctgaaaaaatcgtggggtatccaactagctttatgtctcttcgttgcttgctgtcagatgaactgtctaatattgccatgcaagtccggaaactcgtgggaacacagcatccactgttgacaactgcccgcggattggtgcatgacagttggaattccctccagctgaggggtctggtggtccttttaatatcgaaggccgccggaccaagctcggtcaacacaagttgtcagaactacgatatggtgagcggtatctattcctgccaaagaagcctggccgagattacggagcttattcacatcgccctcttagtgcataggggaatagtaaatctaaacgagctgcaatccagcgatggccctctgaaggatatgcaattcggcaacaagatcgcaatcctgtcaggagatttccttctggccaacgcttgcaacggccttgctctgttgcagaatacaaaagtagtcgagctgctcgccagcgccctcatggatcttgtccagggagtataccacgaaaattctactagcaaagcacaagagaaaggaaggttagactatgcaaagttgcgcgagcgaatcaaagcgggaaagggcgtaacatccgccatcgacctgtgtcgttaccacgggaacaaggccctggaggctctagagtcatttccaccgagcgaagctcgctcggctttagagaacatcgtgttcgctgtcacgaggttctcctag

SEQ ID NO: 129801 - DNA, 882 bp, synthetic construct
  misc_feature 1..882: note = Description of Artificial Sequence: Synthetic coding sequence
  source 1..882: mol_type = other DNA
atgggacgcgtggtcgcagagctggtgtcttcactgcttggcctgtggctcttgctgtgttcgtgcgggtgcccagagggggctgaattacgcgcaccgcccgataagatagccataattggagccgggatcgggggcacaagtgctgcttactacctgcgacagaagttcggaaaggatgtcaagatagacttattcgaaagggaggaagttggaggcagactggccaccatgatggtgcaaggacaggagtacgaagctggagggtcagtgattcatccccttaatctccatatgaagaggttcgtgaaggacctgggattgtcggcggtccaggcaagcgggggcttgctggggatctataatggcgagaccctggtgtttgaagaatcaaactggttcatcattaacgtcattaagttggtgtggaggtatggattccagagcctccgtatgcacatgtgggtcgaggacgtgcttgacaaatttatgagaatttacaggtatcaatcccacgactatgctttctcttctgtagaaaagttactgcacgcactggggggcgatgactttcttggcatgcttaacaggactcttctggagaccctccagaaggctggtttctccgagaaattcctcaacgaaatgatcgcaccagttatgcgcgtgaactacggccagtccaccgacatcaatgctttcgtcggagccgtctcacttagttgttccgacagcggcctctgggccgttgagggcggcaacaagctggtgtgctccggccttctccaggcgtcaaagagtaacctgatctctgggagcgtcatgtacattgaggagaaaacaaagacgaagtatacggtcttggggctgtgtccgttgtag

SEQ ID NO: 129802 - DNA, 1518 bp, synthetic construct
  misc_feature 1..1518: note = Description of Artificial Sequence: Synthetic coding sequence
  source 1..1518: mol_type = other DNA
atgggtcgggtggttgcagagctggtgtcaagcctcctaggcctttggctcttactctgctcatgcggctgccctgagggagcggagctcagagcaccccccgacaagattgccatcatcggtgcggggattggaggaaccagcgcggcctactatctgaggcagaagttcggcaaagatgtgaagattgacctctttgaacgagaggaggtcggcgggcgtctcgcaactatgatggttcaagggcaagaatatgaggccgggggcagcgtcattcacccactgaacctgcatatgaaacggtttgtgaaagatctggggctttccgcggtgcaagcttccggcgggttacttggtatctacaatggtgagacgctggtcttcgaggagtcgaactggttcattatcaacgtaatcaagctcgtgtggcgctatggattccaatccctgaggatgcatatgtgggtggaggatgtcctggataagttcatgagaatatacaggtaccagagtcatgattatgcattttcaagcgtcgagaaattactgcatgccctggggggcgatgacttccttggcatgctgaatcgcacactgctcgagactctccagaaggcagggttttcggagaagtttttgaatgagatgattgcgcctgtaatgcgcgtgaattacggtcagagcactgacataaacgccttcgtgggcgccgtgagcctgtcctgtagtgattccggactgtgggcagtggagggagggaacaagcttgtttgttcaggcttgttgcaggcctccaaaagcaatcttatttctgggagcgtaatgtatattgaagaaaaaactaaaacgaaatatactggaaaccccacaaaaatgtacgaggtggtgtaccagatcgggaccgagacacgttccgacttttacgatatagttctggtggctaccccccttaacagaaaaatgagcaacataacctttctaaactttgatccccctatagaggaatttcaccaatactatcagcatattgttacaactctcgtgaaaggagaactgaatactagcatattttcttcaagacctattgataaattcggcctgaataccgtcctcacaaccgacaactccgacttattcatcaacagtattggtattgtgcctagcgtgcgagagaaagaagaccctgagccctctacagacggtacctatgtttggaaaatcttttctcaggagacactgacaaaggcacaaatcctgaaattattcctgagttacgactacgcagtaaagaagccttggctcgcctaccctcactataagccccccgagaagtgcccgtcgataatcttgcatgaccggctgtattacctaaatggaattgagtgtgcagcttccgccatggagatgagtgctatcgccgcacacaacgccgccctgttggcgtaccaccggtggaacggtcatacggacatgatcgatcaggacggtctttacgagaaactgaaaacagagctgtag

SEQ ID NO: 129803 - DNA, 1287 bp, synthetic construct
  misc_feature 1..1287: note = Description of Artificial Sequence: Synthetic coding sequence
  source 1..1287: mol_type = other DNA
atgatggtgcagggacaagagtacgaggcaggcggcagtgtcatacatcccctgaacctgcatatgaagaggttcgtcaaagatttaggcctcagtgctgtgcaggcctccggaggcctgctgggaatttataacggagagactcttgtgtttgaggagtcaaactggtttatcatcaacgtcataaagcttgtttggcgttatggttttcagtcacttcgtatgcatatgtgggttgaagacgttctggacaagtttatgagaatctacaggtatcagtctcacgattatgctttttcttccgtggagaaactcttgcatgctttgggcggagacgactttcttggcatgttgaatcggactctgttagagactctgcagaaggcaggctttagcgaaaagtttttgaacgagatgattgcgcccgttatgagagttaactatggacagagtacagacatcaatgcttttgtgggcgccgtgagcctgagctgtagcgacagtggcttgtgggcagtcgagggcggtaacaagttagtctgtagcggtctgctacaggcctctaagtccaacctgattagcgggtccgtgatgtatatcgaggagaaaacaaaaaccaaatacacgggaaaccccaccaaaatgtacgaagtggtgtatcagataggcacagagacaaggagcgacttctatgacatagtgctagtggcgaccccgttaaatcgtaagatgagtaacattacctttctgaatttcgacccccctatcgaggaatttcaccagtattaccagcatatcgttactacacttgtaaagggcgagttgaacacctccatattttccagccggcctatcgataaattcggtctgaacacagtactgaccaccgacaatagcgacttatttattaattccatcggcatcgtgccctcagttagagaaaaagaggacccagaaccgagcacggacggcacatacgtctggaagatcttctcgcaagagacactgacaaaggcccaaatccttaaattgtttctttcttatgattatgctgtgaagaaaccgtggctggcgtatcctcattacaagccgccggagaagtgtcctagcataatcctccatgatcgtctgtattatctgaacggaattgagtgcgccgccagcgccatggagatgagcgcaattgccgcccataatgcagccttgcttgcctatcacagatggaatggacacactgatatgattgaccaggacggtctatatgagaagctgaagactgaactgtag

SEQ ID NO: 129804 - DNA, 1284 bp, synthetic construct
  misc_feature 1..1284: note = Description of Artificial Sequence: Synthetic coding sequence
  source 1..1284: mol_type = other DNA
atggtacagggacaggaatacgaggcgggcggctctgtgatccatccactgaatttgcacatgaagaggttcgtcaaggacctcggacttagcgctgttcaggctagcggaggcctgctgggcatctataacggtgagactctggttttcgaagaatcaaattggttcatcatcaacgtgattaagctcgtttggaggtacgggtttcagtccctacgcatgcacatgtgggtggaggacgtgcttgacaagtttatgagaatttaccggtatcagtctcacgattacgctttttctagcgtcgagaagctcttacatgccttgggtggggatgatttcttgggcatgcttaaccggactttacttgaaacgctgcagaaggcaggttttagcgagaagtttctcaacgagatgatcgcacctgtgatgcgggtcaattatggacagagtaccgacatcaatgcgttcgttggagcggtgagcctgagttgcagtgattctggactttgggccgttgaggggggcaacaagctggtctgtagtggtctccttcaggcctctaaaagcaacctgatttcaggatccgtgatgtatatcgaggaaaagactaagactaaatacaccggaaaccccactaaaatgtatgaggttgtgtaccagatcggtactgagaccaggagtgatttttatgatatcgtgctggtcgcaaccccactgaatagaaagatgtccaatataacctttctgaattttgatcctcctattgaagaatttcaccagtattatcagcacatcgtcactacgcttgttaagggagaactgaacacctcaattttcagcagcaggcctattgataagtttggcctgaacacagtgctgacaacagacaattccgacctctttattaattcaattggtattgtgccctccgtgagagaaaaagaggaccccgagcccagtactgacgggacttacgtgtggaagatctttagccaggaaaccctcactaaggcccagattctgaagctgtttttaagttacgattacgcagtcaaaaagccatggctcgcttatccccattacaaaccccctgagaaatgcccctccattattctgcacgaccgactgtactacttgaacggaattgaatgcgcagcctccgcgatggagatgagcgccatagcagcccacaacgcggcccttctggcctaccatcggtggaacgggcacaccgatatgatcgaccaggacggactgtacgagaagcttaaaaccgagctgtag

SEQ ID NO: 129805 - DNA, 1485 bp, synthetic construct
  misc_feature 1..1485: note = Description of Artificial Sequence: Synthetic coding sequence
  source 1..1485: mol_type = other DNA
atggctagagccgctcccctgctggccgccttaacagctctcctagctgctgcagctgcaggtggggacgctccgcccggaaagattgctgtcgtcggggctgggatcggaggtagcgcagtagcacattttctgcaacagcatttcggtcctagagttcagattgacgtctacgagaagggaaccgtgggcggcaggctcgccaccatctctgtgaacaagcagcattatgagtccggagcagcctcatttcactctctgagcctgcacatgcaggattttgtgaagctgcttggcttgaggcatcggcgagaggtagtgggccgtagtgcaatatttggtggggagcattttatgttggaggaaactgactggtatctgctgaacctgttccgcctgtggtggcactatggtatttcattcttgcgccttcagatgtgggtggaggaggtgatggaaaagtttatgagaatttataaataccaggctcatggatatgccttttccggcgtcgaggagttattatattcgcttggggaaagcacatttgtcaacatgactcagcacagcgtagccgaaagcctcctgcaggtcggcgttacgcagcgttttatagacgatgtggttagcgccgtgctgagggcatcatacgggcagagtgccgcaatgcctgcattcgcaggggctatgtcgctcgctggagctcaggggagcctttggtctgtggagggcggaaacaagctcgtatgcagtggacttctgaagctgaccaaagccaacgtcatccatgccacagttacctccgtgactctgcacagcaccgaagggaaggcactttatcaggtcgcttacgagaatgaggtgggtaacagtagcgatttctatgacatcgtggtgatagctacgccattacaccttgataacagtagctcaaacttaacgttcgccgggtttcatcctcctatagacgatgtacaggggagctttcagcctactgtggttagtctggtccacggctaccttaactcttcttactttggatttcccgacccaaaactgtttccgttcgcaaatatactgaccacagatttcccttcctttttctgcacgctggacaacatctgtcctgtgaatatctccgcttctttcaggcgtaagcaaccccaagaggcagccgtttggcgagtgcagagccctaagcctttgttccggacccagctgaaaacactctttcgttcatactacagcgtgcagaccgcagagtggcaggcacaccccctgtacggatccaggcctaccttgcctagatttgcgttacatgaccagctcttttatctgaacgcactcgagtgggcggcctcatccgtggaggtcatggccgtggcggccaaaaatgttgctctgttggcctataatcgctggtatcaggatctagacaaaatagaccagaaagatctcatgcataaagtcaagacggagctttag

SEQ ID NO: 129806 - DNA, 531 bp, synthetic construct
  misc_feature 1..531: note = Description of Artificial Sequence: Synthetic coding sequence
  source 1..531: mol_type = other DNA
atgaaagtgctcttatgtgacctgcttcttctgtctctgttcagttctgtgttcagtagctgccagcgagactgcctcacatgccaggagaagctccaccccgcactggactcctttgatctcgaggtgtgtatcctcgaatgcgaggagaaagtgttcccctcccctctgtggacaccatgcactaaggtgatggctagaagttcctggcagttatctcctgctgcgcctgagcacgtggccgctgcactttaccagcccagagcatctgagatgcagcatcttcgcagaatgccacgtgtgaggtcactttttcaagaacaggaagaacctgaaccaggaatggaggaggccggagagatggagcagaaacagttgcaaaagagattcggggggttcacaggggcacgaaaatcagcccgcaagctggctaatcagaagcgcttttccgaattcatgaggcagtacctggtattgtcaatgcaatcatctcaacggaggagaacacttcatcagaacggcaatgtgtag

SEQ ID NO: 129807 - DNA, 465 bp, synthetic construct
  misc_feature 1..465: note = Description of Artificial Sequence: Synthetic coding sequence
  source 1..465: mol_type = other DNA
atgaaggtgctcctctgtgatctactactactgtctctattctccagtgtgttttcctcatgtcaacgcgactgcctgacctgccaagagaaactccatccggctttagatagtttcgacctggaagtctgtatactcgagtgcgaggagaaggtgtttccctctcctctgtggaccccttgcactaaggtgatggcccgcagctcatggcagctgtcccctgcggccccggagcacgtggccgccgctttgtaccaacccagggctagcgaaatgcagcacctgaggcggatgcctagggtgaggtcactctttcaggagcaggaagagccagagccgggcatggaggaggccggtgagatggaacagaagcaactgcagaaacggttcggcggcttcaccggggccaggaagtccgcacggaagctcgccaaccagaaacgctttagcgagtttatgcgctag

SEQ ID NO: 129808 - DNA, 1230 bp, synthetic construct
  misc_feature 1..1230: note = Description of Artificial Sequence: Synthetic coding sequence
  source 1..1230: mol_type = other DNA
atgacggaactgcccgctccattaagttatttccagaacgcccaaatgtcagaggataaccatctcagtaacaccgtcaggtcacagaacgacaacagagagcgtcaggaacacaatgaccggaggtcccttgggcacccagagcctctttcaaacggacggccacagggcaacagccgtcaggtggtcgagcaggacgaagaggaagatgaggagctgaccctgaaatatggggcaaagcacgtgatcatgttgttcgtgcctgtaactctgtgcatggtggtggtggttgctaccatcaaatctgtcagcttttacacaagaaaagatgggcagctgatctacactccatttaccgaggatactgagaccgtggggcagagggcactccactcaattctcaatgctgctattatgattagcgtcatcgttgtcatgactattttactggttgttctgtacaagtatcggtgttacaaagtgatccacgcgtggctcatcatatcctccttacttctactcttttttttctcattcatctacctgggcgaggtattcaagacttataatgttgctgtagactatatcactgtggccctcttaatttggaactttggagtggtgggcatgatcagcattcactggaaaggccccctcaggctacaacaggcctatctgattatgattagcgccctcatggcgctggtcttcatcaagtacctgcctgaatggaccgcctggctgatcttagcggtgatcagtgtctacgacctggtggcggtcctctgcccgaaagggccgctgagaatgctggtggagaccgctcaggagagaaacgaaactctgtttcccgcactgatctatagcagcaccatggtgtggctggtgaatatggcagagggggaccctgaagcacagaggagagtgtccaaaaattctaagtataacgcagagagaggcgtgaaactcggcctaggggactttatattttactcagtccttgtgggaaaggctagcgcgacggcctccggcgactggaataccaccattgcctgcttcgtggctattctaatcggattgtgcctgacattgctgctgctagcgatcttcaagaaggctctgcctgccctcccgatcagcatcacatttgggctcgtgttttatttcgctactgactatctcgttcagcctttcatggatcagctcgccttccatcaattctacatctag

SEQ ID NO: 129809 - DNA, 1404 bp, synthetic construct
  misc_feature 1..1404: note = Description of Artificial Sequence: Synthetic coding sequence
  source 1..1404: mol_type = other DNA
atgactgagttacccgcccccctgtcctacttccagaacgcccagatgtccgaagacaaccacctgagtaacactgtaaggtcccaaaatgataaccgggaaaggcaagagcacaacgacaggcgcagcctgggtcaccctgagcccttatcaaatggacgcccgcaggggaacagtaggcaagttgtggagcaggacgaggaagaggacgaggaactcactttgaagtacggagcaaagcatgtgataatgctgttcgtacctgtgactctgtgtatggtggtggtggtggctactattaagagcgtctccttctatacacgtaaagacggtcagttgatctatacaccttttaccgaggacacagagactgttgggcagcgagccctgcactcaatccttaacgctgctatcatgatttcagtcatcgttgtcatgacaatcctgttggtggtgctatacaagtataggtgctacaaggtcattcacgcctggttaatcattagctcgctcttactcctcttcttctttagttttatatatttaggtgaggtgtttaaaacgtataatgtcgccgtggattatattacggtggccctcctcatatggaactttggagtggttggcatgatttccatacactggaaggggcccctgcgactccagcaggcttatttgatcatgataagcgccctcatggcccttgttttcattaagtatcttcctgaatggacagcatggctgatcctcgctgtcattagcgtatacgatttggttgcagtgctgtgtcccaaaggaccactccgaatgcttgtcgagactgcccaggagcgaaacgagacccttttccccgccctaatttactcatccaccatggtgtggctagtaaacatggccgaaggggaccctgaagcgcagcggagagtatccaagaactcaaaatacaatgccgaaagcacagagagagaatcacaggacacagtagctgagaacgacgacggcggattctcagaggaatgggaagcccagcgagacagccatttaggtcctcacagatccacacccgagtctcgggcagccgttcaggaactgtcttcttccatcctggcgggggaggatcccgaagagcgtggcgtgaagctgggactgggagatttcatcttctactcagtgctagttggaaaggcttccgcaaccgcctcaggcgattggaacacaactattgcatgcttcgttgccatcctcatcggtctgtgtctcacattacttctactcgcaatcttcaaaaaagcccttccagctctgccaatttcaatcacatttggcctagtgttctattttgcaacagattaccttgtgcagccctttatggatcagcttgcatttcatcagttctatatatag

SEQ ID NO: 129810 - DNA, 1137 bp, synthetic construct
  misc_feature 1..1137: note = Description of Artificial Sequence: Synthetic coding sequence
  source 1..1137: mol_type = other DNA
atgactgagctgcccgcaccacttagctattttcaaaacgcacagatgtcggaagataaccatttaagcaataccgtgcggagtcagaacgataacagggagaggcaagaacacaatgaccgcagatccctggggcacccagaacctctttcaaacggaagacctcaaggcaactctaggcaggtggttgagcaagacgaggaggaagacgaagaactgacactgaagtacggcgctaagcatgtgatcatgctgttcgtccccgtcacgctctgcatggtagtcgtcgtcgcaacaatcaaatccgtgagcttctatacgagaaaagacgggcaattaatctatacccccttcaccgaagatacagagactgtgggccaacgggccctccacagtatcctgaatgcagccatcatgattagcgtgattgtggtaatgaccattctgctagtggtattatacaagtatcgctgttataaagtaatccacgcgtggctcattatcagttccttgctcctgttattctttttctctttcatctatctgggagaggtctttaagacgtacaacgtggcagtggactacattactgtcgccttactcatctggaactttggagttgtcggaatgatcagcatacactggaagggtccactgagactccaacaggcatatcttattatgatctcagcactcatggctctggtcttcattaaatacctcccagagtggactgcctggcttatactagccgtgattagcgtctacgacttggtcgcagtcctttgccctaagggcccattgcggatgctagtggaaacagcccaggaaagaaacgaaaccttattccccgcactcatatactcaagcaccatggtttggctagtgaacatggccgaaggggatcccgaagctcaacgcagggtttctaagaactccaagtacaatgccgagagggcctgcttgcctccggctgccatcaacctgttatcaatcgcacctatggccccacgactgtttatgccaaagggtgcctgccgcccaaccgcccagaaaggatcacacaagaccctgctgcagcgcatgatgatggccgggtctgttcgcaacggtaagccacgagggaccgtgatatag

SEQ ID NO: 129811 - DNA, 1392 bp, synthetic construct
  misc_feature 1..1392: note = Description of Artificial Sequence: Synthetic coding sequence
  source 1..1392: mol_type = other DNA
atgaccgagttacccgccccactctcttatttccaaaacgctcagatgtccgaggacaatcatctgagcaacactaatgacaatagagagcggcaggagcataacgaccgccgcagcttgggtcaccccgagcctctatcaaatggaagaccccagggcaattcccgccaggtcgtcgagcaagacgaggaggaggacgaggaattaactttgaagtacggagccaagcatgtaattatgctattcgttccagttaccctttgtatggtcgttgtcgtcgcaactatcaagtcggtctccttctatacgagaaaagatggacaattgatttacactccattcacggaggacactgaaaccgtggggcagagagccctccactcaatcttaaatgctgctatcatgattagcgtcatagttgtgatgacaattctgctagtcgtgttgtacaaatacagatgctacaaagtcatccacgcatggctgatcattagcagcctgcttttgctcttctttttcagctttatctatctcggtgaagtattcaagacctataacgtggccgtcgattatatcaccgtcgctctcctgatctggaactttggagtggttggtatgatttctatccattggaagggcccactccgcctacagcaggcctatcttatcatgatctccgcgcttatggctcttgttttcattaaatacttaccagagtggacagcttggcttattcttgccgtgatctccgtatacgatctcgtcgccgtcctttgcccaaaaggaccccttcgtatgctggtcgaaactgcccaggagcggaatgaaaccctcttccctgcacttatctattcctccacaatggtgtggctggtgaatatggcagaaggcgaccccgaggcccagcgcagagtgtctaaaaacagtaagtataacgccgaaagcactgaaagagaaagtcaggatacggtggcggaaaacgatgacggcggattctctgaggaatgggaggcacagcgtgattcccatctaggtccacatcgcagtacgccagagagccgggcggccgtgcaggagctatcatctagcatcctggcaggtgaggacccagaagaacggggggtgaaacttggcctaggcgacttcattttctattccgtgcttgtcggtaaggcatcggcaaccgcttctggagactggaacacaactattgcatgctttgtggccatcttgatcggcctctgtctcacgctcctcctgttggctatcttcaagaaggcactccccgctctcccaatcagtataactttcggtttagtgttctactttgccaccgactacctggttcagccctttatggaccagctcgcctttcaccaattttatatttag

SEQ ID NO: 129812 - DNA, 555 bp, synthetic construct
  misc_feature 1..555: note = Description of Artificial Sequence: Synthetic coding sequence
  source 1..555: mol_type = other DNA
atgaccgaactgcccgcaccccttagctactttcaaaatgcccagatgtccgaagacaatcatctctctaacaccgtgagatctcagaacgacaaccgcgagcgacaggagcacaatgaccgacgatccctgggtcaccctgaaccccttagcaacggacggccacagggcaacagccgccaagtagtagagcaagacgaagaggaagatgaggagttaacattaaagtatggtgcaaagcatgtgatcatgttatttgtccccgtcactctctgtatggtagtggtggtcgccacaattaagtctgtgagtttttacacacggaaggacggtcagctgatctatactccttttactgaagacactgagactgttggccagcgggctctacacagcattctgaatgctgcaattatgataagtgtcatcgtggtgatgacaattctactggtcgttctgtacaagtatcggtgctataaagtgtctatgcgccaccggagcctgcttagcaccttgtttttcttgtggcttggcatcctcgtcactgtcacatag

SEQ ID NO: 129813 - DNA, 1392 bp, synthetic construct
  misc_feature 1..1392: note = Description of Artificial Sequence: Synthetic coding sequence
  source 1..1392: mol_type = other DNA
atgaccgaactcccagctccactgtcttattttcagaacgctcagatgagtgaggacaaccatttgagtaacaccaatgataacagggaaaggcaggagcataacgatcggcggagccttggacatccagagcccctgtcaaacggccggccacaaggcaattccaggcaggtagtggaacaggatgaagaggaggacgaagagctcactcttaagtacggggcgaaacacgtcatcatgttattcgtgcctgtgaccctgtgcatggtggttgtagtggctaccattaaatctgttagcttttataccagaaaagatggtcagctcatttatacgccattcacagaagatactgaaactgtaggccagagagctcttcatagcatcctgaacgccgcaatcatgatttccgtaattgtagttatgacaattctgcttgtcgtcctctacaagtacagatgctacaaggtgattcatgcgtggctgatcatctccagtctactgttactctttttctttagttttatctatctgggggaggttttcaagacttacaacgtagccgtggattacatcacagtggctcttctgatctggaacttcggggttgtgggcatgatctcaattcactggaagggcccactgaggctacaacaagcttacctgatcatgataagcgcactcatggccctggtgttcatcaaatatctgcccgagtggaccgcctggctaatccttgccgtgatttccgtctacgatttggttgcagtattgtgccccaaggggccactcagaatgttggtggagacagctcaggagcgaaatgagaccctttttccagcacttatctattcttctaccatggtttggttagttaacatggcagaaggcgatcccgaggcccagagacgcgttagcaaaaacagcaagtataatgctgagtccacagaacgcgagagtcaggatactgtagccgagaatgatgacggcgggttctccgaagaatgggaggcgcagagggattctcaccttggcccccatcgatcaacccctgaatcacgcgcagcagtacaagagctgtcgagctcaatactggccggggaggaccctgaagaacgcggcgtcaaacttggcctaggggactttatattctattcagtgctggtcggaaaggcctcagccaccgccagtggcgactggaacactacaatcgcttgctttgtagcaatcctgattggtctgtgccttaccctgttgctgcttgctatattcaagaaggcactgcccgcgctccctatcagcatcactttcgggctggtgttctatttcgccaccgactacctggtccagcctttcatggaccagctggcctttcaccagttctacatctag

SEQ ID NO: 129814 - DNA, 279 bp, synthetic construct
  misc_feature 1..279: note = Description of Artificial Sequence: Synthetic coding sequence
  source 1..279: mol_type = other DNA
atgacagagcttcctgcgccactatcgtactttcagaatgcgcagatgtcagaagacaaccatctgtcaaatacgaacgataatagagaacgacaggaacacaacgacagacggagcctaggacaccctgagccgctgtctaatggtaggccccaggggaatagccgtcaggttgtagagcaggacgaggaagaggacgaggagctgacactgaagtacggagcaaagcatgtaattatgctttttgtcccggtcaccctctgtatggtggtggtgtag

SEQ ID NO: 129815 - DNA, 444 bp, synthetic construct
  misc_feature 1..444: note = Description of Artificial Sequence: Synthetic coding sequence
  source 1..444: mol_type = other DNA
atgaccgagcttcccgcacccctgtcatactttcagaatgcccagatgtccgaggataatcacctgtccaacaccaacgacaaccgtgagagacaagagcacaatgatcggagatcactgggccaccctgaaccactttctaacggcagacctcaagggaattccagacaagtggtggagcaggatgaagaggaggatgaggagcttaccctcaaatacggcgccaaacatgttatcatgttattcgtgcccgtgacactgtgcatggtggtcgttgtcgccaccattaaaagcgtgtcattctacacccgaaaggacgggcaactcatatacacacccttcaccgaagacacagagaccgtgggacaacgcgccctccacagtatcttgaatgctgccattatgatttccgtgattgtcgtcatgaccatcctgctggtgtag

SEQ ID NO: 129816 - DNA, 330 bp, synthetic construct
  misc_feature 1..330: note = Description of Artificial Sequence: Synthetic coding sequence
  source 1..330: mol_type = other DNA
atgacggaactcccggctcctttgtcatacttccagaatgctcaaatgagcgaagataatcatctgagtaataccgtgaggtcccagaacgacaatcgcgagcggcaggaacataacgaccgccggtccctcgggcaccccgagcctctcagtaatggccggccccaaggcaattctcggcaggtcgtcgaacaggatgaagaagaggacgaggagttaacgctcaaatacggagcaaagcatgtgatcatgctctttgtcccagtgaccttatgcatggtggttgtggtcgctacaatcaaatcggtgtccttttacacgcgtaagtag

SEQ ID NO: 129817 - DNA, 468 bp, synthetic construct
  misc_feature 1..468: note = Description of Artificial Sequence: Synthetic coding sequence
  source 1..468: mol_type = other DNA
atgaccgagctccccgctcccttaagctactttcaaaacgcgcagatgtcagaggataatcacttgtcaaatactgtacggtcacagaacgacaatcgtgagcgccaggaacacaatgaccgccgttcactgggccaccccgaacctcttagtaatggtcggccacaaggaaactccaggcaagtggtggagcaagacgaggaggaagatgaggaactgacattgaagtacggagcaaagcatgtgatcatgctgttcgtcccagtaaccctgtgcatggtggtggtcgtcgcaaccattaagagtgttagtttctacactcggaaagacggtcagcttatctataccccctttaccgaggatacagaaacagtggggcagcgggctctccactcaatactcaacgctgccattatgatctccgttattgttgttatgactatacttctggttgttctgtataaatag

SEQ ID NO: 129818 - DNA, 177 bp, synthetic construct
  misc_feature 1..177: note = Description of Artificial Sequence: Synthetic coding sequence
  source 1..177: mol_type = other DNA
atgaccgagctgccagccccactgtcttacttccagaatgctcagatgagtgaagacaatcatctttccaataccaacgacaatcgcgagaggcaggagcacaatgatcggcggtccttagggcatccagagccactctccaatggacgaccacaggggaatagtaggcaggtgtag

SEQ ID NO: 129819 - DNA, 279 bp, synthetic construct
  misc_feature 1..279: note = Description of Artificial Sequence: Synthetic coding sequence
  source 1..279: mol_type = other DNA
atgactgaattacctgctccattatcttattttcagaatgctcaaatgagcgaggacaatcacctctctaacaccaacgataaccgagaacgccaggaacataacgatcgtaggtccctgggccaccccgaacccctctcaaatggcagaccccaggggaactcccgtcaggtcgtcgagcaggatgaggaagaagatgaagaactcacactgaagtacggcgccaagcatgtgattatgctgttcgtgcccgtgacattgtgtatggtggttgtgtag

SEQ ID NO: 129820 - DNA, 192 bp, synthetic construct
  misc_feature 1..192: note = Description of Artificial Sequence: Synthetic coding sequence
  source 1..192: mol_type = other DNA
atgaccgagttgcccgcgccgcttagctactttcagaatgcccagatgtcggaagacaaccatttgtccaataccaacgacaaccgggagagacaggaacataatgatcgacgcagcctaggacaccctgagccactttccaatggccggcctcaaggcaattcacggcaggtcgtcgagcaggatgagtag

SEQ ID NO: 129821 - DNA, 276 bp, synthetic construct
  misc_feature 1..276: note = Description of Artificial Sequence: Synthetic coding sequence
  source 1..276: mol_type = other DNA
atgaccgagctcccagcacccctgagctattttcaaaacgcacagatgagtgaagataaccacctgtcaaacacgaacgataatcgggagagacaggagcataatgatcggcgctctttgggacatccagagcccctatcaaacggacgcccgcagggaaattcacgccaagtggttgaacaggatgaggaggaagatgaggagctcactctgaagtatggtgccaaacacgtaatcatgttgttcgtacccgtgacgctgtgtatggtagtctag

SEQ ID NO: 129822 - DNA, 189 bp, synthetic construct
  misc_feature 1..189: note = Description of Artificial Sequence: Synthetic coding sequence
  source 1..189: mol_type = other DNA
atgaccgaattgccagccccactgtcctatttccaaaacgcccagatgtctgaagacaatcatctctctaacacaaacgataacagagagcggcaggagcacaatgataggaggtctctgggtcacccagaacccctgtccaatgggcgacctcagggaaactctaggcaagtggtagagcaggactag

SEQ ID NO: 129823 - DNA, 300 bp, synthetic construct
  misc_feature 1..300: note = Description of Artificial Sequence: Synthetic coding sequence
  source 1..300: mol_type = other DNA
atgactgagcttccggcgcccctgagttacttccaaaacgctcagatgtctgaagacaaccacttatctaatactgtgcgatcacagaacgataatcgggaacgacaggaacataatgatcggcggagcctggggcatcccgagcccttgagcaacgggcgaccccagggtaacagtcgccaggtcgtggaacaagacgaagaggaagacgaagagttgactctcaaatatggcgcaaagcacgtcattatgctgttcgtgcctgttaccctgtgcatggtggtggtggtcgccacttag

SEQ ID NO: 129824 - DNA, 408 bp, synthetic construct
  misc_feature 1..408: note = Description of Artificial Sequence: Synthetic coding sequence
  source 1..408: mol_type = other DNA
atgaccgagcttcctgcccctctgagctacttccagaatgcgcaaatgagcgaggataaccatttatctaataccaatgacaatagggaaaggcaggagcataacgacagaagaagcttgggccaccctgagccattgtctaatggacgcccacagggcaactcccgccaggtcgtcgagcaggacgaggaggaagatgaagaactcacgctcaagtacggcgccaagcatgtgatcatgctgtttgtccccgttactctctgtatggtagtggtcgtggctacaataaaatccgtgagtttctatactagaaaagacggacagctgatctatacgcccttcacggaggacacggagaccgtggggcaaagagcattacacagcatactgaacgctgcaattatgtag

SEQ ID NO: 129825 - DNA, 330 bp, synthetic construct
  misc_feature 1..330: note = Description of Artificial Sequence: Synthetic coding sequence
  source 1..330: mol_type = other DNA
atgaccgaacttccagcccctcttagctatttccagaacgcgcagatgagtgaagacaatcatctgagcaacactaatgataatagagagcgacaggagcacaatgacaggcgtagtcttgggcatccggaacctctctctaatggccggccacaggggaatagcagacaggtggtggagcaggatgaggaggaagacgaagaactgaccctcaaatatggagccaaacacgtcatcatgctgtttgttcccgtaaccctttgtatggtggtcgttgtggcaactataaagagcgtctctttctacacccggaaggatggtcaactgtag

SEQ ID NO: 129826 - DNA, 1248 bp, synthetic construct
  misc_feature 1..1248: note = Description of Artificial Sequence: Synthetic coding sequence
  source 1..1248: mol_type = other DNA
atgcttaccttcatggcatcagactccgaagaggaagtatgtgatgaacgcaccagcctcatgtctgctgagagccccacccccagaagctgtcaggaaggtagacaaggccccgaagacggcgaaaatacagctcagtggagatcgcaggaaaatgaagaagacggggaggaggaccccgacagatacgtctgcagcggcgtccccgggaggccacccggtctagaggaggaacttaccctgaaatacggcgcgaagcatgtcattatgctgtttgtgcccgtcacactgtgtatgattgttgtagtggcaacaatcaaatccgttaggttctatactgaaaaaaacgggcaacttatttatactccctttacggaagataccccttctgtggggcagcgtctgttgaattctgtgctcaacactctcataatgatatccgtaattgtcgttatgactatcttccttgtcgtgctgtataaatatcgctgttataagtttatccatggttggctgattatgtccagcctcatgttgctcttcctgtttacctatatctacctcggcgaggtgctaaagacttacaatgtagcaatggattatcctaccctcttgctgaccgtatggaattttggcgctgtaggaatggtgtgcatccactggaaagggcctctagtcctacagcaggcttacctgattatgatttctgcccttatggccctcgtcttcataaagtatctacccgaatggtctgcgtgggtgatactgggcgctatatctgtgtatgccgcgatggtttggacagtcggcatggctaaactggacccttcctcacaaggtgcgctccagctcccctatgatccggaaatggaagaagattcatatgattcctttggagagcctagctaccctgaggtatttgaaccccctctcaccggatatccaggcgaagaactggaggaagaagaggagaggggggtgaaactcggtctcggggactttatcttttactctgtgctggtggggaaagcggccgcaacaggtagcggcgactggaatactaccttggcctgtttcgtggccatattaattgggctctgcctgaccttactccttctagcggtgtttaagaaagccctccctgcactgcccatttccattactttcgggcttatcttttatttctctacggacaacctggtaagacccttcatggacactttagcaagtcaccaattgtatatttag

SEQ ID NO: 129827 - DNA, 1446 bp, synthetic construct
  misc_feature 1..1446: note = Description of Artificial Sequence: Synthetic coding sequence
  source 1..1446: mol_type = other DNA
atgttggctggaaccgtgagattcgctagacactgcctaaaattctttccagcccagaagccagcttgcgtagattttggcgcctcacggggccgcgccatgctcacttttatggccagtgacagcgaggaagaggtctgcgatgagcggacatctctgatgtctgctgaaagccctacacccaggtcgtgtcaggagggccggcagggtccagaggatggagagaatacagcacagtggaggagccaggaaaacgaggaagatggtgaagaggacccagatcggtacgtatgcagcggcgtccctgggcggccccctgggctggaagaagaactgaccctcaagtacggtgcaaagcacgtgattatgctcttcgttccggttaccctgtgcatgatcgtagtagtagccacgatcaaaagcgtgcggttctacaccgaaaaaaatgggcagctcatctatactcctttcactgaggacacacctagtgtgggtcagcgcctccttaactcagtgttgaatacactgattatgatttctgtgattgtggtcatgactatctttcttgtggttctgtataagtacaggtgctacaaatttatccacgggtggctgataatgtcctctctgatgctactctttttatttacatatatatacctgggtgaggtgctgaagacatataacgtagctatggactatccgactctgctgcttaccgtgtggaatttcggcgcggtgggcatggtgtgcattcattggaagggcccgctggtcttgcaacaggcctacctaatcatgatatctgctcttatggccctggtgttcattaagtatctgccggagtggtccgcctgggtgatactgggggccatttccgtgtatgacctcgttgccgtgctgtgccccaagggtcctctccggatgttagtggagaccgcacaggagaggaacgaaccaatcttcccggctttaatttatagcagtgccatggtgtggacagtggggatggcgaagcttgatccaagcagtcagggcgctttgcagctcccttatgacccagaaatggaggaggactcgtacgattcattcggggaaccgagttacccagaggtgtttgagccgccgctgacaggctacccaggcgaggaacttgaggaagaggaagaacgaggggtcaaacttgggctcggcgatttcattttctattctgtgctggttgggaaagctgccgccactggcagcggagactggaacaccacattggcatgctttgtggctatcctgataggactttgcctgaccctactgttgctagcagtgttcaagaaggctctcccagcactacctataagtatcaccttcggcttgatcttctatttctccaccgataacttagtgaggccattcatggatactctggcctctcaccagttgtacatctag

SEQ ID NO: 129828 - DNA, 1347 bp, synthetic construct
  misc_feature 1..1347: note = Description of Artificial Sequence: Synthetic coding sequence
  source 1..1347: mol_type = other DNA
atgcttacctttatggcatcagattcagaggaagaagtctgtgatgagagaacaagtcttatgagcgcagagtctccaaccccgagatcgtgtcaagagggaagacagggccccgaagatggagaaaacacagcccagtggagatcgcaggagaatgaagaggacggtgaggaggatcctgacaggtatgtctgttcaggtgtacccggcagaccaccaggcctggaagaggagctcaccttgaaatatggggccaagcacgtaattatgctttttgtgccagtgacgttgtgtatgatcgtggtcgtggccactattaagtcagttcgcttctacacagagaagaatgggcaactgatctatactcctttcacagaggacacacccagcgtcggtcagcgcttgctgaactctgtcctgaacactctgattatgatttctgtgatcgtggttatgaccatctttcttgtcgttttgtataaatacagatgttataagttcatccatggctggctgattatgagttctctaatgttgctgttcctgtttacttatatatacttgggagaagttctcaaaacttataatgtggccatggactatcctacactacttctgaccgtttggaacttcggcgctgtcggaatggtgtgtatccactggaagggaccccttgtgctacagcaagcatacctaatcatgatctctgcactgatggccctggtgttcatcaaatacttgcctgagtggtctgcatgggtgatcctgggagctatttcagtttatgatttggtcgccgtgctgtgtccaaaaggaccgctgagaatgttagttgagactgctcaggaacggaatgagcccatcttcccagctttgatttatagtagcgcaatggtgtggactgtcggaatggcaaagcttgaccctagcagtcagggagccctgcagctcccctacgatcccgagatggaggaggacagttatgatagtttcggagagccaagttatccagaagtcttcgagccgccccttacaggataccccggtgaggagttggaggaggaagaggagagaggtgtgaaactcgggcttggagactttattttctactcggtgctagtgggcaaagctgcagcaactgggtccggagattggaacacgactctggcctgcttcgtggcaattttgataggcctgtgcttaaccctgctgttgctggccgtgttcaagaaagccctccccgcacttccaattagtataaccttcgggctgatattctatttttctacggacaacctagtgagaccctttatggacacactggcaagtcaccagctgtacatatag

SEQ ID NO: 129829 - DNA, 1446 bp, synthetic construct
  misc_feature 1..1446: note = Description of Artificial Sequence: Synthetic coding sequence
  source 1..1446: mol_type = other DNA
atgctcgccgggaccgtgagatttgcccggcattgtttgaaatttttccccgcacaaaaacctgcgtgtgtggactttggcgctagccggggccgagccatgctgacttttatggcttcagactccgaagaagaggtatgcgatgagcggacgagcctcatgagtgccgagtcgcctacacctcgttcctgccaggaggggaggcagggacctgaagacggcgagaacacagctcaatggcgtagccaggaaaatgaagaggatggtgaagaagaccccgacagatatgtctgcagtggcgtgcccggccggccgcccggcctcgaggaggaactcacgcttaagtatggtgccaaacatgttatcatgttgtttgtaccggttaccttatgtatgattgttgtggtggccacgataaaatcggtgcgcttctacaccgagaaaaacggccagctcatctatacgccctttaccgaggatacaccctctgtggggcagaggcttttaaactcagtgttaaatactctcatcatgatatccgtgattgttgtgatgactatatttctcgtggttttgtataagtatagatgctataaatttattcatgggtggctgatcatgtcttccctgatgctcctgtttttgttcacgtacatttacctgggggaggttcttaaaacttataacgtggccatggattatcccacattgctgctgactgtgtggaacttcggggcggttggcatggtctgcatccactggaaggggcccttagttctccagcaggcctatttgattatgatctccgctttgatggccttagtctttatcaagtacctgcctgagtggtctgcctgggtcatcctgggcgcaatctctgtgtacgatttggttgcggtgctgtgtcccaaggggccccttagaatgctggtggagacagctcaggagagaaatgagcccatctttccagccctgatctatagttcggctatggtatggaccgtggggatggcaaagctcgacccatcatcccagggagccctgcagttaccctacgatcccgagatggaggaggacagttacgattcctttggcgagcccagctaccccgaagtcttcgagcccccattaactggatacccaggagaggagctcgaagaagaggaggaaaggggggtgaagttggggctgggggacttcatcttttactcagtgctggtcggaaaggctgctgccactggcagcggtgattggaatacaacattggcctgtttcgtagctatcctcattggtctctgtctgactttgcttctcctggcagtgtttaaaaaggccctccccgcactgcccatcagcatcacttttgggttaattttttatttctcgacggacaatctcgttcgtccttttatggataccctggcatcgcaccaattatacatttag

SEQ ID NO: 129830 - DNA, 1344 bp, synthetic construct
  misc_feature 1..1344: note = Description of Artificial Sequence: Synthetic coding sequence
  source 1..1344: mol_type = other DNA
atgctaacattcatggcaagcgattctgaggaagaggtctgcgacgaaaggacatcactgatgtccgcggagagcccgacaccaaggtcgtgtcaagagggtcgccaagggccggaagatggggagaataccgcacagtggcggagtcaggaaaatgaggaagacggagaagaggaccccgaccggtatgtgtgtagtggggttccaggtcgccctccaggtctcgaagaggaactcaccctaaaatacggcgccaaacacgtgattatgttgtttgtccccgtgactctctgtatgattgtcgtggtcgctaccataaagtctgtccgtttttacaccgaaaaaaacggacagctaatctatacacccttcaccgaggacaccccatccgtcggccagcgcctactgaacagcgtgttgaacaccctgatcatgatttcagtaattgtcgttatgactatcttcttggtagtcctatataaataccggtgctacaagttcatccacggttggcttatcatgtcctcgcttatgcttctgttcctctttacctatatttacttgggcgaagtactcaagacgtacaatgtcgccatggattacccaacgttgctactcactgtctggaattttggggccgtgggtatggtgtgtatccactggaaaggccctctggttttgcagcaagcatatttgatcatgatctctgctctgatggccctggtttttatcaaatacctgccagagtggtctgcctgggtgatacttggggccatcagcgtgtacgacctggtagccgtgttgtgcccgaaggggccccttcggatgctagtggaaaccgcccaagaacgcaatgaaccaattttccccgcccttatatacagtagcgcaatggtctggacagtaggaatggccaagcttgatcctagcagccagggcgccctacaactgccttacgaccccgaaatggaggactcatacgactccttcggcgaaccatcttacccagaggtatttgaacctcccctgacaggatacccaggagaagaactggaggaagaggaagaaagaggtgtcaaactggggttaggagatttcatcttttattccgtccttgtcggaaaggccgcggctaccgggtctggtgactggaacacaaccctcgcttgtttcgtagccattctgattggactatgtttgacactgctactcctggctgtctttaagaaagccttgcctgccctgcctatctccatcaccttcggattaatcttttactttagcaccgataatcttgtccggccgttcatggatacgctagcaagccaccagctgtacatctag

SEQ ID NO: 129831 - DNA, 390 bp, synthetic construct
  misc_feature 1..390: note = Description of Artificial Sequence: Synthetic coding sequence
  source 1..390: mol_type = other DNA
atgctgacatttatggcctccgattccgaggaggaagtttgtgacgaaagaacttctctgatgagcgctgagagcccaactcccagatcatgccaggaaggccggcaggggcccgaggacggggagaatacagcgcagtggcgaagtcaggagaatgaagaagacggcgaagaggaccctgatcgatacgtctgcagcggggtgcctggacggccacccggacttgaagaagagctaactttgaaatacggggcgaaacatgttatcatgctgttcgtgcccgtcactctatgtatgattgttgtggtggctactatcaagtctgtgcgattctatactgagaaaaatggccagcttatttacactcctttcacagaggacacaccatag

SEQ ID NO: 129832 - DNA, 66 bp, synthetic construct
  misc_feature 1..66: note = Description of Artificial Sequence: Synthetic coding sequence
  source 1..66: mol_type = other DNA
atgctgacattcatggcttcagatagtgaggaggaagtgtgcgatgaacggacgtccctcatgtag

SEQ ID NO: 129833 - DNA, 990 bp, synthetic construct
  misc_feature 1..990: note = Description of Artificial Sequence: Synthetic coding sequence
  source 1..990: mol_type = other DNA
atggcctggcgcggctgggcacagcgcggctgggggtgtggccaggcgtggggtgccagcgttggtggaagaagctgtgaagaacttactgctgttctcacaccgcctcagcttctgggccgccggttcaactttttcatccagcagaagtgcgggtttcggaaagctccacggaaggttgaaccacgaagatcagacccaggcactagtggtgaggcctacaagcgatccgccctcatacctcctgtagaagaaaccgtgttctatccgtcaccatatcccattaggagccttattaagcctctgttttttactgttggattcacaggatgtgcttttggatccgccgctatttggcagtatgaatcactcaagtctcgggtgcagagttatttcgatggaatcaaagccgactggttagatagcatcaggccccagaaagaaggcgatttccggaaagagatcaacaagtggtggaacaaccttagtgatggacagcgcacagtaacgggaatcattgccgccaatgtactcgtcttttgtttgtggcgagtgccttctctccagcggacgatgatccgctacttcacgtcgaacccagcatcatctgtgatttcaaactttgtatcctatgtggggaaggtggccactgggcgctacgggccctctctgggcgcctctggagccataatgactgtgctagctgcagtgtgcacaaagattcccgaaggccgtctggccattatcttcctgccaatgtttactttcaccgccgggaatgcgctaaaggcaattattgcgatggacacagccggcatgatactcgggtggaaattttttgatcatgctgcacacctgggcggcgccttatttggcatatggtacgtcacgtatggacacgagcttatatggaagaaccgtgaaccgctggtgaaaatctggcacgaaatcaggacaaacggccctaaaaaaggcggcggtagcaagtag

SEQ ID NO: 129834 - DNA, 1140 bp, synthetic construct
  misc_feature 1..1140: note = Description of Artificial Sequence: Synthetic coding sequence
  source 1..1140: mol_type = other DNA
atggcctggagaggatgggcccaaagaggatgggggtgtggccaagcatggggggcttcagtcggaggaagatcgtgcgaggaactgacagccgtcctcaccccccctcagctcctgggcaggcggttcaacttctttattcaacagaagtgtggcttccgcaaagctcctagaaaggtagagccacgcagatctgatcctgggacctctggcgaggcatataaacgatcggctctcatccctcccgtcgaggaaactgtattctatccttccccctaccccattaggtcactaatcaagccccttttttttacagtgggcttcaccggctgcgcattcgggtccgccgctatctggcaatacgagtctctgaagtcccgcgtgcaaagctatttcgatggcattaaagcagactggctggatagtatccgcccacagaaggaaggggatttcaggaaggagattaataagtggtggaacaatctgagtgacggccaacgcactgtcaccggcatcatcgccgcgaatgtgctagtgttctgtctgtggagggtgccgagtctgcagaggacgatgattcgctacttcacaagtaatccggccagcaaggtcctttgtagcccaatgctgctatctacattttcacactttagtctgttccacatggcggctaatatgtatgtgctgtggtctttttcatcatcaattgttaatatactgggccaggagcaattcatggctgtatatctgagtgccggcgtgataagcaatttcgtcagttatgtgggcaaggtcgcaactggccggtacggacccagcttaggtgcaagcggtgcaatcatgactgtcttagcggccgtgtgcaccaagattccagaggggaggctggccattatcttccttccgatgttcactttcactgctggaaacgctctcaaggccattatagctatggataccgcaggcatgattctgggctggaaatttttcgaccacgccgcacaccttggaggcgcactattcggaatctggtatgttacttacggacacgagcttatctggaagaacagggagcctctggtgaagatttggcacgagatcagaacgaacgggcctaaaaagggtggggggtcgaagtag

SEQ ID NO: 129835 - DNA, 663 bp, synthetic construct
  misc_feature 1..663: note = Description of Artificial Sequence: Synthetic coding sequence
  source 1..663: mol_type = other DNA
atggcaagcgccacagatagcagatacggccaaaaagaatcatcagaccagaacttcgattacatgtttaaaatattgatcattggcaattcttcagtgggcaaaacatcatttttatttcggtacgcggacgacagtttcaccccggcttttgtgagcactgtcgggattgatttcaaggtaaaaaccatataccgcaatgacaaaaggataaaattgcaaatctgggatacagctggacaagagcgctaccggacaatcacgaccgcctactaccggggcgccatgggctttatactaatgtatgacatcactaacgaagagagttttaatgccgtgcaagattggtctactcagattaaaacatacagctgggataacgcacaggtcctgctagtggggaacaagtgcgacatggaagacgagcgagttgtgtcttccgagcgaggtaggcagctggctgatcatcttggcttcgagtttttcgaggccagcgccaaggataatatcaatgtgaaacagaccttcgagagattggtggatgtgatctgcgagaaaatgtcagagagcctggatactgcggatcccgccgtgaccggggctaagcaggggcctcagctttctgaccagcaggtacccccccatcaagactgtgcctgctag

SEQ ID NO: 129836 - DNA, 306 bp, synthetic construct
  misc_feature 1..306: note = Description of Artificial Sequence: Synthetic coding sequence
  source 1..306: mol_type = other DNA
atgaatttggagagagtgtctaatgaggagaagctcaatctttgccgaaaatactatctgggaggcttcgcgtttctacccttcctgtggctggtcaatattttctggttttttagagaagcctttttggtgccggcgtataccgagcagtcacagatcaaaggctacgtgtggagatcagctgtcgggtttctgttctgggtgatcgtgctcacaagctggatcacaatcttccaaatctatagaccccggtggggagccttgggagattaccttagcttcacaatcccacttggtacaccatag

SEQ ID NO: 129837 - DNA, 378 bp, synthetic construct
  misc_feature 1..378: note = Description of Artificial Sequence: Synthetic coding sequence
  source 1..378: mol_type = other DNA
atggccaagtacctcgcacagatcatcgtgatgggggttcaagtagtgggacgtgcttttgctagagccctccgtcaagagttcgctgcctcaagggcagcagccgacgcacgtgggagagccggccaccgctcagcggccgccagcaatctcagcggcctgagtttgcaggaagcacagcagattctgaatgtcagcaaactgtctcccgaggaggtccagaagaactacgaacacttgtttaaggtcaacgacaaatccgttggtggatcgttttacctccaaagcaaagtggtacgcgcaaaagagagactcgatgaggagttaaagattcaggctcaggaggatagggagaaagggcagatgccccatacctag

SEQ ID NO: 129838 - DNA, 2496 bp, synthetic construct
  misc_feature 1..2496: note = Description of Artificial Sequence: Synthetic coding sequence
  source 1..2496: mol_type = other DNA
atgcccctggagatggagcctaagatgagcaagctcgcctttggatgtcagcggtcctctacctccgacgacgacagtggctgtgctctggaagagtatgcctgggtacccccggggcttcggcccgagcagatccagctgtactttgcatgtttgcctgaggaaaaagttccctacgttaatagtccaggggagaagcatagaattaaacagttactgtatcagctgccccctcacgataatgaggtcaggtattgccagagcttgtccgaggaggaaaaaaaggaactgcaggtgttttctgctcagaggaaaaaggaagccctgggccgtggcactattaagcttctgagcagggcggtcatgcatgcggtatgcgagcagtgcggtcttaaaatcaatggaggggaggttgccgttttcgcgtcaagagctggccctggcgtctgctggcacccctcatgtttcgtttgtttcacttgtaacgaacttctggttgatctcatatacttctaccaggatggcaagatccattgtggccgccaccacgcggaattgcttaagccccggtgctccgcatgtgacgaaattatcttcgccgacgaatgcactgaggctgagggcagacactggcacatgaaacatttctgctgtctagagtgcgagacagtgttaggaggccagaggtatatcatgaaagatgggcgacctttttgctgtggctgtttcgaatctctgtatgcagagtactgtgaaacctgcggcgaacatattggagttgatcacgcccagatgacctatgatggccagcactggcatgccactgaggcctgcttctcctgcgcccagtgtaaggcttcactcttaggttgcccttttctccctaaacaagggcaaatctactgtagcaaaacctgctcccttggagaggacgttcacgcaagcgacagcagcgattccgcattccaaagcgcacgctcacgcgactctcggagatccgtaaggatgggcaagtcttccaggtccgcagaccagtgtcggcagagcctcctgctgtcacccgcccttaactataagtttccaggcctctcaggcaacgccgatgacacgctgtccaggaagttggacgacctttctttgtccagacaggggacctctttcgcctcagaggaattttggaaaggtcgggtggaacaggagactcccgaggaccctgaggaatgggccgatcacgaggactatatgacacagctgctcctaaaatttggcgacaagtccttgttccagcctcaaccgaacgaaatggacattcgggcttcagaacactggatctcagacaacatggttaagagtaagaccgagctgaaacagaacaaccagagcctggcatccaagaagtatcagtctgacatgtattgggcccagagccaggacggcctgggtgactctgcctacggatcgcaccctgggcccgcctcaagccggcgtctgcaggagcttgagttagaccacggcgcttctggatataaccatgatgaaacccaatggtatgaggactctctggaatgcctatccgatttaaaaccggaacagtcagtcagagacagtatggacagtctggctctgagcaacattactggcgctagtgttgatggggaaaacaaaccccgaccttccctttactctctgcaaaacttcgaggaaatggagactgaagattgtgagaagatgagcaatatggggaccctgaattcctcaatgctgcatcggagcgcagagtctctgaaaagcctaagttcggaactgtgtcccgagaaaatactgcccgaagagaaacctgtgcacttgcctgtgctacgcaggtctaagagccaatctagaccccagcaggtgaaatttagcgatgacgtgatagataacgggaactacgatatcgagatcaggcaaccaccaatgtccgagcggactcggcggcgcgtgtacaacttcgaagaacgcggtagcagaagccatcaccaccgaaggagacggtccaggaagagccgctcagataatgccctaaatctggtgacagagcgcaagtactcccccaaggatcggctcaggctgtatacgcccgacaactacgagaagtttatccagaataagtccgctagagaaattcaagcgtacatccagaatgcagatttgtatggccagtacgcccatgccacctccgactatggtcttcagaatccaggaatgaaccggtttcttggactctacggcgaagacgatgactcatggtgctcctcatcatccagcagctccgactcggaggaggagggatatttcttgggtcagccaatcccacagccaaggccccagcgcttcgcttactacaccgatgatctgtccagccctccttcagcccttcctaccccccaatttggtcagagaaccaccaagtccaagaagaagaaaggccataaaggaaaaaattgcattatctcctag

SEQ ID NO: 129839 - DNA, 2496 bp, synthetic construct
  misc_feature 1..2496: note = Description of Artificial Sequence: Synthetic coding sequence
  source 1..2496: mol_type = other DNA
atgcctcttgagatggagccgaaaatgtctaagcttgccttcgggtgccagcggagctctacttccgatgatgactccggctgtgctctagaggaatatgcatgggttcccccggggttgcggcccgaacagatacagctgtattttgcctgcttaccagaggaaaaggtgccgtacgtgaactccccgggcgagaagcatcggataaagcagctgctgtatcagctacccccccacgacaatgaggtgcgatactgccagagtttatccgaggaggagaagaaagagttgcaggtgttttcagcacagcgaaagaaagaggccctgggccgcggtaccatcaagctcctgtcccgggcggtcatgcacgctgtgtgtgaacagtgcggtctcaaaatcaatggaggtgaggtcgcagtgttcgctagcagggccggcccgggggtatgttggcacccatcttgtttcgtgtgttttacgtgcaacgagctacttgtggatctgatctatttctatcaggatggaaaaatccactgcggccggcaccatgccgagctcctaaagcctcgctgctcagcttgcgacgagatcattttcgcggacgagtgtactgaggccgaaggccgccactggcacatgaagcatttttgctgcctggagtgcgaaaccgtcctaggtggacagagatatatcatgaaggatggccgacctttttgctgcggctgcttcgagtccctatacgccgagtactgcgagacttgcggtgagcacatcggtgtggaccacgctcagatgacttacgatggtcagcactggcacgctacagaggcctgtttctcttgcgctcagtgtaaagcttccctcctcggctgtccttttctgcctaagcagggacagatctattgcagtaaaacatgcagtctgggcgaagatgtgcacgcctccgatagcagcgacagcgcctttcagagcgcacgatcccgcgactcaaggcgaagcgttaggatgggcaagagcagtaggagcgctgaccagtgcaggcagtcactgttattgagcccagccttgaattataaatttcccggcctctctggaaacgctgatgacaccttaagcagaaagctagatgatctttctctcagccgtcagggcacctcttttgcctctgaggagttctggaaaggaagagtcgaacaagaaacgcccgaggacccagaggagtgggctgaccacgaagactatatgacccagttgcttcttaaattcggagacaaaagcttgttccagcctcaacctaatgagatggatattagggctagtgagcactggatcagcgataatatggtaaagtccaaaaccgaactaaagcagaacaaccagtccctggccagcaagaagtaccagagcgacatgtactgggctcagagccaagatggtttgggagattccgcatacgggtcccatccgggcccagcatcaagccgaaggctacaagaactggaactggatcatggagccagcggttataaccatgacgaaacgcagtggtacgaggactcactcgaatgcctcagcgacttaaagccggaacagtcagtaagggattccatggactctctggcactgagcaatatcaccggggcctccgtggacggcgaaaacaagccccggccttccttatactcgctccaaaatttcgaggagatggaaacggaggactgtgagaaaatgtctaacatgggaactcttaattccagtatgctgcacaggtctgcagagagcttgaagtctctgtcaagcgagttatgtcctgagaagatcctgcctgaggaaaaacccgttcacctgcccgtcttgagacggtcaaaatcgcagtcccgtccacaacaggtaaaattcagtgacgacgtgattgacaatggtaattatgacattgaaatccgtcagcccccaatgagcgagaggacacgcagaagagtatataacttcgaggagagaggaagcaggtctcatcatcataggcgccgacggtcaagaaaatctagaagcgataacgcgctgaatcttgtcacggagcgcaagtatagtccgaaagatcgcctgcgattatatactccggacaattacgaaaagtttattcaaaataaatcggcacgcgagatccaggcttacatccagaacgcagatctctatggccagtacgcccacgctacaagtgactacggtctgcagaatcccgggatgaaccggttcttggggctgtacggagaagacgatgactcatggtgttcatccagctccagttcaagtgattcagaggaagaagggtacttcctgggacagcctatccctcagccccgacctcagcggttcgcttattacactgacgacctttcaagcccgcctagcgccctgcctaccccacaatttggacaacggactaccaagtctaagaagaagaaagggcacaaaggaaaaaattgtatcatatcttag

SEQ ID NO: 129840 - DNA, 2496 bp, synthetic construct
  misc_feature 1..2496: note = Description of Artificial Sequence: Synthetic coding sequence
  source 1..2496: mol_type = other DNA
atgcctttggaaatggagcccaaaatgagtaagttagcttttgggtgtcaacgctccagtacatcagacgacgactcaggatgcgctcttgaagagtatgcatgggtgccgccagggctccgcccggaacagattcagctgtacttcgcttgcctccccgaggagaaagtcccttacgtcaattcaccgggggaaaagcaccgaattaaacagctgctgtaccagctcccgccccacgacaacgaagttcgatattgtcaatccttatcggaggaagagaagaaggagctgcaggtgttttcggcccagagaaagaaggaggctctcggccgcggcaccataaagttactatctagagctgtaatgcacgctgtttgtgagcaatgcggtttaaagatcaatggcggagaggtagcggtgttcgcctccagagcaggacccggagtctgctggcacccgagctgtttcgtctgtttcacttgtaatgaactcctcgtggacctgatttacttttaccaggatggcaaaattcactgcggccgtcaccacgctgagctcctcaaaccaaggtgttctgcctgcgacgagatcatcttcgcagacgaatgcaccgaggctgagggtcgacattggcacatgaaacacttctgctgcctagaatgtgagaccgttttgggcgggcagcgctatatcatgaaggatgggaggccattctgttgcgggtgtttcgaatctctttatgcagaatattgtgagacctgcggcgagcatatcggagtagaccatgctcagatgacgtacgacggacagcactggcacgccactgaagcgtgttttagttgtgcgcagtgtaaagcttcactgttgggctgtcccttcctccccaaacagggtcagatctactgctcaaaaacttgctccctcggggaagatgtgcacgcctccgatagcagcgacagcgccttccagtcagcccgatcccgcgactctcggagatctgtgaggatggggaaatccagccgcagcgccgaccagtgtcgccagagtctgctgctgagcccagcactcaactataagttcccgggcctgagcgggaacgcggatgacacgctgtcccgaaaactcgacgacttaagcttatccaggcagggcaccagcttcgccagcgaggagttttggaaaggcagagtagaacaggagacccccgaagatcctgaggagtgggctgaccatgaagattacatgactcagctcctgctaaaatttggcgacaagtccctgtttcagccgcaacccaatgaaatggacattagagcatcagaacattggatctccgacaatatggtgaagagcaagacggaactcaagcaaaataatcaatctctggctagtaagaaataccagtccgatatgtactgggctcaatctcaggacggcctcggggatagtgcctacggcagccatcctggccccgcatctagtcggaggctccaggagcttgagttagatcatggggcgagtggttataaccacgacgaaacacagtggtatgaagactcgcttgaatgcttgtccgacttgaagccagagcagtctgtgagggatagcatggatagtctggcactgtcaaatatcacaggagcctcggtcgatggggaaaataaaccacggccaagtctatatagtttacaaaattttgaagaaatggagacggaggactgtgagaagatgagcaatatggggaccttaaatagctcgatgctgcacagatccgccgaatcactgaagtccttgtccagtgagctatgtccagaaaagatccttcccgaggaaaaaccagttcaccttcccgtcctgcgtaggtctaaatcgcagtcccgtccccagcaagtcaagttttctgatgacgtgatagacaacggtaattatgacatcgaaatcaggcagccacctatgagcgaacgaaccagaaggcgtgtgtacaactttgaagaaagggggagtagatcccaccaccaccgtcgccgacgatcaagaaaatccaggagcgataacgcccttaatttggtgaccgagaggaaatattccccaaaagataggctgaggctatacacccccgacaattacgagaaattcatccaaaataaatcagccagggagatccaggcctatatccaaaatgcagatctatatggccagtatgcccatgccacaagcgattacggactgcagaacccggggatgaaccggtttctgggtctgtatggggaggatgacgactcctggtgtagttcctcctcctccagctctgacagcgaggaagagggctacttccttggacagccaattccccagccacgcccccagagattcgcatattataccgatgacttgagctcaccacccagtgcattacctactcctcagttcggccagcgaacgactaagtctaagaaaaaaaaagggcacaaagggaagaattgtattatctcgtag

SEQ ID NO: 129841 - DNA, 333 bp, synthetic construct
  misc_feature 1..333: note = Description of Artificial Sequence: Synthetic coding sequence
  source 1..333: mol_type = other DNA
atgcccctggaaatggagccaaagatgagcaaactggcctttggctgtcagcgctccagtacgtcggacgacgattctgggtgcgctctggaggaatacgcttgggtgcccccagggcttagacctgaacagattcagctctattttgcatgtctccccgaggagaaagttccctacgtcaacagcccaggagagaaacatagaattaagcaattgttgtaccagctccccccccacgacaatgaagtccgttattgtcagtcattgtctgaagaagaaaagaaggagcttcaagttttttccgctcagcgcaaaaaagaggctctcggctag

SEQ ID NO: 129842 - DNA, 2496 bp, synthetic construct
  misc_feature 1..2496: note = Description of Artificial Sequence: Synthetic coding sequence
  source 1..2496: mol_type = other DNA
atgcccctcgaaatggagcctaagatgtccaagcttgccttcggttgccagcgcagttcaacaagtgatgatgactctggatgtgccctagaggagtacgcctgggtgcctcctggacttagaccagagcagatccagctgtactttgcatgcctgccggaagagaaagtgccttacgtgaattccccaggagaaaagcataggattaaacaattgctatatcagctcccaccccacgataatgaggtgcggtattgccagtctcttagcgaggaggaaaagaaggaacttcaggtgttctctgcgcagcgaaaaaaggaggcgctcggacgtggcactatcaaactgctgagcagagccgtgatgcatgccgtttgtgaacaatgtggactgaagattaatggcggcgaggtggccgtgtttgcatctcgcgccggtccaggagtctgttggcatcccagttgcttcgtgtgcttcacttgcaacgagctgctggtagatctgatatatttttaccaggacggcaaaatccactgcggtaggcatcacgccgagctactgaagccgcgatgctctgcttgcgatgagataatattcgctgacgagtgtaccgaagctgagggacggcattggcacatgaagcacttttgctgcctcgagtgtgagactgtgctgggcggccagagatatatcatgaaggacggccgtccattctgttgcggatgcttcgaaagtctttatgcagagtattgcgagacctgcggagaacacattggagtagaccacgcacaaatgacatacgacgggcagcactggcatgccaccgaggcttgctttagctgcgcccaatgtaaggcttcacttctggggtgtccttttctgcctaagcaagggcagatttactgctctaagacttgtagtctcggagaagacgtccatgcctcagactcgagtgactctgccttccagtcagcacgcagtagagattcaaggaggagtgttcggatgggcaaatcctcccggagcgcagaccagtgtcgccagtcactgttactctctccagctcttaattacaaatttcccgggttgtcaggaaacgctgacgacacattaagccgcaagctcgatgacctatccctctcgagacaaggaacctcctttgcctccgaggaattttggaagggacgagttgaacaggagacccctgaggacccggaggagtgggctgatcacgaggactacatgacccagttgctcctgaagttcggggataaatctttgtttcagccccaacccaatgaaatggatatccgggcatccgagcactggatttctgataatatggtgaaaagcaagaccgaactgaaacagaacaatcaaagccttgctagcaagaaataccagagtgacatgtactgggcacaatcccaggacggtctcggggattctgcatatggttcgcatccaggccccgcttcatccaggagattgcaggagctggaacttgaccatggggcctccgggtataatcatgatgagacgcagtggtatgaggactcattggagtgccttagtgacctaaagccagagcagagtgtaagagattccatggatagccttgccctcagcaatatcaccggcgctagtgtggatggcgagaataaacccagacccagtctctactcactgcagaattttgaggagatggagaccgaggactgcgagaaaatgtccaatatgggcactttgaactctagtatgttgcatcggagtgcagaatctttgaaatccctttcaagcgaactgtgccccgagaagatcttgcctgaagagaaaccagttcacctgccagttctcagacgctcaaaatcacaatctcgccctcagcaggtaaaatttagcgacgacgtgatagacaatggaaattatgatatcgagatcaggcagccaccaatgtcggaacggacccggaggcgagtatataactttgaggaacggggcagccgctcgcaccaccatagacgtaggcgctcaagaaagtcccggtccgacaacgcactcaatctggtgaccgaacgtaagtatagcccaaaggataggctgcggctgtacaccccagacaactatgaaaaattcatccagaataaatctgcgagagaaatccaggcttatatccaaaacgcagatctgtacgggcagtacgcccacgccacctcagattatgggctccaaaatcccggaatgaatcgctttctgggcctctacggcgaggatgatgattcctggtgtagctcatctagttcttcatcggatagcgaggaagaaggctacttcctgggacaacctattcctcagccgcgcccacaacgatttgcttattatacagatgacctctcttctcccccatctgctttaccaaccccacaattcggacagcgtaccactaagagtaagaaaaaaaaagggcacaaggggaaaaattgcattatcagttag

SEQ ID NO: 129843 - DNA, 360 bp, synthetic construct
  misc_feature 1..360: note = Description of Artificial Sequence: Synthetic coding sequence
  source 1..360: mol_type = other DNA
atgcccctcgagatggaacctaaaatgtctaagcttgcctttgggtgtcaacggtcttccacttcagacgacgattctggttgtgctctcgaggaatatgcttgggttccccctgggcttcgaccagagcagatccagctgtacttcgcctgtctgcctgaggaaaaagtgccatatgtgaattcccccggagagaagcacagaattaagcaactgctctaccagctcccccctcacgataatgaggttcgttactgccagtccctgagcgaggaagaaaagaaggaactccaggtgttttcagcacagcgcaagaaggaggctctaggtcgaggaaccattaagctactgagtaggtag

SEQ ID NO: 129844 - DNA, 480 bp, synthetic construct
  misc_feature 1..480: note = Description of Artificial Sequence: Synthetic coding sequence
  source 1..480: mol_type = other DNA
atgcccctggaaatggaaccaaaaatgagcaaactggccttcggttgtcagcgaagctcgaccagtgacgacgatagtggctgcgcccttgaggagtacgcttgggtccctcccggccttaggcctgagcaaattcagttatactttgcctgcctgcccgaggagaaggtgccgtacgtgaactctcccggagagaaacacaggatcaagcagctcctgtaccaactgccaccacacgacaatgaggtaagatactgtcagtccctgagtgaggaagagaagaaggaactccaagtgttttccgcccagcggaaaaaagaagctctcggccgggggaccatcaaactactatctagagctgtcatgcacgccgtttgcgagcaatgcggtctaaagatcaatggcggggaagtggctgtgtttgcgagtcgagccggtccgggcgtgtgctggcatccttcttgcttcgtctgtttctag

SEQ ID NO: 129845 - DNA, 2496 bp, synthetic construct
  misc_feature 1..2496: note = Description of Artificial Sequence: Synthetic coding sequence
  source 1..2496: mol_type = other DNA
atgcccctagagatggaacccaagatgtccaagttagcattcggctgtcagcggagctctacctcagatgatgacagcgggtgcgccttggaggaatacgcctgggtgccccctgggctgagaccagagcagatacagttatacttcgcatgcctgccagaggagaaagtgccctacgttaactccccaggcgagaaacataggatcaagcagttgctttatcaacttccgccccacgataatgaggtccgatactgtcagagcctttccgaggaagaaaaaaaggaactccaggtgttttcggcccagcggaaaaaagaagctctgggtagaggtactattaaactgttgtctcgagctgttatgcacgccgtatgtgagcagtgcgggctgaagattaatgggggtgaggttgctgttttcgcttcgcgggccggcccaggggtctgctggcaccccagctgtttcgtttgcttcacatgcaacgagctgctggtcgacctgatctatttttaccaggacgggaagatccactgtgggagacaccatgctgagctcctgaagcccaggtgttccgcttgtgacgaaatcatttttgctgatgaatgcactgaagccgagggtcgacattggcatatgaagcatttttgttgcctcgaatgtgagaccgtcctgggcggacagaggtacatcatgaaggatgggagacctttttgctgcggctgctttgagagcctgtacgccgaatactgcgagacttgcggagaacacattggagtcgatcatgcacagatgacctatgatgggcagcattggcacgccaccgaagcctgcttctcctgcgcccagtgtaaagcctctctgctgggatgccccttcttaccaaagcagggacagatctattgctctaagacttgttcacttggagaagatgtgcacgcgagcgattcaagcgactccgcattccagtccgcccgcagcagagacagccgaaggtcagttcgtatgggcaaaagctctaggtcagcagaccaatgtcgccagtcacttctgttgagtccagcactaaattacaagtttccgggcctttccggcaatgccgatgacaccctttcccgaaagctcgacgatctgtcactgagccggcaagggactagttttgccagcgaggaattttggaaaggacgagtcgaacaagagacaccggaagatcccgaggaatgggcggatcatgaagactacatgacccagctcctcctcaaatttggggacaaatccttgttccagcctcagccaaatgaaatggacataagagctagtgaacactggatcagtgacaacatggttaagagcaagaccgagctgaagcagaacaaccagtccctcgcatccaagaagtaccagagcgatatgtattgggcccaatctcaagacggattgggggactccgcatatggaagtcacccaggtcctgcaagctcccgaagactgcaggagctggagctggatcacggggcttccgggtacaaccacgacgagacacagtggtatgaggacagtctcgagtgcttgagcgacctgaagcccgaacagagcgtgcgggactctatggattcactagccctatccaatatcaccggcgctagcgtagacggcgagaacaagccccgcccgtccttgtactcgttgcaaaactttgaagagatggaaactgaagattgtgaaaaaatgtcaaacatgggcacactgaactcctccatgctgcacaggtcagccgagtccttgaaatcacttagctctgaattatgccccgaaaagatcctgcctgaggaaaaaccagttcaccttcctgtcctgcgtagatccaagagccagagcagacctcagcaggtaaaatttagcgatgatgtcatcgataacgggaactatgacatcgagattcgtcagccacctatgagcgaacgcactaggagaagagtgtataatttcgaggaacgggggtctaggagtcatcaccataggcgccggagatcccggaagagccgttccgacaacgccctaaacttggtgacagaaagaaagtatagtccaaaggaccgcctgcgactctacacccctgacaattatgaaaaattcatacaaaataagtccgcccgcgagatacaggcttacatccagaatgccgacttatacggccagtacgcgcatgccacctctgattatggacttcagaacccagggatgaacaggttcctgggactttacggcgaggacgatgattcctggtgcagttcatctagttcaagctcagactcagaggaagaaggatacttcctcggccagcccatcccacaaccccggccccagcggttcgcttattacaccgacgacctgtccagccctccttctgctttgccaactccccaattcgggcaacggacgacgaagtctaagaagaaaaaaggccacaagggaaaaaactgtattatcagctag

SEQ ID NO: 129846 - DNA, 2535 bp, synthetic construct
  misc_feature 1..2535: note = Description of Artificial Sequence: Synthetic coding sequence
  source 1..2535: mol_type = other DNA
atggtgaccgtcatgccgctcgagatggaaaaaaccatctccaagctgatgttcgacttccaacgcaacagcacttcggacgatgactctggatgcgctctggaagagtatgcttgggtacctcccggcctcaaaccagagcaggttcaccagtattacagttgcctacccgaggagaaggtcccttatgtcaactctccaggtgagaagctgcgcatcaaacagttgctccaccagcttcctccacacgataacgaggtgcgttactgtaatagcctcgacgaggaggagaagagggagctcaaactgtttagttcacagcgcaagagggagaaccttggacgtggaaatgtccggccatttcccgttactatgacaggcgctatctgcgagcagtgcgggggccagataaatggcggcgatatcgccgtgttcgccagtcgcgccggacacggggtgtgctggcatcccccatgtttcgtctgtactgtttgcaatgagctgttagtagacctaatttatttctaccaggacggcaagatttactgcggacgacaccatgctgaatgtctgaagcctcgttgcgctgcttgcgacgaaattatatttgctgatgagtgtactgaagccgagggaaggcactggcatatgaaacatttctgctgtttcgaatgtgagacggtgctaggcggacaaagatacataatgaaagagggacgaccatactgctgtcactgcttcgaaagcctgtacgctgagtactgtgatacgtgcgcccagcacatcgggatcgatcagggacagatgacatacgatgggcaacactggcacgctactgaaacttgtttttgctgtgcccattgtaaaaagtcactcttgggccgaccgttcctgcccaagcagggccagatcttctgttcaagggcttgttccgctggcgaggaccccaacggaagtgatagcagcgattcggcattccagaacgctcgggccaaggaatcccgaagatcagccaagataggcaaaaacaaggggaagactgaggaacctatgcttaatcagcacagtcagctgcaagtgtcctctaatcgcctatctgcagacgtggatcctctgtctctgcaaatggatatgctgtcactgtcatctcagaccccttctctaaatagagaccccatttggaggagcagagaggagccctaccactacggcaacaaaatggagcaaaatcaaacccagtcaccactgcaacttttgtctcagtgcaacatcagaaccagctattcccccggaggtcaaggcgccggagcacagcctgagatgtgggggaagcacttttctaaccctaaaaggtcctcgagcctcgcaatgaccggacatgcggggtcctttatcaaggagtgtcgtgaagactactaccctggcaggttacgcagccaggaatcatattctgacatgagttctcagtctttcagcgagactagaggtagcattcaggtccccaagtatgaggaggaggaggaggaggagggaggcctgtcaacacagcagtgcagaacacggcaccccatctcttctcttaaatacacagaggacatgacgccaaccgagcagaccccaaggggcagcatggagagcctagccttaagtaatgctaccgggctgagcgccgacggcggggcgaaaaggcaagagcacttatccaggttttctatgccagatctgagcaaagacagtggtatgaatgtcagcgagaagctgagtaatatgggaacactaaacagtagtatgcaatttcgctcggctgaatccgttaggtcacttcttagcgctcaacagtatcaagagatggagggtaatctgcaccagctttcaaatcctatcggatacagagacctgcaatcccatggaagaatgcatcagtcattcgacttcgacggcggcatggccggaagcaagctgcccgggcaggaaggtgtgaggattcagcccatgtccgagaggacccgtaggagggccacttctagggacgacaacaggcggttccggccccaccgttcaagacggtcccgaagaagccgttcagacaatgcgttacatttagcatccgaaagagaggccatctcccgccttaaggatcgccctcctctgagagctcgcgaggattacgatcaatttatgcgacagcgttcctttcaggagtctatgggccacggatccagacgtgatttatatggccagtgtcctaggacagtttctgatctagccctgcaaaatgctttcggggatagatggggcccatacttcgctgagtacgattggtgttctacgtgctctagcagctccgaatcggataacgagggctattttctgggggagcctattccccagcctgccagattgaggtacgttacatccgacgagctattgcacaaatactcaagttatggcctcccaaagagcagtactctgggcgggcgcggacagttacacagcagaaagaggcagaaatcgaaaaattgtatcatatcctag

SEQ ID NO: 129847 - DNA, 453 bp, synthetic construct
  misc_feature 1..453: note = Description of Artificial Sequence: Synthetic coding sequence
  source 1..453: mol_type = other DNA
atggtaaccgtaatgccgctcgagatggagaagactattagcaagctgatgttcgattttcagaggaatagcacttcagacgatgattctgggtgtgcgttggaggagtacgcttgggtcccacccgggctgaaaccagaacaggtgcatcaatattacagctgtctgcccgaggagaaggtgccgtatgttaattccccaggagaaaagctgcggatcaagcagttgctgcatcagctcccgccccatgataacgaagtccgttactgcaacagcttagacgaggaagagaaacgggaactgaagcttttttcgtctcagagaaaacgcgaaaacctcggaagagggaacgtgaggccattcccggtgaccatgactggcgccatctgcgaacagtgtggtggccagatcaacggcggggacatcgccgtttttgcgagcagggccgggtag

SEQ ID NO: 129848 - DNA, 1263 bp, synthetic construct
  misc_feature 1..1263: note = Description of Artificial Sequence: Synthetic coding sequence
  source 1..1263: mol_type = other DNA
atggaaactttcgatccaaccgagctgccagagctacttaagctgtactaccggaggttgtttccctattcacagtactatagatggttaaactacgggggggtcattaagaactattttcagcacagagaattcagcttcaccctcaaggatgacatctatatccggtaccagtcgtttaacaatcagagtgacctagaaaaggagatgcagaaaatgaacccttacaaaattgatatcggagcagtctatagtcaccgcccgaaccagcataacacggtgaaactgggtgcctttcaggctcaggaaaaggaactcgttttcgatatcgacatgacagactacgacgacgttcgccgctgttgctccagtgctgatatctgtccgaagtgttggacacttatgacgatggctatacgcattatcgatagagcattgaaagaagattttggctttaagcacagactgtgggtgtactcagggcgaagaggcgtgcactgctgggtgtgcgatgaatctgtgagaaaactgtcatctgctgtccggtccggcattgtcgaatacctctcactggtgaagggtggccaggatgttaagaagaaggtgcacctgagcgaaaaaatccacccattcattaggaagagtatcaacattattaagaaatactttgaagagtacgccttggtcaatcaagatatcctcgaaaataaggaatcgtgggacaagatcctcgctctggtgccagagacgattcatgatgagctgcagcagtcctttcagaagtcgcacaattccctacagagatgggagcacctgaagaaggtcgcttcgagatatcagaataatattaaaaacgacaagtacggcccgtggttggagtgggagataatgctccagtattgctttcctcgcctagacattaatgtaagtaagggcattaatcatcttctgaagagcccattcagcgtgcatccaaagactggacgaatctccgtgcccatcgacctgcaaaaagtggaccaatttgacccatttactgtgcctacaattagcttcatttgtcgcgagctcgatgcgatatcgaccaacgaagaggaaaaagaggaaaacgaagcagagtctgacgtgaagcaccggacaagggactataaaaaaactagcctagctccttatgtcaaagtgtttgaacactttctggagaacctcgacaagtcaaggaagggagaacttctcaaaaagtctgaccttcagaaggatttttag

SEQ ID NO: 129849 - DNA, 1284 bp, synthetic construct
  misc_feature 1..1284: note = Description of Artificial Sequence: Synthetic coding sequence
  source 1..1284: mol_type = other DNA
atggagacattcgacccaaccgaattaccggagctcctcaagctgtattatagacggctgttcccatattcacagtattacagatggctgaactacggtggtgttataaagaactatttccagcacagggagttctcctttactctgaaagacgacatctatataagataccagtcgtttaacaatcagagcgacctggagaaggagatgcagaaaatgaatccctacaaaatcgatatcggcgcggtctactcccacaggcctaatcagcacaatactgtcaaattgggagcctttcaggcccaggagaaggaactggtattcgatatcgatatgactgactatgacgatgtccggcgctgttgttcctccgccgatatctgcccaaaatgttggaccttgatgacaatggccattcgcattatcgatcgcgctctcaagggcaaagacttcggatttaagcacagattatgggtgtatagcgggcggcgcggggtgcactgctgggtctgtgatgaatcggtgagaaagctctcatcagctgtgaggagcggtatcgtcgagtacctatctctggtgaaaggcggccaggatgttaaaaaaaaggtacacttgtccgaaaagattcacccattcataaggaaaagtattaatatcatcaagaaatatttcgaggagtacgccctggttaatcaggatatacttgaaaacaaggaaagttgggacaagatcttagccctgatgggtttgttcctaaacgatccaagccccattcacgatgagcttcagcagtcattccaaaaatcccacaacagcttacagaggtgggaacatttaaagaaggtggcttcccgatatcaaaataatatcaagaacgataaatacgggccttggcttgagtgggaaatcatgctgcagtactgttttccacggttagatattaacgtgagtaaaggcatcaatcacctgttaaagagccctttctctgtgcatcccaaaaccggtcgcatttcagtaccaatcgatttgcagaaggtggatcagttcgaccccttcactgtgcccacaatctcctttatctgccgggagctcgatgccattagtaccaatgaggaggaaaaagaagagaacgaggcggaaagcgatgtgaagcatcggacacgggattacaagaagacctcccttgcaccttatgtgaaagtgtttgaacactttctcgagaacctggataagtcgcggaagggcgaactcctgaagaaaagcgacctccaaaaggacttttag

SEQ ID NO: 129850 - DNA, 762 bp, synthetic construct
  misc_feature 1..762: note = Description of Artificial Sequence: Synthetic coding sequence
  source 1..762: mol_type = other DNA
atggccaatctggggtgttggatgcttgtgctgttcgtggccacttggagcgacctcggactgtgcaaaaaacgcccaaagcccgggggctggaacacggggggatcaagataccctggccagggaagtcctggaggtaaccgctacccaccacagggcgggggagggtggggacagccgcacggtggtggctggggccagccccacgggggcggctgggggcaacctcacgggggcggctggggccagcctcacggtggcggttgggggcagggcggagggacacattcgcagtggaacaagccctcaaagccaaagaccaatatgaaacacatggcaggcgccgctgctgcgggcgctgtcgtcggcggcctgggcggctacatgttgggttctgccatgtctcgaccaataattcattttgggtcggattacgaggatcgctattaccgggagaacatgcacagataccctaatcaagtgtattaccggccgatggatgagtattccaatcagaataatttcgtccacgattgcgtaaatatcactataaagcagcacactgtgactactactacaaaaggggagaattttaccgagacagatgtcaagatgatggaaagagtcgttgagcaaatgtgcatcacacagtatgaaagagaatcgcaggcctactaccaaaggggtagcagcatggtgctgtttagcagtccccccgtcatcctgctgatttcttttctcatcttcctcatcgtgggatag

SEQ ID NO: 129851 - DNA, 750 bp, synthetic construct
  misc_feature 1..750: note = Description of Artificial Sequence: Synthetic coding sequence
  source 1..750: mol_type = other DNA
atggccaacctgggctgctggatgctggtgcttttcgtcgcaacctggtcagatttggggctgtgtaagaagcgccccaaaccgggagggtggaataccggcgggtcaagatacccaggccaggggagccccggcggcaaccggtatccaccgcaaggaggcggagggtggggacaaccacacggaggcgggtggggccagcctcacggaggcggctggggccagccgcacggtggcggttgggggcagccccacggtggtggatgggggcaggggggcgggactcattctcaatggaacaagcccagtaagccgaaaactaacatgaagcatatggcgggggccgctgccgcgggggctgttgtgggggggctgggcgggtacatgttaggcagtgcaatgtcccgcccaataatccatttcggtagcgactacgaggaccggtattatagagaaaatatgcaccggtatcccaatcaagtgtactatagacccatggacgagtacagcaaccagaacaactttgtccatgattgcgttaatatcaccatcaagcagcacacagtgactactacgactaagggagaaaattttactgagacagacgtcaagatgatggaacgcgtggtcgagcagatgtgcatcacccagtatgagcgtgagagccaagcatactatcaacgcggttcatctatggtgttgttttcctccccccccgtgattctgctgatttccttcctgattttctag

SEQ ID NO: 129852 - DNA, 762 bp, synthetic construct
  misc_feature 1..762: note = Description of Artificial Sequence: Synthetic coding sequence
  source 1..762: mol_type = other DNA
atggcgaatttaggatgttggatgttggttttgtttgtggccacatggtccgatctggggctatgtaagaagcggccaaaaccgggcggttggaatacaggtggcagccgataccctggacaagggtctcccggaggaaatagatatcctcctcagggcggaggcgggtgggggcaacctcacggaggggggtggggacagcctcatggggggggctggggacagccacatgggggtggatggggacagcctcacggaggagggtggggccaaggcggcggaacccacagtcagtggaataaaccaagtaagcccaaaaccaacatgaaacacatggcaggcgccgcggccgccggtgctgttgtgggcggcctgggcggctacatgctgggctctgccatgagtcggcccattatccactttggcagcgattatgaggatcgctattaccgggagaacatgcaccgctaccctaaccaagtctactacagaccgatggacgagtacagcaatcagaataacttcgtgcatgattgtgtgaatattacaattaaacagcacaccgttacgaccacaacgaaaggcgaaaactttaccgaaaccgacgtgaagatgatggagcgcgtggtcgaacagatgtgcataacgcagtacgaacgcgaatcccaggcttactatcagcgcgggagctccatggtgctgtttagctctccaccagtcattttacttatctcattcttgatctttttgattgtgggttag

SEQ ID NO: 129853 - DNA, 579 bp, synthetic construct
  misc_feature 1..579: note = Description of Artificial Sequence: Synthetic coding sequence
  source 1..579: mol_type = other DNA
atggaacattggggccagcctcatggaggaggttggggccagccacacggcggcggctggggacagcctcacggcggaggctggggtcagggcggcgggacccactcccaatggaataagccctctaagccaaaaactaacatgaaacatatggcaggcgccgcagctgccggtgccgtggtgggcggcctgggcgggtacatgctgggatccgctatgagcaggccaatcatacattttggctcagactatgaagaccggtactatcgcgagaacatgcaccgctatccaaatcaggtgtactacaggcccatggacgaatactcaaatcagaataactttgtccacgactgcgtcaatataactattaaacagcacaccgtcacgactacgaccaagggtgagaactttactgaaaccgatgtgaaaatgatggaaagagtggtcgagcagatgtgtatcacgcagtacgaacgcgaaagtcaggcgtattaccagcgcgggagtagcatggtcctgttttcgtctccacctgtgattttattgatctccttcttaattttccttatcgtaggttag

SEQ ID NO: 129854 - DNA, 654 bp, synthetic construct
  misc_feature 1..654: note = Description of Artificial Sequence: Synthetic coding sequence
  source 1..654: mol_type = other DNA
atggccaacctgggctgttggatgctcgtcttatttgttgccacgtggagtgatttaggtctctgcaaaaagagacctaaacccggaggttggaatactggcgggtctaggtacccgggccagggttcaccgggcggtaaccgatacccaccgcaaggcggcggcggctggggccagcctcacggcggcggctgggggcaacctcacggggggggctggggccagcctcatggggggggctggggccagccccatggcggcgggtggggccagggcggtgggacccattctcagtggaataaaccatctaaaccaaagaccaacatgaagcatatggctggcgccgccgcagccggggccgttgtgggtgggctcgggggatatatgttgggatccgctatgtctcgacctataatccacttcgggtcagattacgaagatagatactacagggagaacatgcacaggtaccccaatcaggtctattatcgccccatggacgagtacagcaaccagaataacttcgttcatgattgcgttaatattactatcaagcaacacactgtgacaacaacgacgaagggagagaatttcaccgagaccgatgtaaaaatgatggaaagagtggttgaacagatgtgtattacccaatag

SEQ ID NO: 129855 - DNA, 531 bp, synthetic construct
  misc_feature 1..531: note = Description of Artificial Sequence: Synthetic coding sequence
  source 1..531: mol_type = other DNA
atgcggaagcatttgtcctggtggtggttggcgacggtgtgcatgctccttttcagccacctaagcgcagttcagacccgaggaataaaacacagaatcaaatggaataggaaagcgctgccaagcacagcgcaaatcaccgaagcgcaggtagccgaaaatcgacctggcgcatttatcaaacagggccggaagttagatatcgatttcggcgcggagggtaatcgctactatgaggcaaattactggcagttcccagacggtattcactataacggatgctctgaggctaatgtcacaaaagaagccttcgtgaccggttgcataaacgccacccaagccgcaaaccaaggagagttccagaaacctgataataagctgcatcagcaggtcctttggcggcttgtacaagagttatgcagtctaaagcattgtgagttttggttggagagaggcgccgggctgcgagtgaccatgcaccagcccgttttgctctgcctgctggcgctgatttggctgactgttaagtag

SEQ ID NO: 129856 - DNA, 1023 bp, synthetic construct
  misc_feature 1..1023: note = Description of Artificial Sequence: Synthetic coding sequence
  source 1..1023: mol_type = other DNA
atggctacgggtggctaccgaacttctagcggactaggaggcagtacgacggactttctcgaagagtggaaagcaaaaagagaaaagatgagagccaagcaaaacccgcccggcccagcccctccggggggcggttctagcgatgcagcgggaaagccgccagctggggctctggggacgccggccgccgccgctgcaaacgagctgaataataacctcccagggggcgccccggccgccccagcggtcccaggccctgggggggtcaactgtgccgtgggatctgcaatgctgacccgggccgcccctggtccccgtaggagcgaagacgagcccccagcagcgagcgcctccgcggcacccccccctcagcgggacgaagaagagcccgacggggttcctgaaaagggcaagtcctcaggccctagtgcccgcaagggcaagggccaaatagaaaaaaggaaactgagggaaaagcggcggagtaccggcgtcgtcaacattccagcagcagaatgcctcgatgagtatgaggacgacgaagcaggtcaaaaggagcgcaagcgggaagacgcgatcacccagcagaatactattcaaaacgaagccgtgaaccttttagacccaggatcctcatatctgctgcaggagcctccaagaacagtgtccgggagatacaaatctactacctcagtctcagaggaggatgtgtctagtcggtactctagaacggaccgctcaggtttcccccgctataatagggacgccaacgtttccggcactctggtttcttcctctacgctggagaaaaagattgaagatctcgagaaggaggtagtaagggagcggcaagagaatctgcgactggtccggctgatgcaagataaagaagaaatgatcggaaaactgaaggaggaaatcgatctattgaacagggacttggatgatatcgaagatgagaatgaacagctgaagcaggagaacaagacattactgaaagtggtcggacagttgacccgatag

SEQ ID NO: 129857 - DNA, 231 bp, synthetic construct
  misc_feature 1..231: note = Description of Artificial Sequence: Synthetic coding sequence
  source 1..231: mol_type = other DNA
atggccactggaggatacaggacctcttccggcctgggggggtcgacgaccgacttcctcgaggaatggaaggctaagcgtgagaagatgcgtgcaaagcagaatcctccgggacccgcccctcccggcggaggaagtagcgatgctgcgggcaagccgccagcaggggctctggggacacctgcggcagccgccgcaaatgagctgaacaacaacctccctggcgggtag

SEQ ID NO: 129858 - DNA, 195 bp, synthetic construct
  misc_feature 1..195: note = Description of Artificial Sequence: Synthetic coding sequence
  source 1..195: mol_type = other DNA
atggctacaggcggatatagaaccagcagtggcctcggaggcagcaccactgatttcctcgaggagtggaaggcaaagcgcgagaagatgagagcgaaacagaatccaccgggaccagctccccctggcggcggaagctccgatgctgcgggtaagccacctgccggagctctcgggacccccgcagcggcctag

SEQ ID NO: 129859 - DNA, 663 bp, synthetic construct
  misc_feature 1..663: note = Description of Artificial Sequence: Synthetic coding sequence
  source 1..663: mol_type = other DNA
atgaaaagcgtgatctaccatgccctgagtcagaaagaagccaacgattccgacgtgcagccatccggagctcagagggctgaggctttcgtgcgagcttttctgaaacgttccacaccacgaatgtctccgcaagctcgcgaggatcagctgcagaggaaagccgtagtgctggagtactttaccagacacaagagaaaggagaaaaagaaaaaggccaaaggcttgagtgctcggcaacgtagggagctgcgactgttcgatataaaacccgagcagcagcgatattccctcttcttgcccctccacgaattatggaaacagtacataagagacctgtgctccggtctaaaacccgacacccagccccaaatgatccaggcaaagctgttgaaagcagacttgcacggcgcgatcatcagcgtgacaaaaagtaaatgccccagctacgtggggatcacaggcatcctgctccaagagacaaaacatatcttcaaaataatcacaaaggaggacagattaaaagtgattcccaagctcaattgcgtcttcacagtggagactgacgggttcatctcttatatctacgggtctaagtttcagctgcgcagctccgaacgaagcgctaaaaagttcaaggctaaagggaccatcgatctgtag

SEQ ID NO: 129860 - DNA, 1695 bp, synthetic construct
  misc_feature 1..1695: note = Description of Artificial Sequence: Synthetic coding sequence
  source 1..1695: mol_type = other DNA
atgtcatcccacggcaactctctgttccttagggaaagtggacagcgactgggtcgcgtcggttggctgcagagattacaggaaagcctccagcagcgtgctctgaggacccgtcttcgtctgcaaaccatgaccctggagcacgtgctgcggttccttcgcaggaacgccttcatactgttgacagtgtccgccgttgtgataggggtgagcttggcattcgccctgcggccctaccaactcacgtacagacagatcaagtactttagctttccaggagagctgctcatgcgtatgctccaaatgttagttcttccgcttattgtctccagtctggtgaccggcatggcaagccttgacaacaaagctaccggaaggatgggcatgcgagcggccgtgtattatatggttactacaatcattgctgttttcattgggattctaatggtgaccattatacatccaggcaaagggagcaaggagggtctgcatcgcgaaggtcgcatcgagaccatcccgacagcagatgcattcatggatctcatcagaaatatgttccctcccaatctcgttgaagcctgtttcaagcagttcaaaacgcagtatagtacacgagttgtgaccaggactatggtgagaactgagaacggtagcgagcccggtgcctccatgccccctcctttctccgtagaaaatgggacctccttcttagagaatgtaactcgcgcactggggaccctgcaagaaatgcttagctttgaagagactgtgcccgtaccgggctctgcaaacggaatcaacgcgctgggcctggtggtgttcagtgtggccttcggactggtaattggagggatgaaacataaaggcagggtcctgcgggattttttcgactcgttgaacgaagccataatgcgcttggtgggcattattatttggtatgcgccagtggggatcctattcctcattgcgggaaaaatcctcgagatggaggacatggccgtgctgggcggccagctgggcatgtacaccctgacagtaatcgtgggcctgtttctccacgctggcattgtgcttccacttatctattttttggttacccaccgtaacccatttccttttattggcggcatgctgcaggccctgataaccgccatggggacctcatctagttccgccacactcccaatcacgtttagatgcctggaggagggcctcggtgttgataggaggattacgaggtttgtcctcccggtaggggccacggttaatatggatggcactgctctgtacgaagcacttgctgctatttttattgctcaggtcaataactatgaactcaacctgggccagattacaaccatctccatcacagcaaccgctgccagtgttggggcagcaggaataccccaggccggattagtgacaatggtgattgtgctcactagcgtggggctacccaccgaggacattacactcataattgctgtggattggtttttagaccggctgaggactatgaccaatgtgctcggagatagcatcggggccgccgttatcgaacaccttagtcagagggaactggaactgcaggaggcagagctgactctgccttcgctgggcaagccctacaagagtctgatggcacaagaaaagggggcctcaaggggacggggaggcaacgaatccgccatgtag

SEQ ID NO: 129861 - DNA, 420 bp, synthetic construct
  misc_feature 1..420: note = Description of Artificial Sequence: Synthetic coding sequence
  source 1..420: mol_type = other DNA
atgcattgtctcagaaagagacggatgacaccaatgtctagatactcattgttccttccactgcacgaattgtggaaacagtatattcgcgatctctgttcagggttgaaacctgatactcaacctcagatgatccaggccaagctcctgaaagctgatctgcatggcgctatcattagcgtaacaaaaagtaaatgtccttcctatgtcggcatcacaggtatattattacaggagaccaaacatatttttaagataatcactaaggaagatcgattaaaagtaattccgaaactgaactgcgtgtttacagtcgaaacggatgggttcatcagctatatttacggctcaaaattccaattacggagctcagagcggtctgccaaaaagtttaaggccaaggggacaatcgatctctag

SEQ ID NO: 129862 - DNA, 342 bp, synthetic construct
  misc_feature 1..342: note = Description of Artificial Sequence: Synthetic coding sequence
  source 1..342: mol_type = other DNA
atggtccgattcaagcaccggtacctactttgtgagctggtgagcgacgacccccgctgtaggctctctctcgacgaccgggtgctgtccagcttggtgcgtgacacgattgcgcgcgtgcatggtacgttcggtgccgcagcttgtagcatagggttcgctggaactattaggacgtgccagaaatttctcattcagtacaaccggcgccagttattgatactcttgcagaactgtacagatgagggcgaacgagaggcgattcaaaaaagcgtgactaggtcctgcctgctcgaggaagaggaggagagtggagaggaagctgcggaagccatggaatag

SEQ ID NO: 129863 - DNA, 492 bp, synthetic construct
  misc_feature 1..492: note = Description of Artificial Sequence: Synthetic coding sequence
  source 1..492: mol_type = other DNA
atggtccggtttaagcacagatatctcctctgcgagctggtcagcgatgaccccaggtgtcgcttatctttggacgatcgggtgctgtcaagcctcgtgcgggatactatcgccagagtgcacggcacctttggcgccgcagcttgctccatcgggttcgcagtgcgttacttgaacgcctacacaggcattgtcttactgagatgccggaaagaattctaccagttggtctggagcgccctgcctttcataacatatctcgagaataaaggccatcggtacccatgcttttttaataccctgcacgtgggaggcaccattaggacttgtcagaaattcctcattcagtataatcggcgccagctactaattctgctgcagaactgcaccgacgagggggagagggaggctatacagaagagcgtcacaaggtcttgtctactggaagaggaggaagagagcggagaggaagcggctgaagccatggagtag

SEQ ID NO: 129864 - DNA, 423 bp, synthetic construct
  misc_feature 1..423: note = Description of Artificial Sequence: Synthetic coding sequence
  source 1..423: mol_type = other DNA
atggctgagaaccgcgagccaagaggggctgtggaagctgaactggaccctgttgaatacactttgagaaaaagactcccttcaagattaccaagaagaccaaatgatatctatgtgaatatgaaaaccgactttaaagcccagctggcacgttgccagaagcttttagacggcggcgccaggggccagaatgcctgctccgagatttatattcacggcctcgggctggctattaatagggccataaacattgccctacagttacaggccggaagctttggaagtcttcaggtcgctgccaatacctcaacagttgagctggtagacgagctcgaacccgaaacagatacacgggagcccctaactcgtatacgcaacaactctgccattcatatccgggtgttccgagtcacacccaaatag

SEQ ID NO: 129865 - DNA, 414 bp, synthetic construct
  misc_feature 1..414: note = Description of Artificial Sequence: Synthetic coding sequence
  source 1..414: mol_type = other DNA
atggcggagaatcgagagcccaggggagcagtggaggcagagctggatccagtggaatacacgctgcgaaagcgtttgccgagtaggctcccccggcgccctaatgacatatatgtcaatatgaagaccgacttcaaagcccaattagccaggtgtcagaaactactcgatggcggtgcccgaggacaaaacgcttgttccgagatttacattcatggcctgggcctggctataaacagggcgattaacatagcattgcagttgcaggctggatcttttggctcgctccaggtcgctgccaatacctcgaccgtagagttagtggacgaattggaacccgagacagacacccgggagccactgaccaggatccgaaacaactctgctatacacatccgagtattccgggtgtag

SEQ ID NO: 129866 - DNA, 708 bp, synthetic construct
  misc_feature 1..708: note = Description of Artificial Sequence: Synthetic coding sequence
  source 1..708: mol_type = other DNA
atgaggaggggcgcgccacaagaccaggagctggtcggccccggaccaccaggacgcggttcccgtggagcccctccacctctgggcccagtggtcccagtcctcgtatttcctcccgatcttgtgtttagggccgatcagcgcagtggccccagacagcttctcaccctctataaccctaccggtacagccttgaggtttagggtgctttgtactgccccagcaaaatataccgtgttcgacgccgagggctatgtgaaaccacagagctgcatcgacattgttatccgacacgtggcgcctattcctagccattatgatgtgcaagaccgctttaggattgagctgtccgaggagggcgcggagggccgggtggttggaaggaaggatatcaccagtattctgagagctcccgcttaccccctggagctgcagggacagccagatccagcccctagacccggccccccagcaggcacacctccgcctaccgcgcggcattttcaagaacaccccagacagcaacttgcaacaagtagctttctgctgttcctgttgacaggcatagtgagcgtggcctttttactcctccctctgcctgacgagttgggcagccagttgcctcaggtgctgcatgtatcactcggtcagaaacttgtagcggcatatgtgctcggactactcacaatggtgtttctgagaacttag

SEQ ID NO: 129867 - DNA, 1248 bp, synthetic construct
  misc_feature 1..1248: note = Description of Artificial Sequence: Synthetic coding sequence
  source 1..1248: mol_type = other DNA
atgagaggtgcgaatgcctgggcccctctgtgtctgctgttagcagctgcgactcagctctctcgtcagcagtctcctgagcggccagtattcacttgtggcggtatcctgaccggtgaatcaggcttcatcgggagcgagggatttcccggagtgtatccccctaattctaagtgcacttggaagatcactgtgccagagggcaaggtggtggttctgaacttcagattcatcgacctggaaagcgataatctctgccgctacgattttgtggacgtttacaatggccacgcaaacgggcagaggatcggtaggttctgtggaacgtttcggcctggggcccttgtgagctctggaaataagatgatggtgcaaatgatcagcgacgcaaacacggccggtaacggctttatggctatgttctccgccgccgaacctaatgaaagaggggaccagtactgcggagggctgttagatcgcccttccggctccttcaagaccccgaactggcctgaccgcgattaccctgcaggggttacttgcgtatggcacatcgtcgcgcccaagaatcagttgattgagctgaagttcgagaaatttgacgtggagcgggacaattactgccgctacgattacgtcgccgtgttcaacggcggcgaggtcaatgatgcccggcgcattggcaaatactgcggagacagcccccctgctcccatcgtgtcagagcggaacgagctcttgattcagtttctgagcgatttatcacttactgccgacggatttattggccactacatattccgccccaaaaagctacctacgacaacagagcaacccgtcacaaccacatttccagttacaaccggcctgaaaccaacggtcgcgctgtgccagcagaaatgtaggagaacaggaacactggaggggaattattgctccagcgattttgtcctcgcgggcacggtcatcaccactattaccagagatggcagcttacacgccacagtatcaatcatcaacatctataaagaaggaaatcttgctatacagcaggccggaaagaacatgtccgccaggctgactgtagtttgcaaacagtgtcctttgcttcggagggggctgaactatataattatgggccaggtgggcgaagacggcaggggaaagataatgcccaacagttttatcatgatgtttaagactaagaaccagaaactactggacgcgctaaagaacaaacagtgttag

SEQ ID NO: 129868 - DNA, 2184 bp, synthetic construct
  misc_feature 1..2184: note = Description of Artificial Sequence: Synthetic coding sequence
  source 1..2184: mol_type = other DNA
atgcgacccctgcttcttttggccctgctaggttggctgttgctggctgaagccaagggggatgctaagcccgaggacaatctactggttctgactgtggctacaaaggaaaccgaaggttttcggaggttcaagcgttccgcacagtttttcaattataagatccaggccttgggacttggggaagactggaacgtcgaaaaggggacaagtgctgggggtggccagaaagtgaggctcctcaaaaaggccctggaaaaacatgccgataaggaggacttagttattttgttcgccgactcttacgatgtcttgttcgccagtggcccgagagaattgctcaagaagttccgccaggcaaggtctcaggtggtttttagtgctgaggaactcatctaccctgacaggcggcttgagaccaaatacccagtcgtgagcgacggcaagagatttctggggtcagggggcttcatcgggtatgcgccaaatcttagtaagctcgtggccgaatgggagggacaagactcggactccgaccagctcttctacacgaaaatatttctggaccctgagaaaagagagcagattaacatcactcttgaccaccgatgcaggatatttcaaaatttggatggggccctggacgaagtggttctgaagttcgagatgggacacgtgagagccagaaaccttgcctacgatacattacctgtgctcattcacgggaacggacctacaaaacttcaacttaactatctgggcaattacatccctcgattttggacttttgaaaccggatgtacagtgtgtgacgagggccttcggagtttaaagggaatcggtgatgaagctctgcctaccgttctggttggtgtctttatagagcaacccactccttttgtgtccctgttcttccaacgcttgctccggctccactacccccagaagcatatgcggctgttcattcataaccacgagcagcaccataaagcccaagttgaggaattcctcgcacaacatgggtcagaataccaatccgtgaaactcgtgggcccagaggtgagaatggcaaatgccgatgcgcgaaacatgggcgccgacctctgtcgccaggaccggtcctgcacatattacttctccgtggatgccgacgtggcccttacagaaccaaattcattgagactcctgattcagcagaataaaaatgttatcgctcccctaatgacacgccacgggaggctttggtcaaatttttggggtgctctgtctgcggacggatactacgcaaggagtgaagactacgtggatattgtgcaaggcagacgcgtcggggtgtggaatgtgccttacatcagcaacatttatctgattaagggtagcgctctccgtggggaattacagagttccgatctgttccatcactccaagctggatcccgacatggcattttgcgccaacattaggcagcaggacgtctttatgtttttgaccaaccggcacacactggggcacttactgtcgctggattcctatcgcaccacccacctccataatgacttatgggaggtcttctcaaatcccgaggactggaaggaaaagtacatccatcagaactatacaaaggcactcgccgggaaactggtggaaacaccgtgtcccgacgtgtactggttccctatttttaccgaagttgcttgcgatgagttggtggaggaaatggagcactttggacagtggagcctgggtaacaacaaggacaatagaattcaagggggttacgagaatgttcctacgattgatatccatatgaatcagattggcttcgagagggagtggcacaagttcctgttggagtacatagcccctatgacggaaaaactgtaccccgggtattatacaagggcccaatttgatttggcttttgtggtgagatacaagccagatgaacaaccctctcttatgccccatcatgacgcctccactttcacaattaatattgccctgaatcgggtgggagttgattatgagggcggcggctgccggttcttacgttacaattgtagtattcgtgctccgcgtaaaggctggacactgatgcaccccgggcggctcacccactaccatgaaggcctgccaaccacccgtggaacacgatacatagctgtgtctttcgtcgatccatag

SEQ ID NO: 129869 - DNA, 600 bp, synthetic construct
  misc_feature 1..600: note = Description of Artificial Sequence: Synthetic coding sequence
  source 1..600: mol_type = other DNA
atgcggccactgctgctgctggcgttgctggggtggctgctattagccgaggccaaaggggatgctaagccagaagacaatctcctggtgctcacagtggccacaaaagaaacagaagggtttcggcggttcaagagaagcgcccagttcttcaactacaagatacaggccctggggctgggggaagattggaatgtggaaaagggcacctcagccggtggtggacagaaagtcagactgctgaagaaggcattagaaaagcacgctgataaggaggacctagttattctgttcgccgattcttatgacgtgttatttgcttccggtccaagggagctcctcaagaaattccgacaagcgaggtcacaggtggtgttttcggcagaggaactcatctatcctgataggcgattggagaccaaataccctgttgtcagcgatggcaaacgatttctgggctccggcgggtttattggttacgctccaaacttgagcaaacttgtggccgaatgggaagggcaagactctgattccgatcagctgttttatacaaaaatttttttagaccctgagaagcgtgtgtctagactgcacagctag

SEQ ID NO: 129870 - DNA, 2325 bp, synthetic construct
  misc_feature 1..2325: note = Description of Artificial Sequence: Synthetic coding sequence
  source 1..2325: mol_type = other DNA
atgcgcccactgcttctgcttgccctgttaggctggctgctgctcgccgaagccaagggcgatgctaagcctgaggcgccctgttgtcaggaggggttgcgcgctgggggctcgggctctctgcacctggggcgggacttcaccgtgctggctggcgcccgaggcagtccctcaccgtctgtcagctccatacctaggttttggatccctggctcggataaccttcttgtattgacagtggcaacaaaagagacagaaggttttcgccgcttcaaacgttcagctcagtttttcaattataaaattcaggccttgggcctaggagaggattggaacgtagagaaggggacaagcgccggtggagggcagaaggtgcgcctgcttaagaaagctctagaaaagcatgctgacaaagaggatttagtaatactgttcgccgactcttatgatgtgctcttcgcatctgggcctagggagttactcaaaaagtttcgccaagcacgctcccaggtcgtcttttccgccgaagaactaatatatccagaccggaggcttgagactaagtatccagttgtgtctgacggaaagcggttcctggggtccggcggctttattggctatgcaccgaacttatcaaagctggtggcagaatgggagggtcaagactccgacagtgatcagttattttatacaaaaatttttctggatcctgaaaaacgggaacagataaacatcacattggatcatcgatgtcggatatttcagaatcttgacggggcactggatgaggtggttctcaaatttgagatggggcatgtgagagcacggaacctggcctacgacactctccccgtattgattcatggcaatggtccgacaaagctgcagctgaattatttgggtaactatatccctcggttctggacatttgagactgggtgtaccgtttgtgatgaaggcctccgctctctgaaggggatcggggatgaggcgttaccgaccgtacttgtgggagtttttatcgagcagccgacgcccttcgtgagtttgttctttcagagattactccgtctccattacccccagaaacatatgcgactgtttatccacaaccacgaacagcaccacaaagcccaggttgaagagttcttagcccagcatgggtccgaataccaatccgttaagcttgtggggccggaagtgcggatggcaaacgctgacgcgcgaaatatgggggcagacctgtgccgccaagacagatcgtgcacgtactatttctcggtggatgctgacgtcgcccttaccgaaccgaattccttaaggctgctgatccagcagaataagaacgttatcgctcctctcatgacaagacacggccgcctgtggagtaacttctggggggcattgtccgccgatggatattacgcaaggtcagaggattatgtcgacatagttcaaggcaggcgcgtcggagtttggaacgttccctacatctcaaacatttacctgatcaagggttcggcattgcgcggcgaactacaaagtagcgacttatttcaccactcaaagctcgatcccgatatggccttttgtgcgaacattcgccagcaagatgtattcatgtttcttaccaacagacacaccttaggacatttgttgtcgctggattcctataggaccacccacttacataatgatctgtgggaggtctttagcaaccccgaggactggaaagagaagtacattcaccagaattataccaaggccctcgcaggcaaacttgtcgaaaccccttgccctgacgtatactggttccctatttttaccgaggtcgcttgtgacgagctggtagaggagatggagcacttcggccaatggagtctcggtaataacaaagacaacaggatccaaggcggctatgaaaacgtcccaacaattgatatccacatgaatcagatcggctttgaacgcgaatggcataagttcttgctcgaatacattgctcctatgactgaaaagttgtacccaggatattatacaagagcgcagtttgatctcgccttcgtggtccgctataaaccggacgaacagccttccctcatgccccaccacgatgcttcgacgtttaccatcaatattgctctgaatagggtaggtgttgattacgaggggggtgggtgccggtttctacgatacaactgctcaatacgagccccgcggaaggggtggaccctgatgcaccccgggcgcttaactcactaccacgagggccttccgacaacacgcggaacccggtatatagcagtgagctttgtcgatccatag

SEQ ID NO: 129871 - DNA, 1176 bp, synthetic construct
  misc_feature 1..1176: note = Description of Artificial Sequence: Synthetic coding sequence
  source 1..1176: mol_type = other DNA
atgcggcctttgctgctgctggccctcctgggctggctgttgctggccgaggcaaagggtgatgctaaacccgaagataatttgctcgtcctgaccgtcgccaccaaggaaaccgaggggttccggcgcttcaagaggagcgcccagtttttcaactataagatacaagccctgggcttaggtgaagactggaacgtggagaaaggtacttcggcgggaggaggacagaaagtcagactcctaaaaaaggctctcgaaaaacatgctgacaaggaggatttagtgatcttgttcgcagattcttatgacgtgctttttgcttccggtccgcgcgagcttcttaagaagtttaggcaagctcggtcacaggtggtgttctcagctgaagaactgatctatcccgaccgcaggcttgagactaagtatcccgtggtgtccgacggaaaacgctttctcctggaggatgttttcatgtttctgaccaacaggcacacacttggtcatctcttgagcctcgactcatacagaactacgcacctgcataacgatctgtgggaggtgttctctaacccggaagactggaaagagaagtacattcaccagaactataccaaggcactggcaggtaaacttgtagaaaccccgtgtcccgacgtctattggtttcccatctttacggaggtggcttgcgacgagctggtcgaggaaatggagcattttgggcagtggtcactgggcaataacaaagacaacaggatccagggaggttacgagaatgtccctaccatcgatattcacatgaatcagatcggtttcgaaagagagtggcataaatttctcctggaatacatcgcacctatgacggagaaactgtacccaggctactacacccgcgcccaattcgacctggccttcgtggtgaggtataagcctgacgaacagccctctctgatgcctcaccacgatgcctctacgttcaccattaatatcgctctcaatcgtgtcggcgtcgattacgaaggaggaggctgtagattcctgagatacaactgtagtatacgcgctccaaggaagggctggacacttatgcaccccggcaggctgacgcactatcacgaaggtttgcctacaacaagaggaactcgctatatcgcagtttccttcgtggatccttag

SEQ ID NO: 129872 - DNA, 852 bp, synthetic construct
  misc_feature 1..852: note = Description of Artificial Sequence: Synthetic coding sequence
  source 1..852: mol_type = other DNA
atgagacctttgctgcttctggctctgctggggtggttactactcgccgaagccaagggcgatgcaaaacctgaagacaatctcctggtcttaactgtggcaacaaaagaaaccgagggctttcggagattcaaacggtcagcacaatttttcaattacaaaatccaagcactgggactgggagaggattggaacgtggagaagggaacatctgccggcggtggccagaaagtccgccttttaaaaaaggcactggagaaacacgccgacaaggaagatctggtcattctgttcgctgactcatatgatgtcttgtttgcatccggcccaagggagttgctcaaaaagttccgccaggcccggtcgcaggtcgtgtttagtgcggaggagttgatttacccagatcggcggctcgagaccaaatacccagtagtgtctgacggcaagcgatttctcggatccggaggttttattgggtacgccccaaacctgtcgaagttagtagcggagtgggagggtcaggactccgactccgatcagttgttctacaccaaaattttcctggacccagaaaagagagagcagattaacataaccctggatcaccggtgccgcatcttccagaacctcgatggtgctcttgtttccccctggggacaggggcacttgcctggagcttgttacgagttgaccgcaagcgttctgaccagcgaactctccgtgatgccctcgtttccagctgtcgtgctgcagctaaattatcttgggaattacatcccacgtttctggactttcgagacagggtgcacggtgtgcgacgaaggcctccgctccctcaagggcatcggatag

SEQ ID NO: 129873 - DNA, 678 bp, synthetic construct
  misc_feature 1..678: note = Description of Artificial Sequence: Synthetic coding sequence
  source 1..678: mol_type = other DNA
atgagacccctacttctgctggccctcttaggttggctgctgttagctgaggccaagggtgatgccaaaccagaagctccttgctgccaggaaggactgagagctgggggatcaggcagcctgcaccttggaagggattttacagtgctggcaggggctaggggatcacccagccctagcgtgagttcaatacctaggttctggatacccggctcagataatctgcttgttttaactgtggctaccaaggagacagaaggctttcggaggttcaaaagaagcgcccagttttttaattacaagatccaggcacttggcctaggtgaggactggaacgtcgaaaagggtacctccgctggtggcggacaaaaggtgaggctattaaagaaagctctggagaagcacgctgataaagaggatttggtcattctgttcgcggacagctacgacgttcttttcgcttctggcccacgggagctgctcaagaagttcagacaggccaggagccaggtcgtattctctgctgaagagctcatttacccagaccggaggctggagactaagtatcctgttgtgagtgatgggaagcgcttcttgggatcaggaggctttatcggctatgcccccaatcttagcaagctggtagctgagtgggaaggacaggacagtgactcctag

SEQ ID NO: 129874 - DNA, 2277 bp, synthetic construct
  misc_feature 1..2277: note = Description of Artificial Sequence: Synthetic coding sequence
  source 1..2277: mol_type = other DNA
atgggcggctgcactgttaaacctcagttactgctgctggccctcgttctgcatccctggaacccttgtctcggcgccgactctgagaagccatctagtattccgacagacaaattgctggtgatcacagtggctactaaggaatccgacggattccatagatttatgcagtctgctaagtattttaattacacggtgaaggtgctcggccagggcgaagaatggaggggaggggacggaatcaattctataggaggggggcaaaaagtacgtctgatgaaagaggttatggaacattacgcagaccaagacgatctggtcgtcatgtttactgaatgtttcgacgtgatttttgctgggggtccagaggaggtcctgaaaaaatttcagaaagccaaccacaaggtcgtattcgcggcagatggaattctgtggccagataagcgcctggctgacaaatacccggtagttcatatcgggaagcggtacctgaacagcgggggattcatcggctatgctccctacgtaaacagaatagtgcagcagtggaacctgcaggataacgacgacgaccagctgttttatacaaaggtgtacatagatcctttgaagcgagaagctattaacatcacccttgatcacaaatgcaaaatttttcagactctgaatggcgcagtggacgaggtcgtactgaaatttgaaaacggcaaggcccgcgccaagaataccttttacgaaactctgcctgtcgcgataaatggcaatggtcctacaaaaatccttctaaactacttcgggaattacgtgccaaattcctggactcaggataatgggtgcaccttatgcgagttcgataccgtggacctgtccgccgtcgatgtgcaccctaatgtttcaatcggcgtcttcattgagcagccgactccattccttccgagattcctcgacatcctactcacgcttgactatccaaaggaagccctcaagctgtttattcataataaagaggtttaccatgagaaagacataaaggtgtttttcgacaaggccaagcatgagattaaaactatcaagatcgtgggtccagaagaaaatttgagccaggctgaagcccgcaacatgggcatggatttctgtcggcaggatgaaaagtgtgactattatttttccgttgacgcggatgtcgtcctgacgaacccccggacgctgaaaatcctgattgaacaaaaccgcaaaatcatcgctccattagtcactcgacacggcaagctctggtcaaatttttggggggcactttccccagatggttattatgctcgcagtgaggactacgtcgacattgtgcagggtaatcgcgtgggcgtgtggaacgttccctacatggcaaatgtgtacctgatcaaggggaaaacactgcgaagcgaaatgaatgagcgcaattacttcgtccgagacaagttggacccagacatggccctgtgtcggaacgctcgagagatgacactccagcgggagaaggactcacctacaccggaaacatttcagatgttgagcccgcccaaaggcgtctttatgtacatcagtaatcgacacgaattcggacggctgttgtccactgctaattataacacctcccattacaacaatgatctctggcagattttcgaaaaccccgttgactggaaagaaaaatatatcaaccgggattatagtaaaatatttaccgaaaatatcgtcgagcagccctgtcccgacgtcttttggttcccaatcttttcagaaaaagcctgcgacgagttagttgaggaaatggagcactacggcaagtggagcggaggtaagcaccacgattcacggatatccggaggatacgagaacgtgccaacggatgacatccacatgaagcaagtggacctggagaacgtgtggctgcacttcattagagaatttatagctcctgtgacactgaaggtgttcgccgggtactacaccaagggcttcgccctgcttaattttgtggttaagtacagtcccgagagacagagaagcctccggccccaccacgacgctagcacgttcaccatcaacatagccttaaacaacgtgggcgaagacttccagggaggtggctgtaagtttctgaggtacaactgctcaattgagtccccacgcaaagggtggtcatttatgcaccctggccggctcacacaccttcacgaaggacttcctgtcaagaatggcacacgctatatcgcagtgagttttattgacccctag

SEQ ID NO: 129875 - DNA, 2214 bp, synthetic construct
  misc_feature 1..2214: note = Description of Artificial Sequence: Synthetic coding sequence
  source 1..2214: mol_type = other DNA
atggggggctgtacagtcaaaccccagctccttcttctcgctctggtgttacacccttggaacccctgtctaggtgccgactctgagaagccttcaagtatcccgacagacaagctgcttgtgataacagttgctaccaaagagagcgacggctttcacagattcatgcagtctgctaaatactttaactacacagtgaaagtccttgggcaaggagaagagtggcggggcggcgatggtattaatagcatcggtggggggcagaaagtccggcttatgaaagaagtgatggagcattatgccgatcaggacgatctggtcgtaatgtttaccgaatgctttgacgtcatatttgcaggaggaccagaggaggtcctaaagaagttccagaaagccaatcacaaagtggtcttcgccgccgatggcatcttatggcctgataagcgattagctgacaagtaccctgtggtccacatcggcaagagataccttaattccggaggctttattggttacgctccgtacgttaaccggatcgttcagcagtggaatctgcaggataatgacgatgaccagctattttacaccaaggtctatattgaccctcttaagcgcgaggcaattaatatcactctggaccacaagtgtaagatcttccagacactcaacggcgcggttgatgaggtcgtcctaaaattcgagaatggaaaagccagggccaagaacacattttacgaaacgctgcccgtcgctatcaatggtaacggtccaaccaagatactgttgaattactttgggaattacgttcctaactcgtggactcaagataacgggtgtaccttatgtgagttcgacacagtagatctttcagccgttgatgtccaccccaacgtatcgatcggggttttcatagaacagccaacgccatttctccctaggtttctagacatcctcctgacactggactatcccaaggaagcattgaagttgtttattcataacaaggaggtgtaccacgagaaggacattaaagtatttttcgacaaagcaaaacatgaaatcaagacaattaaaatcgtcggtcctgaggaaaacctgagtcaagcggaggctcggaacatgggaatggatttctgccggcaggatgagaaatgtgattattactttagcgtcgacgctgatgtggttcttactaaccccaggactctgaaaatcttgatcgagcagaaccgtaaaatcatagcgccactggtaaccagacatggcaaattgtggtccaacttttggggcgctctcagccctgatgggtattacgcaagatctgaggattacgtggatatcgtgcagggcaatcgggtcggagtctggaacgtcccttatatggctaatgtctacctgattaaggggaaaaccctccgctccgagatgaacgagcgtaattactttgttagagataaactggacccagatatggctctctgtaggaatgctcgcgaaatgggtgtcttcatgtatatcagcaacaggcacgagttcggcaggctgctgtctactgctaactataacaccagtcactacaataatgatctgtggcaaatctttgagaatccagtggactggaaggagaagtatatcaaccgggactactcaaaaattttcaccgagaacatagttgagcagccatgcccagatgttttctggtttcctatcttctcagagaaggcgtgcgacgagctggttgaagagatggaacactacggaaagtggtccggcggcaaacaccatgactccagaatctccggaggatacgagaacgtgcccacggatgacatccatatgaaacaagttgacctggagaatgtttggctccacttcatccgggaattcatcgcccctgtaactttaaaggttttcgctggatactacacaaagggctttgccttgcttaacttcgtggtcaagtattcaccagaaagacagcgatcgctgcgtccgcaccacgacgcttctacattcaccattaacattgccctgaacaacgtgggcgaggatttccagggtggggggtgtaaattccttcgctataattgttccatcgagtctccaaggaagggctggtcattcatgcatcctggtcgcctaacacatttacacgagggtctccccgtaaagaacggtacgcggtacatcgctgtctcctttatcgatccctag

SEQ ID NO: 129876 - DNA, 1257 bp, synthetic construct
  misc_feature 1..1257: note = Description of Artificial Sequence: Synthetic coding sequence
  source 1..1257: mol_type = other DNA
atgttagagaaccacattctccataagcgtatctacatactaacctttttctcccaacagatctttatcttgtgtcatgcacatttcatcttcttttttacagtacgggacttttgtcggcaagacgagaagtgcgactattatttcagcgtcgacgcggatgtggtgcttactaacccaagaacactgaagatcttgatcgaacagaatagaaagatcatcgctcctcttgttacacgtcacggtaagctgtggtccaatttttggggcgccctgtcccccgatgggtattatgcaagatccgaggattacgtcgatatcgtgcaggggaaccgagttggcgtgtggaacgtgccctacatggccaatgtctatctgatcaaggggaagacacttagaagcgaaatgaatgagagaaactacttcgttcgggacaaactggacccagatatggctctgtgccggaacgcgagagaaatgactcttcaacgcgaaaaagattctcccacccccgaaacattccagatgctgtcgccacccaagggtgtttttatgtacatatctaataggcatgagttcggcagactgctatcaacagcaaattacaacacatcgcactacaataacgacctttggcagatctttgagaaccctgtggactggaaagagaaatatatcaacagagactactctaagatctttacagagaatatcgtggagcagccgtgccccgacgtgttttggtttccaatatttagtgagaaggcctgcgacgagcttgtcgaagagatggagcattacgggaaatggtctggtggaaaacatcacgactctcgtatctccggcgggtacgagaatgtccctaccgacgacattcacatgaagcaagtggatctggaaaacgtgtggctgcactttattcgtgagtttatagccccagtgacactgaaggttttcgcggggtattatacaaaaggctttgcgctccttaatttcgtggtcaagtacagccctgaaaggcagcgatcccttcggcctcaccacgacgcttccacctttactatcaatattgcattgaacaatgtgggcgaagacttccagggcggcggatgtaagtttcttcggtataactgctctatcgaaagcccgaggaaaggatggagctttatgcacccgggaagattgacccacctgcacgagggtctgcccgtgaagaatggaaccaggtacattgctgtgagctttatagatccatag

SEQ ID NO: 129877 - DNA, 2112 bp, synthetic construct
  misc_feature 1..2112: note = Description of Artificial Sequence: Synthetic coding sequence
  source 1..2112: mol_type = other DNA
atgcagagcgctaagtactttaactacacagtgaaggtgctgggccagggagaggaatggcggggtggcgacggcattaacagcattggtggcggccaaaaagtcaggctgatgaaggaagtgatggagcactatgcagaccaagatgacctggtggtcatgttcaccgaatgttttgacgtcattttcgctgggggccctgaagaagtgttaaagaaattccaaaaggctaaccataaagtcgtcttcgccgcggatggcatcctgtggcccgataagcggcttgccgataaatatccagtggtacacatagggaaaagatacctcaacagcggcggcttcattggttatgcgccttatgtcaatcggattgtccagcagtggaacctccaggataatgacgatgatcagctattctacactaaggtctacatagacccactgaagcgcgaggctatcaatattacactggaccacaagtgcaagatttttcaaacgttaaacggggccgtggacgaagtggtcctgaaatttgagaacggtaaggcaagggcgaagaacacgttctacgagacgctccccgtcgccatcaacggcaacggtcccacaaaaattttgctcaactatttcggtaactacgtacctaatagctggacacaagacaacggctgtacactctgtgagttcgataccgtggatctttccgccgtcgacgtccacccgaatgtgtctattggtgttttcatcgagcagcccactcccttcttgccaaggtttttggatatcctgctgaccctggactacccgaaagaagccttaaagctctttatccataataaggaagtgtatcatgaaaaggatatcaaggtcttcttcgacaaagccaagcatgagataaagacaataaagattgtaggccctgaggagaatctgtcccaggctgaagccaggaacatgggaatggacttctgccgtcaggatgaaaaatgcgattactacttctccgtcgacgccgacgttgttttgacaaatccacgcaccctcaaaatcctgatcgagcaaaatcgaaagatcattgcacccttagtgacgaggcatggcaagctctggagcaacttctggggcgcattgtctcccgacggttattatgcacggagcgaggattatgtcgatatcgtccaaggcaaccgcgtgggggtttggaatgttccctatatggcaaacgtgtatcttattaaggggaagactctcaggagcgagatgaatgaacgtaactatttcgtgcgggacaaactggatcctgatatggctctgtgtcgcaacgcccgtgagatgaccctccagcgggagaaggatagccctactccagagaccttccagatgctatccccgcccaaaggcgtgtttatgtatatcagtaatagacatgagtttgggcggctgctctccacagctaattataacacatcccattataataatgacttgtggcaaatcttcgaaaatccagtggactggaaggagaagtacatcaaccgcgactatagcaagattttcactgagaacattgttgaacagccctgccctgatgtgttctggttccctatctttagcgagaaggcgtgtgatgaactggttgaggagatggagcactatgggaaatggtcgggagggaagcatcatgacagcaggatctctggagggtacgagaacgtccctacagacgatatccatatgaagcaggtggatttggagaacgtttggcttcatttcatcagggaattcattgcaccagtaactctcaaggtgttcgccggctactacaccaaaggatttgccctattgaattttgtggttaaatattctcctgagagacagcgctctctaagacctcatcacgacgcctccacattcactattaacattgccctgaataatgtcggggaggactttcagggcggaggatgcaaattcctgcggtataattgctcaatagagtctccaagaaagggctggagtttcatgcaccctggccgtctcacacacctgcacgaaggactacccgtgaaaaatgggaccaggtacatcgctgtttctttcatcgatccatag

SEQ ID NO: 129878 - DNA, 1092 bp, synthetic construct
  misc_feature 1..1092: note = Description of Artificial Sequence: Synthetic coding sequence
  source 1..1092: mol_type = other DNA
atggcgagcaagtcctggttaaattttttaacttttctgtgtggctccgccatcgggtttctgttgtgctcccagctcttttccattttgcttggggagaaagtggatacccagcccaatgtcttgcacaacgacccccacgctcgccacagcgatgacaatggccaaaatcatcttgaaggacaaatgaattttaatgccgattcatctcagcacaaggatgagaataccgatatcgccgagaatctttaccagaaggtccggattctgtgttgggtcatgacgggcccccaaaatcttgagaaaaaagccaagcacgtgaaagcaacgtgggcgcagcgatgcaacaaagtgctgtttatgtccagcgaggagaacaaggatttccccgccgttggcttgaaaacaaaagaggggcgagaccagttatactggaaaactatcaaagctttccagtacgttcatgaacactatttagaggatgctgactggttcctgaaagccgacgatgatacatatgtgatcctcgataacctccggtggctgctcagtaaatacgaccctgaggaaccgatctattttggtcgccgttttaagccctatgtgaagcagggctatatgagtgggggtgctggatatgttctgtccaaggaggcattaaagagattcgttgacgcctttaagacagataagtgcactcacagctcttcaattgaagacctggccttaggccggtgcatggagataatgaatgtcgaggccggggacagccgcgacactatcggtaaggaaaccttccaccccttcgtgcctgaacatcacttaattaaggggtatctgccccggacgttctggtactggaactacaattactatccacccgtcgagggccccgggtgttgttccgacttagctgtgtctttccattatgttgactccacaacaatgtatgagcttgagtatctggtgtatcaccttagaccctacggttacctctatagatatcaaccaaccctcccagaaagaattcttaaagagattagccaggccaataagaatgaggacaccaaggtgaaactggggaacccctag

SEQ ID NO: 129879 - DNA, 231 bp, synthetic construct
  misc_feature 1..231: note = Description of Artificial Sequence: Synthetic coding sequence
  source 1..231: mol_type = other DNA
atgacgagctctggtcccgggccacgcttcctgctactcctgccgctcttgctaccgcccgctgcaagtgcttccgatagaccaaggggccgagatccggttaatcctgaaaaactcctggtgattaccgtggccactgctgagaccgagggttacttaagatttctgcgctcagccgaatttttcaattatacggtacgcaccctggggctgggtgaagagtggcggtag

SEQ ID NO: 129880 - DNA, 732 bp, synthetic construct
  misc_feature 1..732: note = Description of Artificial Sequence: Synthetic coding sequence
  source 1..732: mol_type = other DNA
atggagaagtacgccgacagagaagatatgataatcatgtttgtggacagttatgatgtgattttggcgggaagccctacagagttgttgaaaaagttcgtccaatctggaagccgcttgttgttctccgctgagtctttctgttggcctgaatggggcctggccgaacagtaccccgaggtgggcactggtaaaaggtttctaaacagcggcggattcatcgggtttgcaaccaccatccaccagatcgtcaggcagtggaagtacaaagatgatgacgacgatcagctgttctacacgagactctacttggaccctggcctacgggagaagctctctctgaatttggatcacaaaagcagaattttccagaacctaaacggcgcactagacgaagtggtgctgaagttcgacagaaatagagtgcgcatcaggaatgtggcctatgatacgttgccgatcgtagttcatggaaacggaccaactaaacttcagctgaactacctgggcaattatgtgcccaacggttggacgcccgaggggggttgcggtttctgtaaccaggacaggagaaccctgccaggtggaccggcctcgccccctggggtgtcgggacgcgtgtgtggcacagcctactcagtgtccgcccccttacctgccgctgctgccacccctggcctctctcctcggcagggacatccatttcctgcgcagcagcggggactgccctag

SEQ ID NO: 129881 - DNA, 1740 bp, synthetic construct
  misc_feature 1..1740: note = Description of Artificial Sequence: Synthetic coding sequence
  source 1..1740: mol_type = other DNA
atggcagccaagagcgatggagccgctgcttctgcaagccccgatcccgagggggctgccgggggcgctcgggggagcgctggcgggagaggcgaagccgctgccgccgccggtccaccgggcgttgtgggagccggtgggcccggccctcgctacgagctgagggactgctgttgggtgctctgcgcgttactcgttttttttagtgatggcgctactgacctttggttggcagcttcctattacctccagaatcaacatacatatttcagcctgactctgttgttcgtgctgctgccgtccctggtggttcagctgctttcctttcgctggtttgtgtacgactacagtgaacccgcagggagccccggaccggcagtgtccaccaaggactcagttgcaggcggtgcagcaatatctaccaaggattcagcaggggcatttcgcaccaaagaaggttcccccgagcctggcccccagccagccccgagtagcgcttctgcctatagaaggcgctgctgccgcctatgcatctggctgctccagacgctcgtgcacttactgcagcttggccaggtctggagatatttgcgcgcactctatctcgggttacagtcccgctggaggggggagaggctccgtcggcacttctattggcagatgctcttcgaatctgcggatgtatcaatgctccgcctgctggaaacatttcttcgttcagcacctcaactggtactccagctgtcattattggtgcatcgggggggcgcccctgatctactcccagctctttcaacctctgcctcactcgttagtttggcgtggacactggccagctaccagaaggtgctgagagattctcgcgatgataaacgcccactgtcttataagggggctgtcgctcaggtgctgtggcatctgttttccattgctgccaggggtctggcctttgcattgttcgcatccgtgtataagctttatttcggtatatttatcgtggcgcactggtgcgtaatgactttttgggtgatccagggagaaaccgacttctgcatgagtaaatgggaggaaattatctacaacatggttgtgggaattatctacatcttttgctggtttaacgtgaaagagggacggagtagacggagaatgacactctatcactgcattgttctgctagaaaatgctgctctaaccgggttctggtactccagccgcaatttctccaccgatttctattctctcatcatggtgtgcgttgtggcatcttccttcgctcttggtatcttcttcatgtgcgtatattattgtcttctgcaccccaacggccccatgctaggcccgcaggcccccggctgcatcttcagaaaggcttccgaaccatgtgggccccctgccgatgccattactagcccccctcggtctctgccccgaaccactggggccgagcgggacggagcctcagccggcgaacgcgcggggacaccaacccctccagtcttccaggtacgccctgggctcccacctactcccgtggcccgcacgctacgcactgagggacccgtaatccggatcgatttgccgcgcaaaaagtaccctgcctgggatgcccacttcatagacaggaggctgaggaaaactatcctcgctctcgagtattcttcacctgctacgcccagactccagtacaggagcgtcggaacctcacaggaattgctggagtacgaaaccacggtgtag

SEQ ID NO: 129882 - DNA, 765 bp, synthetic construct
  misc_feature 1..765: note = Description of Artificial Sequence: Synthetic coding sequence
  source 1..765: mol_type = other DNA
atggcatggcaaggactggtattggcggcatgcttgctgatgttcccatcaacaacggcagactgcctgtctcgatgctctctgtgcgccgtgaagacccaggatgggccgaagccgattaaccctctgatctgtagtctgcagtgccaagctgccttgctgccttctgaggagtgggagaggtgccagtcctttctcagtttttttacaccgtccacactgggtctcaacgacaaggaagatttgggttctaaatccgtgggagaaggtccctatagcgaactggccaaattatctgggtcctttctgaaggaactagagaaaagcaaatttcttccctctatcagcactaaggaaaacacactgtccaaatctctggaggagaagctgagaggtctctctgacggattccgcgagggtgccgagtcagaattaatgagggatgcacaacttaatgatggcgcaatggaaaccggcacattgtacttggctgaagaggacccaaaggagcaggttaaacgatatggaggattcctccggaaataccctaaacgctcaagtgaagtcgcaggtgaaggggatggtgactctatgggccacgaggatctatacaaacggtacggagggtttctgcggagaattaggcctaaactgaagtgggacaatcaaaagcgctatggcggtttcctgcgccgccagtttaaagtggttactagatcgcaggaggatccaaacgcctactcaggtgagctgtttgatgcttag

SEQ ID NO: 129883 - DNA, 765 bp, synthetic construct
  misc_feature 1..765: note = Description of Artificial Sequence: Synthetic coding sequence
  source 1..765: mol_type = other DNA
atggcatggcagggcctcgtacttgctgcgtgcctgctcatgttcccaagcactactgctgattgcttgtccagatgttctttgtgtgctgtaaagacccaagatggacccaagccaattaatcccctcatttgttccctccaatgccaggccgcgcttctgccttcagaggagtgggaacgctgtcagagtttcttgtccttctttaccccatcaacactggggctgaacgacaaagaagatttggggtcaaaatcagtcggggaagggccatactctgaactggcaaaactgtctgggtcattcctgaaggagctcgagaagtccaaattcctcccctctatatctactaaagagaacactctctcaaaaagcctggaggaaaagctccgtggcttatctgatggtttccgagagggggctgagtcagagctaatgagggatgcccagctcaacgatggcgcaatggagaccggtacactctacctggccgaagaggatccaaaggagcaagtaaaaagatatggaggatttctgaggaaataccccaagagatcctcagaggtggcgggcgaaggcgatggagatagtatgggacacgaggacctgtataagcggtacggcggtttcttacggcggatacggcctaaattgaagtgggacaaccagaaacgctatggcggtttccttcggcgccaattcaaggtcgttacaagaagtcaggaggaccccaacgcatactccggagagctgttcgacgcctag

SEQ ID NO: 129884 - DNA, 804 bp, synthetic construct
  misc_feature 1..804: note = Description of Artificial Sequence: Synthetic coding sequence
  source 1..804: mol_type = other DNA
atggcccgtttcctcaccctgtgcacttggttactgctgctgggtcccgggctgttggccacagtcagagctgaatgctcccaggattgtgccacttgttcttaccggctcgtgcgccctgccgacattaacttccttgcttgcgtgatggaatgtgaaggaaagctcccctctctcaagatttgggagacttgtaaagaactgctgcagctttcgaagccagagctaccccaagacggcacgtccactctgcgcgagaatagcaagccagaggaaagtcatctgttagctaagcgatacggcggcttcatgaaaaggtacgggggcttcatgaagaaaatggacgaactctatcccatggagcccgaggaagaggcaaacgggagtgaaattctggccaaacgctacggcggcttcatgaaaaaagatgccgaggaggatgactccctagcaaactcctccgacttgcttaaagaattgctagaaacaggggataatcgagaacgaagtcaccaccaggacggttctgacaatgaagaggaggtgtcaaaacggtatgggggcttcatgcgcgggttaaagagaagcccgcagctcgaagacgaggccaaggagctgcagaaacgatacggcggcttcatgcgacgagtcggcagaccagagtggtggatggactaccaaaagcggtatggaggtttcctcaaaaggttcgcggaggccctacccagcgatgaggagggggaatcttactccaaggaggtgccagagatggagaagcgatacggcgggttcatgcggttttag

SEQ ID NO: 129885 - DNA, 804 bp, synthetic construct
  misc_feature 1..804: note = Description of Artificial Sequence: Synthetic coding sequence
  source 1..804: mol_type = other DNA
atggcacgcttcctcacactgtgcacatggctgctcctgctaggacccgggctcctggcgacagtgagggccgagtgttcccaagactgcgccacctgcagttacaggctggtacggcccgccgatatcaattttctagcgtgtgttatggagtgcgaaggtaaattgccatcactgaaaatatgggaaacctgcaaggagcttctccagctgtccaaacccgagctcccacaggacgggacaagcaccctaagggaaaatagcaaacccgaggagagtcacctgcttgcgaaaagatacggaggattcatgaagcgctacggaggctttatgaaaaagatggatgaactctaccctatggagcccgaggaagaagcaaacggctctgagatccttgcaaaaagatacggaggtttcatgaagaaagatgccgaagaagacgattccctagctaactcttctgacctcctgaaggagctattagagaccggtgataacagggagcgcagtcaccatcaggacggtagtgacaatgaagaggaggtcagcaaacgttatgggggcttcatgcggggacttaaaagatcgcctcaactggaggatgaagccaaggaactccaaaaaagatatggcggcttcatgcggcgcgtgggccgtccggagtggtggatggactatcagaagaggtacggcggctttctcaagagatttgctgaggccttgcctagcgatgaggaaggggagagttattccaaagaagttcccgagatggagaaacggtatggcggattcatgaggttttag

SEQ ID NO: 129886 - DNA, 318 bp, synthetic construct
  misc_feature 1..318: note = Description of Artificial Sequence: Synthetic coding sequence
  source 1..318: mol_type = other DNA
atggcccggttcctgaccctgtgtacgtggcttctcttgctgggccccgggctgctggccaccgttagggctgagtgctcccaggactgtgcaacctgcagttatcggctggtgaggcctgccgacattaacttccttgcctgtgtaatggagtgcgagggcaaattgccgagtctgaagatatgggagacgtgtaaggaactgctccagctgagtaaacccgagctcccacaagatgggacaagtaccctccgagaaaattcaaagcctgaagaaagccatttgctcgctaaaaggtacggcggtttcatgaagtag

SEQ ID NO: 129887 - DNA, 570 bp, synthetic construct
  misc_feature 1..570: note = Description of Artificial Sequence: Synthetic coding sequence
  source 1..570: mol_type = other DNA
atggctaggttcctcaccctgtgtacctggctgttgctgctggggcctggcctcctggctaccgtgagggctgagtgttcccaagattgcgctacctgtagctatcgtctagtgaggcccgccgacataaactttctcgcttgcgtaatggagtgtgaaggtaaactgccgagcctgaagatctgggagacttgtaaagagctgctccagctttcaaaacctgagctgccacaggacggcacctctactcttagagagaattctaagcccgaggaaagccatctgctggctaagcggtacgggggcttcatgaaacgctatggggggttcatgaaaaaaatggatgaactctaccccatggaaccagaagaagaagccaacgggtccgaaatccttgctaaacggtacggaggcttcatgaaaaaggacgccgaggaggacgacagtctcgccaactccagcgatctgctgaaggaattacttgaaacaggggataaccgcgagcggagccaccaccaggatggatctgacaacgaagaggaaaaaaagaagaagaaaagaaaggaatag

SEQ ID NO: 129888 - DNA, 423 bp, synthetic construct
  misc_feature 1..423: note = Description of Artificial Sequence: Synthetic coding sequence
  source 1..423: mol_type = other DNA
atggctggttggcagtcttacgtggacaacctcatgtgcgacggctgctgccaagaagcagcgatcgtgggatactgcgatgccaagtatgtgtgggctgcaactgcaggaggggttttccagagtataacacccatcgagatcgatatgatcgttggcaaagacagagagggcttttttactaacgggctgactctaggcgcaaaaaagtgtagcgttataagagatagcttatacgtggacggcgactgtacaatggacatcagaaccaagagccaggggggcgaacccacctataacgtggctgttgggagggctggaagagttctagtttttgtgatgggcaaagaaggagttcatggtggaggactcaacaagaaggcctacagtatggcaaagtatttacgggatagtggtttctag

SEQ ID NO: 129889 - DNA, 423 bp, synthetic construct
  misc_feature 1..423: note = Description of Artificial Sequence: Synthetic coding sequence
  source 1..423: mol_type = other DNA
atggcaggatggcagagttatgtggacaatctcatgtgtgacggatgttgccaggaagcagctatcgtaggttactgtgacgcaaagtatgtgtgggccgctactgctggaggggtattccagagtattactccgatcgagatcgatatgattgtgggaaaggatcgagagggcttcttcaccaatggtctgactctcggcgctaagaaatgtagcgtgatcagagactcactgtacgtagatggcgactgtaccatggacattcgcacaaagagtcagggaggagagcctacctataacgttgcggtggggcgggcgggcagggcccttgtcattgtgatgggaaaggagggggtccacggtggaacattgaataaaaaagcctacgaacttgccctgtacctccgccgctccgacgtgtag

SEQ ID NO: 129890 - DNA, 414 bp, synthetic construct
  misc_feature 1..414: note = Description of Artificial Sequence: Synthetic coding sequence
  source 1..414: mol_type = other DNA
atgggagactggaaagtgtatatctcagccgtgctcagagatcagaggatagatgatgtcgccatcgtgggtcatgctgataattcatgtgtgtgggcctctcgccctggcgggctgctcgccgccatctccccacaggaagttggggtgctgaccggaccagatcggcatacattcctgcaggcaggattatccgtcggcgggcgtcgctgctgcgtgattcgcgaccatctgttggcggagggcgatggtgttctggatgccaggaccaagggtctcgacgcgcgagcggtatgtgtcgggagggctccccgcgccttgctggtgctgatggggagacgcggcgttcacggcggcatcctgaacaagaccgttcatgaattgataagaggacttagaatgcaaggggcgtag

SEQ ID NO: 129891 - DNA, 1167 bp, synthetic construct
  misc_feature 1..1167: note = Description of Artificial Sequence: Synthetic coding sequence
  source 1..1167: mol_type = other DNA
atgaaatggatggtagtagtcttggtatgcctgcagctcctcgaggccgccgtcgttaaagtgcccctgaagaaatttaagtctattcgcgagactatgaaagaaaaggggttgctcggggagttcctccggacacataagtacgacccagcctggaagtatcggttcggcgacctcagtgttacctatgaacccatggcctacatggatgccgcctatttcggggaaataagcatcggcactcctccacagaatttcctcgtcctgtttgacacaggatcctctaacctgtgggttccaagtgtgtattgccagagtcaggcttgcacaagccactctcgttttaatcccagcgaaagcagcacctacagcacgaatgggcagaccttcagcctccaatacggatccggctccctgacgggcttcttcgggtatgacactctcacagtgcagagcatacaggtgcctaatcaggagttcggactgtcagagaatgaacccggcaccaacttcgtttacgctcaattcgacggaattatgggcctggcatacccggcactgagtgtggatgaagccactacggccatgcagggcatggtgcaggaaggggccctgacaagtcctgtcttctcagtgtaccttagtaaccagcaaggctccagcggaggagccgtcgtttttggcggagtggacagtagtttatacaccggacaaatttattgggctcccgtgactcaggagctgtactggcagattggaatagaggagttcttgattgggggccaggccagtggctggtgctcagaggggtgtcaggcgatcgttgacactgggacgagtctcctgactgtgcctcagcaatatatgtctgctctgctgcaagcgacaggggcacaggaggatgagtacggccagtttttagtaaactgtaatagcatccagaatctgccttctctcactttcattatcaatggcgtagagtttccactgccaccaagcagctacatcttgtccaacaacggatattgtactgtgggagtcgagcccacctacttgagctcccagaatgggcagcctctgtggattctaggggacgttttcctgcgcagctactatagtgtctatgacctggggaacaatcgtgtcggattcgccactgcggcctag

SEQ ID NO: 129892 - DNA, 315 bp, synthetic construct
  misc_feature 1..315: note = Description of Artificial Sequence: Synthetic coding sequence
  source 1..315: mol_type = other DNA
atgaagtggatggtagtggtgctggtctgtctgcagcttcttgaggcggcagtcgtcaaggtgcccctcaagaagttcaagtctataagagagacaatgaaagaaaagggtctgctcggggaatttttacgaacccataaatacgacccggcttggaagtaccgctttggggatctctcagtgacctacgaacccatggcgtatatggatgcggcgtactttggagaaatatccattggcaccccaccgcaaaactttctagtactgtttgatacgggctcctctcctctccccctggaccccgccccctcctag

SEQ ID NO: 129893 - DNA, 411 bp, synthetic construct
  misc_feature 1..411: note = Description of Artificial Sequence: Synthetic coding sequence
  source 1..411: mol_type = other DNA
atgaagtggatggtggtggtgctagtttgtctccaactgttggaggccgccgtggtgaaagttcccttgaagaagtttaagtcgatccgagaaacaatgaaggaaaagggattgttgggtgaattcctccggacacataagtacgaccctgcttggaagtatcgctttggcgacctcagtgtcacctacgagccaatggcatatatggatgtgcagtcaatccaggtgccgaaccaggagtttggtctgtcggagaatgagccgggcacaaacttcgtctacgctcagttcgacgggattatgggtctggcttatcccgcgctgtcagtggatgaagccacaacagcaatgcagggtatggtccaggagggagcactcacatcccccgtcttctccgtgtatctgtcttag

SEQ ID NO: 129894 - DNA, 948 bp, synthetic construct
  misc_feature 1..948: note = Description of Artificial Sequence: Synthetic coding sequence
  source 1..948: mol_type = other DNA
atgaaatggatggtcgtggttctggtgtgtctccaactgctggaggcagccgtcgtcaaagtgccgctgaagaagttcaaaagcattcgcgagactatgaaagagaaaggcctcctcggggagttccttcgcacgcacaagtatgacccagcgtggaagtacagattcggtgatctttccgtcacttacgaacccatggcatatatggacgcagcctacttcggcgaaatttcaataggcacaccaccccagaatttccttgtactattcgacaccgggtccagtaatttgtgggtgcccagtgtctattgtcaatctcaggcctgtacctctcacagcagattcaatccttccgagagttccacatattcaacgaatggtcaaacgttctctctacaatacggcagcggtagcttgacaggtttcttcgggtatgatacactgactgtgcagtccatccaggtcccaaatcaggagttcgggctatccgaaaacgagcctggcaccaacttcgtgtacgcacagtttgatggcataatggggcttgcctacccagccctctctgtagatgaagccacgacggccatgcagggaatggttcaggagggagctctgacctctcccgtgtttagcgtatatctttcaaacttggtcctggaaagttcggggctgggcccactcctcactcctagcagagcagcaccaccttccagtactctgcagctccccgagaaacctctggaacagacctggaatatactaaccccctttaccaaaacactcccagtgtcgaacctcagcagaaaggtgacttcttgggctggtgtgggcatccccgtcacatgcctgccagaggccgggtccggcggagaacggagagccgaatgtggcctaggagttccgacaacgagaggcccgcctcgctctcagcatcactcaggtgcttag

SEQ ID NO: 129895 - DNA, 543 bp, synthetic construct
  misc_feature 1..543: note = Description of Artificial Sequence: Synthetic coding sequence
  source 1..543: mol_type = other DNA
atgctctgcttattattaacactcggtgtcgccctggtttgcggagtccctgctatggacatcccacagaccaagcaggatctggagctgcctaaactcgccggcacctggcattccatggcgatggccacaaataatataagcctcatggcaaccctaaaggctcctttgagggtgcatattaccagtctgttgccaacaccggaagacaacctggagattgtgctgcatcggtgggaaaataatagctgcgttgagaaaaaagtgctaggagaaaagacagagaacccaaagaagttcaaaattaactacaccgttgcaaatgaagccactctcctggacaccgactacgacaatttcttgtttctgtgcttgcaggataccacaacacctatacagtctatgatgtgccagtacctagcaagagtgctcgtggaagatgacgagatcatgcaggggtttatccgggcctttcgacccttgccaaggcacctgtggtacctgctcgacttaaaacagatggaggaaccgtgccgattctag

SEQ ID NO: 129896 - DNA, 261 bp, synthetic construct
  misc_feature 1..261: note = Description of Artificial Sequence: Synthetic coding sequence
  source 1..261: mol_type = other DNA
atgttatgcctgctgctgaccctgggtgtcgctctcgtatgtggtgtacccgccatggatatccctcaaactaaacaagatctggagcttcccaaagacacgacaaccccaattcaatcaatgatgtgccaatacctcgcacgggtgctggtcgaagatgacgagattatgcaggggttcatcagagcgtttcgacccctccctagacacctgtggtatctgcttgacctgaaacagatggaagccccttgttggctgtag

SEQ ID NO: 129897 - DNA, 543 bp, synthetic construct
  misc_feature 1..543: note = Description of Artificial Sequence: Synthetic coding sequence
  source 1..543: mol_type = other DNA
atgctctgtctcctgcttaccctgggcgtggctctggtttgtggggtcccagcgatggatatccctcaaaccaaacaggatttggagctaccaaagctcgctgggacatggcacagcatggcgatggcaaccaacaatatctctctcatggcaacattgaaggccccactccgcgtgcacatcactagtctgctgccaacccccgaagataacctcgagattgtcctgcatcgctgggaaaacaactcatgcgttgagaagaaagtactgggcgagaaaactgagaatcccaagaaattcaaaataaattatacagtggcaaatgaggcaactttgctggatacagattacgataatttcctgtttctgtgtctacaggacactacgaccccaatacaatccatgatgtgtcagtatctagcacgagtgctggttgaggatgatgagatcatgcaggggtttatccgagccttccggccgttacctcggcacctctggtatctcctggacctgaagcaaatggaggaaccttgcagattctag

SEQ ID NO: 129898 - DNA, 438 bp, synthetic construct
  misc_feature 1..438: note = Description of Artificial Sequence: Synthetic coding sequence
  source 1..438: mol_type = other DNA
atgctctgcctcctactgaccctgggcgtggccttggtatgtggcgtgcctgctatggacattccccagaccaagcaggacctagaactgcctaaggcaccgctacgagtccacattacatctctgctcccaacacccgaggacaatcttgagattgtgctgcacagatgggagaacaattcctgcgtggaaaaaaaggtcttgggcgagaagaccgagaatcccaagaagttcaagatcaattgcaaagcctccggggccccacagctgagctggaaaccacagggacccagaaccgatcctgcatcaagtaccgctagagtcttggtggaggacgatgagatcatgcaggggtttattagagccttccgcccacttccacgccatttatggtacttgttggacctgaagcagatggaagagccctgccggttctag

SEQ ID NO: 129899 - DNA, 399 bp, synthetic construct
  misc_feature 1..399: note = Description of Artificial Sequence: Synthetic coding sequence
  source 1..399: mol_type = other DNA
ttgatggccacgctgaaagcccctctgagggttcacataactagtctgttgcctactcccgaggataatctggagatcgtgttacataggtgggagaacaattcctgcgtggagaagaaggtcctgggagagaaaactgaaaatcccaagaaatttaagatcaattacacagtggccaacgaggcgacactgttggacaccgactatgacaactttctgttcctctgtttgcaagataccaccacgcccattcagagcatgatgtgccagtacctcgccagagtgctggttgaagatgacgagataatgcagggcttcattcgggccttccgccctctgcctcgacacctctggtatctgttggacctgaagcagatggaggagccctgccgcttttag

SEQ ID NO: 129900 - DNA, 396 bp, synthetic construct
  misc_feature 1..396: note = Description of Artificial Sequence: Synthetic coding sequence
  source 1..396: mol_type = other DNA
tgagtgcctgccatggatattccgcagactaagcaggacttggagctgccgaaagccccactgcgcgtccatattactagcctcctgccaactcccgaagacaatcttgagatcgtgctccatcgttgggaaaacaacagctgtgttgagaaaaaagtgctgggcgagaagaccgaaaaccctaagaagttcaagatcaattgcaaggcctctggtgcccctcagctctcctggaagcctcaggggccccgaaccgaccccgcatcctcaaccgcacgggtgctcgtggaggacgacgagattatgcagggatttattcgcgccttccgcccactgccccgccacctctggtacctgctggacttaaagcagatggaggagccttgcagattttag

SEQ ID NO: 129901 - DNA, 381 bp, synthetic construct
  misc_feature 1..381: note = Description of Artificial Sequence: Synthetic coding sequence
  source 1..381: mol_type = other DNA
taaccactgcgtgtgcatatcacatccctgctacctacacctgaggataacctcgagattgtgctgcaccgttgggagaacaattcttgcgtggagaaaaaagttctcggagagaaaactgaaaaccccaaaaaattcaaaattaactatacagtggcgaatgaggcgacgctgctcgatactgattatgacaacttcctgttcctgtgcctgcaggacaccacaaccccgatccagtctatgatgtgccagtatctggcacgcgtgctagttgaagacgatgaaatcatgcagggctttattcgcgccttcagaccgcttcctagacatctttggtatttactcgatctcaaacaaatggaagagccatgtaggttttag

SEQ ID NO: 129902 - DNA, 102 bp, synthetic construct
  misc_feature 1..102: note = Description of Artificial Sequence: Synthetic coding sequence
  source 1..102: mol_type = other DNA
tgagaaatcatgcaaggattcattcgcgcatttaggccactcccccggcacctgtggtatttgttagaccttaaacaaatggaggaaccttgtcggttttag

SEQ ID NO: 129903 - DNA, 543 bp, synthetic construct
  misc_feature 1..543: note = Description of Artificial Sequence: Synthetic coding sequence
  source 1..543: mol_type = other DNA
atgttgtgtctcctgctgacactgggtgtggcactcgtgtgtggtgtgcctgcgatggacattccacagacaaaacaggatctagagttaccaaaactggcgggcacttggcatagcatggctatggccactaataatatttccttaatggcgacattgaaggctccactgcgcgtacacatcacctcactgctgccaacccccgaagacaacctcgagattgtgcttcaccgatgggagaataatagctgcgtggaaaagaaggtgctgggggaaaaaactgaaaacccgaaaaagttcaagattaattacacagttgctaacgaggcgacactgctcgataccgactatgataatttcctttttctgtgtctgcaggacaccacaaccccgatccagagcatgatgtgtcagtatcttgctcgagttcttgtggaggacgatgaaattatgcagggctttatccgcgccttccggccccttcccaggcacctgtggtaccttctggacctcaagcagatggaagagccttgtaggttttag

SEQ ID NO: 129904 - DNA, 510 bp, synthetic construct
  misc_feature 1..510: note = Description of Artificial Sequence: Synthetic coding sequence
  source 1..510: mol_type = other DNA
atgctgtgtctgcttctgactttaggcgtagcactcgtgtgcggggtgcccgccatggatattccccagaccaagcaggacctggaactgcccaaactggctggtacttggcattcaatggccatggccacaaacaatatttccttgatggcgacgttgaaggcaccactccgcgtccacatcacgagccttctgccaacccccgaggacaacctcgagattgttctgcacaggtgggaaaataattcatgtgtcgagaaaaaggtgcttggggagaaaaccgagaacccaaagaaatttaagattaactatacggtcgccaacgaagcaacgctgcttgacaccgactacgacaactttcttttcctctgcttgcaagatacaaccacacccatccagagtatgatgtgccagtaccttgaaagctggtggcggacgatgagatcctgtagagactcgtccggcctgtctggaccatgccccggcacatatgggacgtgctggacttag

SEQ ID NO: 129905 - DNA, 2274 bp, synthetic construct
  misc_feature 1..2274: note = Description of Artificial Sequence: Synthetic coding sequence
  source 1..2274: mol_type = other DNA
atgtcaagaaagatttccaaagagtccaagaaggtcaacatttcctcatccctcgagagtgaggatatttcactcgaaaccaccgttccaaccgacgatatcagctcatccgaggagagggaagggaaagtcaggatcacccgacagctcatcgagcggaaggagctgctgcataatatccaactactgaaaattgaactgtcacaaaaaactatgatgatagacaaccttaaagtggattatctcacaaaaatcgaagagctggaagaaaagttgaacgacgccctacaccagaaacagttgttaaccctgaggctcgataaccagctcgcatttcagcagaaggacgctagtaaataccaggagttgatgaaacaggaaatggaaaccattctgctgcgccagaagcagcttgaagaaacgaatctgcagcttagagagaaggccggcgacgtgcgccggaatctgcgagactttgaactgaccgaagagcagtacatcaaactcaaagcatttcctgaggatcagcttagcattcccgagtacgtaagtgtgcgcttctacgagctggtgaatccccttcgcaaggagatctgcgagctgcaagttaaaaagaatatcctggccgaggaattgagcaccaataagaatcagctgaaacaactgaccgaaacatatgaggaagacaggaagaactattcagaggtgcaaattcgatgccagaggctggctttggagctcgctgacactaaacagctgatccaacagggagattaccggcaggagaattatgacaaagttaagagtgagcgcgacgccttggagcaggaagtcatcgaactcagacgcaaacatgagatactggaggcctctcacatgatacagacaaaagagcggagcgaactgtctaaggaggtagttacattagaacagactgtaactttgttacagaaggacaaagagtacttgaaccgacagaatatggaactctccgtcaggtgtgcccatgaagaggatagattggagagactccaggcccaactggaagagtcaaagaaggctcgagaagaaatgtacgaaaagtacgtggcgtccagagaccattacaagacggagtacgaaaacaaactgcatgatgaacttgagcaaattagactgaaaaccaatcaagagattgatcagctgagaaacgccagcagggagatgtacgagcgggaaaatcgcaatttgagagaagcacgagacaacgcagtggctgaaaaggaaagagccgtgatggccgagaaagatgctctggaaaaacacgaccaactgcttgaccgataccgcgagctccagttgagcacagagtctaaagtgactgagttcctgcaccagtccaaacttaagagcttcgagagtgagcgcgtgcagttgctgcaggaagagactgcacggaacctgacccagtgccaactcgaatgcgagaaatatcagaagaagctcgaggtcctgacgaaggaattctactcactgcaggcaagctcagaaaagcggatcacagagcttcaggcacagaactcagagcatcaggcgaggctggacatctacgagaagctggagaaggaactcgacgaaattattatgcagactgccgagattgaaaacgaagacgaagctgagagagttctcttctcctatggatacggcgctaatgtgccaaccacagcaaaacggaggctaaagcagtcggtacacctggctcgcagggttctccagttggaaaagcagaattcgctgatacttaaggacctggagcacagaaaggatcaggttactcagctttctcaggagctggatagagctaattccctcctgaatcagacacagcagccatatcgttacttgatcgagagtgtgagacagcgggattctaagatcgattctctcacggaaagtattgcgcaacttgagaaggatgtcagtaacctgaataaggaaaagtcggcactcctgcagactaagaatcaaatggcactcgacctcgagcagttgctgaatcatcgtgaagaactcgcagccatgaaacagatacttgtgaagatgcatagcaagcacagcgagaattcattactgctgactaagactgaacccaagcacgtgacggagaaccagaaatccaaaactctcaatgtccccaaggagcatgaagataacatttttacaccaaaacccacattattcactaaaaaggaggccccagagtggagcaaaaagcagaaaatgaagacatag

SEQ ID NO: 129906 - DNA, 651 bp, synthetic construct
  misc_feature 1..651: note = Description of Artificial Sequence: Synthetic coding sequence
  source 1..651: mol_type = other DNA
ttccggacagcgaaagttgagaatgaggatgaggccgaacgggtcttattcagctatgggtatggggctaatgttcctacaacagccaaacgccggctaaagcagagtgttcacctggccagacgggtcctccagctggagaaacagaattctctgatcctgaaagacctcgagcataggaaggaccaagtgacacagcttagccaggagctggatagagccaacagtttactgaaccagacacagcagccttataggtaccttatcgaatctgtgaggcagagggatagcaaaatcgattcactgacagagtctattgcacaattggagaaagatgtgtctaacctgaataaggagaaaagcgcactgttgcaaactaagaaccagatggctctagatctggagcagttgctaaaccatcgtgaggagttggccgccatgaagcagatactcgtgaagatgcattccaaacacagcgaaaatagtcttctgctcaccaagacggagcctaagcatgtgactgaaaatcaaaagagcaaaactttgaacgttccaaaggagcacgaggacaacatctttacccccaaaccgaccctgttcaccaagaaggaagcgcccgaatggtcaaagaaacagaaaatgaaaacatag

SEQ ID NO: 129907 - DNA, 1245 bp, synthetic construct
  misc_feature 1..1245: note = Description of Artificial Sequence: Synthetic coding sequence
  source 1..1245: mol_type = other DNA
atgagtagaaaaatctccaaagagagtaagaaggtgaacattagctcttccctggagtctgaggacatcagcctggaaaccaccgtgccaacagacgacatctcctcatcggaagaacgtgaaggtaaagtcagaataacacggcagctgattgagcgaaaggaattgttgcacaatattcagctcctaaagattgaactgagtcagaagacgatgatgattgacaatctgaaagtggattacctcacaaagattgaagagctggaggaaaagctgaatgacgcactgcatcagaaacagttactgaccctccgcctggacaaccaactggcctttcagcagaaggatgctagtaagtaccaagagctaatgaaacaggaaatggaaacaatcctcttgcgccagaaacagctggaagagacaaacctgcagctgagggaaaaagccggcgatgttcggcgtaatctccgagatttcgaactaacagaagagcagtacatcaaactaaaggcctttccagaagaccagctatcgattccagagtatgtttctgtcagattctacgaactggttaaccctttgcgtaaggaaatctgtgagcttcaggtaaagaaaaatattctcgccgaggagttgagtactaataaaaaccaactgaaacaactgaccgagacttacgaggaagatcgcaagaattactcagaagtgcaaattcggtgccagagactggctctagagctggcagataccaagcagctcatacagcagggtgattaccgacaagagaattatgacaaggttaaaagcgagcgcgacgcgctcgaacaagaagtgattgaattgagacgaaaacacgagatattggaggctagccacatgattcagaccaaagagaggtctgaactgtccaaagaagtggtcaccctcgagcagacggtaacactgctgcagaaagataaagaatacttgaataggcagaacatggaactctctgtgcgatgtgctcacgaggaagaccggctggagagactgcaggcccagctggaggagtccaaaaaagcccgcgaagaaatgtacgagaagtatgtcgcgtcaagggaccactacaagactgaatatgagaacaagctgcatgatgaactggagcagatccgactgaaaacaaaccaagaaattgatcagctaagaaatgcgtctcgggaaatgtatgagcgggaaaatcggaagaagaggaagaaaaaatag

SEQ ID NO: 129908 - DNA, 1734 bp, synthetic construct
  misc_feature 1..1734: note = Description of Artificial Sequence: Synthetic coding sequence
  source 1..1734: mol_type = other DNA
atgaccgaactagctggtgcatcgtcgtcctgttgtcatcgcccggctggacgcggggccatgcagtctgtcctgcaccacttccagagactgcgaggaagggagggaggtagccacttcattaacaccagctcccctcggggagaagccaagatgtcaatcaccagcgacgaagtgaattttctggtgtataggtacctgcaggaatcagggttctcacactccgcctttacgttcgggatcgaatcccatattagccagtctaacatcaacggtactctagtaccacccgccgccctgatctccattctgcaaaaggggttgcagtacgtggaagcagagattagcattaatgaagatggcactgtttttgacgggcgccctattgagtcgttgagcctcatcgatgcagtaatgcccgacgtcgtccagacccgacagcaagctttcagggaaaagctggcacagcagcaagctagtgccgctgccgcagctgcagccgccacagctgccgctaccgccgccactactaccagcgctggcgtgagtcaccagaacccatctaaaaacagagaggcgaccgtgaatggcgaagagaatagggcccatagcgtgaataaccatgctaaaccaatggaaatcgatggggaggtggagattcccagttcaaaggccacagtccttcgcggtcacgaatcggaagtcttcatctgcgcctggaatcctgtgtccgatctcctggcttccggcagcggagactcaaccgcccgaatctggaatcttaatgaaaactcaaacggaggatccacccaattggtgctgcgccactgcatacgagaaggaggccacgacgtcccgagtaataaggacgtcacgtctcttgattggaacaccaacggaactttgctggctacgggatcctatgacggcttcgcccgcatctggaccgaggatggtaacctggcatcaactttgggccagcataaaggccccatctttgcactaaagtggaatcggaaggggaactatatcctttcagccggcgtggataagactaccattatctgggacgcgcacacaggtgaagccaagcagcagttcccattccatagtgcccccgcgcttgatgtcgactggcagaacaataccacatttgcatcatgtagtaccgatatgtgtatccacgtgtgtcggttaggatgtgaccggcccgtgaagacattccaggggcacactaacgaagtgaacgccatcaagtgggatccatctgggatgctcctggcctcgtgtagtgatgacatgaccttgaaaatctggtccatgaaacaggaggtctgcatccacgacttacaggcccacaacaaggaaatttataccatcaaatggtcccctaccggccccgccacttccaaccccaacagcaacatcatgcttgcttcagcatcttttgatagtaccgtgcgcttgtgggatattgaaagaggggtgtgcacgcacaccctcactaagcaccaggaacccgtgtactccgtcgcattctcccccgatggcaagtatctggcttccggctcttttgataagtgtgtgcatatttggaatactcagtccggtaacctagtccactcgtaccgcggcacgggcgggattttcgaggtctgctggaacgctaggggagataaggtgggggccagcgcctcagatggctcagtctgcgtgttggatctgcgcaagtag

SEQ ID NO: 129909 - DNA, 432 bp, synthetic construct
  misc_feature 1..432: note = Description of Artificial Sequence: Synthetic coding sequence
  source 1..432: mol_type = other DNA
atggcagctgaggatgtggttgcaactggagcagaccccagcgacttggagagcggaggattgctccacgagattttcacttccccactaaatttattactgttaggcttatgcatctttctgctgtataagattgtcaggggtgaccaaccagctgccagcggcgattccgacgacgatgagccacctcccctgccccggctaaaacgtagagattttactccagccgagcttaggcgctttgacggggtacaagacccaaggattctcatggctattaacggaaaggtgtttgatgtgaccaaaggacggaaattctacgggccagttaagtatcatcacgttggtaaactgttaaaagaaggtgaagaacctacagtgtattccgacgaggaggagcccaaggatgaaagtgcgcgtaaaaatgattag

SEQ ID NO: 129910 - DNA, 672 bp, synthetic construct
  misc_feature 1..672: note = Description of Artificial Sequence: Synthetic coding sequence
  source 1..672: mol_type = other DNA
atggccgccggcgacggggacgtcaagctggggacacttggaagtggttccgaaagctctaacgacggtggaagcgagtctcctggggatgctggcgccgcagccgaaggcggtggatgggcagcagctgcattagcattgttgaccggagggggcgaaatgttgttaaacgttgctttagtcgccctcgtgctgctcggcgcatacaggctgtgggtgcggtggggtaggcgaggactgggcgcgggagcaggagccggtgaggagagccctgcaacatctctaccccggatgaaaaaaagagatttttccctggaacaactacggcaatacgatggaagtcgtaacccacggatcctgctagccgtgaacggtaaagttttcgatgtgactaaaggatctaagttctacggccccgctggcccatatggaatctttgccggccgcgacgcctcacgcggtctcgcgaccttctgcctcgacaaagacgcactgcgcgacgagtatgacgaccttagtgacctaaatgctgttcagatggagtccgtgcgggagtgggagatgcagttcaaggaaaaatatgattatgttggaaggctgctaaagccaggggaagagccttccgagtacacagacgaagaggataccaaggatcacaataaacaggactag

SEQ ID NO: 129911 - DNA, 402 bp, synthetic construct
  misc_feature 1..402: note = Description of Artificial Sequence: Synthetic coding sequence
  source 1..402: mol_type = other DNA
atggctgccggagacggagacgttaagcttggcaccttaggctcaggtagtgaatcttctaacgatggcggcagtgagtcacctggagacgcaggagctgctgccgaagggggtgggtgggccgccgccgccctggcgttgttgacaggaggcggtgaaatgctgctcaatgtggccctggtggccctcgtactgctgggagcgtaccgactgtgggtgcgctggggccgaagaggtctcggagctggagctggggccggtcttcagcttggggccgccgccccggttcggagacttccgcaacccgctcacccagctcggggacaatgggagtctctgcgtcgggatcaacggcagcaggttctgagacccgggggcagcatctggaacatttgctggtag

SEQ ID NO: 129912 - DNA, 744 bp, synthetic construct
  misc_feature 1..744: note = Description of Artificial Sequence: Synthetic coding sequence
  source 1..744: mol_type = other DNA
atgggcggagctggcaggggcgttggcgaaggacgaggccgcggaggcggcggtcgcaggtggcgggcggtgatggcagccggggacggagatgtgaagttgggtactctgggctcggggtccgagagctctaacgacgggggtagtgagtctccaggggacgccggcgccgcagccgagggcggtgggtgggccgccgccgccttagcgcttctcacagggggaggagaaatgctgctgaacgtggccctggtagctctcgtgctgcttggggcatatagactttgggtcagatgggggcgaaggggactcggggctggggcgggggccggagaggagagccctgccaccagtctgcctcgcatgaaaaagcgggatttctcgctagaacagctcagacagtacgatggttccagaaatccaaggatactactggctgtcaacggcaaagtgttcgatgttacaaagggatccaaattttatggaccagccggcccatatggaatttttgccggtagggacgcatctagaggtcttgccaccttttgtttggacaaggacgctctgcgtgacgagtatgatgatttgagcgacttaaacgctgtgcagatggagagtgtgcgcgaatgggagatgcaattcaaggaaaaatatgactacgtgggccgcctcctgaaacccggcgaggagccctcggagtacaccgatgaggaggatacgaaagatcataacaagcaggattag

SEQ ID NO: 129913 - DNA, 1041 bp, synthetic construct
  misc_feature 1..1041: note = Description of Artificial Sequence: Synthetic coding sequence
  source 1..1041: mol_type = other DNA
atggccatggcacagaaactgagccacctgctccctagcctccgacaggtgatacaagaaccccagctaagcttacagcccgagcctgtttttaccgtcgacagagctgaagtaccccccctgttctggaagccttatatctatgcgggttataggcccttgcatcagacttggcggttttatttccggacactgtttcaacagcacaacgaggctgtcaacgtgtggactcacctgctggccgcgctcgtactcctgcttaggctggctttgttcgtggagaccgtggacttttggggcgacccccacgccctcccacttttcattatagtcttggcatcctttacttatctttctttttcagctctggctcatctgctgcaggctaagagtgaattttggcactatagcttctttttcctggattacgtaggggtagccgtctaccagtttggaagtgcgctggcccatttctactatgctatcgagcccgcatggcacgcccaggtccaagcggtgtttttgcccatggccgctttcctggcatggttgagctgtattgggagctgttataataaatacatccaaaaacctggactgctgggtcgaacctgtcaagaagtgccatccgtcctggcttatgcgctcgacatcagtcccgtcgtgcatcgtatattcgtgagcagcgacccaacgaccgacgatcccgcccttttatatcacaaatgtcaggttgtgttcttcctccttgctgcggcattcttcagcacattcatgcccgaacgttggtttcccggctcctgtcacgtgttcggtcagggacatcagctcttccatatctttctcgtcctgtgtacgctggcacagttagaagctgtggctctcgactacgaagcaaggcggcccatatacgagccactgcacacacactggcctcataattttagtggtttgttcctgttgacagtcggctcaagcattcttaccgcctttcttctgtcgcaattagttcaaagaaaacttgaccagaagaccaagtag

SEQ ID NO: 129914 - DNA, 867 bp, synthetic construct
  misc_feature 1..867: note = Description of Artificial Sequence: Synthetic coding sequence
  source 1..867: mol_type = other DNA
atgcagatcccccaggctccttggcctgtggtctgggcggtgctgcagttgggctggcggcctggatggttcttagacagcccggatcgcccatggaacccccctacctttagtccagctttgctagtggtcacggaaggagataatgccaccttcacttgctcattcagcaatacttccgaatcattcgttttgaactggtatcgtatgtctccaagcaatcagacagataaacttgcagcctttcctgaagaccgttcacagcctggtcaggactgtcggttccgggtgacgcagcttcctaacgggcgggattttcatatgtccgtcgtgcgagccaggaggaacgatagcggaacttatctttgcggcgccatttccctcgcccccaaggcccaaatcaaagagagcctacgagccgaactccgcgttactgaaagaagggctgaggtgcccacagcccatccctctccaagtcctagacccgctggacagttccagaccttagtcgtgggtgtggtcggcggcctgctgggctccttggttttgcttgtgtgggttctagctgttatttgctcaagggccgcccgtggcactattggtgccagacgcacaggacaacctcttaaggaggatcctagtgctgttccagttttttctgtcgattacggagagcttgattttcagtggcgagaaaagactcccgagcccccagtcccctgcgtgcccgaacagaccgaatacgcaacaatcgtctttccgtcagggatgggaacgagttctccagcccgacgaggctctgccgacggacccagaagcgctcagcctctgagacccgaagacgggcactgttcttggcctctgtag

SEQ ID NO: 129915 - DNA, 540 bp, synthetic construct
  misc_feature 1..540: note = Description of Artificial Sequence: Synthetic coding sequence
  source 1..540: mol_type = other DNA
atgcagatccctcaggccccctggcctgtcgtgtgggccgtcctacagctgggctggagaccaggatggtttctggacagccccgaccgcccttggaaccccccaacattttcgcctgcactcctggtggttactgaaggcgacaatgcgacattcacatgttccttttccaatacctccgagagcttcgttctgaattggtatcggatgtccccttctaatcaaaccgacaaactggcggctttccccgaagaccgtagtcagccaggtcaggattgccggtttcgagtgacccagctccccaacggacgcgactttcacatgagcgtggtccgcgccaggcggaatgactccggcacgtacttgtgtggggccatcagtcttgcgccgaaggctcagattaaggaatccctccgagcagaactccgggtgactggtaccatcggcgcccggcggactggccagcctctgaaggaagatccttcagctgtgccggtcttctccgttgattacggtgagctggacttccagtggcggtag

SEQ ID NO: 129916 - DNA, 639 bp, synthetic construct
  misc_feature 1..639: note = Description of Artificial Sequence: Synthetic coding sequence
  source 1..639: mol_type = other DNA
atgcgaatgaccatggaggagatgaagaacgaggccgagaccacttctatggtctccatgcctctctacgcagtcatgtacccagttttcaacgaactggaacgcgtaaatctatctgctgctcagacacttagagctgccttcataaaggccgagaaagagaaccctgggttaactcaagacataattatgaaaattttggagaagaaatcagtggaggtgaatttcacagagagtctgttaagaatggctgccgatgatgtggaggagtatatgattgagcggcccgagcccgagttccaagacctgaatgaaaaagctcgcgcattgaaacagatactttccaaaataccagatgagattaatgacagagtgcggttcttacagaccataaaggatatcgctagcgcaatcaaggagttactggacaccgtcaacaatgtgttcaaaaaataccaataccagaacaggcgggcgctggagcatcaaaagaaagaatttgttaagtattcaaagtccttttccgacaccctgaagacttattttaaggacggaaaggccattaatgtgtttgtgagcgcaaatagattgatccatcaaaccaacctgatccttcagacattcaaaaccgtggcgtag

SEQ ID NO: 129917 - DNA, 639 bp, synthetic construct
  misc_feature 1..639: note = Description of Artificial Sequence: Synthetic coding sequence
  source 1..639: mol_type = other DNA
atgagaatgactatggaggaaatgaagaatgaggccgagaccacctccatggtgtccatgcccctgtacgcggtcatgtaccccgtatttaatgagctggaacgagttaacctgagtgccgcccagacattgcgggctgctttcattaaggcagagaaagagaatccgggccttacccaggacattatcatgaagattctagaaaagaaatccgtcgaggtgaactttaccgaatcactgctgaggatggcggctgatgatgtagaggagtatatgattgaacgtccagaacctgaattccaggacttaaacgagaaggcacgagcccttaagcagatactgtctaaaattccggatgagattaatgatcgcgtgcgatttcttcagaccataaaagatattgcttccgcgatcaaagagctcctcgacactgtgaacaacgtcttcaagaagtaccagtaccaaaatcgcagggcgcttgaacatcagaagaaagagtttgtgaaatatagtaagtccttctcagatacgctgaagacctacttcaaggacggcaaggccatcaacgtatttgtcagcgccaatcgtctgatccatcagacaaatctgatcctgcagacctttaaaacggtggcttag

SEQ ID NO: 129918 - DNA, 441 bp, synthetic construct
  misc_feature 1..441: note = Description of Artificial Sequence: Synthetic coding sequence
  source 1..441: mol_type = other DNA
atgcgtatgactatggaggaaatgaaaaacgaagcagagaccacttcaatggtaagcatgcctctgtacgcggtgatgtaccccgtgtttaacgagcttgaaagagttaacctaagcgcagcccagaccctgcgggcagccttcattaaggctgagaaggagaaccctggactgacccaagatattatcatgaagattcttgaaaagaaaagtgtggaagtaaattttaccgagagtttgctcaggatggctgctgacgatgtggaggaatatatgatcgagaggccagagcccgagtttcaggatctaaacgagaaggcacgggctctgaagcagatcctgagtaaaattcctgacgaaattaacgaccgcgtgcgattcctgcagactatcaaggacatcgctagcgccattaaagagttacttgataccgtgaattag

SEQ ID NO: 129919 - DNA, 240 bp, synthetic construct
  misc_feature 1..240: note = Description of Artificial Sequence: Synthetic coding sequence
  source 1..240: mol_type = other DNA
atgagaatgacgatggaagagatgaagaatgaagcagagacaacctccatggtaagcatgcccctgtacgctgtcatgtaccccgtgtttaacgagcttgagcgcgtaaacctgtccgccgcgcagactttacgggccgctttcattaaggccgaaaaagagaaccctggcttaactcaggatataataatgaagatcctggaaaaaaagtccgttgaggtcaactttaccgagtcttag

SEQ ID NO: 129920 - DNA, 639 bp, synthetic construct
  misc_feature 1..639: note = Description of Artificial Sequence: Synthetic coding sequence
  source 1..639: mol_type = other DNA
atgcggatgaccatggaagaaatgaagaacgaagctgaaaccaccagcatggtttcaatgcctctgtatgctgtcatgtacccagtctttaacgagctggagagggtgaatctgtccgcggcccagacattgcgagccgcttttattaaggccgaaaaggaaaatcccgggctcacacaggacataatcatgaaaatattggagaagaaaagcgtggaggtgaactttacagaatccctcctccgcatggcggcggacgacgttgaggaatacatgattgagcgacctgaaccggagtttcaagacttgaatgagaaggcccgggcactgaagcagatcctgagcaagatacctgatgagatcaacgaccgtgtgcgcttcttgcagacaattaaagatatagctagcgcgatcaaggagttattggatacagtgaataacgttttcaaaaagtaccaataccagaataggcgtgcactagaacaccagaagaaggaatttgtgaagtacagcaagtccttctctgatacactgaagacctacttcaaggacggaaaggccattaacgtgttcgtaagcgccaaccgcctcattcaccagacaaacctcattctacaaacctttaagaccgtggcatag

SEQ ID NO: 129921 - DNA, 639 bp, synthetic construct
  misc_feature 1..639: note = Description of Artificial Sequence: Synthetic coding sequence
  source 1..639: mol_type = other DNA
atgcgcatgactatggaggaaatgaaaaatgaagcagaaactaccagtatggttagcatgcccctgtacgccgttatgtacccagtgttcaatgaacttgaaagggtgaatcttagcgctgcacagacattacgggctgcattcattaaagcggagaaggagaatccaggactcacccaggacattatcatgaagattctcgaaaaaaaatcagtggaagtgaattttaccgaatccctgctcagaatggcagccgacgacgtcgaagagtatatgattgagcgccctgaacccgagtttcaggacttgaacgagaaagcacgcgccctgaagcagatactaagtaaaatcccagacgagatcaacgatcgggtaagattcctccagactataaaggacatcgcaagcgccatcaaggagttgttggataccgttaacaacgtgttcaaaaagtatcagtatcagaacagacgggccttggaacaccagaagaaggaattcgtgaagtactccaaatcatttagtgacactctgaaaacatattttaaggacggaaaggcaatcaatgtgttcgtctcagcaaaccgcttgatccatcagacaaatctgattctccaaactttcaagactgtagcatag

SEQ ID NO: 129922 - DNA, 609 bp, synthetic construct
  misc_feature 1..609: note = Description of Artificial Sequence: Synthetic coding sequence
  source 1..609: mol_type = other DNA
atgcgcatgaccatggaggagatgaaaaatgaagccgagacaactagtatggtgtcaatgcccctatacgctgtgatgtaccccgtctttaacgagctggaacgggtcaatctgagtgccgcccagacccttcgggctgcctttattaaagccgaaaaagagaatccagggcttacacaagatattatcatgaaaattctcgaaaagaaaagcgtcgaagtcaacttcacagagagcctcttgaggatggcagctgatgacgtggaggagtacatgatcgaacgtcctgaaccagaattccaggacttgaatgaaaaggcccgcgctctcaagcagatcttgagcaagatccctgatgaaattaacgaccgcgtcaggttcctccaaacaataaaagatattgcctctgcaataaaagagttattggataccgtgaataacgtctttaagaagtaccagtaccagaaccggcgggcccttgaacatcagaagaaagagtttgtcaaatatagtaaaagcttttctgacaccttgaaaacttattttaaggatggaaaggcgattaatgtctttgtgagtgccaatcgcctcatccaccagactaactag

SEQ ID NO: 129923 - DNA, 561 bp, synthetic construct
  misc_feature 1..561: note = Description of Artificial Sequence: Synthetic coding sequence
  source 1..561: mol_type = other DNA
atgcgcatgactatggaagagatgaagaacgaggcagaaacgacaagtatggtgtccatgcctctgtatgccgtgatgtacccagtgtttaatgaactggagagagtaaacttgagtgctgcccagacactgcgtgccgcatttattaaagccgaaaaagagaacccagggctgacccaggacataatcatgaagatactcgaaaagaaatctgtggaggtgaacttcactgagtcactcttgagaatggctgccgatgacgtggaggaatacatgattgaaaggcctgagcctgagtttcaagacctcaacgaaaaggctagggctttaaaacagatcctgagcaaaatacccgacgaaatcaacgaccgggtcaggttcttacagacaatcaaggacattgcctcagctatcaaggagctcctggatacagtgaacaatgtgttcaaaaagtaccaatatcagaatcgccgagcactggaacaccagaaaaaggaattcgtcaagtattcaaagtccttcagcgacacactcaaaacctatttcaaagacggaaagtag

SEQ ID NO: 129924 - DNA, 405 bp, synthetic construct
  misc_feature 1..405: note = Description of Artificial Sequence: Synthetic coding sequence
  source 1..405: mol_type = other DNA
atgcgtatgactatggaagaaatgaagaacgaggccgagactacaagcatggtgagtatgccactatatgctgtaatgtaccccgtatttaacgaactggaacgggtgaacctgagtgccgcgcagaccctcagggctgcattcattaaggctgagaaggaaaatcccggtctcacgcaagacattataatgaaaatcctggaaaaaaaaagcgtggaagtcaacttcacagagtctctgttaaggatggcagccgatgacgtcgaggagtacatgatcgagcgccccgaacccgaattccaggatctgaatgagaaggcacgggctttaaagcagatcctttctaagatcccagacgagatcaatgacagggttcgctttctccagacgatcaaggatatctag

SEQ ID NO: 129925 - DNA, 639 bp, synthetic construct
  misc_feature 1..639: note = Description of Artificial Sequence: Synthetic coding sequence
  source 1..639: mol_type = other DNA
atgcgaatgacgatggaagagatgaagaatgaggctgagactacctccatggtaagtatgcccttgtatgctgtgatgtaccccgttttcaacgagctggagcgggtgaacctgagcgctgcacagactctgagggctgctttcatcaaggctgagaaggaaaatcccggcctaactcaggatattatcatgaagatcctggagaaaaaaagcgtggaagtgaattttacagagtccttactccgcatggcagccgacgatgtcgaggaatacatgatcgagcgccccgagccagagtttcaggacctgaatgagaaagcgcgggccctgaagcagatcctcagtaaaattccggatgaaattaacgatcgcgtgcgattcctgcaaaccattaaggacatcgcttcagctatcaaggagcttctggacactgttaataacgtgttcaagaaataccagtaccagaaccgtagggcactggaacatcaaaaaaaggaatttgtcaaatacagcaagtccttctctgacactctgaaaacctactttaaagacggcaaagccattaacgtgttcgtctctgcgaatagactgatacatcagaccaacctgattttacagactttcaaaaccgttgcctag

SEQ ID NO: 129926 - DNA, 5616 bp, synthetic construct
  misc_feature 1..5616: note = Description of Artificial Sequence: Synthetic coding sequence
  source 1..5616: mol_type = other DNA
atggccaacttagaagagagttttcccagaggaggcacccgtaaaatccacaaacctgagaaagcgttccagcaatcagttgagcaggataatctgttcgatatttccaccgaggaaggatccaccaaaagaaagaaaagccaaaagggaccagctaaaacgaagaaattgaaaatcgaaaagcgcgagagcagcaagtctgcccgagaaaagtttgaaattctttccgttgaatctttatgcgaagggatgcgaatcctcggctgcgtgaaagaggtcaacgagcttgagttggtgatttccctgcccaacggactccaagggttcgtgcaggtcacagaaatatgtgatgcatacacgaaaaaattgaacgaacaggttacccaagaacagcctctgaaggatcttctacatttgcccgaattgttttctcccgggatgttggttcgctgcgtggtaagttctttggggatcactgaccgcggcaagaaaagcgtcaagctgtccctgaaccccaaaaatgtcaacagggtgctgagtgccgaggcccttaaacctggaatgctgctgactggcaccgtgtcttctttggaggatcatgggtacttggtggatattggcgttgatgggacaagagcctttttacctctccttaaggcgcaggagtacatacgacagaagaacaagggcgctaaattgaaagtgggtcagtacctgaattgcattgtcgagaaggttaagggcaacgggggagtggttagtctgagcgttggacacagtgaagtgtcaactgctattgctacagagcaacagtcttggaatttaaacaacttgctcccgggtttagtggtcaaagcgcaggtgcagaaggtgacaccatttggactgactctgaattttcttactttcttcactggtgtggttgattttatgcatctggacccaaaaaaggccggtacatacttctctaatcaggctgtaagagcatgtattctttgtgtccatcccagaactagagttgtgcatctgtcgctgcggcccatttttttgcagccaggacgccctctcacacgcctctcttgtcaaaacctgggagctgtgttggacgacgtccctgttcagggtttcttcaaaaaggccggagccactttccggcttaaggacggggtgctcgcttatgctaggctctctcacctcagcgatagtaaaaacgtattcaatcccgaggctttcaagcctggcaatacgcacaagtgcaggattatagattattctcaaatggatgaactagcattactatcgctccgcacttcaattatagaagcacagtatctcaggtaccatgacatagagccaggagctgttgttaaaggcaccgtactgaccattaagtcctacggaatgctggtgaaggtcggcgaacagatgagaggtctggtgcctcccatgcacctcgctgatattctgatgaaaaacccagaaaaaaaatatcacatcggagatgaagtgaagtgtcgagtacttctgtgtgacccggaggcaaagaagctgatgatgaccctgaaaaagaccctgattgagagcaaactgccagtgatcacctgttatgctgacgccaagcccgggttgcagacacacgggttcatcatccgagtgaaggattacggctgcattgtgaaattttacaataacgtccagggactggttcccaaacacgaactcagtaccgaatacatcccagatccagaaagagtcttttacactggtcaagtcgtcaaggtcgtggttctcaattgcgaacctagtaaggaaagaatgcttctatcctttaaactgtcttccgatcccgagcccaagaaagagccagccggacattctcaaaagaagggaaaggccatcaacattggacagctggtcgatgtgaaggtgctggagaagacaaaagacggacttgaagtggctgtattgcctcataatatacgggcctttctgcctacatcccatctgagtgaccatgttgccaacggacccctgctccatcactggcttcaggccggggacatattgcatcgggttctgtgcctgagtcaatccgaaggccgtgtgctgctttgccgcaaaccagcactggtgagtacagtcgagggcggacaggaccccaaaaacttttcagagattcaccccggaatgctccttatcggattcgtgaaatctatcaaagactacggagtgtttattcagttcccttctgggctttctggcctggcccctaaggctataatgtctgataaattcgtcaccagtacatccgaccatttcgtcgaagggcagacagtcgccgcaaaggtgacaaatgtcgacgaagaaaagcaacgaatgctgctttctctgaggttatcggattgtgggcttggagatctcgccatcactagccttttactgctcaatcagtgcttggaagaattacagggagtgagatcattgatgtccaaccgcgattccgtcctgatccagacgttagcagagatgactccggggatgttcctggacctggtcgtgcaagaggtgctggaggatggctctgtcgtcttctcaggtgggcccgttccggacctggtattaaaggcctcccgataccatcgtgccgggcaggaggtggagagcggtcagaaaaaaaaagtagtgatactgaacgtggacttgttaaagcttgaggtacacgtatccctccaccaggacctcgtcaataggaaggcacgcaagcttagaaagggcagcgaacaccaggcaatagtgcagcatttagagaagagcttcgccatcgctagtttagtggagacgggtcacctcgccgcgttctcgctgactagccatctcaacgacacttttcgcttcgactctgagaaacttcaggttggtcaaggagtctctctgaccctgaagaccaccgagcctggcgtaacaggtctgctccttgccgtggagggccccgccgccaaaagaaccatgaggcccacacaaaaggattcagaaaccgtcgatgaagatgaggaggttgaccccgctctgacagttggcactattaagaaacacacgctgagcatcggcgacatggtcactggaaccgtgaagagcatcaaacccacccatgtagttgtgacactagaggatggtattattggctgtatccacgcatcccacatccttgatgatgtgcccgaaggaacctcccctacaaccaagctgaaggtcggaaaaaccgtgacggcgagagttatcggaggaagagacatgaagacattcaagtacttacctatctcccatccccggttcgtaagaaccatcccagaattgagtgtgcgacctagcgagctggaagacgggcacactgccctcaatacgcactcggtcagtcctatggaaaaaatcaaacagtatcaggccggtcagaccgttacctgtttcctgaaaaagtacaatgtggtgaaaaaatggctggaggtggaaattgctcctgatattcggggaaggattccgcttctgcttacctcactcagcttcaaggtgctcaaacaccctgataagaagtttcgcgtgggacaggcgttgcgagctaccgtggttggccccgattcaagtaaaacactgctgtgtctttcactgacaggcccacacaaactggaggagggcgaggttgccatgggcagggttgtcaaggtgaccccaaacgagggactgaccgttagtttcccctttggcaagatcggaacagtctctatttttcatatgagtgattcttattccgaaacacctctagaggacttcgtgcctcagaaggtagtccgctgctacattctttctaccgcagataacgtccttaccttaagcctgcgaagttcccggaccaaccctgagaccaaaagcaaagtggaagaccccgaaatcaactctattcaggatataaaggagggccaacttttgcgtggctacgtgggctcgattcaaccgcacggagtcttttttaggttaggaccctctgtggttgggctagcccggtactcccatgtgtcgcagcatagtcctagtaaaaaggctttatataacaagcatctgcccgagggtaaactgttaaccgctcgggtcctacgcctcaatcatcaaaagaatctcgtagaactgagtttcctgcccggcgacaccggaaagccagacgtgctgagcgcctccttagaaggacagctcactaagcaggaggaacgcaagacagaagcagaggaacgggatcagaagggagagaagaaaaatcagaagcgcaacgaaaagaagaatcagaagggccaggaagaggtggaaatgccgtctaaagaaaagcagcagccccaaaagccccaggctcagaagagaggaggccgggagtgtcgagagtctggatccgaacaagaacgagtgtctaagaaacccaagaaagccggcttgtccgaagaagatgactctctcgtggacgtctactacagagaaggcaaggaggaggcagaagagaccaacgtgttaccaaaggagaaacagaccaagccagctgaggcaccacgccttcagctgtccagcggattcgcctggaacgttggactcgattctttgacgcctgctctaccccccctcgccgagagttctgactccgaagaggacgagaaaccacatcaggcaacaattaagaagtccaaaaaggagcgagaactcgaaaagcaaaaggcagagaaagaactcagcaggatcgaagaagccttgatggatcccggtaggcagcctgaaagtgctgacgatttcgataggcttgtactatcgtctccaaatagttcaatcctgtggctacagtatatggcattccacctgcaagcgactgagatcgaaaaggcgagggctgtcgccgagcgcgccctaaagacaatctcattccgggaagagcaggagaagctgaatgtgtgggtggccctattgaacctggaaaatatgtatggctcacaggagtctcttactaaagtgtttgagcgcgcagtgcagtataacgagcctctgaaggtctttctgcacctagccgacatttacgccaaaagcgagaagttccaggaagctggagagctgtacaaccgaatgttgaaacggtttaggcaggagaaggccgtgtggattaagtatggtgcatttctgcttcggcggagccaggcagcagcgagtcacagggtgctgcagagggctttggaatgcctgccttcaaaagagcacgtggacgtgattgccaagttcgcccagctggagtttcagcttggcgacgccgaaagggccaaggccatttttgaaaataccctgagtacgtatcctaagaggaccgacgtgtggagcgtgtacatagacatgaccattaaacacggatcccagaaagatgtccgagacatttttgagcgggtgatccacctgtccctggccccaaagagaatgaagttttttttcaagagatacttagattacgagaagcagcatggaactgaaaaagacgtacaggcagtgaaggcaaaggccctggagtatgtggaagctaagtcctctgtgctcgaagactag

SEQ ID NO: 129927 - DNA, 3705 bp, synthetic construct
  misc_feature 1..3705: note = Description of Artificial Sequence: Synthetic coding sequence
  source 1..3705: mol_type = other DNA
atggccaatctagaggagtcctttcccagaggggggacccgcaaaattcataagccagaaaaagcctttcagcaatcggtagagcaggacaatctgttcgacattagcacagaggaaggtagcaccaagcgcaaaaaaagtcagaagggcccagccaagacgaagaagctgaaaatagagaagcgagaatcaagcaagagtgccagagagaagttcgagattttatccgtggagagcctctgcgagggcatgagaattttgggatgcgtgaaggaggtgaatgagctagaactagtgataagcttacccaatgggctccaaggcttcgtacaggtcacagaaatttgtgatgcctacaccaaaaaactcaacgaacaagtcactcaggagcaacccctgaaggatctactgcatttgcctgaactgttttccccaggcatgttagtacggtgcgtggtctcaagcctgggaatcacagaccgcgggaaaaaatccgtgaaactctctctcaatcccaagaacgtcaaccgcgtcctaagtgcggaagccctgaagccagggatgctcctaacggggaccgtaagttccttggaagatcatggctatctcgtagatatcggggtggatgggacacgcgcgtttctgccattactcaaagcacaagagtacataaggcaaaaaaacaaaggagcaaagctgaaagtcggccaatacttgaattgcatcgtcgagaaggtaaaggggaatggcggtgtggtctcactctctgtcgggcatagcgaggtgtcgactgccatcgcgacggagcagcagtcttggaacctcaacaacctccttcccgggttggtcgtaaaagctcaggtgcaaaaggttacaccttttgggctcaccctgaacttcctgactttctttactggggtggtggacttcatgcatctcgatccaaagaaggcaggcacatacttttccaaccaagccgttagggcctgcatcctgtgcgtccaccccaggacccgagttgttcacttgagcctacgtcccattttcctccagcccggacggcccctgacgcgcctgagctgccagaacttaggagccgttctcgacgatgtgccagtccaaggtttctttaagaaagccggagcaacttttcgtctgaaggatggagtcctggcatacgctagattatctcatctgtcagactctaaaaatgtctttaatccagaggcgttcaagccgggcaacactcataaatgcagaatcattgactacagccaaatggatgagctcgcccttctgagcctgagaacatctattatcgaggctcaatacttgagataccacgacatcgagccaggagcagtggtcaaggggacagtcctgactatcaagtcttacggcatgctggtgaaagttggcgagcagatgagaggcctcgtccctccgatgcatttagctgacatcctgatgaaaaatcccgaaaaaaagtaccatataggagacgaggttaaatgcagggttctcctgtgtgatcctgaggccaaaaaacttatgatgacactcaagaagactctgatcgagtctaagctgcctgtgatcacatgctatgcagatgccaaaccggggctgcaaacccacgggttcattattagagtgaaggattacggctgcattgttaaattctacaacaacgtacagggactggtacccaagcatgagttgtcgacagaatatattccggacccagagcgggtattctacaccggacaggttgtgaaggtcgtcgttttgaactgtgagccttccaaagagagaatgctactgtccttcaaattgagcagcgatccagagccaaagaaggagccagccgggcattcacagaagaagggaaaggcaataaacatagggcagctagttgatgtgaaggtgctggaaaagacgaaagatggtctggaagtggcagttctgccacataacatccgggcgttcctacctacatcccatctctctgatcatgttgctaatggccctctgctccatcactggctccaggccggagatatcttgcaccgcgtcctgtgtctgagccaatctgaaggcagggtcctgctctgtagaaaaccagccctggtgtcgaccgtggagggtggacaggatcctaaaaatttttccgagattcaccccggaatgctcctgattgggtttgtaaaatccataaaagattatggcgtgttcatacagttcccatcaggcctcagcgggctggccccaaaggccatcatgagcgataagttcgtcacgagcacaagtgaccatttcgtcgagggccagactgtggcagctaaggtgactaacgtagacgaagaaaagcagcgcatgttgttgagcttacgcttgagtgactgtggattgggcgatctcgcaatcacatctttactactgctgaaccagtgcctcgaggagctgcagggtgtccggtctctcatgagcaacagagactcagtcctgatccagactctggcagagatgactcccgggatgtttctcgatctcgtggtgcaagaggtactggaagacggttccgtggttttttccggcggtcccgtccccgacctggtgctcaaagccagtcgatatcacagagcaggacaggaggtcgaaagtggtcaaaagaaaaaggttgtgattctgaacgtcgacctgctgaaactcgaggtgcacgtgtcacttcatcaagacctggtgaatcgcaaggcacgcaaactgcgcaagggatccgaacatcaggctatcgtgcagcatctcgagaaatcatttgctatcgcatcactggtagaaaccggacaccttgccgctttcagtctgaccagccatctgaatgacactttcagattcgattcagagaagctacaggtgggacagggagtgagcttaacgctgaaaaccacagaacctggtgtcacaggcctgctgctggctgtggagggacccgctgcaaaacgtactatgcgcccaactcagaaggattccgaaacggtggatgaagacgaggaagtggacccggcactgaccgtcggaactattaaaaaacacacacttagcattggggacatggtgacaggtaccgtgaaaagtattaagcccacacacgtggttgtgaccctagaagatggcatcatcggctgtatacacgcgtcccatatactggacgacgttccagagggcacttctccaacaacaaagctgaaggtcggaaagaccgtgacggctcgggttatcggtgggcgtgatatgaaaacattcaagtacctacccatttcgcatccgaggtttgtcagaacaatccccgagttgtcggtgagaccttcagagttagaggatgggcacaccgcccttaatacacactccgtctcaccaatggagaaaattaagcaatatcaagccggacttagtgaggaggacgacagcctggtggacgtttactacagggaaggtaaagaggaagctgaagagacaaatgttcttcccaaagaaaagcaaacgaaaccagccgaagcccctcgcctgcagctgagctctggcttcgcttggaacgtgggtcttgatagcctaaccccggcgctgcctcccctcgccgagtcttcagatagtgaagaagatgaaaaaccacaccaagctacacagattaagaaatccaaaaagtag

SEQ ID NO: 129928 - DNA, 936 bp, synthetic construct
  misc_feature 1..936: note = Description of Artificial Sequence: Synthetic coding sequence
  source 1..936: mol_type = other DNA
atggccgccgccggcgcccggcctgtggagctgggcttcgcagagtcagcccctgcttggagactgaggtcagaacagtttccatctaaggtgtacgcaccactgccggggcgacctgatgcctttcatcggtgtatcttcctgttctgttgtcgcgagcaaccatgttgtgctggactgcgggtgttcagaaaccaactaccccggaagaacgacttttatagttacgaaccgccctccgagaatccaccacctgaaactggtgagtctgtatgcctgcaactgaagtccggtgcgcatctttgccgggtgtgtgggtgcctggggcctaagacgtgctctcgctgtcataaggcctattattgcagcaaagagcaccagaccctcgattggcgtctgggccacaagcaggcctgtgctcagcctgaccaccttgaccacatcattcctgaccataacttcctgttccccgaattcgagatagtaattgaaacagaggatgagataatgcccgaggtggtagagaaggaggactactccgagatcatcggaagcatgggtgaagccctggaagaagagctcgacagcatggccaagcacgaaagtcgcgaggacaagatatttcagaagtttaagacacagatcgccctggaacctgagcagattctcagatacggaagggggatcgcccccatttggatctcaggcgaaaatatcccgcaggagaaagacatccccgattgtccctgcggggcaaagcgtatcctcgaatttcaggtaatgccgcagctcctcaactacctgaaagctgatcggttgggaaaatccatcgactggggtatccttgcagttttcacttgcgcggaatcctgttcgttaggcaccggttatacggaagaatttgtgtggaaacaggatgtcacagatacaccttag

SEQ ID NO: 129929 - DNA, 687 bp, synthetic construct
  misc_feature 1..687: note = Description of Artificial Sequence: Synthetic coding sequence
  source 1..687: mol_type = other DNA
atggccgctgctggtgctcggcccgtggagctgggctttgctgagtccgcccccgcctggagactcagaagcgagcagtttccgtctaaagtaggcggtcgccctgcctggctgggtgctgcaggattaccaggaccacaggcattagcttgcgaattatgcggacgcccattgagttttctgttacaggtgtacgccccactccccgggaggccagacgcattccacagatgcatatttctattttgctgtagagagcaaccttgctgtgcgggactgcgcgtcttcaggaatcaactccctcggaagaatgacttctactcttacgagcccccttcagagaatccccctcctgaaacaggagagagcgtatgcttgcagcttaagagcggcgcccacttatgcagggtctgcggatgtttaggtcccaagacctgtagtcgctgtcacaaagcttattattgttcaaaagaacaccagacactagattggaggctgggccacaaacaggcttgtgcacagcctgaccatctcgaccatattattcccgaccataacttcctctttccagagtttgaaatcgtgatcgagaccgaagatgaaatcatgcctgaggttgtagagaaggaggattacagtgagatcatcggatccatgggtaagcagttccaggatttcatccattag

SEQ ID NO: 129930 - DNA, 1035 bp, synthetic construct
  misc_feature 1..1035: note = Description of Artificial Sequence: Synthetic coding sequence
  source 1..1035: mol_type = other DNA
atggctgctgccggggcgaggcctgtcgaactgggctttgccgagtctgcccccgcttggcgcctgaggtctgaacagttcccctccaaggtcggggggagaccggcgtggcttggggcagccggtcttcccggcccacaggcattagcctgtgagctgtgcggacggccgttaagcttccttctgcaggtctatgcacccctgcccggtaggcccgacgcctttcatcgctgcatctttttgttttgttgtagggagcagccctgttgcgctggcctgagggtctttcgcaaccaactcccccgaaagaacgatttttactcctacgagccaccgtcagagaatccacctccagagactggagagtccgtgtgccttcagctgaagtcaggggcacacctgtgtcgtgtttgtggttgtttgggaccgaaaacctgtagtcgttgtcataaagcttattattgctcaaaggagcatcagactttggattggagactgggacacaaacaggcctgtgcccagcctgaccatcttgaccacataataccagaccacaactttctatttcccgagttcgagatcgttattgaaacagaggatgaaatcatgcctgaggtggtcgagaaagaagactattccgaaatcatcgggagcatgggggaagctctcgaggaggaattggacagcatggccaagcacgaaagccgggaagacaagatttttcagaaattcaagacccagattgctttagagcctgagcagatccttcggtatgggagaggcatcgcgccaatatggatttctggcgagaacattcctcaagaaaaagatattccggactgtccctgtggggcaaagaggatcctggagttccaagtgatgcctcagctgcttaactatctgaaggctgaccggctcggaaagtcaatcgactgggggatcctggccgtcttcacatgtgctgagtcttgcagcctaggcaccggctatacagaggagttcgtgtggaagcaagacgtaacagatactccctag

SEQ ID NO: 129931 - DNA, 588 bp, synthetic construct
  misc_feature 1..588: note = Description of Artificial Sequence: Synthetic coding sequence
  source 1..588: mol_type = other DNA
atggcggcggctggggctcggcccgtagagctgggattcgccgagtccgcgcccgcctggagactccggagcgagcaattcccatccaaagtatacgccccactccctggtcgtcctgatgccttccatagatgcatttttctgttttgctgtcgtgaacagccttgttgcgcaggccttagggtctttcgaaaccagttgccccggaagaatgacttctattcttacgagccaccatccgaaaaccccccgcccgaaactggcgagtcagtttgcttacagctgaaaagcggcgctcatctctgccgtgtctgtggatgtttggggcccaagacttgtagtaggtgtcacaaggcctactactgctccaaggagcaccagacactcgactggcgtttgggccacaagcaggcatgtgcccagccggaccatttggaccatattatccctgatcacaacttcctcttccctgaatttgaaattgtgatcgagaccgaggacgagattatgcctgaggtcgtggaaaaagaggactatagcgaaatcatcggatcaatgggtaaacagttccaggactttattcattag

SEQ ID NO: 129932 - DNA, 567 bp, synthetic construct
  misc_feature 1..567: note = Description of Artificial Sequence: Synthetic coding sequence
  source 1..567: mol_type = other DNA
atggctgcagctggcgcacggcccgttgaacttggcttcgctgagtctgccccagcttggaggctgcgttctgagcaattcccaagcaaggtatacgccccgttgcccggacgcccagatgccttccatagatgcatctttttattctgttgcagagaacagccttgctgtgcaggacttcgtgtttttcgcaaccagctaccccggaagaacgacttttactcctacgagccaccgtccgagaacccccccccagagaccggcgagtccgtctgtctacagctaaagtcaggcgcacatctttgtcgcgtgtgcgggtgcctcggaccaaagacatgcagccgctgccataaggcgtactattgctctaaggagcatcaaacactcgactggcggctgggacacaaacaggcgtgcgcccaaccagatcacctggaccatattatccctgaccataattttctgttcccagagttcgagattgtaatcgagacagaagatgagataatgcctgaagtggtcgagaaagaagactattccgaaattattggctcaatgggcatatag

SEQ ID NO: 129933 - DNA, 2607 bp, synthetic construct
  misc_feature 1..2607: note = Description of Artificial Sequence: Synthetic coding sequence
  source 1..2607: mol_type = other DNA
atggccacttttatttccgtgcagctgaaaaaaacgagcgaggttgacttggccaagcctctggtgaaatttatccagcagacctatccatcaggtggcgaagaacaggcccaatattgcagggcagctgaggagctcagcaagctcagaagagctgcagtgggtaggcctttagataagcatgagggggcacttgaaacactgttaaggtattacgatcagatctgtagcatcgaaccaaagttccccttcagtgagaaccagatatgcctaaccttcacttggaaggacgccttcgataagggatctctctttggaggctccgtgaagctggccctggcatccctaggttacgaaaagtcttgtgtgttatttaactgcgccgccttggcaagtcagattgcggctgagcagaatctcgacaacgacgaagggctcaagatagccgcaaagcattaccaatttgcctcaggagcttttctccatataaaagagaccgtcctgtctgctcttagtcgcgaacctaccgtggacatatccccagataccgtggggacacttagtttgattatgctcgctcaggcgcaggaagtgttcttcttgaaagcaacaagggataaaatgaaagacgcaattattgcaaagttggccaaccaggccgctgattactttggggacgccttcaaacagtgccagtataaagatacactgccaaaggaggtctttccagtgctcgccgcaaagcattgcataatgcaggcgaatgcagagtatcaccagtccattctggccaaacaacagaagaagtttggtgaggagatcgcccgcctccagcacgctgccgagctgatcaaaacagtggccagccgatacgatgagtacgtaaacgttaaagacttcagcgacaaaatcaaccgcgccctagcagcggctaaaaaagataatgacttcatatatcacgacagggtaccagacctgaaagacctggatccaatcgggaaggctacacttgttaagtcaacccccgtcaacgttcccatctcccagaagttcaccgacctcttcgagaagatggtccccgtctctgtacaacagtccttggctgcttataatcagagaaaggcagatctcgtgaacagatccatagcccagatgagggaggcaacgacacttgcaaacggtgtcttagcgtctttaaatctcccagcagcgatcgaagacgtttcaggagataccgtgccccaatccattctgactaaatcacggagtgtgattgagcagggaggaatccaaaccgtggatcagctgatcaaggaattgcctgaactgctccagagaaacagggaaatcctggacgagagcctgaggctcttggacgaggaagaagccactgataacgacctgagagctaaatttaaagagcggtggcaaagaacaccctctaacgagctctacaaaccattaagagctgagggcaccaactttcggacagttctcgacaaagcagtccaagctgacggtcaagttaaggagtgttatcagtcccaccgcgacacaatagtgctcctttgtaaaccggagcctgagctgaatgcagccataccttcagctaacccggcaaagaccatgcagggatccgaagttgtcaacgtgctgaagagtctcctctccaatctggacgaagtcaaaaaggaaagagagggcttggaaaatgacctcaaaagcgtgaatttcgatatgacctcaaaatttctgacggctctggctcaggatggcgtcattaatgaggaggcactgtccgtgaccgagttggatcgggtttacggcggactgacaacaaaagttcaggaatcccttaagaagcaggagggccttctgaaaaacatccaagtttctcatcaggagtttagtaagatgaagcagagcaataatgaagccaatctgagggaggaggtgctaaaaaaccttgctactgcatacgacaattttgttgaattggtggcaaatctgaaggagggaaccaagttctataacgagctaaccgagatcctggtgcgcttccagaataagtgcagcgacatcgtcttcgctcgaaaaacggagcgagacgaactgctgaaggacctgcaacagtcgatcgctcgggagccttctgccccatccattccaacccccgcctaccagagttctcccgccgggggccatgcgcctacacctcctacacccgcgccccgtactatgcctcccacgaaaccacagcctcctgcccgcccaccgcctcctgttcttcccgccaaccgagctccctcagcaacagcgccttcacctgtcggagccgggacagctgctccagcccccagccagaccccgggaagcgctccgcccccacaagcgcagggtccgccataccctacatatccaggatatcccggatattgccagatgcctatgcctatgggttataacccctacgcctacggtcagtacaacatgccttacccccctgtgtatcaccagagtccggggcaggctccgtacccgggaccccaacagcccagctatccgttccctcagcccccgcagcagagctactatccccaacagtag

SEQ ID NO: 129934 - DNA, 2622 bp, synthetic construct
  misc_feature 1..2622: note = Description of Artificial Sequence: Synthetic coding sequence
  source 1..2622: mol_type = other DNA
atggctacatttatctcagtccagctgaaaaagacaagtgaggtggacctggcaaaaccactggtaaaattcattcaacagacatacccaagcggcggggaggaacaagcccagtattgtagagccgctgaggaacttagtaagcttagacgtgcagccgtgggaaggcccttggataaacatgaaggagctcttgagacccttctccgatactacgatcaaatatgcagcatcgagcccaaattcccgttttctgaaaaccaaatttgcctgacattcacatggaaagacgcgttcgacaaaggaagtctgttcggcggatctgtcaagttagccctggcctccctcggctatgaaaaatcctgtgttttatttaactgtgccgcccttgcctcacagatcgcggccgagcaaaacctggacaatgacgagggcctgaagatcgcagctaagcactatcaatttgcaagcggggccttcctacacatcaaagagacagttctctcagccctcagtcgtgaaccgactgtggacatcagccctgatacagtgggaacactctctctaatcatgctcgcccaggcccaggaggtgtttttcctgaaggccactcgagacaagatgaaggacgccattatcgctaagctggcaaaccaggcggccgattacttcggcgacgccttcaaacagtgtcagtacaaggacaccctccctaagtacttttactttcaggaggtgtttcctgtgctggctgcaaagcattgcattatgcaggcgaatgccgagtaccaccagtcgattctggctaagcagcagaagaaatttggcgaggaaatcgccagattacaacacgccgccgaactcataaaaacagtggcgagcagatatgatgagtacgttaacgtgaaggatttcagtgataagataaaccgcgccctagccgccgccaagaaagataacgatttcatttaccatgacagagtacccgatttaaaagacctcgacccaataggtaaggccactctagtgaagtctactccagtgaacgtgcccatctctcagaagtttaccgacctgttcgagaagatggtaccagtaagtgtccaacaaagcctagctgcatataaccagcggaaggccgacctggtaaacaggagcatcgcgcagatgcgagaggccaccactcttgcaaacggggtgcttgccagcttaaatctgcctgccgctatcgaggatgtgagcggcgataccgtcccacagtcaattcttacaaagagtagatccgtcattgaacagggagggatccagacagtggatcagttaattaaagagctacccgagcttcttcagaggaatcgggaaatcctcgatgagtccctcagactgctggatgaagaggaggcaaccgataacgacctccgcgcaaaatttaaggaaaggtggcagcggaccccctcgaatgagctttataaacctcttcgcgccgaggggactaatttcaggaccgtgctcgacaaagctgtccaggcagacggacaggtgaaggagtgctatcagtctcaccgggacactatcgtgctgctctgtaagccggagccggaacttaatgcagcaatcccctctgctaatcccgccaagactatgcaggggagcgaggtagtcaatgtactcaaatcattattgtccaaccttgatgaggttaaaaaggagcgggagggcctggaaaatgacttgaagtcagttaacttcgacatgacttcaaagttcctgactgcgcttgcccaagatggcgtcatcaatgaagaggcactctctgtgaccgagctggaccgagtgtacggcggattaacaacaaaggttcaggaatcactcaagaaacaagaagggttgcttaagaacatccaggtgagtcatcaggaattttctaagatgaagcagtcgaataacgaggccaacctcagggaggaagttctgaagaaccttgccacagcctatgataacttcgtagaactggtggccaaccttaaagagggcacaaaattttataatgagttgaccgagatcctcgtcaggttccaaaataaatgttctgacattgttttcgcccggaagaccgagagagatgaactgcttaaggatctccaacaaagcatcgcccgagaaccatccgctccttccattcccacgcctgcttaccagtcaagccctgccggcggtcacgccccaacgccgcctaccccagccccccgaacaatgccacctaccaagccacagcctccagctcgcccaccaccccctgtgcttccggccaacagagctccatctgctactgctcctagtccggttggcgctggaaccgcggctcccgcaccctcacagacccccggtagtgcaccgcctccgcaggctcaggggccaccatatcctacctaccctgggtacccaggttattgccaaatgcctatgcccatgggctacaatccctacgcctatggccagtataatatgccctaccccccagtctaccaccagtctcctgggcaggctccatatcccggcccccaacagccgtcttacccgtttccacagccaccacagcagagttattatccgcagcagtag

SEQ ID NO: 129935 - DNA, 1458 bp, synthetic construct
  misc_feature 1..1458: note = Description of Artificial Sequence: Synthetic coding sequence
  source 1..1458: mol_type = other DNA
atggcactgccaccttttttcggccagggtagaccgggccctccaccacctcagcctcccccaccagccccctttggatgtccaccaccacctctcccatctccagccttccccccacccctgccccagaggccgggaccttttcccggggcgtccgcaccattcctgcaacccccattggcactgcagcctcgtgcaagcgcggaggccagccggggagggggcggcgccggggctttttaccccgtccctcctcccccactcccaccgccacccccccaatgtaggcccttccctggcaccgatgcaggcgagcgaccacgtccccctcctcctggccctggccccccttggagccccaggtggccggaggcccctcctcctcccgcagacgtattaggtgacgctgccctccagcgcttgagagatagacaatggcttgaggcggttttcggtacaccccgacgggcaggatgccccgtgccgcaaagaacccatgctggccctagcctcggcgaagtgagagcaaggctccttcgtgctctgagactcgtccggcgactgagaggtctatcacaggccctgcgggaagctgaagcagacggtgcagcttgggtactgctctactcccagactgcccctctgcgggccgagctggcagagcgcctgcagcccctgactcaagcagcatacgtgggagaagctagaagaaggctggaacgtgtacgcaggagacggctaaggctgagggagagagcgagggaacgtgaagctgagagggaggccgaagccgccagggctgttgagcgcgagcaagaaattgacaggtggagggtcaagtgcgtgcaggaggtggaggaaaaaaagcgggagcaggagctcaaggctgccgctgatggggtgttgagcgaggtacgtaagaagcaagccgatactaaacggatggtggatatcctccgggcattggagaagttgcgaaagctccggaaggaggcagccgccagaaagggtgtctgcccccccgcttctgcagatgagacgttcacacaccacctgcagcgcctgcgcaagctgatcaagaagcgttccgagctctatgaggcagaggagagggctcttagggtgatgctagagggagagcaggaggaagaacggaagcgagagctcgagaagaagcagaggaaggagaaggagaaaatcttgcttcagaaacgggagatcgaaagcaagttatttggcgatccggacgagttcccattagcacacctccttgaaccctttaggcagtactacctgcaagcagagcatagccttcctgctctgatccagatccgccatgactgggaccagtatctcgtgccatcagatcaccccaaggggaactttgtgccgcagggatgggtcctgcccccactgccatcaaatgacatatgggctactgcggtcaaactgcattag

SEQ ID NO: 129936 - DNA, 840 bp, synthetic construct
  misc_feature 1..840: note = Description of Artificial Sequence: Synthetic coding sequence
  source 1..840: mol_type = other DNA
ctcatgagaagtcactcagacagctgccatttttccaagcacttgcggcgggaacatggacccgctacgatcctcagacctggaagcccccgtccgccaccgcccccaagtttctcactcaggcggttacgggagcgcgctagggagcgggaggcggagagggaagcagaggccgcaagagccgtggaacgggagcaagaaatcgaccgatggcgcgttaaatgtgttcaggaggtagaggagaagaagagagaacaagaattgaaagcggccgcggatggagtgttgtccgaagtccgcaaaaagcaagctgataccaaaagaatggtggatattttacgcgccctggaaaagctgcggaaactgagaaaagaggccgcagcacgtaagggggtctgcccaccagcaagcgctgacgaaacattcacacatcacttgcagagattgcggaaactgatcaaaaagcggtccgaattgtacgaagccgaggagcgggctctgagagtgatgcttgagggcgagcaggaagaagaaagaaagagagagctagagaaaaaacagaggaaagagaaggagaaaatcctgctgcagaaacgcgaaatcgaaagtaagctgttcggcgaccccgatgaatttcccctggctcacctgctggagccattcaggcagtactatctgcaggcagaacatagcctgcccgcacttattcaaatccggcacgattgggatcaatatttagtgccctccgaccacccaaaaggaaactttgtaccgcaggggtgggtgctcccaccattgccatcaaacgatatctgggccacggccgtgaagctgcactag

SEQ ID NO: 129937 - DNA, 813 bp, synthetic construct
  misc_feature 1..813: note = Description of Artificial Sequence: Synthetic coding sequence
  source 1..813: mol_type = other DNA
tcccactccgattcgtgtcacttttcaaagcatctgagacgggagcatggccctgcaacgattttacggcccggcagcccacgccggcggagactgaggttacgcgaaagggctagagaacgcgaggctgagcgtgaagccgaggccgcgcgcgccgtagagcgggagcaggagattgatcggtggcgtgttaaatgtgtacaggaggttgaagagaagaagcgggagcaggaacttaaggccgcagctgacggcgttctgtcggaggttcgaaaaaaacaagctgatacgaagcgtatggtggacatactacgtgcacttgagaagcttagaaaattaaggaaagaagcggcggctcggaaaggggtttgccccccggcatcagctgacgagaccttcactcaccatctacagcgcttgagaaaattaatcaaaaaaagaagtgaactatacgaggccgaagagagggcactcagggtgatgcttgaaggtgaacaggaggaggagaggaagagggagttagaaaaaaaacagaggaaggagaaggagaagatcctgctgcaaaagcgcgaaattgaaagcaagcttttcggggaccctgatgaattccccctggcacacttgctcgaaccctttcgtcagtattatttgcaggcggagcattcccttcctgccttgatccagataagacatgattgggatcagtacctggtacctagcgatcaccccaaagggaactttgttccacaaggatgggtcttaccaccattgccttccaacgatatctgggcgactgctgtcaagcttcactag

SEQ ID NO: 129938 - DNA, 165 bp, synthetic construct
  misc_feature 1..165: note = Description of Artificial Sequence: Synthetic coding sequence
  source 1..165: mol_type = other DNA
atgtgtacaaccttgtttctcctcagtactctcgccatgttgtggcgaaggagatttgccaaccgagtgcagcctgagccttcggacgtcgatggagcagccaggggatcttcgctggatgctgatccccagtcctcgggcagggaaaaagaaccacttaagtag

SEQ ID NO: 129939 - DNA, 246 bp, synthetic construct
  misc_feature 1..246: note = Description of Artificial Sequence: Synthetic coding sequence
  source 1..246: mol_type = other DNA
atgactcggaccgagagccccgcgacctggatgggtcagctgggcgccgccgcgtggatgcgcacgcttagtcctcaggcagcacaggtgctggttcgaccactcgctcaagaagatgccgtaggggcagctgctgccgcccgcggacgaatggggggaagctccacccgagaagtgcctagggcacacccagtgaccggttgctccgcggaaattattaacaagaaatgtcagctggacctctag

SEQ ID NO: 129940 - DNA, 819 bp, synthetic construct
  misc_feature 1..819: note = Description of Artificial Sequence: Synthetic coding sequence
  source 1..819: mol_type = other DNA
atggccgcaaaggtgtttgagtcaatcggcaagttcggattggccctggcggttgcaggaggagtggtgaattctgccctttataacgtagatgctggacacagagctgtgatcttcgaccggtttcgtggtgtgcaagacatcgtggttggggaaggcacccatttcttaataccgtgggtgcagaagccaattattttcgattgcagaagccggccaaggaacgtgccggttatcaccggatccaaagacctgcagaatgttaatattaccctcaggattctgttccggcccgtggctagccagttgcctagaatctttacgagtatcggcgaagattacgatgaacgcgttctgccatcaatcacaacagaaatcttgaagagcgtggtagctcggtttgatgctggggaactgattacccagagggagttagtttcccgtcaggtatccgatgatctgacagagcgggctgctaccttcggcctgatcctcgatgacgtgagtctcactcatctgaccttcggcaaagaatttacagaagccgtcgaagctaaacaggtcgctcagcaggaggccgagagagcccggtttgtcgtcgagaaggcagaacaacagaagaaagccgcgatcatctccgctgaaggagattcgaaggccgccgagctcatcgcaaatagtctggccactgccggggatggccttattgagctgcgaaagcttgaagcagccgaagacatcgcttatcagttaagcagatcaagaaacattacctatctgcccgccgggcagagcgttctccttcaactcccccagtag

SEQ ID NO: 129941 - DNA, 741 bp, synthetic construct
  misc_feature 1..741: note = Description of Artificial Sequence: Synthetic coding sequence
  source 1..741: mol_type = other DNA
atggccgctaaggtgtttgagtctattggcaaatttggattggctctggccgtggccggcggcgtagttaattccgccctgtacaatgtcgatgccgggcaccgggcggtcattttcgacaggttccgcggcgtacaggacattgtcgtgggcgagggtacgcatttcctcattccttgggtgcagaaacccattatattcgactgccgcagccgtccaaggaatgtacccgtaattactggcagtaaggatcttcaaaatgtcaatatcacactcaggatactattcagacccgtcgcatctcagttgcctagaatattcacctcaataggtgaagactatgacgaacgcgtactgcccagcatcactactgaaatcctgaaatcagtggtggcccggttcgatgcgggtgaactcataactcaacgtgagctcgtttcccgccaggtatcggacgacttaacagagagggcagcaacatttggcctgatcctggacgatgtcagtctgactcatctgaccttcggcaaggaattcaccgaggccgtagaagctaagcaagtcgcccagcaggaggccgagcgggcacgcttcgtggttgagaaagccgagcagcagaagaaagctgcgatcatctctgccgaaggagactctaaggctgccgaacttatcgcaaattcccttgctacagccggtgacggtctcattgagctgagaaagctggaggcagctgaggactag

SEQ ID NO: 129942 - DNA, 375 bp, synthetic construct
  misc_feature 1..375: note = Description of Artificial Sequence: Synthetic coding sequence
  source 1..375: mol_type = other DNA
atggcagctaaagtgtttgaatctatcgggaagtttggtctggctctggccgtagccggtggggtagtgaactccgcactctataatgttgatgctggtcacagagccgttatttttgaccgctttagaggggtgcaggatatcgttgtgggcgaaggcactcattttctcatcccttgggtccaaaaaccaatcatttttgactgtaggtctcgacccagaaacgttcccgtaatcactgggtctaaggatctgcaaaacgtgaatattaccttacgcatcttgtttaggccagtcgcctcccagctgccacgaatctttacgagtatcggtgaggactacgatgagcgagtcttacccagcattaccacttag

SEQ ID NO: 129943 - DNA, 606 bp, synthetic construct
  misc_feature 1..606: note = Description of Artificial Sequence: Synthetic coding sequence
  source 1..606: mol_type = other DNA
atggccgccaaggtcttcgagagtatcggcaagttcggcctggccctcgctgtcgcggggggggtagtaaacagcgctctctacaatgtggacgccgggcacagagctgtgatttttgataggtttcgtggtgtccaggacatagtggtgggggaggggacgcattttctgatcccttgggtgcaaaaacctatcattttcgattgtagatcccgaccacgcaatgtcccagtcattacgggcagtaaggacctgcaaaatgtaaacatcactttgcgtatcctgtttcggcccgtagcgtcacagctcccccgcatttttacgtctataggcgaagattacgatgagcgggtcctaccctcaatcaccactgaaatcctaaaatcagtggttgctcgctttgatgcaggggagcttatcactcagcgggagttggtgagcagacaggtttccgatgaccttacagaacgagcagcgaccttcggcctcattcttgatgatgtcagcctgacgcacctgaccttcgggaaggagttcacagaagccgtggaggccaaacaagttgcccagcaggaagccgaacgggcacgctttgtggtcgaatag

SEQ ID NO: 129944 - DNA, 645 bp, synthetic construct
  misc_feature 1..645: note = Description of Artificial Sequence: Synthetic coding sequence
  source 1..645: mol_type = other DNA
atggccgccaaggtcttcgaatcaatcggtaagttcggtctcgctctcgcagtggccggcggagtggttaatagtgctctttataatgttgacgcaggccacagagccgtcatctttgataggttccgaggtgtgcaggatatagtcgtgggggagggcacgcatttccttattccgtgggtgcagaagcctattatttttgattgcagatcccggccaagaaatgtgcccgtcatcaccggcagcaaagacctgcagaacgtgaacatcacattgcggatcctgtttcggccggtggcctcccagctgcccaggatcttcacctccatcggagaggattacgacgaacgagttctgccttccataaccacggagatacttaaatcagtggttgctaggtttgacgcaggcgaactaattacacagcgagaactcgtgagtagacaggtgtcggacgatctgacagaacgtgcagcgacatttggcctgatcctcgatgatgtttcccttacacatctgacttttgggaaggagtttacggaggctgttgaagccaagcaagtggcgcagcaggaagccgagagggcaagattcgtcgtcgaaaaagccgaacaacagaaaaaggcggctattatctccgcgtag

SEQ ID NO: 129945 - DNA, 468 bp, synthetic construct
  misc_feature 1..468: note = Description of Artificial Sequence: Synthetic coding sequence
  source 1..468: mol_type = other DNA
atggctgctaaggtgttcgaatccattggaaaattcggtttagccctggcagtggccggaggcgttgtcaactcggcactctataatgtcgatgcaggacatcgagcagttatttttgaccggttccgcggcgtgcaggatatagtcgtcggcgagggcacacacttcctcatcccatgggtgcagaagcctattattttcgattgccgctcccgaccgaggaacgtgccagtcatcaccggcagcaaggacttgcagaatgtcaacattaccttgaggatactcttccgaccggtcgcatcccagctgccaagaatcttcacaagcatcggggaggactacgacgagcgggtccttcctagcatcactacagagattttgaagtcagtagtcgctcggttcgatgccggcgagctgattacctacctacccgctgggcagtctgttctcctgcagctgcctcagtag

SEQ ID NO: 129946 - DNA, 615 bp, synthetic construct
  misc_feature 1..615: note = Description of Artificial Sequence: Synthetic coding sequence
  source 1..615: mol_type = other DNA
atggccgccaaggtatttgagagtataggaaagttcggcctggcactggccgtggccggaggggtcgtcaattctgccctgtataatgtggatgctggccatcgggccgtcatctttgacaggttccggggtgtgcaggacattgtcgtcggtgagggcacacactttctaatcccatgggtgcagaaacctatcatattcgattgtcgctctagacctcgtaacgtacccgtaatcactggctctaaagatctgcagaacgtcaatatcaccctccgcattctctttcggccggttgcctctcaactgccgagaattttcacttctattggagaggactacgatgagagggtgctgccatctattaccactgagattctgaagtcggtggtggcaaggtttgatgccggggaattaataactcaaagagagctggtgtcccggcaggtgtcagacgatttgaccgagcgggctgcaacgttcggcctaatcctggacgacgtgagcctcacgcacctgacatttggtaaggagtttactgaagctgtcgaagctaagcaagtggctcagcaggaggctgaaagagctcgattcgtcgttgaaaaggtgagttag

SEQ ID NO: 129947 - DNA, 900 bp, synthetic construct
  misc_feature 1..900: note = Description of Artificial Sequence: Synthetic coding sequence
  source 1..900: mol_type = other DNA
atggcacagaacctaaaggatctggccggccggctgcccgcagggccgcggggcatgggcaccgccctaaagctgttgttgggggctggcgcagttgcctatggcgttcgagagagcgtgttcaccgttgaaggtggacacagggcaatatttttcaaccgcattgggggagttcagcaggacactatactggctgaggggttgcacttcagaattccatggttccagtaccccattatatacgacatccgggctcggcctagaaaaatttccagccccaccggctccaaggacctgcagatggtaaacatatcactgcgagttctgtctagacccaacgcccaggaactgccttcaatgtatcagcgccttgggttagactacgaggagcgcgtactgccctccatcgtgaacgaggtgttgaaatcagttgttgccaaatttaatgcctcccaactcatcacccaacgcgcccaggtgagcctgctaattagacgcgagttgaccgagcgagcaaaggacttttccttaattctggatgacgtggctattaccgaactgagtttctcgcgtgaatacaccgcagccgtagaagctaaacaggtcgcccaacaggaggcgcagcgcgctcagtttctggtcgagaaggcaaagcaggaacagagacaaaagatcgtgcaggccgagggcgaggccgaggcagctaagatgttgggggaggctttgagcaaaaacccaggatatatcaagttgcgcaaaattagggccgcccaaaatatatctaagacaattgcaactagccagaaccgcatctaccttacagctgacaatttggttcttaacctgcaggatgaaagcttcacgcggtactcggactctctgataaagggaaagaaatag

SEQ ID NO: 129948 - DNA, 786 bp, synthetic construct
  misc_feature 1..786: note = Description of Artificial Sequence: Synthetic coding sequence
  source 1..786: mol_type = other DNA
atggcccagaacctcaaagatctagccggaagactgcccgctggtccccggggaatgggaaccgctctcaaactgttgctgggcgcaggagcagtggcgtacggagtgcgggagtccgtgttcacggtcgagggagggcatagagcaatttttttcaaccgcataggcggcgtacagcaggacacgatcctggcagaagggttgcacttcaggataccatggttccaatatcccatcatctatgacatccgagcacggccacgcaaaatcagttctccaaccggctcaaaggacctgcagatggtgaacataagtctgcgtgttctgagccgcccaaatgcccaggagttaccgtccatgtaccagagacttgggctcgattacgaagagagggtcttaccttctattgtgaatgaggtgctgaagagcgtggtggccaagttcaacgcgagccaattaatcactcaacgtgcccaggtgtctctgctgataagacgcgaactgactgagagagctaaagatttttcacttatcctcgacgacgttgctataactgaactgtccttctcgcgggagtatactgccgccgtggaggcaaaacaagtggctctgtcaaagaacccgggctatataaagctgaggaagattcgcgcagcccaaaacatatcaaagacaattgccacaagccagaaccgtatttacctcaccgctgacaatctcgttttgaacctgcaggacgagagtttcacccggggctccgatagcctgattaagggcaagaaatag

SEQ ID NO: 129949 - DNA, 900 bp, synthetic construct
  misc_feature 1..900: note = Description of Artificial Sequence: Synthetic coding sequence
  source 1..900: mol_type = other DNA
atggcccagaatttgaaggatctggccggccgactaccggcaggcccccgcggcatgggcaccgccctgaagcttctgctcggcgccggggcagtggcgtacggggttagagaatcggtgtttactgttgaggggggtcatagggcgatattttttaatcgcatcgggggtgtgcagcaggacaccattctcgccgaggggctgcactttcgaatcccctggttccaatatccgattatttatgacatccgcgcccgcccaagaaaaatcagttctccgactggctctaaggatctccagatggtgaatatttcactacgggtcctttcccgaccaaacgctcaggaactgccttccatgtatcagcgcctgggtctggattacgaggaacgtgttctgccatctatagtgaacgaagttctgaagagtgtggtggccaagttcaatgcttcccagttgattacccagagggcccaggttagcctcctgatcaggcgcgagctgactgaacgggcaaaggacttctctctgatccttgacgatgtcgcaataacggagcttagcttctcccgagaatacaccgccgccgtggaggccaaacaggttgcgcagcaggaagctcagagggcacagttcctggttgagaaggccaagcaggaacagcgacagaaaatcgttcaggcggagggggaggctgaagcggccaaaatgcttggcgaggcactttcaaagaacccaggctacataaagctgcggaagattcgggctgctcagaatatctctaagacaatcgctaccagccagaaccgtatttatttgacggccgataaccttgtgcttaatctgcaggacgagagttttacccgtggtagcgattcactgattaaggggaagaagtag

SEQ ID NO: 129950 - DNA, 642 bp, synthetic construct
  misc_feature 1..642: note = Description of Artificial Sequence: Synthetic coding sequence
  source 1..642: mol_type = other DNA
atggcgcagaacttaaaagatctcgccggaaggctaccagctggcccaagaggcatgggaaccgctctgaaacttctgcttggagccggtgctgtagcttacggtgtacgggagagtgtatttacagtggagggtggtcacagggctatcttcttcaaccgtattggcggagttcagcaggacacaatcctggccgagggcctgcattttcgcattccctggtttcaataccctatcatatatgatatccgggctagaccccgtaagatcagcagccctactgggtcaaaggatcttcagatggtgaatataagccttagggtgctgtcaagacctaacgcacaggagctgccatcaatgtaccagagattgggactcgattacgaagagcgtgtgttgccctccatcgttaacgaggtgctgaaatcagtggtggcgaagttcaacgcctcgcagctgatcacacaacgcgctcaggttagtctgctgatacgccgcgaattgaccgagcgagccaaggacttctctcttatcctagacgatgtggccatcacagaactatcattctcacgagaatataccgccgccgtcgaggccaagcaggttggggagagtcaagagccctggggggagggattttag

SEQ ID NO: 129951 - DNA, 318 bp, synthetic construct
  misc_feature 1..318: note = Description of Artificial Sequence: Synthetic coding sequence
  source 1..318: mol_type = other DNA
atgaggggtgctacccgggtgagtattatgctgctgctggtgaccgttagtgactgtgctgtgattacgggcgcatgtgagcgcgacgtgcagtgtggagcgggcacatgctgcgcaatatcgttgtggctcagagggctgcggatgtgtactccactcggccgggaaggtgaggagtgccaccccggctcacacaaggtgcccttttttaggaagcgcaaacaccatacatgtccttgtcttcccaatttactgtgcagtcggtttcccgacggtcgatatagatgttccatggatctgaagaatattaacttctag

SEQ ID NO: 129952 - DNA, 390 bp, synthetic construct
  misc_feature 1..390: note = Description of Artificial Sequence: Synthetic coding sequence
  source 1..390: mol_type = other DNA
atgcggtcattgtgctgtgctccgctcctgctgctgcttttgctgcctcctctgctgctgacccctcgcgcaggggatgctgccgtgattaccggagcttgcgataaggattctcagtgcggaggcggaatgtgctgtgctgtgtctatctgggtcaagtcaatccgcatctgcacaccgatgggaaaactaggggattcttgtcatccccttactcgcaagaataacttcggcaacggacgtcaggagcggcgtaagagaaagcgcagtaaaagaaagaaagaggtcccattctttgggcggcgcatgcatcacacatgtccctgccttcccggcctcgcatgtctgcggacctcatttaatagattcatctgcttagctcaaaagtag

SEQ ID NO: 129953 - DNA, 327 bp, synthetic construct
  misc_feature 1..327: note = Description of Artificial Sequence: Synthetic coding sequence
  source 1..327: mol_type = other DNA
atgcgatcactgtgctgtgctccactcttgttacttctgctgctcccgcccctgctgctgacgcccagggcaggcgatgccgccgtcataacaggcgcctgtgacaaagatagccagtgcgggggagggatgtgctgcgccgtctccatctgggtgaaatctattcggatctgcactccgatgggcaaactcggtgattcctgccaccccctgacccgtaaagtcccattctttggccgacgcatgcaccatacctgcccttgtctgcctggcctcgcttgccttcgcacttcttttaatcgttttatttgcctcgcccagaaatag

SEQ ID NO: 129954 - DNA, 705 bp, synthetic construct
  misc_feature 1..705: note = Description of Artificial Sequence: Synthetic coding sequence
  source 1..705: mol_type = other DNA
atgcgtgcgcccctttgcctgctgctgcttgtcgctcatgctgtggatatgctcgctttgaaccgaaggaagaaacaggtgggaacaggtctgggtgggaactgcactgggtgcatcatttgttctgaggaaaatggatgtagcacatgtcagcagagactctttctgtttatacggcgcgagggaatcagacaatacggcaagtgcctgcatgactgcccccccgggtacttcgggattcgcggccaggaggtcaaccggtgcaagaagtgtggggccacgtgcgagtcctgcttcagtcaggatttttgcattcggtgcaaaagacagttttacctctataagggcaagtgccttccgacttgtcctccgggtaccctcgcccaccagaacacaagggaatgccagggagagtgcgagctgggaccttggggcggatggtctccgtgtacacataacggtaagacatgtggaagcgcttggggacttgagagccgggttagagaggccgggagggctgggcacgaggaggccgccacatgtcaggtgctgtctgaatcccgaaaatgtccaatccaacggccctgtccgggggaacgaagccctggccaaaagaagggcagaaaggaccgtaggccgagaaaggatcgtaagctcgatcggagactggacgtcagacctagacagccagggctgcaaccatag

SEQ ID NO: 129955 - DNA, 1155 bp, synthetic construct
  misc_feature 1..1155: note = Description of Artificial Sequence: Synthetic coding sequence
  source 1..1155: mol_type = other DNA
atggctgctcagaatggaaacactagctttactcccaatttcaaccccccccaggatcacgctagcagcctgtcttttaacttctcttatggggactatgacctgccgatggatgaggacgaagatatgacaaaaacccgcaccttcttcgctgccaagatcgtaattgggattgctttggccgggatcatgcttgtgtgcgggatcgggaacttcgtgttcattgccgccctcactaggtacaagaaattacgtaatttgaccaacctcctgattgccaaccttgcaatttctgacttccttgtagcgataatatgctgtcctttcgagatggattattacgtcgttagacaactgtcatgggagcatgggcacgttctctgtgctagcgtaaactatttgagaacagtctcgctgtacgtgagcaccaacgctctgctcgcaatagctattgataggtaccttgctattgtgcaccctctaaaacctaggatgaactaccagacagcatcgttccttatagcccttgtctggatggttagcattctaatcgctataccttcagcctacttcgctacggagacggtgctctttatcgttaagtctcaagaaaagatcttctgtggacaaatctggccagttgatcagcagctctattacaagagttacttcttattcattttcggcgtggaattcgtgggacctgtggtgaccatgaccctgtgttacgcacgtatctcgcgcgagctgtggtttaaggccgttcccggatttcagaccgaacagatacggaaacggctgagatgccggaggaagactgtgctcgtcttaatgtgcatcctgactgcctacgtgctgtgctgggctcccttctatggcttcaccatcgtccgcgatttcttccccacagtgtttgttaaggagaaacactacttgacagccttctatgtcgtggagtgtatagccatgtccaactctatgatcaacacagtgtgcttcgtgacagtcaagaataacacaatgaaatatttcaagaagatgatgttacttcattggcggccatcccagcgcggatcaaaatcatcagcagacttggacttacgcaccaatggagtgcctaccacagaagaggtggattgcatcagactcaaatag

SEQ ID NO: 129956 - DNA, 684 bp, synthetic construct
  misc_feature 1..684: note = Description of Artificial Sequence: Synthetic coding sequence
  source 1..684: mol_type = other DNA
atgaatattaagggcagcccatggaaggggagcttgttgctgcttctcgtttctaacctgctcctgtgtcaaagcgtagccccactgcccatttgcccaggaggtgccgccaggtgtcaggtgacactgcgcgacctgttcgatagagctgtggtcctgagccactacatccataatctcagctctgagatgttcagcgagtttgataagcggtacacccacgggcgggggttcatcacaaaggcaattaacagctgccatactagctcactcgcaactcctgaggacaaggagcaagcccaacagatgaatcaaaaagatttcttgtcgctgattgtctcaatactgaggtcctggaacgagccattgtaccacctggtgactgaggtgcgggggatgcaggaagcaccagaagccattttgtctaaggctgttgagattgaagagcagaccaaaagactgctggagggaatggagcttatcgtcagccaggtccatcctgagaccaaggagaatgagatctaccccgtgtggtccggactgccaagcctgcagatggccgacgaagaatcgcgtctgagtgcatactacaatcttcttcattgcctgagacgagatagccacaagatagataattaccttaagctgctgaaatgccgcattatccacaacaacaattgctag

SEQ ID NO: 129957 - DNA, 591 bp, synthetic construct
  misc_feature 1..591: note = Description of Artificial Sequence: Synthetic coding sequence
  source 1..591: mol_type = other DNA
atgaatatcaaaggatctccctggaagggatcactgctccttctgctggtatctaacctgctattaagccactatatccataatttgtcttccgagatgttctccgagttcgataagcgatatacccacggtagggggtttatcacgaaagcgataaattcatgccacacatcaagcctcgccacgcctgaggataaggagcaggcccaacaaatgaatcagaaggatttcctgagtttgattgtctccattcttagatcctggaacgaaccactgtaccacctggtcacagaagtgcgtgggatgcaagaggctcccgaggctattctttccaaggccgtggagattgaggagcagaccaagcggcttcttgaaggtatggagctaattgtgagccaggttcaccccgagactaaggaaaacgaaatttatcctgtttggagcggcctgcccagcctccaaatggcggatgaagagagccgactgtcagcgtactataatctgctgcattgccttcgacgagattcccacaagattgacaattatctgaagctgttgaaatgtcgaatcattcataataataattgttag

SEQ ID NO: 129958 - DNA, 1545 bp, synthetic construct
  misc_feature 1..1545: note = Description of Artificial Sequence: Synthetic coding sequence
  source 1..1545: mol_type = other DNA
atgacactcatttggcggcatttgctccggcccctgtgcctggtgacatctgctccccgtatcctggaaatgcatccctttctgagtctgggcacttcccggacgtctgtgactaagctgagccttcataccaagccccgaatgccaccatgtgattttatgcccgagcgataccagtcccttggctataacagagtgctggaaatccacaaagaacatctgtccccagtcgtcacagcatacttccagaaacctctgttattacaccaggggcacatggaatggctgttcgatgccgagggcagcaggtatctggatttcttcagcggaattgtcaccgtgtctgtgggccactgccaccccaaggttaacgcagtcgctcagaagcagttgggcaggctgtggcatacaagcacagtattcttccacccacctatgcatgagtacgccgagaagctggcagccctactgccggaaccattgaaggtaatctttctggtgaacagcggctctgaggccaatgagctggccatgctcatggccagagcacattccaataacattgatatcatctcttttcgaggcgcttatcacggctgttcgccatacaccctgggcttaacgaacgtgggaacttataagatggagttgccgggaggcaccggctgccagccaactatgtgtcctgatgttttccgaggaccgtggggaggtagtcattgtcgagacagtcctgttcaaaccattcgaaagtgctcatgtgcaccggactgctgccaggctaaagatcagtatattgagcagttcaaagacacgctgtcaacatccgtggctaagtcaattgctggatttttcgccgagcctatccaaggtgtgaacggagtggtgcagtatccaaaaggcttcttaaaggaggccttcgagctggtcagggctagaggcggtgtttgtattgccgacgaggtccagacagggttcgggaggctggggtcccacttttggggttttcagactcacgacgtgcttcccgatatagtaactatggccaaaggcatagggaatggcttccctatggcagccgtcatcacaacacctgagatagcaaaatcgctggccaaatgcttgcagcatttcaatacatttggagggaatccgatggcatgcgccatcgggtcagccgtcctggaagtgattaaagaagagaaccttcaggaaaactcacaagaagttggcacttacatgctactgaagtttgctaagctccgtgacgagtttgagatagtgggagatgtgagaggaaagggtcttatgatcggaatcgagatggtgcaagacaaaattagctgccggccacttcctcgggaggaggtgaaccagatccacgaggactgcaagcacatgggcctgctggtgggccgagggtccatctttagtcagaccttccgcatcgctccgtcaatgtgtattactaaaccagaggtggatttcgctgtggaggtattcagatctgcccttacccagcatatggaacgccgcgcgaagtag

SEQ ID NO: 129959 - DNA, 1050 bp, synthetic construct
  misc_feature 1..1050: note = Description of Artificial Sequence: Synthetic coding sequence
  source 1..1050: mol_type = other DNA
atgaaagaaaatgtggcctccgccactgtattcacactgttactctttctcaatacgtgcctcctcaacggccaactacctcccgggaagccagaaatctttaagtgtaggagtcctaacaaagagacttttacttgctggtggcgacccggtacggacgggggcctccctactaattattccctcacttaccaccgagagggggagaccctcatgcacgaatgtcccgattatattaccgggggccctaacagttgtcatttcggcaaacagtacaccagtatgtggagaacgtatattatgatggttaacgccactaatcagatggggtcctctttcagcgatgagctgtacgtcgatgttacatatatcgtccaacccgacccaccactggagctggccgtagaagtgaagcaacctgaggatcggaaaccgtatctctggatcaaatggagccctccaacattgatagacttgaaaaccggatggtttactctgctgtatgaaatccgactcaaaccggagaaagcagccgagtgggaaatacatttcgcagggcaacagactgaattcaagattctgtctttgcacccaggacaaaaatatctggtgcaagtgcggtgcaagcccgaccatgggtattggagtgcctggtctccagctactttcattcaaatcccctctgactttaccatgaacgatacgacagtctggataagtgtagcagttttgagcgccgtgatttgcctcatcatcgtgtgggcggtggccctaaagggctatagcatggtgacttgtatctttcctcctgtccctggccctaaaatcaagggtttcgacgcccatctgctcgaaaagggaaagtcagaagaactgctatctgctctgggttgccaggacttcccacccactagcgattatgaggatttactggttgagtatctagaggtagatgatagcgaggatcagcacctaatgtccgtacatagcaaagaacacccatcacaggagcgcgagcagaggcaggcgcaggaggccagagattcctag

SEQ ID NO: 129960 - DNA, 1566 bp, synthetic construct
  misc_feature 1..1566: note = Description of Artificial Sequence: Synthetic coding sequence
  source 1..1566: mol_type = other DNA
atgaaagagaacgttgcaagcgctacggtgtttacactactgctatttttgaacacatgcctgctgaatgttcagccagatccaccactggagttagcagtggaagtcaagcagccagaggaccgtaaaccatacctatggataaaatggagcccacccaccctgatagatttaaaaaccggatggtttaccttgctgtatgagatcagacttaaacctgagaaagccgccgagtgggagattcactttgcgggacagcaaacagaattcaaaattttatccctgcatccaggacagaagtatctcgtgcaggttaggtgcaagccagaccacgggtactggtcagcgtggtctcccgccacgttcatacaaatccccagtgacttcactatgaatgacacgactgtctggattagtgtcgcagtactcagcgcagtcatctgcctcataattgtctgggccgtggccctgaaggggtactcaatggttacatgtatctttcccccagtgccgggacccaagatcaaggggttcgacgcgcacctgctcgagaagggcaagtcagaagaacttctttccgcgttagggtgccaggatttccctcccacatccgattacgaggacctacttgttgaatacctcgaggtggatgatagcgaagatcagcacctgatgtcggtccacagcaaggagcaccccagccagggtatgaaaccaacatacctggatcccgacactgattctggaagagggagctgcgactccccatctctcttaagtgagaagtgcgaggaaccacaagctaacccttccaccttttatgaccccgaggtgatcgagaagccggagaacccggagacaacccatacttgggacccccaatgtattagcatggagggtaagataccttacttccacgcgggcgggagcaaatgctctacctggcccctgccgcagccaagtcagcataacccaaggtcctcctaccataacataaccgatgtctgcgagctggcggtgggccctgcaggagctccggccactctcctgaatgaggctggtaaggacgccctcaagtctagccagactatcaaatcaagggaagaagggaaggctacacaacagagagaagtcgaaagttttcattccgaaaccgatcaggataccccttggttgctcccccaggaaaaaacaccattcggctctgctaaacctctcgattacgtcgaaatacacaaggttaataaggacggggccctgtcccttctaccaaagcagcgggagaattccggcaagccaaagaaacctgggactcccgaaaacaataaggagtatgcaaaagtctccggagttatggacaacaatattctggtgctggtccctgacccgcatgctaagaatgtggcttgttttgaagagagtgctaaagaggccccgccgtccctggagcagaatcaggccgagaaggcactggctaacttcaccgcaactagctccaagtgtcgattacaattaggcggcctcgactatttagaccctgcctgcttcactcactcctttcactag

SEQ ID NO: 129961 - DNA, 807 bp, synthetic construct
  misc_feature 1..807: note = Description of Artificial Sequence: Synthetic coding sequence
  source 1..807: mol_type = other DNA
atgaaagaaaacgttgcttcagccactgtcttcaccctgttgcttttcttaaacacatgcctgctgaatggccagctgccgccagggaagccagagattttcaagtgtcggagtccaaacaaagaaaccttcacctgctggtggcgtccagggaccgacggcggactgcctacaaattacagcttgacgtaccaccgagagggggaaactttgatgcatgaatgtcctgattacattaccggggggcccaactcctgtcattttggtaaacagtataccagtatgtggaggacctacatcatgatggttaatgcaacaaaccagatgggatcctcctttagcgatgaactgtacgtcgacgtgacctatatagttcagccagacccacctctggaactcgcggtggaggtaaaacagccagaggaccggaaaccttacctttggattaaatggtcccctccaactctgatcgacctcaaaactgggtggtttaccctcctttatgagataaggttaaagcccgagaaggccgctgaatgggagattcactttgccggccaacagaccgagtttaagatcctaagtcttcacccgggccagaagtatttggtgcaagtaaggtgcaaacccgatcacggatattggtctgcttggtcccctgccacatttattcagatacctagtggcgatccattaatgttaggcgcctcccattataagaatctgaagagctaccgacccagaaagatttctagccagggccgccttgctgtgttcaccaaggccacccttaccaccgtacagtag

SEQ ID NO: 129962 - DNA, 1869 bp, synthetic construct
  misc_feature 1..1869: note = Description of Artificial Sequence: Synthetic coding sequence
  source 1..1869: mol_type = other DNA
atgaaggagaacgtggccagtgctacagtgttcacgctgttgttgttcctgaacacttgtctgttaaacgggcagcttccaccaggaaagcctgaaattttcaagtgtagaagcccaaacaaggaaacttttacatgctggtggcggcccggcactgacggcggactccctacaaattacagccttacataccacagagagggtgaaactctgatgcacgagtgcccagattatatcactggcggcccaaattcttgtcatttcggcaagcagtacacaagtatgtggagaacttacatcatgatggttaacgctacgaaccaaatgggtagttctttctctgacgagctatacgtagacgttacttatattgtgcagccagatccaccactggagctcgccgtcgaagtgaagcagccagaggacagaaaaccatacctgtggattaagtggtctccccccacactcatagatctgaagacaggttggtttacgttactgtacgagatcagactaaagcctgagaaagccgccgagtgggagatccattttgcggggcagcagactgagtttaagatcctctctcttcacccaggccagaaatacttggtgcaggtccgttgcaaacccgaccacggttactggtccgcttggtcacctgcaacatttattcaaatcccctccgatttcactatgaatgacacgacagtgtggatcagtgtagcggtactatctgcggttatttgccttatcattgtctgggcagtagctctcaagggatatagcatggtcacgtgcatttttccgcccgttcctggccctaaaatcaaaggctttgacgcgcacctgctggagaagggtaagagcgaagaactgttatcggcgctgggatgccaggattttccccccactagcgattacgaggatttgctcgtggagtatctggaagtggatgacagtgaagaccaacacttgatgtcagtgcactctaaggaacacccatcccagggaatgaagcccacctacttagacccagatactgattccggtcgcgggagctgtgattccccatcccttctgagcgaaaagtgtgaggagccacaggcgaacccatcaaccttttatgatccagaggtgattgagaaaccagagaacccagaaaccacgcacacctgggatccgcagtgtatatccatggagggcaagataccttacttccacgccgggggttccaagtgctcaacctggcctttgccccaaccaagccagcacaatcccagatcctcctaccacaatattactgacgtgtgtgaactggccgtcgggcctgccggggcaccagcaacactgctaaacgaagccggtaaagacgcactgaaaagcagccaaaccatcaagtcacgcgaagaagggaaggcgactcaacaacgagaggtagaatcgttccacagcgagaccgaccaggacacgccttggctcctgccacaagagaaaacacccttcggttcagccaagccactggactatgttgaaatccataaggtaaacaaggacggcgccctgtcgctcctccctaagcaacgggaaaactccggcaaaccaaaaaagccgggaaccccagaaaataataaggagtatgccaaggtatcgggtgttatggacaacaatattctggtgctggtgccagatccacacgccaaaaacgtcgcttgttttgaggagtctgccaaggaagcgcctccctcattggaacagaatcaggctgaaaaggcactggccaacttcaccgccacaagcagtaagtgccggctgcagctcggcgggctggattacttggacccagcatgctttacgcactccttccattag

SEQ ID NO: 129963 - DNA, 594 bp, synthetic construct
  misc_feature 1..594: note = Description of Artificial Sequence: Synthetic coding sequence
  source 1..594: mol_type = other DNA
atgcatgaatgtccagactatataacaggcggaccaaactcttgtcatttcggaaagcagtataccagcatgtggaggacttatatcatgatggtgaacgccacaaatcagatggggtcctccttttccgatgaactgtacgtcgacgtcacctatatcgtgcagcctgacccacctctggaactggcagtcgaggtgaagcagcccgaggaccgcaaaccctatctttggatcaaatggtcaccacccactctcatcgaccttaaaaccggttggttcactctcctgtatgaaatccggttaaaacctgagaaagccgcagagtgggaaatccacttcgcaggacagcaaacagaatttaagattctcagtttgcaccctggccagaaatatcttgtgcaagttaggtgcaagccagaccacgggtattggtccgcctggagccctgcaacatttatccaaatcccgagtggggatccactcatgctgggtgcctcccactacaagaacctgaagtcatatagaccacgcaaaataagcagccagggtaggttggctgtgtttacaaaggctacgctgaccactgtacagtag

SEQ ID NO: 129964 - DNA, 312 bp, synthetic construct
  misc_feature 1..312: note = Description of Artificial Sequence: Synthetic coding sequence
  source 1..312: mol_type = other DNA
atgaaggagaatgtggcatcagctacagtttttacgctcctgttgtttctgaatacatgtctgttgaacggccagctgccccctggcaaaccagagattttcaagtgtcggtcacccaataaggaaacgtttacttgctggtggcgcccggggactgatggaggcttgccaactaactacagtctgacctatcaccgggaaggcgaaactctgatgcatgaatgccctgactatataactgggggaccaaactcttgtcacttcggcaaacagtacacatctatgtggaggacatatatcatgatggtgtag

SEQ ID NO: 129965 - DNA, 189 bp, synthetic construct
  misc_feature 1..189: note = Description of Artificial Sequence: Synthetic coding sequence
  source 1..189: mol_type = other DNA
atgaaagagaatgtggcctccgcgacagtgtttaccttgctgctgttcctaaacacctgcctgttgaatgggcaactgccaccagggaagccggaaatatttaaatgtcggtcccctaataaggaaacttttacttgctggtggaggcctggaacggatgggggactcccgaccaattacagcctttag

SEQ ID NO: 129966 - DNA, 336 bp, synthetic construct
  misc_feature 1..336: note = Description of Artificial Sequence: Synthetic coding sequence
  source 1..336: mol_type = other DNA
atgaaagagaacgtggcatccgccacagtgtttacattactgctttttcttaatacctgcctgctaaacggtcaactcccgcctggcaaaccggagattttcaaatgcaggtcccctaataaggaaacattcacctgctggtggaggccaggcacggatgggggcctgccaaccaattactcgttgacttaccaccgagaaggcgaaacactaatgcacgaatgccccgattacattaccggcgggccaaatagttgccatttcggaaaacagtacactagtatgtggaggacttacatcatgatggtgaacgcgacaaaccagatgggcagttag

SEQ ID NO: 129967 - DNA, 1566 bp, synthetic construct
  misc_feature 1..1566: note = Description of Artificial Sequence: Synthetic coding sequence
  source 1..1566: mol_type = other DNA
atgaaggagaatgtggcttccgcaaccgtttttaccttgctcctctttctaaacacctgtctgttgaatgtgcagcctgacccacctcttgagttggccgttgaggtgaagcaaccagaggataggaaaccatacctctggatcaagtggtcccctcccacgctaattgaccttaagacaggttggtttactcttctctacgaaatacgccttaagccagagaaagcagcagagtgggagattcattttgccggccagcagacagagttcaagatcttgtctctgcatcctgggcaaaagtacctcgttcaggtgcgctgtaaacccgaccacggatactggtccgcctggagccccgcaacctttattcaaattccgtccgacttcaccatgaacgatactactgtttggatttctgtggccgtcctgtccgctgttatttgtctgatcattgtgtgggccgtggctttaaaagggtactcaatggtcacctgtatcttcccccccgtcccaggccctaaaataaaagggttcgatgcacacctgcttgaaaaggggaaaagtgaagaattgcttagtgcgctgggctgccaagactttcccccaacttctgactacgaggacctcctggtggaatatcttgaggtcgatgactcagaggaccagcacctgatgtccgttcactccaaagagcatccctcccagggtatgaagcccacctacctcgacccagatacggattcaggccgcggatcatgtgactccccctccttgctgtcagagaaatgcgaggagccgcaggcgaacccctccacattttatgacccagaagtgattgagaaaccagagaatccagaaacaacacacacttgggatccccagtgtattagcatggaaggtaagattccatactttcacgctggggggtctaagtgctcgacttggcccctcccacagcctagtcagcacaatcctcggtcgagttaccataatattacagatgtttgtgaattagctgtaggccccgccggcgccccagctacactcttgaatgaagccggcaaggatgcgttgaagtcctctcagactatcaagtcccgagaggagggcaaagctacgcagcagcgcgaggttgagagtttccactcggaaaccgatcaggacactccctggctcctacctcaggagaagacaccttttggaagtgcaaagcccttggactatgtggagatccataaggtgaataaggacggggccctgtcccttctacctaaacaaagagagaactctggcaagccaaaaaaacctggcacacccgagaataacaaagaatatgctaaggtctcaggagtaatggacaacaatatactggtactggtgcctgacccgcatgcgaaaaacgttgcttgtttcgaggaaagcgcaaaggaggcacctccatctctggagcagaatcaggctgagaaggcccttgccaatttcacagcgacctcttctaagtgcagactccagttgggtggccttgactatcttgacccagcttgttttacacattccttccactag

SEQ ID NO: 129968 - DNA, 867 bp, synthetic construct
  misc_feature 1..867: note = Description of Artificial Sequence: Synthetic coding sequence
  source 1..867: mol_type = other DNA
atgaaagagaacgtggccagtgccacagtattcaccctgctcctgtttctcaacacctgccttctcaatgggcaactgccgcctgggaagccagagattttcaaatgtaggtctccaaacaaggaaacatttacatgctggtggcgaccaggaacagacggcggcctgccaacaaattactccttgacataccatcgcgagggcgagaccctcatgcacgaatgtccagactacatcactgggggccctaacagctgccacttcggaaagcagtatacatccatgtggcgtacctatatcatgatggtgaatgctaccaatcagatggggtcctctttcagtgatgagctctacgtggatgtcacctatatcgttcagcccgatcctccacttgagctcgccgtcgaggtgaaacagccggaagatcggaaaccgtacctgtggattaagtggagtccaccaacgctaattgacctgaagacaggatggttcaccctgctctatgaaattagactgaagccggagaaggccgctgaatgggagatccactttgctggccagcagactgaatttaagatccttagcttgcaccctggccagaaatatctggtgcaagtgcgctgcaagccggaccacgggtactggagtgcctggtctcccgccacattcatacaaatacctagcgactttaccatgaatgatacaacggtgtggatcagcgtagctgtgctgtccgctgtgatctgtcttataatagtctgggctgttgcactgaaagggtactcgatggtgacttgtatctttccccctgtccctggcccaaagataaagggattcgatgcccatttgctggaggttaccccatag

SEQ ID NO: 129969 - DNA, 363 bp, synthetic construct
  misc_feature 1..363: note = Description of Artificial Sequence: Synthetic coding sequence
  source 1..363: mol_type = other DNA
atgaaagaaaacgtagcctctgcgactgtgttcactctgcttctgttccttaatacatgtctcttgaatggccaactgcctcccggtaaacccgaaatattcaagtgcagaagcccaaacaaggagactttcacctgttggtggcgacctggcacagacggaggcttgcctactaattatagcctcacctaccatagggaaggcgagaccttgatgcatgagtgccccgattatatcaccggggggcccaatagttgtcattttggcaagcagtacactagtatgtggagaacctatatcatgatggttaatgctaccaaccaaatggggtccagcttctccgacgaactctacgtcgattag

SEQ ID NO: 129970 - DNA, 105 bp, synthetic construct
  misc_feature 1..105: note = Description of Artificial Sequence: Synthetic coding sequence
  source 1..105: mol_type = other DNA
atgaaggagaacgtcgcgtctgcaacggttttcactctgctactgtttctgaatacctgtctgttaaacggtcaacttccgccgggcaagcccgagatcttctag

SEQ ID NO: 129971 - DNA, 930 bp, synthetic construct
  misc_feature 1..930: note = Description of Artificial Sequence: Synthetic coding sequence
  source 1..930: mol_type = other DNA
atgaaggaaaatgtagcgagtgccacggtctttacactgttgcttttcctgaacacatgtttgttaaatgggcaattgccgcccggcaagcccgagatctttaaatgccgcagccccaataaagagacgttcacgtgctggtggcggcctggtacagatgggggtctgcctacaaactactcattgacataccatagggagggggagaccctcatgcacgagtgtccagattacatcacaggaggccctaattcatgtcactttggaaagcaatatacatccatgtggaggacgtatatcatgatggtcaacgcaacaaatcagatgggaagcagcttcagcgatgaactctacgtggacgtgacgtacatcgtgcagcctgacccaccgttggaacttgcggtggaagtgaagcagccagaagatagaaaaccctatctgtggattaaatggagccctccaaccctcatcgacctcaaaaccggatggtttaccctcttgtacgagatccggctcaaacctgaaaaggccgcagaatgggaaattcactttgctggacaacagacagagtttaagatactttcccttcacccgggccagaaatacctcgtacaagtgaggtgcaagcccgaccacggctactggtctgcatggtctcccgcaacttttattcagatccccagtgatttcacaatgaacgataccactgtttggataagcgtggctgtactgagtgccgtgatatgtctgattatcgtttgggcagttgccctgaaagggtattctatggtgacctgcatctttccacctgtaccaggccccaaaatcaaaggctttgatgcccacttactggaagaccgcctttgcacgcccgggcgctgctgcgtgtctactggtttgaccgacctggattacagctgtagcacctag

SEQ ID NO: 129972 - DNA, 1254 bp, synthetic construct
  misc_feature 1..1254: note = Description of Artificial Sequence: Synthetic coding sequence
  source 1..1254: mol_type = other DNA
atgggccggcgaagggcccccgaattataccgcgccccatttccgttgtacgcacttcaggttgatccctcaaccgggttactgattgccgccggcgggggcggggcagccaaaacgggcataaagaacggggtgcactttcttcagcttgagctcatcaatgggcgcttgtctgcaagcctattgcattcccacgacacagagacaagggctaccatgaatctagcgcttgctggcgacattctagctgccggacaggacgcacactgccagctacttagatttcaggcccaccagcagcaggggaacaaagccgaaaaagccgggagcaaagaacaggggccacgccagcggaagggcgccgctccggccgagaagaaatgcggtgcagaaacacagcacgagggccttgagttacgggtggagaacctgcaagcggtgcagacagatttctcttcagaccctcttcagaaggtggtctgcttcaaccacgataacaccttgctggctacagggggaacagacggttacgttagggtctggaaagtgccttcactggagaaggtactggaatttaaggcacacgaaggggagattgaggatctggctctagggcctgatggaaagctcgtcaccgtgggccgcgacttaaaggcctctgtttggcaaaaggaccaactcgtgactcagctccactggcaggaaaacgggcccacattctcttcaacgccttatagatatcaagcttgtcgcttcggtcaagtgccggaccagcccgccggcctgcggctgttcaccgtccagattcctcacaaaagactgcggcaacccccgccttgctatcttacagcgtgggacgggtccaacttcttgccactgcggaccaagtcttgtggccacgaagttgtgagctgcctggacgtgagtgagtcagggacattcctgggtctggggaccgtaaccggctcagtggcaatctatattgccttttcgctgcagtgcctgtactacgttcgggaagctcatgggattgtcgtcaccgatgtggccttcttacccgaaaaaggccgaggcccggaactgctggggagtcatgagaccgcactgtttagcgtcgcagttgatagccgttgccaactgcaccttctccccagcaggaggagtgtccctgtctggttactgttgctgctttgcgttggcctgatcattgtcactatcctgctgcttcagagcgcgtttcctgggttcctatag

SEQ ID NO: 129973 - DNA, 1254 bp, synthetic construct
  misc_feature 1..1254: note = Description of Artificial Sequence: Synthetic coding sequence
  source 1..1254: mol_type = other DNA
atgggtcgaagacgggctcctgaattataccgcgccccctttccattgtacgcgctgcaggtggatccctctaccggcctgctcatcgccgcaggcggtgggggggcggcgaaaactggaatcaaaaatggggtgcattttctgcagcttgaactgatcaatggacggttgagcgcgtccctcttgcacagtcacgataccgaaacccgcgctaccatgaacctggccttggcaggagatatcctggctgcgggccaggacgcacattgccaactcctccggtttcaggctcaccagcagcagggcaataaggctgagaaggctggaagcaaggagcagggccccagacaacgtaagggggccgcccccgccgagaagaagtgcggggccgaaacccagcacgagggtttggagctgcgggtcgaaaacttacaggccgtgcagactgactttagtagtgaccccctgcagaaagtcgtgtgctttaatcatgacaataccctcctcgcgaccggcgggaccgacggctatgtaagggtgtggaaagtgccctcactggagaaggtgctcgagtttaaggcacacgaaggtgaaatcgaggaccttgccctgggccctgacggcaagctcgtgaccgtggggcgggacctcaaggcctcagtttggcagaaggatcagttggtcacccagctccattggcaggagaacggacccactttttcctctaccccctaccggtatcaggcgtgcaggttcggtcaggtgcctgatcagccagcgggcctccgcctctttaccgtacaaattccccataaacgactccgccagcctcctccttgttatctgaccgcctgggacggttccaacttcctacccctgcgtacaaaatcttgcggccacgaggtggtgtcctgtctggacgtaagcgagagcgggactttccttgggctggggacagtgaccggcagcgtggcaatttacatcgctttttcacttcagtgcctttactacgtccgggaagcgcatggcattgtggttaccgacgttgcctttttgccagaaaaagggagaggtcccgagctgctggggtctcacgagaccgccctgttttctgtggccgttgactccaggtgccagttacacctcctcccgagccgccgatccgtccctgtttggctcctcctgctcctgtgcgtgggcctgatcattgtcaccattttgctgttgcagtccgcatttccaggattcctctag

SEQ ID NO: 129974 - DNA, 441 bp, synthetic construct
  misc_feature 1..441: note = Description of Artificial Sequence: Synthetic coding sequence
  source 1..441: mol_type = other DNA
atgagattactacagctgctgtttcgcgctagcccagccacgcttctcctggtgctatgtttgcagttaggagcgaataaagcccaagacaatacgaggaaaatcatcattaaaaatttcgacatacccaagtccgttcgtccaaatgacgaggttactgccgtattggccgtccagacggagctaaaggagtgtatggtggtaaagacctatttgatcagcagtattcccctgcagggcgcctttaattataagtatactgcgtgcctatgtgatgacaaccctaagacattctactgggatttctatacgaatcgcacggtgcagatcgctgccgtggtggatgtcatcagggagcttggaatctgccctgatgatgccgccgtgatcccaatcaagaacaacaggttttataccattgagatcctgaaggtagaatag

SEQ ID NO: 129975 - DNA, 1185 bp, synthetic construct
  misc_feature 1..1185: note = Description of Artificial Sequence: Synthetic coding sequence
  source 1..1185: mol_type = other DNA
atgtccggagaggatgaacagcaggagcaaactattgctgaggatctagtcgtgactaaatataagatggggggcgatatcgctaacagggttttgcggagcctggtggaggcctcatcaagcggagttagcgtgctgagtctttgtgaaaagggggacgctatgattatggaggaaactggaaagatttttaaaaaagaaaaggagatgaagaagggtatcgcttttcccaccagcatttcagtcaataactgtgtttgccatttctcacccctgaaatctgatcaggattatatcttgaaagaaggagacttagtcaaaattgatctcggcgtccatgtggacgggttcatagccaatgtggcgcatactttcgtggtggacgtcgctcaaggtacacaggtgaccgggcggaaagccgatgtgattaaagccgcccacttgtgtgccgaggccgcactgcgcctggtgaaaccgggtaaccagaatactcaagtgactgaggcatggaataaggtggcacactccttcaactgtacaccaattgaagggatgttgagccatcaactgaaacagcacgtcatcgatggagagaaaactattattcagaaccccaccgaccaacagaaaaaggaccacgaaaaggctgagttcgaagtgcacgaggtgtacgccgtcgatgtcctggtgagttcaggcgaaggaaaagctaaagacgctggccaacggaccacaatctacaaaagagacccctcaaaacaatacggtctcaaaatgaaaacaagtcgagctttcttctcagaagtagagaggagattcgacgccatgccatttacgttaagggcctttgaagacgaaaagaaggcaaggatgggagtcgtagagtgcgcgaagcacgagctgctgcagccgtttaatgtgttatacgaaaaagaaggggaatttgtcgcacagtttaagttcactgtcctgctcatgcctaatggacctatgcgaataaccagcggaccattcgaaccggatttgtataaaagtgagatggaagttcaggacgctgagctcaaggctctgttacaatcaagcgcatcacgtaagacacagaaaaagaagaaaaaaaaagcttctaagacagccgaaaacgccacttccggcgagactctggaagagaacgaagcaggcgactag

SEQ ID NO: 129976 - DNA, 1218 bp, synthetic construct
  misc_feature 1..1218: note = Description of Artificial Sequence: Synthetic coding sequence
  source 1..1218: mol_type = other DNA
gcatgccctgcaccacaacccgctagatcgcaactgctggctttagcctgtctgcccgctcccctgctggccagagctttcgccagacctctgctcgaggaccggggcgactccgatcacagccccgaagacctggtggtgactaagtacaaaatgggaggcgatatagctaatcgcgtgctccggtccttggtagaagccagcagttccggggtcagtgtgctgagtctttgtgagaagggggacgctatgatcatggaagagacaggaaaaatttttaaaaaagaaaaggagatgaaaaaaggcatcgcttttcccacatcaataagcgtgaacaactgcgtatgccacttttcccctctcaagagcgaccaggattatatactgaaagagggggacttggttaagatcgaccttggagttcacgtcgacggcttcatcgctaacgtggcccatacattcgttgtggatgttgcccaaggaacacaggtcacaggacgcaaggcagatgtgattaaggctgctcatttgtgcgccgaagcagctctccgtctcgtgaagccaggtaatcaaaacacccaggttacggaggcttggaataaagtagctcacagtttcaactgcactcctattgagggaatgctgtctcaccaactcaagcagcacgtcatcgacggtgagaagaccataatccaaaaccctaccgaccagcaaaagaaggatcatgagaaagccgaattcgaggttcacgaagtgtacgcagtggacgtgcttgttagtagtggtgaaggcaaagccaaagatgctggacagcgcactactatatataagcgcgacccttcgaagcagtatggtctcaaaatgaagacgtcccgcgctttcttctccgaagtggaacgcagatttgacgcaatgccgttcaccctcagggcatttgaggatgaaaagaaagctaggatgggggtggtggaatgtgctaagcatgaactgctgcagccgtttaatgtattgtatgagaaggaaggagagttcgtggcccaatttaagtttaccgttctgctgatgcctaacggacccatgagaattacctctgggcccttcgagccagacctgtacaagtccgagatggaagtgcaggatgctgagttgaaggcccttttgcagtcaagcgccagtagaaagacccaaaagaaaaagaagaagaagaagaaaaagtag

SEQ ID NO: 129977 - DNA, 738 bp, synthetic construct
  misc_feature 1..738: note = Description of Artificial Sequence: Synthetic coding sequence
  source 1..738: mol_type = other DNA
atgacaagaatgttacaaaggatggacgtgctggctaagaaggccaccgaaatgggcgtgcgcttgatggtagatgcagaacagacgtatttccaaccagccatctcacgcttgacattggagatgcagcgcaagttcaacgtggagaaacccctgatatttaacacctaccagtgctacctgaaggacgcctatgacaacgttacgctggacgtagagctggctcggcgagaaggttggtgtttcggagccaaactcgtgcggggcgcttaccttgctcaagagcgagccagagctgccgagatcggctacgaagacccgatcaatccgacatatgaagctactaacgccatgtatcatcgttgcctagattatgtgctcgaagagctcaagcataatgccaaggcaaaagttatggttgcgtctcataacgaagacactgtaagatttgccttaaggcgcatggaggaactgggcttacaccccgctgatcaccgagtgtattttggccagctcctaggcatgtgcgatcagatcagcttccctctgggccaggccgggtatcctgtgtataagtacgttccttacggtcctgtgatggaggtattgccctatctgagcagacgagccttggagaactcttcactgatgaagggcacacacagggagaggcagctcctgtggctggagctgctgaggcggctgcgcaccggaaatcttttccatcggccagcatag

SEQ ID NO: 129978 - DNA, 1803 bp, synthetic construct
  misc_feature 1..1803: note = Description of Artificial Sequence: Synthetic coding sequence
  source 1..1803: mol_type = other DNA
atggctttaagacgggcactgcctgctctccgtccttgcattccacgctttgtccctttgtcaacagctccagcaagcagggagcaaccggcggccgggccggctgccgtgcctggaggaggatccgcaacagccgtgcggccacccgtgcccgccgtagactttgggaatgcccaagaagcttaccgctcaaggaggacgtgggagctggcgcgcagtctgttagtcctgaggctgtgtgcgtggcctgccctccttgcacgtcacgaacagcttctgtacgtgagtaggaagctgcttgggcagaggctgtttaacaagctgatgaagatgacattttatggacatttcgtggctggcgaggatcaggaatccatccagcctctgctgagacactaccgagcctttggagtgtcagcgatcttagactatggggtcgaggaggatctcagcccagaggaggctgaacataaagagatggaaagttgtacttccgccgcagagcgggatggttccggaacaaacaagcgcgacaaacagtatcaggcccattgggccttcggggaccgacgtaatggcgtgatcagcgcgagaacctatttttacgccaacgaggccaaatgcgactcccacatggagacattcttacgctgtatcgaggccagcgggcgcgtttccgatgatggcttcatcgccatcaagctgaccgctctcggacgtccccaattcttactgcagttcagcgaggttcttgcaaagtggcgctgcttttttcaccaaatggcagtcgagcagggtcaggccgggcttgccgctatggacaccaaattagaagttgctgtgctgcaggagtcagtggctaagttaggcatcgcctcgcgcgccgagatcgaggactggtttactgctgagacacttggcgtgtccgggaccatggatctccttgattggtcatccctcattgactcccgtaccaagttgtccaagcacctcgttgtaccaaatgcgcagactggacagctcgaacctttgctttcacggttcaccgaggaggaggaactacaaatgacccgtatgctgcagaggatggacgtgctagcaaagaaggcaacagagatgggagtgcggctgatggtggacgctgagcagacctattttcaaccagccatatccagacttactctggaaatgcagcggaaatttaatgttgagaaacccctaatattcaacacgtaccagtgctacctgaaggacgcatacgataacgtcacattagatgtcgaactggctcggagggagggatggtgtttcggcgcaaaacttgttaggggtgcttatctggcgcaggaacgagccagggctgccgagattggctacgaggaccccattaatccaacttacgaagcgaccaatgccatgtatcatcgctgcttagattacgtcctagaggagcttaagcacaatgctaaggcgaaggtgatggttgccagccataacgaagacacagtgaggttcgcgcttcgccgtatggaggaactcggtttgcaccccgcagaccaccgtgtgtactttgggcaactgttaggcatgtgtgatcagatatccttccccttaggacaagcgggttaccctgtgtataagtacgtgccctacggccccgttatggaggttctaccctacttgagcaggagagccttggaaaattcaagtctgatgaaagggacgcatcgcgagaggcagctcctctggctagagttactgaggagactgcggacagggaacctgtttcacagacccgcatag

SEQ ID NO: 129979 - DNA, 1479 bp, synthetic construct
  misc_feature 1..1479: note = Description of Artificial Sequence: Synthetic coding sequence
  source 1..1479: mol_type = other DNA
atgaagatgacattttacggccatttcgttgcaggcgaagaccaggaatctatccagcccctgctacgccactatagggcctttggtgtctccgcgatcctcgactatggggtggaagaggatttatccccagaggaggccgagcataaagagatggaaagctgtacttccgccgccgaacgggatggctccgggaccaacaagcgggacaagcaataccaggcccattgggcttttggagaccgccgcaacggagtgattagtgccagaacctacttctacgccaatgaagctaagtgcgatagccacatggagaccttcctgcgctgcattgaggcttcaggacgcgtttccgatgacggttttatcgcaattaagctaactgctcttgggagaccacagtttctgttgcagttttcggaggtactcgctaaatggcgctgtttctttcaccaaatggccgtcgaacagggtcaagccgggttggctgccatggatactaaacttgaagtggccgtgctccaagaaagcgtcgcaaagttaggaatcgccagcagggcagagatcgaggactggttcacggcagagactctgggagtgagtggtaccatggacctcctcgactggtcttcccttatcgatagtcgaaccaagctctccaagcatctagtggtaccaaacgctcaaacgggacagctggaacctctcctgtccagattcactgaggaggaggaactccagatgacacgcatgttgcagaggatggatgttttagccaaaaaggctaccgaaatgggcgttcggctaatggtggatgcagagcaaacctattttcagcctgctattagccgcctgaccttggaaatgcaacgtaaattcaacgtggagaagccactgatcttcaatacataccaatgttacctgaaggatgcttatgacaacgtgacactcgacgttgagctcgcaagaagggaaggctggtgcttcggagccaaactggtgagaggtgcatatttggctcaggagagagctcgggctgccgagatcggctatgaagatcccatcaatccaacatatgaagccacaaatgcaatgtaccaccgctgcctggattacgtgttagaggaacttaaacacaatgctaaggcaaaagtgatggtggctagtcacaacgaagacaccgtccgctttgcactacgtcgcatggaggaattagggctgcatccggccgatcaccgggtgtatttcggccagctccttggaatgtgtgaccagattagttttcccctcggacaagccggataccccgtgtataagtatgtaccttatggccccgtgatggaagtgctcccatacctgagccgcagggcactggagaattcatcactgatgaagggtacacacagggaaagacagctcctttggcttgagcttctccgccggctccgcactggaaatctctttcaccgtcccgcctag

SEQ ID NO: 129980 - DNA, 1611 bp, synthetic construct
  misc_feature 1..1611: note = Description of Artificial Sequence: Synthetic coding sequence
  source 1..1611: mol_type = other DNA
atgtcccccagagttgtctctaatagtagtgtactcgccagtcaatcagtgggtatcaccaacgtgaggacagtgttcagcaacgtgttcaataacacaaccgcattccctatcttaaggggcagcaattgtcataagatcactgctcctggtctgggtaagggacagcttgttaacctcttgccgcccgagaacctgccttggtgtggagggagccagggccccagaatgctgcggacctgctacgtgttgtgttcccaggctggccccccttcacggggttggcagtcactctccttcgacggtggagccttccacctgaagggaaccggagagctaacacgcgctttgttagttcttcgtttatgtgcatggccaccactagtcacacatggactcctcctgcaggcttggagcagacgccttctcggcagcagattgagtggcgcattcctgagggcttccgtttacgggcaattcgtagccggtgaaaccgctgaggaggtgaaagggtgtgtgcaacagctcaggacattgagcctgcggccattgctcgccgtgcctaccgaagaggagccggattccgcagccaaatctggcgaggcatggtatgaaggaaatctgggagccatgttgaggtgtgtggacctgtcccgaggtctgctggaacccccatctctagccgaagccagtcttatgcaactgaaagtaaccgcccttacgagtactcgcctgtgcaaggagctggccagctgggtgaggcggccaggggcaagtcttgaactgtcacctgagcggttggccgaggccatggattcagggcagaacttacaggtgtcctgcctgaatgcagaacagaaccagcatttgcgcgcgagcttgagccgcctccatcgcgtggcccagtatgcccgagcccagcacgtgaggttgcttgtcgatgccgaatacacctccctcaacccagccctttcactcctcgttgccgctctggccgtgaggtggaactcgccaggagaggggggaccttgggtgtggaacacatatcaagcttgtctgaaggacacttttgaacgcttgggtcgagatgccgaagccgcacaccgcgccggcttggcctttggggttaaactggtcaggggagcatatctcgacaaggagagggccgtggctcagttgcacggtatggaagacccaacccaacccgactacgaagcaacaagtcagagttacagtcgttgccttgaactgatgcttacgcatgtagcacgccacgggccgatgtgccatctgatggtcgctagccacaatgaagaatccgtaaggcaagctaccaagagaatgtgggagctcggaattcctctggacggaaccgtgtgtttcgggcaactactgggaatgtgtgaccacgtctctctggcactggggcaggctggctatgtggtgtataaatccatcccctatggctccctcgaggaggtgattccttatctgattcgtagggctcaagagaataggagtgtgctgcagggcgcccggagggagcaggagcttttgagccaggagctttggcgtcggctgttgccgggatgtcgcaggatcccacactag

SEQ ID NO: 129981 - DNA, 762 bp, synthetic construct
  misc_feature 1..762: note = Description of Artificial Sequence: Synthetic coding sequence
  source 1..762: mol_type = other DNA
atgcccggacggactgaaggtggctcatggctccggaacgctgccgccgcggatgttttgaggaacctcccagaagtggagtggagagagcctcaacactgctgcccacctacacctagaaagagaaagcagaatccccgcgtgccactgccgcattatccacccaacccagccgccgccatcgctgccgacactatgccaaagcgtaagaagcaaaaccaccaccagcctccaacacagcagcagccgccactgcccgagcgggaagagactggtgatgaggaagacgggtcccctattggtccaccaagtctgttgggtcctcctcctatggctaacggcaagcccggggacccaaagagtgctctccatcgtggacctcctggctctagggggccgcttataccaccactgctgtcattgcctccgccaccgtggggacgggggccaatcagaaggggacttggccctagatcaagcccttacggccggggctggtggggggtgaacgccgagcccccgtttccaggccctgggcatggcggaccaacccgtggatcgtttcacaaggaacagagaaatcccaggcggttgaagtcctggtcactcataaaaaatacctgcccccccaaagacgatccccaagtgatggaagataaatccgacaggccagtgtgcagacattttgcgaagaaggggcactgtaggtatgaggacctctgcgccttttatcatccaggcgttaacggaccccccctttag

SEQ ID NO: 129982 - DNA, 504 bp, synthetic construct
  misc_feature 1..504: note = Description of Artificial Sequence: Synthetic coding sequence
  source 1..504: mol_type = other DNA
atgcccaaaaggaaaaaacaaaaccatcaccagccccccacccagcagcagccccctctgccagagcgcgaagaaacaggcgatgaggaggacgggtcaccaatcgctctccatagagggcctccgggaagcagaggacctctgattccaccacttttaagtctgccaccgcccccatgggggagagggcccatccggcgaggcctgggcccccggtcatcgccttatggccgaggttggtggggagttaatgctgagcctccctttccaggcccgggccacggaggacctacccgcggatcctttcacaaggagcaaaggaacccccgtcgtctaaagtcatggtccctgatcaaaaacacttgtccacccaaagatgaccctcaggtgatggaagataaatctgaccggcccgtatgtaggcatttcgccaaaaaggggcactgtcgctatgaggatctttgcgccttttaccaccctggagtgaatggaccgccactgtag

SEQ ID NO: 129983 - DNA, 567 bp, synthetic construct
  misc_feature 1..567: note = Description of Artificial Sequence: Synthetic coding sequence
  source 1..567: mol_type = other DNA
atgcctaagcgaaaaaaacagaaccatcaccagccacctacccagcagcagcctcctctcccagaacgggaggagacaggcgacgaagaggatgggtccccaatcgggccaccttctctcctagggccccctcctatggccaatggcaaacccggcgacccaaaaagcgcccttcacagggggccgcctggctcccgaggcccgctgattccacccctgctgtccctcccaccccccccatgggggaggggccctatacgcaggggactcggcccacgatcttccccttacggtcgcggatggtggggagtaaatgccgagcccccttttccaggaccagggcatggaggtccaactcgcggttctttccacaaggagcagcgcaacccccgtaggctgaagtcttggtcattgatcaaaaacacgtgtccgccaaaggacgatccacaggtcatggaggacaagtcagacagacctgtgtgtaggcactttgcgaagaagggacattgccgctacgaagacctttgtgctttttatcaccctggcgttaacgggccgcccctctag

SEQ ID NO: 129984 - DNA, 567 bp, synthetic construct
  misc_feature 1..567: note = Description of Artificial Sequence: Synthetic coding sequence
  source 1..567: mol_type = other DNA
atgcccaaaaggaaaaagcagaaccatcaccagccccccacacagcagcagcctccactgccagagagggaagagacgggcgacgaagaagacgggtcaccgatcgggcctccatccctactgggcccgcctccgatggctaatggaaaacccggggatccaaaatcggcgctccacaggggccctcctggtagccggggccccctgatcccaccactcttatcactcccccctccaccgtgggggcgtggccctatcaggcgaggcctcggccccagaagcagtccgtacggaagaggctggtggggagtgaatgccgagccaccttttccagggcccggacacgggggccccactagggggtcgttccataaggagcaacgtaatccacggcgtctgaagtcgtggtcacttattaaaaatacatgtcccccaaaagacgacccacaggttatggaggacaaaagcgaccggccggtctgccgacacttcgccaaaaagggccattgtaggtacgaggacctctgcgcattttaccaccctggtgtcaacggtccacccctctag

SEQ ID NO: 129985 - DNA, 504 bp, synthetic construct
  misc_feature 1..504: note = Description of Artificial Sequence: Synthetic coding sequence
  source 1..504: mol_type = other DNA
atgccgaagaggaagaagcaaaatcatcatcagcctcccactcagcagcaacccccgttgcccgaacgagaggagaccggtgacgaagaggacggctcacctatcgccctgcatagaggaccacctggatcacgggggccattaataccgcccttactcagcctccctccgcctccttggggaaggggtccaatccgccgtgggttgggcccccgttctagcccatacggacgcggatggtggggagtaaatgctgaacccccattccccggccctggtcatggcggacccacaagaggatcattccataaggaacaaaggaatcccagacggctcaaaagctggagtctcataaagaatacgtgtcctccaaaggatgatccgcaggtcatggaagacaaaagtgacaggcccgtgtgccggcacttcgctaaaaagggacactgtagatacgaggatctgtgtgcgttttaccatcctggcgtcaacggacccccactttag

SEQ ID NO: 129986 - DNA, 504 bp, synthetic construct
  misc_feature 1..504: note = Description of Artificial Sequence: Synthetic coding sequence
  source 1..504: mol_type = other DNA
atgccaaaaagaaaaaagcaaaatcaccaccagccccctacacagcagcaacctccattgcccgagcgggaagagaccggcgacgaagaggacggctcacccattgcgttgcaccggggccctccagggagccggggcccattgatccccccactattatctcttcctcctcccccgtggggccgcggccctatcaggagaggccttggtcctcgcagcagcccctatggccgcgggtggtggggagtcaacgcggaacctcccttcccaggcccgggccatggcgggcccacccgggggagttttcataaggagcagagaaatccacgccggttgaagtcctggagcctcataaagaacacctgcccaccaaaggatgatccccaagtgatggaagataaaagcgaccgtccggtttgccgccatttcgctaagaagggccattgccggtacgaggatctctgcgccttctaccacccaggtgtgaatgggcctccactgtag

SEQ ID NO: 129987 - DNA, 504 bp, synthetic construct
  misc_feature 1..504: note = Description of Artificial Sequence: Synthetic coding sequence
  source 1..504: mol_type = other DNA
atgcccaaacgaaaaaaacagaatcatcatcaaccgccaactcagcaacaaccgcccctgccagaaagagaagaaacaggggacgaagaggatgggtcccccattgcacttcatcggggtccacctggttcaaggggacctctgatcccacccctgttgtcattacccccgccgccatggggccgcggccccatcagacgcggccttggcccccgctcttcaccatacgggcgaggctggtggggcgttaatgccgagccaccattccccgggcccggccatggtgggcctacccgtggatcgtttcacaaggagcagcggaatccccgtcggctgaagtcctggagcttgatcaaaaacacttgtcccccaaaggacgatccgcaggtcatggaagataaaagtgaccggcctgtttgtaggcactttgccaagaagggccactgtcggtacgaagacttatgtgccttctaccatcccggagttaacggcccacctctctag

SEQ ID NO: 129988 - DNA, 567 bp, synthetic construct
  misc_feature 1..567: note = Description of Artificial Sequence: Synthetic coding sequence
  source 1..567: mol_type = other DNA
atgcctaaacgcaagaagcagaatcatcatcagccacccacccagcagcagccacctctgccagagagagaggaaaccggcgatgaggaggatggatctccaatcggccccccgagtctcctgggccctccgcctatggcaaatggtaaaccgggggatcctaagagcgcccttcatcgggggccccccggtagcagggggcccctaatccctccactgctctccctccctccccctccttggggacgcggaccgatcaggagagggctgggccctcgatcctctccgtacggccgggggtggtggggcgtcaacgctgaacctccttttcctggaccagggcacggcggcccaacacgaggtagctttcataaggaacagcgcaatccacgccgacttaaatcctggagcctgatcaagaatacttgcccaccgaaagatgaccctcaggtgatggaggacaagtctgatcgtccagtctgcaggcactttgccaagaagggccactgcagatacgaggacctctgcgcattctaccatcccggtgtgaatggcccacctctctag

SEQ ID NO: 129989 - DNA, 567 bp, synthetic construct
  misc_feature 1..567: note = Description of Artificial Sequence: Synthetic coding sequence
  source 1..567: mol_type = other DNA
atgccaaaacggaagaagcagaaccatcaccagcctcctacccagcagcagccacccctgcctgagagagaagagacgggagatgaagaggatggcagccctattggcccgccatctttgctgggccccccacctatggccaacggcaagcccggggacccaaaatcagctctgcacagagggccgccaggaagtcggggacctcttattcccccactcctctccctaccacctcccccgtggggaaggggaccaatcagacgcggactgggacccagaagttctccttacgggcgaggctggtggggcgtgaacgccgaacccccctttcccgggccgggccacggcgggccgacccgaggaagcttccacaaggaacagagaaaccctaggagactgaaaagttggagtctcattaaaaacacttgcccacccaaggacgatccacaagtcatggaggataaatcagatcgccctgtctgtagacattttgcaaaaaagggccattgtcgttatgaggatttgtgtgctttctatcatcccggtgtgaacgggccacctctgtag

SEQ ID NO: 129990 - DNA, 504 bp, synthetic construct
  misc_feature 1..504: note = Description of Artificial Sequence: Synthetic coding sequence
  source 1..504: mol_type = other DNA
atgccgaaaagaaagaagcagaaccatcaccaacctcccacgcagcagcaaccaccactccccgaaagagaggaaaccggagatgaagaggatgggtctccgattgctctccatcgcggtccacccgggagcagaggacctttaattcccccacttctctctcttccgcctccaccttgggggcgcggtcccatacggcgaggacttggccccagatcgtccccttatggtcgtggttggtggggggtgaacgccgaaccaccttttcctgggcctggtcatggtggccctacgcgcggtagtttccacaaagaacaacgaaaccctaggcgtttaaagtcttggtcactaattaagaatacctgtcctcccaaggatgatccacaggtgatggaggataagagcgaccgcccagtgtgtcgccattttgctaaaaagggtcattgtagatacgaagacctatgtgccttttatcaccccggcgtgaatggccctccactgtag

SEQ ID NO: 129991 - DNA, 504 bp, synthetic construct
  misc_feature 1..504: note = Description of Artificial Sequence: Synthetic coding sequence
  source 1..504: mol_type = other DNA
atgccaaaacgcaagaagcagaaccaccatcagccgccgacacagcagcaacccccgctgcccgagagggaagagaccggagacgaggaggatggcagtcccatcgctttgcaccgggggcctcccggcagtaggggcccactcattcctccactcctgagcttacctccacccccgtggggacggggccccattaggaggggactaggacctaggtcctctccctacgggagagggtggtggggcgtgaatgccgagccaccattccctggaccgggacacggaggccccacacgcggctcatttcataaagagcaacgtaaccctcggagactgaaatcttggagccttatcaagaatacgtgcccaccaaaagatgatccacaagtcatggaagacaagtccgaccgacccgtctgccgtcacttcgctaagaaagggcattgtaggtacgaagacctctgcgccttttatcatcctggggtgaatgggccgccactgtag

SEQ ID NO: 129992 - DNA, 504 bp, synthetic construct
  misc_feature 1..504: note = Description of Artificial Sequence: Synthetic coding sequence
  source 1..504: mol_type = other DNA
atgccgaagaggaagaaacagaaccaccatcagccacctacccagcaacagcccccgctcccagagcgggaggaaaccggggatgaggaggatggctcacccattgccctccatcggggcccacccggctctcggggccccttaatcccacccctgctgtccctgcctccacctccttgggggaggggccctatcagaagaggtttaggccctcgtagctcgccttatgggcgcggttggtggggtgtcaatgctgagccccccttcccgggaccaggccatggcggccccaccagagggagtttccataaagaacagcgaaaccctcggaggttgaagagttggagtctgattaagaacacctgcccccctaaggacgatcctcaagttatggaggacaagtcagatagaccagtttgccgacattttgcgaagaaggggcactgtcgttacgaagacctctgtgccttctaccacccaggggtcaatggtcctcctctgtag

SEQ ID NO: 129993 - DNA, 567 bp, synthetic construct
  misc_feature 1..567: note = Description of Artificial Sequence: Synthetic coding sequence
  source 1..567: mol_type = other DNA
atgccgaagaggaagaagcagaaccaccaccagccacctactcagcagcagcctccccttcctgaaagagaggagacaggagatgaagaggatggttctcccatcggaccaccctccctcctagggcctccccccatggccaatggcaaacccggcgaccctaaatccgctttacaccggggaccacctggcagccgcggccccctgattcctccactgctgagcctgccaccacccccatgggggcggggccccattagacggggccttgggccaaggtcaagcccttatggaagaggatggtggggagttaacgcagaaccccccttcccaggacctgggcacgggggacctacacgcggatcctttcataaggagcagaggaatcccaggcgcttgaaaagctggtccctgatcaagaacacatgtccacccaaggatgaccctcaggtaatggaggataagtccgatcggcccgtgtgccgccacttcgccaagaaaggccactgcagatacgaggacttgtgcgccttttaccacccgggagtgaacgggcccccactgtag

SEQ ID NO: 129994 - DNA, 567 bp, synthetic construct
  misc_feature 1..567: note = Description of Artificial Sequence: Synthetic coding sequence
  source 1..567: mol_type = other DNA
atgccaaaacggaagaagcagaaccaccaccagccaccaactcagcaacaaccccccctcccagaaagggaggagacgggtgatgaggaagatgggagccctattgggccaccctcactgctcgggccacccccaatggcaaatgggaagccgggcgaccccaagtctgcacttcaccgcgggcctccgggatcgcgggggcccttgattcccccgctcctgtccctgcctccccccccttggggaagaggcccaattcgacgtggcttgggcccgcgctcctcaccatacggacggggatggtggggtgtaaatgccgagcccccgtttccagggcctggccacggaggacctaccagagggagcttccataaagaacaacggaatcctcgtaggttaaagtcctggtccttgattaagaacacgtgcccccctaaggacgatccccaagtcatggaagacaagagcgatagaccagtgtgtaggcactttgccaagaagggccattgccggtacgaggatttatgcgcattttaccatcctggggttaacggccccccactttag

SEQ ID NO: 129995 - DNA, 567 bp, synthetic construct
  misc_feature 1..567: note = Description of Artificial Sequence: Synthetic coding sequence
  source 1..567: mol_type = other DNA
atgcccaagcgtaaaaaacagaaccaccaccaaccacccactcagcagcagcctccattgcctgaacgggaggaaactggagacgaggaagacggctctcccatcggccccccttcactgctgggtcctccccctatggctaatggcaagcccggcgacccaaaatccgccctccatcgcggccccccaggatcacggggtccccttataccgcccctgctctcactgcccccccccccctgggggcggggcccaattagacgaggactgggacctagaagttccccttatggacggggctggtggggggtgaacgccgagcctccgtttcccgggcccgggcatgggggtcccactcgcggttcctttcacaaggaacaacgcaatccaaggagattaaaatcctggtccctcatcaagaacacgtgtcctcccaaagacgacccacaggtaatggaagataagagcgacaggcccgtctgcagacatttcgccaagaagggacactgccgatatgaggacctgtgtgcattctatcaccccggcgttaacggtccacccctgtag

SEQ ID NO: 129996 - DNA, 762 bp, synthetic construct
  misc_feature 1..762: note = Description of Artificial Sequence: Synthetic coding sequence
  source 1..762: mol_type = other DNA
atgccggggcgcacggagggtggcagctggttacgcaacgcagcggcagccgacgtgttgcggaacctaccagaagtggagtggcgtgagccacagcactgctgtccacctactcccaggaaacggaaacagaaccctcgggtacctctgcctcactaccctccgaatcctgccgccgccatcgccgcagataccatgccgaagaggaagaaacagaatcatcaccagccacccacacagcagcagccaccgctgcccgaacgagaagagacaggagacgaggaagacgggagtcctatcgggcctcccagtctccttgggcccccccctatggcaaacggaaaaccgggagacccaaagagtgccctgcatagagggccaccaggcagccgcggcccactgatcccgcccctcctgagcctacctcctccaccttggggcaggggccctatccggcgggggttaggtccaaggagctctccttacggacggggatggtggggagtgaatgctgagcccccctttcctggccctggccacggggggcctacacgaggctcttttcacaaggaacagaggaatccccgcaggctgaagtcctggagcctgatcaagaatacctgccctccaaaggacgacccccaggtcatggaggataaaagtgatcgcccagtatgcaggcactttgcaaagaaaggacattgtagatatgaggatctgtgcgcattctaccatcctggcgtgaatggcccgcccctgtag

SEQ ID NO: 129997 - DNA, 762 bp, synthetic construct
  misc_feature 1..762: note = Description of Artificial Sequence: Synthetic coding sequence
  source 1..762: mol_type = other DNA
atgcccggtaggacagagggaggctcttggctgagaaatgccgctgccgctgatgttctcagaaatttgcccgaagtcgagtggcgggaacctcagcactgctgcccacctacaccacgaaaacgcaagcagaacccaagagtcccactgcctcattacccgccgaacccagcggcagcgattgccgcggacactatgcccaaaaggaaaaaacagaaccaccatcaaccgccgacccaacagcaacctcccctcccagagagggaagagacaggagacgaagaggacgggagtcccattggcccaccttccctgctgggacccccccccatggccaacggcaagcctggcgatccgaaaagtgcactccaccgcggccctcccggcagtagaggcccacttattcctcctctcttgagcttgcctcctcccccctggggtcgtggccctattcgacgaggtttaggacctaggagttcaccttacggtcgcggatggtggggggtgaacgccgagccccccttccctggacctggacacgggggcccaacccggggctcttttcacaaggaacagcggaatccacgccgactcaaaagctggagcctgataaagaacacctgtcccccaaaggacgatccgcaggttatggaagacaagagcgaccgccctgtctgtcggcacttcgctaagaaaggacattgccggtacgaagatctgtgtgcattttaccatcccggggtgaatgggccaccattatag

SEQ ID NO: 129998 - DNA, 762 bp, synthetic construct
  misc_feature 1..762: note = Description of Artificial Sequence: Synthetic coding sequence
  source 1..762: mol_type = other DNA
atgccaggtcgcacagaaggcggttcgtggttgcggaatgcagcggcagcggacgttctgcgaaacctgcccgaggttgagtggagagagccgcagcattgctgtccccccacccccaggaagcgcaaacaaaatccacgggtgcctctccctcattatcccccaaaccctgccgcggccatagccgccgacacgatgccaaagagaaagaaacaaaaccaccaccagcctcccacgcaacagcagcctcctctacctgagcgcgaagagaccggggatgaagaggacggatctccaataggccctccttccttgctggggccacccccaatggccaacggaaagcctggagacccaaagtctgctctccacaggggtcctcccggttcacgaggacccttgatacctcctcttctgtctctgcctcctccgccgtgggggcgtggcccaattcgaaggggactggggccaagatcatccccctatggccggggttggtggggcgtcaatgccgagccccctttccccggtcctggccatggcggccctacccggggtagcttccacaaagagcagcggaatccccgacgtctaaagtcatggtcattaatcaagaacacttgccctccaaaggacgatccccaggttatggaggataaatcagatcgcccagtttgccgccactttgccaagaaagggcattgccgctacgaggatttgtgcgcgttttaccatcctggggttaatggtccgccactctag

SEQ ID NO: 129999 - DNA, 762 bp, synthetic construct
  misc_feature 1..762: note = Description of Artificial Sequence: Synthetic coding sequence
  source 1..762: mol_type = other DNA
atgccaggacggaccgagggcgggtcatggctcagaaacgcggccgcagcggatgtactgaggaacctgccggaggtggagtggcgagagcctcagcattgttgtcctcccactccccggaagaggaagcagaaccctcgggtgcccttacctcattatccgcccaatcccgcggccgccatcgccgccgataccatgccaaagaggaaaaaacaaaaccatcatcagccaccaacccaacagcagcctcctttgcccgagcgggaggaaacaggtgacgaggaggatggtagccccattggccctccctcactcctggggcccccacctatggcaaacggcaaaccaggagatcccaaaagtgccctgcatcggggaccaccaggcagtcgtggacctcttatccctccactcctaagccttccaccccccccttggggtcgcggccctattagaaggggcctgggcccacgcagttctccctatggacgcggatggtggggtgtcaatgccgaaccaccattccctggtccgggtcacggggggccgactcgagggagctttcacaaggaacagagaaatccccgtcgcttgaagtcttggagtctcattaagaatacctgtccccccaaggatgacccccaggtaatggaggataagagtgataggcccgtgtgtcgacacttcgccaagaaaggccactgtagatacgaggacctgtgcgccttttaccaccccggggtaaatgggccccctctgtag

SEQ ID NO: 130000 - DNA, 762 bp, synthetic construct
  misc_feature 1..762: note = Description of Artificial Sequence: Synthetic coding sequence
  source 1..762: mol_type = other DNA
atgcccggacggaccgagggtggatcctggctcaggaatgctgccgctgctgatgtgctgaggaatttaccagaagtggaatggcgggagccgcaacactgttgtcctccgacaccccgaaagaggaaacaaaacccccgtgtgccacttcctcattatcccccaaaccccgctgctgctatcgcggctgatactatgcccaagcgcaagaagcagaaccaccaccagccaccaacacagcaacagccgccgctgcccgagcgggaggagacaggtgatgaggaggacgggtccccaattggcccgccaagcctgctgggaccacctccaatggcgaatggtaaaccaggagaccccaagtccgctctgcaccgcggcccccccggatctcggggcccactcatcccccctttgttatcgttacccccccccccttggggcaggggacccatccgccggggcctgggccctcgttctagcccatatggtcgcggctggtggggcgtcaacgcagagcctcctttccctggacccggccacggcggccccactcggggatcctttcacaaagagcaaagaaatccccgcagactcaagtcctggtcccttatcaagaatacctgcccccctaaggatgatcctcaggtgatggaagataagagcgataggcctgtctgtcgacattttgccaaaaaggggcattgcagatacgaagacctgtgtgctttttaccaccccggcgtgaacggcccccccctatag

SEQ ID NO: 130001 - DNA, 762 bp, synthetic construct
  misc_feature 1..762: note = Description of Artificial Sequence: Synthetic coding sequence
  source 1..762: mol_type = other DNA
atgccggggaggaccgaaggcggatcctggctaaggaacgccgcagcagcagatgttctgcgcaatctgcccgaggtggaatggcgagaaccacagcattgttgtccccccacacctagaaagcgtaaacagaaccctcgggtcccgctgcctcattaccccccgaatccagctgctgctatcgccgccgatactatgcccaaacgtaagaagcagaatcatcaccagcctcccacccagcagcagccgcccctgcctgagcgcgaagagaccggcgacgaagaggatgggtctcctattgggccaccttcactgctggggcctcctcctatggctaatggaaagcctggcgatcccaaaagtgccctgcaccgaggcccccctggcagtcgaggacctctcattccccctctcctgtctttaccccctccaccatgggggagaggtccaattcgacggggcctgggtccacggtctagcccctacggaagaggctggtggggggtcaatgcggagccccccttccctggacctggccatggaggacccacccgcggttccttccacaaagagcaacgaaaccctcggcgcctgaagagttggtcgttgattaagaacacatgtcctccgaaagacgatccacaggtgatggaggacaaatcggacagacctgtttgccgccattttgccaagaagggccactgtaggtacgaagatctgtgtgcattctaccaccccggggtaaatggcccgccactgtag

SEQ ID NO: 130002 - DNA, 1344 bp, synthetic construct
  misc_feature 1..1344: note = Description of Artificial Sequence: Synthetic coding sequence
  source 1..1344: mol_type = other DNA
atgagatccgtgtcttatgttcaaagagtggcccttgaattcagcggtagtctttttccgcacgcgatctgcttgggggacgtcgataatgacaccctgaatgaattagtcgtaggagacactagcggaaaagtctcagtgtacaagaacgacgatagcagaccatggttgacatgctcttgtcaagggatgttaacatgtgttggagtgggggacgtgtgcaataagggaaaaaacctcttggtggcagtgtctgccgaaggatggtttcatctgttcgatctgacacctgccaaggttctggatgcatccggacatcacgaaactttgattggtgaggaacaacggcccgtctttaaacagcacatccccgccaataccaaggtcatgctgatttcagacattgacggggatgggtgcagagaactggtggtagggtatacagatagagttgtccgcgccttccggtgggaggaactgggcgagggacctgaacatctgaccggccagttagtttcactgaaaaaatggatgcttgagggccaagttgatagtttgtcagtgacgctaggcccgcttggattacccgaattaatggtcagccagccagggtgcgcatatgcaattctcctgtgcacttggaaaaaagacaccggcagccccccagcatctgaaggaccaacagacggctcccgcgagacacctgccgccagggatgtcgtgttgcaccagactagcgggcgcattcacaataagaacgtttctacccatctcattggaaatattaagcaaggacacggcactgaatcctcaggctcaggcttgtttgctctatgcactctggatgggacgctgaaactgatggaggagatggaggaggccgacaaacttttgtggtcagttcaggtagatcatcagctgttcgccttggaaaaactggacgtcacagggaatggtcacgaggaggttgttgcttgcgcgtgggatggtcaaacttacattatcgatcacaaccggacggtggtgcggtttcaggtggatgagaacattcgtgccttttgtgctggcctgtatgcgtgcaaggaagggcgaaacagtccttgcctagtgtatgtgaccttcaaccagaagatctacgtatactgggaggtgcaactcgaacgcatggaatcaactaacctggtgaaactcctggaaacaaagcctgagtatcattcgcttctgcaggaacttggagtggacccagatgaccttccagtgacaagggccctgcttcaccagaccctgtaccatcccgaccaacctccccagtgtgctcctagttccctgcaggaccccacatag

SEQ ID NO: 130003 - DNA, 381 bp, synthetic construct
  misc_feature 1..381: note = Description of Artificial Sequence: Synthetic coding sequence
  source 1..381: mol_type = other DNA
atgctcctggtcctgctctctgtggtcttactcgcactgtcctccgcccagtccacagataatgacgtgaattatgaagacttcacatttactatccccgacgtggaggattcttacctcgatccactggttattgtggtgactaaaatgatggtgctgtcccgagaccatcagaaccaggaagctattaccgccattctgccacacctgctgttcaaaatttcaaatgaccaccccgacgaggataccgtgaacagcctctaccccgactttctcctgtctgcttgccgaaagcatcaccactctagcagaggaactgatcaacaggacattccacgctccaaccactcaggcaacctggaattttcaggtcgtaaatag

SEQ ID NO: 130004 - DNA, 198 bp, synthetic construct
  misc_feature 1..198: note = Description of Artificial Sequence: Synthetic coding sequence
  source 1..198: mol_type = other DNA
atgctattagttctcttaagtgtagttctactcgccctgagcagtgctcaaagtactgacaatgacgtcaattatgaggacttcaccttcaccatccccgcctgtcgaaagcaccaccacagttctcgtgggaccgatcagcaggatatccctaggagcaatcactcaggtaatctagaattttctggtcgtaaatag

SEQ ID NO: 130005 - DNA, 696 bp, synthetic construct
  misc_feature 1..696: note = Description of Artificial Sequence: Synthetic coding sequence
  source 1..696: mol_type = other DNA
atggccgtgttcctggaggcaaaagacgcccactcagtcctgaaacggtttcccagagctaatgaattcttagaagaattgaggcagggtacgattgagcgcgagtgcatggaggagatctgctcatacgaggaggtcaaagaggtcttcgaaaataaggaaaaaacgatggagttctggaaggggtatcctaacgctgtctattcagtcagagacccatcacaatcgtccgacgcaatgtacgtggttgtcccattgctcggcgttgctctattgatagtgatcgcactattcataatctggcgatgtcagttgcagaaagctacaaggcaccatccatcctacgcccagaaccgctatctggcttcgcgagccgggcacactcttccccgcgtcatggtctatcgcggaacggtgcactctcagggggaaccttcaggccacagggaagctgcaaattccccccaggtggttctggggcctagcagaggaggaaggaccacagtgcgactagaaagcactctttaccttcctgagttgtctctgagccggcttagctctaccacccctccccctagctacgaggaggttacagcacctcaggagtccagctccgaggaggcttccgtgtcgtattccgatcctccaccgaaatacgaagaaattgtggccgccaaccccggcgcagataagtag

SEQ ID NO: 130006 - DNA, 309 bp, synthetic construct
  misc_feature 1..309: note = Description of Artificial Sequence: Synthetic coding sequence
  source 1..309: mol_type = other DNA
atggcaggattatcccgcgctcttagctctgtgttcctagaagccaaagatgcccactcagtcttgaaaagattccccagggcgaatgaatttctggaggaactccgacagggcaccattgagagagagtgcatggaagagatctgctcctatgaagaagtcaaggaggtctttgagaacaaggagaagacagcctgcaccaccctcggactggtgctcggcgttggagtcgctagcggaatcgccagaaccgggcccggcaatgccgaccaatctgaggccagaaaggacacccagccgaaggcatag

SEQ ID NO: 130007 - DNA, 276 bp, synthetic construct
  misc_feature 1..276: note = Description of Artificial Sequence: Synthetic coding sequence
  source 1..276: mol_type = other DNA
gacccttctcagtcgagcgatgctatgtacgtggtggttcccctgctgggtgtcgccctcctgatcgtgattgccttgttcattatctggcgctgtcaactgcaaaaggccacacggcaccatccctcctatgctcagaaccggagatgtttcgcagtccggctggcagctccatctttcgcctccaagtactcaaatgtcggagcctttccattcaggctgtgggccgccagtttgtcgttagcaagaatatatctcactaacattccaaaatag

SEQ ID NO: 130008 - DNA, 159 bp, synthetic construct
  misc_feature 1..159: note = Description of Artificial Sequence: Synthetic coding sequence
  source 1..159: mol_type = other DNA
atggctgttttcctcgaggccaaggacgctcactcagttctcaagaggttcccacgggctaacgagttcctggaagaactgcgccaaggcactatcgaacgcgaatgcatggaagaaatttgctcatatgaggaggttaaagaggtgtttgagaattag

SEQ ID NO: 130009 - DNA, 696 bp, synthetic construct
  misc_feature 1..696: note = Description of Artificial Sequence: Synthetic coding sequence
  source 1..696: mol_type = other DNA
atggctgtctttctggaagctaaagacgcccactcggtacttaaacgcttccctcgagcaaacgagtttctggaagagctccggcaaggcaccatcgaacgcgagtgtatggaagaaatctgctcttacgaggaggtcaaggaggtcttcgagaacaaagaaaagaccatggaattctggaagggataccctaatgctgtgtactcagtgcgggacccatcccagtcctccgatgcgatgtatgttgtggtccctctgctgggagtggctttgctgattgtcatagctctgttcataatctggcgatgccaactgcagaaggcgactaggcaccatcccagttacgcccagaaccgctacctggcctcccgggccgggcacactctgcctcgggtcatggtgtaccgcggcacagtacactcccagggagaaccaagcggccatcgggaggccgccaattcccctcaggtggtgcttggaccctcgagaggggggcgaaccacggtccgactggagagcacactgtatttaccagagctctctctttctaggcttagctcaaccactccacctccatcctacgaagaggttacggccccccaggagtccagttcagaagaggctagcgtgtcctacagcgatccgccccccaaatatgaggaaatagtagccgcaaatcctggggctgacaaatag

SEQ ID NO: 130010 - DNA, 681 bp, synthetic construct
  misc_feature 1..681: note = Description of Artificial Sequence: Synthetic coding sequence
  source 1..681: mol_type = other DNA
atgtttactctcctcgtcctactgagtcaactaccaaccgtcacactggggttcccccactgcgcgagagggcccaaggcttcaaagcacgccggcgaggaggtgtttacaagcaaggaagaagcaaacttcttcatccacaggcggctactatacaaccgctttgatctggagttgtttactccaggaaacttggagagagaatgcaacgaggagctgtgtaattacgaggaagccagagagattttcgtcgatgaggacaagaccatagctttttggcaagagtacagcgccaagggaccaactacaaaaagtgacggcaatagagagaagatcgatgtgatgggcttgctgaccggtctcattgcggcgggagtcttcttggtcatcttcgggcttctggggtattatctttgtattaccaagtgtaataggttgcaacacccatgcagcagcgccgtgtatgagcgcggacggcacactccgtctatcatctttagaaggcctgaggaggccgccctgagccctttaccgccaagcgtcgaagatgcaggcctaccgtcctatgaacaggccgttgcactgacacggaagcattctgtatcccctcctccaccgtatccaggacataccaaaggtttcagggtgtttaagaagtctatgtccctgccttctcactag

SEQ ID NO: 130011 - DNA, 375 bp, synthetic construct
  misc_feature 1..375: note = Description of Artificial Sequence: Synthetic coding sequence
  source 1..375: mol_type = other DNA
atgcttctgcgcgacctggttctccgccgaggttgctgttggagtagtctattgttgcactgtgccctgcaccctctgtgggggtttgtgcaggttactcatggagaaccccagaaaagttgtagcaaggtcactgactcctgcagacacgtttgtcagtgccggccccctcctcctctgcctcctcccccaccaccccccccacccccacgcttactgtccgctccggcacccaatagcacctcttgcccgaccgaggagagctggtggtcaggactggtgataatcatcgccgtgtgctgcgcttccctggtgttcctcacagtgctggttataatatgctacaaagcaatcaaacggaatcatgcgatctag

SEQ ID NO: 130012 - DNA, 462 bp, synthetic construct
  misc_feature 1..462: note = Description of Artificial Sequence: Synthetic coding sequence
  source 1..462: mol_type = other DNA
atgctactgagagatctcgtcctaagacgcgggtgctgttggtcctctctccttctgcattgcgcgttgcaccccctgtggggatttgtgcaggtgacccatggggagccacaaaaatcttgctccaaagtaactgactcttgccggcatgtgtgccagtgcaggccgccgcctccgctgcctcctccccctccaccacctcctccacctagactgctcagcgctccagctccgaattccacctcttgccccaccgaggaatcgtggtggagcggcctggtgattattattgctgtgtgctgcgcaagcttggtatttctgacagtcttagtgattatttgctataaggcaattaaacgcaaacctttgcgcaaggatgagaatggcacctctgttgccgaataccccatgagcgcatcacagagcaataaaggcgtagatgtcaataatgcagtggtgtag

SEQ ID NO: 130013 - DNA, 462 bp, synthetic construct
  misc_feature 1..462: note = Description of Artificial Sequence: Synthetic coding sequence
  source 1..462: mol_type = other DNA
atgctgctccgcgatctcgtgctgagacgcgggtgctgctggtcttctctgctgctgcactgtgcgcttcaccctctctgggggttcgtgcaggtcacccatggtgaacctcagaaatcatgctccaaagtgacagactcgtgccggcacgtgtgccagtgccgacccccccccccgctcccaccaccacctcctcccccccctcctccgcgtctcctatctgcccccgcccctaacagcacttcatgccccaccgaggagtcctggtggtctgggctcgttataattatcgccgtctgctgtgcctcccttgtttttctgacagtcttggtcatcatttgttataaggctatcaagcgcaagcccctcaggaaagacgagaacggaacctctgtcgccgagtacccaatgtccgctagccagagtaataaaggggtggatgtcaataacgccgtggtgtag

SEQ ID NO: 130014 - DNA, 828 bp, synthetic construct
  misc_feature 1..828: note = Description of Artificial Sequence: Synthetic coding sequence
  source 1..828: mol_type = other DNA
atgtggcgcgccggctctatgagcgctgagctgggggttggatgtgccctgagggccgtgaacgagcgtgttcaacaggctgtggcgcgcaggccccgagatctgcctgctatccagccgcgtctggtcgccgtttccaaaaccaagcctgcggacatggtaatagaggcctatggtcatggacaacgaaccttcggagagaactacgtgcaagagctgttggagaaagcctcaaatccaaagatcttaagcctgtgcccggagatcaagtggcatttcatcggtcacctccagaagcagaatgtgaacaaactcatggctgttccaaacctattcatgctggagactgtggacagtgtcaagcttgccgacaaggtcaattccagctggcaacggaagggcagccccgaacggttgaaagtgatggtccagataaatacatctggagaggagtccaaacacgggctgccaccttcggagaccatcgcgatcgtggagcacattaatgccaagtgcccaaatttagaatttgtagggctgatgacgattggtagctttgggcacgatctgtcacagggccccaaccccgactttcagctgctgcttagtctgcgggaggaactgtgcaagaagcttaacatccctgcagaccaggtcgaactcagcatggggatgagcgccgacttccagcacgctgtggaagtaggctcgacaaacgtgcgcatcggatcgacaatttttggcgaaagggattacagcaaaaagcctaccccagacaagtgcgcggccgatgtcaaagcccccttggaggttgctcaagaacactag

SEQ ID NO: 130015 - DNA, 1149 bp, synthetic construct
  misc_feature 1..1149: note = Description of Artificial Sequence: Synthetic coding sequence
  source 1..1149: mol_type = other DNA
atgcgcagtcctctgtgctggttgctaccccttctgatcttagcctctgtggcacagggtcagcctacccgccgcccccgcccaggcacagggcctggtaggcggcctagaccacgccctcgccctacgccaagcttcccccagcccgatgagcctgctgaacccacggacctgcccccgcctctccctcctggccctccctcgatttttccagactgccctcgcgagtgctattgtcctccagatttcccctccgcactgtattgcgactcgagaaaccttcgaaaggtgcccgtgatccctccacgcattcattacctgtatctgcagaataatttcatcacggaactgcctgtcgagtcttttcagaatgcaactggtctgcgctggatcaatctcgacaacaaccgcatccggaagattgaccaaagggttctggagaagctgccaggcctggtctttctctacatggaaaaaaatcagttggaggaggtaccatccgctctgccgaggaacctggagcagctgcgactgtcccaaaaccatatctccagaattcctcccggtgttttttccaagctcgaaaatctactcttgctcgatttgcaacataatcgattatccgatggcgtgttcaaaccggatactttccacggcctcaaaaatttgatgcagctgaatctcgcccacaacatccttaggaagatgccccctcgcgtgccgaccgccatccatcagctgtacctcgattctaataaaatagagactataccaaacgggtactttaagagtttccccaacctggcctttattagactgaattataacaaactgacagaccgcggtttgcctaaaaacagtttcaatatcagtaatctgttggtgctgcatctgagtcacaatcggatttccagcgtgccagccatcaacaatcggctggagcacctctacttgaacaacaatagcatcgaaaagattaatgggactcaaatctgcccaaacgacctggtcgcattccacgatttctcctctgatctggagaacgtccctcatctgagatacttgcgcctcgacggaaattacttgaaaccccctatccctttagacctaatgatgtgctttcgcttgttgcaaagtgtggtgatctag

SEQ ID NO: 130016 - DNA, 1002 bp, synthetic construct
  misc_feature 1..1002: note = Description of Artificial Sequence: Synthetic coding sequence
  source 1..1002: mol_type = other DNA
atggaagatcttgaggaggacgtgcgctttatcgtggatgaaaccttggattttggcggcttaagtccctcagatagccgcgaggaggaagacataacggtactggtcactcccgaaaagcccctgcgacggggattaagccaccggagtgacccaaatgcagttgctcccgcaccgcagggcgtgcgactgtccctggggcccctttcaccagagaaattagaagagattctggatgaagcaaacagactcgcggcacagctcgaacagtgcgcgctccaagatagagaatctgcgggtgagggcctgggaccacgcagagtgaagcccagcccacggcgcgagacgtttgttttaaaggacagccccgtccgggacctgctgcccaccgttaattctctgacgcggtctactcccagcccatctagcctgacaccacggctacgatctaacgaccgcaaaggctctgtccgagcccttagggccacgagtggcaagcggccttcgaacatgaaacgggagagtcctacatgcaatcttttcccagcgtccaaatcacccgcctcatcccctctgaccaggagcacacctccagtacgtggccgtgcgggcccttctggccgtgctgctgccagcccacctacccctatacgatcagtgctcgccccgcagccatctacgagtaattctcagaggctgccccgtccccagggggctgccgccaagtcgtccagccagctcccgattcctagtgccatcccccgccctgctagccggatgccacttacctcccgctccgtcccaccgggccgcggcgctctgccacccgactccctatctacgcggaaaggactccctcggccctcaaccgccggccacagggttcgggagtccggccacaaagtgcctgtcagccagagacttaacctccctgtgatgggcgctacacgtagcaatctgcaaccccctcgcaaagtggcggtccccgggcctacgaggtag

SEQ ID NO: 130017 - DNA, 933 bp, synthetic construct
  misc_feature 1..933: note = Description of Artificial Sequence: Synthetic coding sequence
  source 1..933: mol_type = other DNA
atggaggatttagaagaggatgtgcggttcattgtggatgagaccctggatttcggcggattaagcccatctgactctcgcgaggaagaagacatcactgtcttagtaactcctgagaagcccttgcggagagggctgtctcacagaagtgacccaaatgcagtcgcccccgcgccccagggggtaaggctcagcttgggacccttatctcctgagaagctggaggagatcctggacgaggcaaatcgcctagctgcgcagcttgaacagtgtgcactccaggatagggaatctgcaggagaaggtctcgggcctaggcgagtcaaaccgtctcctcggcgcgagacgttcgtccttaaagattcacccgtgagggacctgctgccaactgtcaattccctgacccgatctacgccttctccatctagcctaaccccacggctcagaagtaatgatcgtaagggctccgtcagagcgcttcgggcaacttcaggtaagcgcccaagcaatatgaagagagagagtcccacgtgcaacttgttcccggcatcaaagtcacccgcctcttcacccctcacacgctctacgcccccggtccgtggacgcgctggaccttctggcagagccgctgccagcgaagagacccgagcggccaaactgagagcctgtcaacctaatgccacccatcagcccgagtgcgcgacctggcagcggtgtccgacatccgggttttctgtaaacagtaaacgtgcctctaagacaaaacactgccgcacccaatccgccggcaagtggacacaagggtcgtgcttccccgcaaccaaatcctcctgtcatggatgccactcgcagcagtccgccgcaccacaggagtctggtagcccgaggacttatcaggttaagagaagtggacagcaggccagacttcagtag

SEQ ID NO: 130018 - DNA, 1002 bp, synthetic construct
  misc_feature 1..1002: note = Description of Artificial Sequence: Synthetic coding sequence
  source 1..1002: mol_type = other DNA
atggaagatttggaggaggacgtgcgtttcatcgttgatgaaacactggacttcggaggactgagtcctagcgattcaagggaagaggaagatattaccgttttggtcactcctgaaaaacccttacgtagggggctgagccaccgcagtgatccaaacgcagtcgcccccgcaccccaaggcgttagactgtcccttggccctctctctcctgagaaattggaggagatattagacgaagccaaccggctcgccgctcagcttgagcagtgtgcactgcaagaccgcgagtctgccggagaaggcttaggtcctaggagggttaagccttccccgcgcagagagacttttgtgttgaaagattctccggtcagagacttgttaccaacagtgaattcgctcacaaggagcacaccgtcccccagctccttgacaccacgcctccggtcaaatgataggaagggctctgtgcgtgcacttcgagccactagcgggaagcgtccatcaaatatgaagcgagagagtccaacatgcaacctattcccagcaagtaagtcccccgcttcctcccctctgaccaggagtacccctcctgtgcgtggaagggccggcccctctgggagggcggccgccagtccacctactcccatccgctccgttctcgccccccagccctctacatccaatagtcagagactccctcgcccacagggcgctgcagctaaatccagtagtcagcttccaataccatccgctattcctcgtcccgccagtcgaatgccactgacgagcaggtctgttcctcctggacggggagcgctcccacctgattcactctcaactcgtaaaggcttgcctcggccttccacagcaggccacagagttagggagtcaggacataaggtgcctgtctcccagagactgaatctgcctgtgatgggagccacccgatcaaacttgcagccaccaaggaaagttgctgtgccaggtcccaccagatag

SEQ ID NO: 130019 - DNA, 1002 bp, synthetic construct
  misc_feature 1..1002: note = Description of Artificial Sequence: Synthetic coding sequence
  source 1..1002: mol_type = other DNA
atggaagacctggaggaggacgttcgcttcatcgtggatgagacactggacttcggcggactctctccttccgatagcagagaggaggaagacatcaccgtattggtgactccggaaaagcctcttagacgcggtctgagtcaccggagtgatcctaatgccgtggccccggcaccccagggcgttagactgagcctgggccccctgtccccagaaaagctggaggagattttagacgaggccaaccgactggccgcccagctagaacagtgtgctcttcaggacagagagtctgcaggtgaaggactggggccacgccgtgttaagccatctcctcgcagggaaacctttgtactgaaggactctccggttcgggacctcttgccaactgtaaatagtctgactaggtctactccttcccctagctctctgacccccagactccggtccaacgatcggaagggaagcgttagggcgctcagggctacatccgggaaacggccctctaacatgaagcgcgaaagccctacatgtaacttgttccccgcctctaagtcgccagcgtcgagccctcttacccgaagcactccacccgtccggggccgcgccgggcctagtggtagggctgcggcctctccccccacccctatcaggtccgtcttggcgccccagcctagcacatccaatagtcagcggttacctcggcctcagggggcggccgccaagagttcctcgcagcttccaatcccctccgcaatccccagaccagcttcccgaatgcccctcactagcaggtcggtgcccccaggtagaggagctctgccccccgattctctgtctaccaggaagggtctccctaggccttctacagctgggcaccgagttcgcgagtcgggacataaggtcccagtcagccagagactcaacctccctgtcatgggcgcaacaagatctaatctgcaacctcctcgaaaggtggcagtaccagggcccactcgctag

SEQ ID NO: 130020 - DNA, 1002 bp, synthetic construct
  misc_feature 1..1002: note = Description of Artificial Sequence: Synthetic coding sequence
  source 1..1002: mol_type = other DNA
atggaggacctggaggaggacgtgcggttcatagtcgatgagacacttgacttcggaggactgtcccctagcgattcgcgcgaggaggaggatattacagtgctggtaacaccggagaaacctctgagaagagggcttagccacaggtctgacccaaacgctgtcgcgcccgccccccaaggcgtccggctgtctcttgggccactctcccccgagaaactggaggaaattctggacgaagcaaaccggttggctgcccaactggagcagtgtgcactgcaggatcgcgaaagcgccggagaaggactgggcccaagaagagtcaagccatcccccagacgcgaaaccttcgtgttaaaggacagccctgtgcgcgacctgctgccgacagtaaatagcctgactagatctacgccctccccgtctagcttgacgccaagactgaggtctaatgacagaaaaggaagtgtgagggctctgagagccacgagcggcaagcggccttcgaacatgaagagagagtccccgacatgcaacttattccctgcttccaagagccccgcatcttctccgctgactcggagtacacctcctgtcaggggcagagccggtcctagtggccgtgctgccgctagcccacccactccaattcgatctgtgttagcacctcagccttctacctcaaacagccagcgactcccgcgcccacagggggcagcggccaagtcttctagccaattgcccatcccaagcgctatcccgaggcctgccagtagaatgcctctcacaagccggagtgtcccacctgggaggggtgcacttcccccagacagcctcagcaccagaaagggtctccctcgtccaagtacggctggacacagagttcgggagtccgggcataaagtcccagtgtcacagcgactcaacttacctgtgatgggcgctactaggtcgaacctccagcccccccgaaaagtggcagtgcccggcccgacacgctag

SEQ ID NO: 130021 - DNA, 666 bp, synthetic construct
  misc_feature 1..666: note = Description of Artificial Sequence: Synthetic coding sequence
  source 1..666: mol_type = other DNA
atggaagacctggaggaagacgttcgttttatcgtggatgagacactggattttggtggactgagcccctcagatagccgtgaggaggaagatatcacggttctcgtgactcctgagaagcccctccgtagggggctatcacacagatccgatccgaatgcagtggcccctgccccccagggcgtgaggctgagcctgggaccactgtccccagagaaacttgaggagattctggacgaagccaatcgactggctgcccagcttgaacagtgcgctctgcaggatagagagtccgcaggcgaagggctggggccgagaagggttaagcccagcccgcgccgggaaacgttcgtcctcaaagatagccctgtgagggaccttttgcccacggtgaattcacttactcgctccacccctagtccgagcagccttacccctcgactgcgaagtaacgacaggaagggaagcgtccgggcgttgagggcaacatcaggcaaacgaccatccaatatgaagcgggagtccccgacttgcaatctgttcccagcctccaaaagcccggcgtccagtccactgacccgctccacacccccggttcgaggtagagccggaccttccggtagggccgctgcatcagaggaaacccgcgcggcaaagctcagatag

SEQ ID NO: 130022 - DNA, 699 bp, synthetic construct
  misc_feature 1..699: note = Description of Artificial Sequence: Synthetic coding sequence
  source 1..699: mol_type = other DNA
atggaagatctggaagaggatgtcagattcatcgtggacgaaacgctggacttcggtggactgagcccgagcgacagtcgtgaggaggaagatatcacagtgctggttacccccgagaaacctctgcgacgaggactgtcccaccgtagcgatccaaacgccgtcgcccccgcacctcagggagttcggctgtccttaggcccactctcccccgagaagcttgaagagatcttagatgaagcaaatagattggctgctcagttggagcaatgtgccctacaggacagggagtcggcaggagaggggttaggcccgaggcgggtgaagcccagccctcgacgtgagacctttgttctcaaggatagccctgtgcgcgatcttctgccgacagtgaatagcctcacaaggagtacaccttcaccatcatccctcacccccaggcttaggagtaatgaccgcaaaggctccgtgcgggcccttagggctacatcaggcaagcgcccgtctaatatgaaacgcgaatcccccacttgtaacctgtttcccgccagcaagtccccggcttctagcccccttacccgttctacccctcctgtgcgcggcagggcaggcccttcaggccgagccgcagcctcaccacccacacctatcagaagcgtactggccccacagccatctacatcgaactctcagcggtag

SEQ ID NO: 130023 - DNA, 1092 bp, synthetic construct
  misc_feature 1..1092: note = Description of Artificial Sequence: Synthetic coding sequence
  source 1..1092: mol_type = other DNA
atggaggacctggaagaggatgtcagattcatcgttgatgagacactggattttgggggtctgagcccctctgactctagggaagaggaggacattaccgtgcttgtaacacctgagaaaccattgagacgtggcctcagccaccggagcgaccccaacgccgtggctcccgccccgcagggggttcgcctcagcctcggcccactgtctcctgagaagctggaggagatcctcgatgaggcgaaccggctggccgcccagcttgaacagtgtgccttacaagaccgtgagtctgcaggggaaggactcggtcctcgccgcgttaaaccttcccctcggagggaaacctttgttctgaaagattcacctgtgcgcgacctcctgcccacagtgaattctctgacccggtcgacgcctagtcccagctctctgacgccacgactacgctccaacgatcgtaagggctccgtgcgggcgctcagagcgaccagcggcaagcggccttcaaacatgaagagggaatcccccacatgcaacttgtttcctgcttctaagtccccggcatccagtccgctcacaagaagtacacctcctgtgcgtggcagagctggcccttccggccgcgccgctgcatctgaggaaacccgggccgcaaagttgagagtctcaggttctggcgagtttgttggtctaacactcaagttcctgcatccctcccctccaggcccacccactccgattcgttcagtcctggcaccacaacctagcacgtccaacagccagaggctgcccagaccccagggcgcagccgccaagtcttcctcccaactgccaatcccaagtgccattcctagaccagccagcagaatgccactcacatctaggagcgtgcccccaggccgtggagcgttgccgccagattcactgtccaccagaaagggcctgcctcgcccttctacggcaggtcacagggtgcgcgaaagtggacacaaagtccccgttagccagaggctgaatctgccggtgatgggcgctaccagatcaaacctccaacctccccggaaggtggcggtaccgggaccaactcggtag

SEQ ID NO: 130024 - DNA, 273 bp, synthetic construct
  misc_feature 1..273: note = Description of Artificial Sequence: Synthetic coding sequence
  source 1..273: mol_type = other DNA
atgcgccgcctccttttggtgacatcattagtggttgtgctcttgtgggaggctggagcagtgcctgcaccaaaagtgcccatcaaaatgcaggttaaacattggcccagtgaacaggacccagagaaagcctggggcgctcgggtcgtagagccccccgaaaaggacgatcaattggtcgtcctctttcccgtccagaagcccaaattgctaacgacggaggagaagcctcggggtactaaggcatggatggaatcacgagcaaggccatag

SEQ ID NO: 130025 - DNA, 459 bp, synthetic construct
  misc_feature 1..459: note = Description of Artificial Sequence: Synthetic coding sequence
  source 1..459: mol_type = other DNA
atgagacgtctgctgctggtgacatctttagtggtcgtgcttctctgggaggcaggagccgtgcccgccccaaaagtgccaattaagatgcaggtcaaacactggcccagtgaacaggatccagagaatagggcatggggggcaagggttgttgagccacccgaaaaggatgaccagctggtcgttctattccccgtacagaagccgaagctgctgactaccgaagagaagccaagaggccaaggtcggggacccatcctacccgggacgaaagcctggatggagactgaagacaccctgggacatgttctgtctcccgagccagaccacgatagcttgtaccatcctcccccagaggaggaccagggcgaggaacgtcccaggctgtgggtaatgcctaatcatcaggtgctcttaggacccgaggaggatcaggaccacatctaccatccacagtag

SEQ ID NO: 130026 - DNA, 456 bp, synthetic construct
  misc_feature 1..456: note = Description of Artificial Sequence: Synthetic coding sequence
  source 1..456: mol_type = other DNA
atgcgacgccttttgcttgtgacgagtctggtggttgtgctgctgtgggaggccggcgcggtgccagcaccgaaggtgcctatcaaaatgcaggttaagcactggccctcggagcaggacccagaaaaagcgtggggcgctagggttgtagaacctcctgagaaggatgatcagttggtggtgctctttcccgtccaaaagcccaagctgcttactactgaggaaaagcccaggggacagggacgagggcctatcctgccggggaccaaggcctggatggagactgaggacaccctcggccacgtcttgagtcctgaaccggatcacgattccttgtatcacccaccgcctgaggaagaccagggcgaggaacgaccacgactgtgggttatgccaaaccatcaggtgctactgggtccggaagaagatcaggaccacatttatcacccacagtag

SEQ ID NO: 130027 - DNA, 429 bp, synthetic construct
  misc_feature 1..429: note = Description of Artificial Sequence: Synthetic coding sequence
  source 1..429: mol_type = other DNA
atgaggaggctcctcctagtgacttccttggtggtggtgttgttgtgggaggcaggtgcggtaccagcgcctaaggtgcctataaagatgcaggtaaaacactggccaagtgaacaagacccagaaaaggcctggggcgcccgcgtggtagaaccccccgagaaagatgatcagctggtcgtgctcttcccagttcagaagcccaaactgctaactactgaggagaaaccaagaggaactaaagcttggatggaaactgaggatacgctggggcatgtcttaagcccagagccggaccatgattctctctaccatcccccacccgaggaggaccagggcgaagagcggcccagactttgggtgatgcccaatcatcaggtcctcctgggtccagaggaggaccaggatcatatttatcacccccagtag

SEQ ID NO: 130028 - DNA, 6474 bp, synthetic construct
  misc_feature 1..6474: note = Description of Artificial Sequence: Synthetic coding sequence
  source 1..6474: mol_type = other DNA
atgagtgaccgcagcgggcctacagcgaagggcaaggacggcaaaaaatattcatctcttaacctgttcgatacgtacaaaggaaaatctctggaaatccagaaacccgcagtcgctccaaggcatggcctgcagagccttggaaaagtggcaatcgcgaggaggatgccaccacccgctaatctgccctccctgaaagcagagaataagggaaacgatccgaatgtttcactcgttccaaaggacggcacgggatgggctagcaagcaggagcaaagtgaccccaagtctagcgacgccagcacagcgcagccaccggaaagccagcccctgccagcgtcccagacccccgcctcaaatcagccgaagcgtccacccgctgccccagagaacaccccactggtgccatcaggagtgaagagctgggcacaggcctccgtgacgcacggcgctcacggggatggcgggcgtgcatcctcgttgctgtcacggttcagtagagaagaattccccacactccaggcagcaggcgatcaggataaagctgcaaaggaaagagagtctgccgagcagagttccggaccaggcccctcccttcggcctcaaaattcaacaacttggagagatggagggggacgcggcccagacgaactggaaggtcctgactccaagctgcaccatggacacgaccctcggggcggattacaaccctcaggcccaccacaattccccccttaccgcggcatgatgcccccatttatgtacccaccttacctgccgttcccgcccccatacggccctcagggcccgtacagataccccacacctgatggcccatctcgattccctagagtcgcggggccccggggcagtgggccccctatgcgcctggtggaaccagtcgggcggccatccatactgaaagaggataatctgaaggaattcgaccagctggatcaggagaatgatgatgggtgggccggtgcccacgaggaggttgattacacagagaagctgaaatttagtgatgaagaggacggaagagactccgatgaagaaggtgcagaaggccatcgagactcacagagtgcctctggcgaagagagacctccagaggctgatggtaagaagggcaactccccaaacagtgagccacccaccccaaagacagcatgggctgaaacaagcagacctccagagaccgagcctgggccaccggcccccaagcccccgctcccccctcctcatcggggaccagccgggaattggggccctccaggcgactatccagatcgcggcgggcctccctgcaaacctcccgctcctgaagatgaggatgaagcctggcgccagagacgaaaacagtcatcgtcggaaatcagcctcgctgtcgaacgcgctcgccggcgccgcgaggaggaggaaaggagaatgcaggaggagcgcagagcggcttgcgctgagaagctgaagcgcctcgacgaaaagttcggcgcccctgacaaacggctgaaagccgagccagccgcccctcccgctgccccctctacacctgcccctccgccggccgtgcccaaagagctgcctgccccacctgccccccccccagcctcagctcctacaccagagaccgagccggaagagccggctcaggcaccgccggcccagtcgacccccactcccggcgtagctgccgcacctaccttagtcagcggaggaggtagcacatcctccacaagctcgggatcgtttgaagctagtccggtggagccccaacttccatctaaggagggccctgagccacctgaggaagtgcccccacccacaacaccgcccgtccctaaagtagagccgaagggggacggcattggtccgacacgacagcctccttcacagggacttggttaccccaaatatcagaaatcgctgcccccacgttttcaacgtcaacagcaagagcagctacttaaacaacagcagcagcaccaatggcagcaacatcagcaaggctccgccccccccacccccgtgcccccttccccaccccagcccgtgaccctaggggccgttcccgctccacaggctcccccccccccacccaaagctctctaccccggcgccctggggagacctcctcctatgcctcccatgaacttcgatcctaggtggatgatgatccctccttatgtcgatccacgcctgctgcagggtcgaccgccattagatttttacccgccaggcgtgcacccttcaggcctcgtcccacgcgaacgtagcgatagcggcggatccagcagtgagcctttcgatcgacacgccccagcaatgttacgggagagggggacgcccccggtggacccaaaacttgcatgggtcggtgacgtgtttactgcgacacccgcggagccaagacccttaacctccccattacggcaggccgccgacgaggacgataaggggatgagaagcgagactcctccggtgcccccgcctccgccttacctggctagctatcctggcttccccgagaatggcgccccaggaccacccattagcagattccctttggaggagccagggccccgccctctaccatggccacccggatctgatgaggtcgctaagatccaaaccccaccgccaaaaaaagaaccacctaaagaggaaacagcccagctgaccggacccgaagcaggcaggaagcctgccagaggcgtaggctctggagggcagggtccacccccaccacgaagggaatcgaggacggagaccagatgggggcccagacccggctcctcacgtcgggggatccctcctgaggagcccggtgcccccccgcggagggcggggccaatcaagaagccacctccacctactaaagtcgaggagttgcctcccaagccactggagcagggggatgagacccctaagccgcctaaaccagatccactcaaaatcacaaagggaaagctgggcggtccgaaagaaactccgcctaatggcaatctcagccccgccccaaggctgcggcgtgattattcatacgagcgcgtggggccaacctcatgtcgcggtaggggtcgcggggagtatttcgcacggggtaggggttttcgcgggacctacggagggaggggtcgtggggcacggtctagggaattccgatcctatagagagttccgaggcgacgatggccggggaggcgggaccggtgggcccaaccacccacccgcccctcgagggcgtactgcatccgaaacgcgatccgagggatctgagtatgaggagatacccaagaggcggaggcaaagagggagtgagactgggtcggaaacccacgagtcagacctagcaccgtcagacaaggaggcccctaccccgaaggaaggaacgctgacccaagttccacttgctcctccccctcccggagctccaccttccccagcaccagcccgcttcacagcacggggcggcagggtgtttactcctagaggtgtcccgtcacgaagggggagaggtggcggaaggcctcctcctcaggtctgtcctgggtggtctcccccagcaaaaagtcttgctcccaagaagcccccaacgggccctttgccaccgagtaaggagccacttaaggaaaaattgattcctggtcctctctctccagtcgcaagaggtggctcaaatggtggcagcaacgttggtatggaagacggcgaaaggcctcgacgtaggcgtcacgggcgcgcccagcagcaagataagccccccaggttcagacgtctcaagcaggagcgggagaatgcagcccgtgggagcgaggggaagccatctctgaccttgcctgcgagcgcaccaggaccagaggaggccttgacgaccgtgacagtggctcctgccccccggagagctgccgctaagagtcctgacttgtccaatcagaatagtgaccaagccaacgaggaatgggagactgcgtcagagtcctccgatttcacttccgagcgcagaggagataaggaagcacctccaccagttctgctgactcccaaagcagtaggcacacccgggggaggcggagggggggccgtaccgggcatatcagccatgagccgcggtgacctatctcaaagggctaaggatctgtccaagagatccttttcatcccagcggcccggaatggagagacaaaatcggcgtccaggccctggaggaaaagcaggatcatctgggtctagtagtggtggcggtggtggtggaccaggcggccgcacgggacctgggaggggcgataaacggtcttggccttctccaaaaaaccggtcacgtccccctgaagagcggccccccggattaccactgccaccacctcctccctcctcctccgcggtcttccgccttgaccaggtgattcactccaaccccgccggcatacaacaggctctggctcagctctccagccgacaggggtccgtgaccgcccctggaggtcatccccggcataagccgggcctgccgcaggcaccacaagggccaagccctcgtcctccgacacggtatgaacctcagagggttaactccgggctgtccagtgacccgcatttcgaggagccaggccctatggtgagaggtgtggggggaacacccagagacagtgcgggggtgagtccctttccaccaaagcgcagggaacgccctcccaggaagcccgaactgctgcaggaggagagcctgcctccaccccattcttccggctttctgggctcaaagcctgaaggccctggcccccaggctgaatccagggatacgggaacagaggcgcttacaccccacatctggaaccgtctgcacacagccacatccagaaagagctacaggccaagttcgatggagccttggatggagccactcagtccgttcgaggatgtcgcaggcacagaaatgagtcagagtgacagtggtgtcgacctctctggagactctcaggtatccagtggaccatgcagtcagagatcatcccctgacggagggctaaagggcgcggctgaaggaccccccaaaagaccaggcggaagctctccactaaacgccgtcccttgtgaggggccacctggatcagagccacctcgccggcctccccccgcaccccatgatggtgacaggaaggagctgcctagggagcagcctctgccaccagggcctatcgggacggagcgatcgcagcgcactgatcggggtacggagccgggacctattcgaccctcccatagaccaggaccacctgtgcagttcggaactagtgacaaagatagcgacctcagattggttgtgggtgacagcctgaaggcagaaaaagagttaactgccagcgtgactgaggccatccctgtgtcacgggactgggagctgcttccatccgctgcggcctcagctgaaccccaatctaaaaatcttgattccggtcattgcgtgcccgaaccctcttcgtcaggacaaagactctacccagaagtcttttacggctcagctggcccctcgagcagccaaatatcaggaggcgcaatggactcccagcttcaccctaacagtggcgggtttcgccctggcaccccttcactgcacccatatcgatctcaaccactctatctgccacctggtcccgcgcctccaagtgccctgctgagcggcctggcccttaaaggacaattcctcgattttagcacaatgcaggccaccgagctgggaaagctgccagcgggcggtgttctgtatcctcctccaagtttcctgtattcacctgcattctgccctagcccgctcccagacacctctctcctgcaggttcgccaggacctccccagtccttccgacttctattcaacgcccttgcaacccggtgggcaatcaggttttttaccttccggcgctcctgcacagcagatgctacttcccatggtcgacagtcagctgccagttgtaaacttcgggtcgctgcctccagccccccccccggcacctccaccgctgtcactgcttcctgtcggcccagccctccaacctccttctctcgctgtccggcccccacccgcacccgcgacgagagtcttaccgtctcctgcccgaccctttccagcctccctggggcgcgctgagctgcacccagttgagttgaaaccctttcaggactaccaaaagctgtcttcaaatcttggaggtccgggatcctctaggaccccccctactggccggtcgtttagtggcctcaattctcgcctgaaggctacacccagtacttactccggagtcttccgaacccaaagagttgacctctatcaacaggcatctcccccagatgccctaaggtggatcccaaaaccttgggagcgtactggcccgccccctcgggagggcccctcaaggagagccgaggaacctggttcaagaggagacaaggagccgggacttccgccccctaggtag

SEQ ID NO: 130029 - DNA, 4149 bp, synthetic construct
  misc_feature 1..4149: note = Description of Artificial Sequence: Synthetic coding sequence
  source 1..4149: mol_type = other DNA
atgctgcgcgagcggggtacccctcctgtggatcccaagcttgcctgggtgggagatgtgtttaccgccaccccggccgaaccccgcccactaacatcccccttgagacaggcagccgatgaggatgacaaaggcatgcggtctgaaaccccccctgttccccctcctcccccatacctggccagctacccaggttttccagaaaatggcgcccctggccctcctatctcacgctttccgctcgaggaacctgggccccgaccactgccttggcctccaggttccgacgaagtggctaagatccaaacccccccaccaaaaaaggagccccctaaagaagaaacagcccaactgacaggtccggaggctggaaggaaacctgctagaggcgtggggtccgggggccaaggtcctccaccgccccggcgcgagagtcgaacagaaaccaggtggggcccccggcccgggtcatcgaggaggggtatacctcccgaggagcccggagctccgccaaggcgcgcaggacccataaaaaagccacctccaccaacaaaggtggaagaactgccacctaaacccttagaacagggtgacgagaccccaaaaccacctaagccagatccccttaagatcaccaaggggaagctgggaggtcccaaagaaaccccccccaacggcaatctaagtccagcacctagactgcgaagagactatagctacgagcgggtaggacccacctcgtgcagagggcgtggtcggggggaatatttcgcccgcggacgcggattccgtggtacttacggcggacgtgggcggggggccagatcccgagaattccgttcatatcgtgagtttcggggcgacgatggaagaggcgggggcaccggcggccccaaccacccccccgctcctaggggccggactgcctccgaaactagatccgagggcagcgagtacgaggaaattccaaagaggagacggcagcggggatcagaaaccggcagtgagacacacgaaagtgatctggcaccttctgacaaagaagctccaactcctaaagaagggacgctgacacaggtgccactggcccctccaccaccaggggcccctcccagtcccgcaccagccaggtttaccgctagaggaggtcgggtgtttactcccaggggagtaccatcacgacgaggacgtggcggagggagacccccaccacaggtttgccccggatggtcccctcccgctaaaagtttggccccaaagaagcctcctaccggccccctgccgccgtccaaggagcctctcaaggaaaaactgattcccggacctctcagcccagtcgcccgggggggtagcaatggagggtccaacgtgggcatggaagatggggagcggcctcggcggcgacggcacgggagggcacaacagcaggataaacccccaaggttccgtcgcttaaagcaggagagagagaatgctgccaggggatccgaaggaaaacccagccttacactccccgccagcgctcccggacccgaagaagctttaactacggtcaccgtcgcccccgccccgagaagagcagccgcaaagagccccgacctgagcaaccagaattcggatcaggccaacgaagaatgggaaacagcgagcgaatcctcagacttcactagcgaaagaaggggcgacaaagaggcacctccccccgtgctgcttactcccaaggccgtggggacacctggaggcgggggggggggagcagtgcctggaatcagcgcaatgagtcgtggggacctgagccaaagggctaaagacctcagcaaaaggagcttctccagccagagacctgggatggagcgacagaacagaagacctggtcctggcgggaaagcaggaagttccggctccagttccggagggggcggagggggtcccggcggccgaaccggacccggcaggggagacaagcgatcttggccctcgcccaagaatcggagtcgcccacccgaagaaagacccccaggtctgcccctccctccaccaccaccttctagcagtgcagtttttaggctggaccaagttattcactccaatccagctggaatccagcaggccctcgcccagctgtccagtagacagggcagtgtcaccgctcctggagggcacccacgccataaacccgggcttccccaggcccctcagggtccttccccacgacctcccacgagatacgagccacaacgggtaaatagcggactttcatccgatccccactttgaggagcctggtccaatggtgagaggagttggagggacccccagggattctgcaggtgtcagcccttttccccccaagagaagagagcgccccccaaggaaacccgaattgcttcaggaggaatctctgccgccacctcacagctctgggttcttagggagcaagcccgagggaccaggcccacaagcagagtctcgcgatacgggtaccgaagctctaaccccccatatttggaacaggctgcatactgctacatcacgtaagagctatagacccagtagcatggaaccatggatggagccccttagcccctttgaagatgtagccggaacagagatgagccaaagtgatagcggggttgacctgtctggcgattctcaggtctctagcggtccctgctctcagcgcagctctccagatggcgggctcaagggtgctgctgaggggccacccaagaggcctggtggcagctccccactgaacgccgtcccatgcgagggccctcctggtagtgagccaccgcggcgcccccctcccgcccctcatgacggggatcgtaaggagctccctagggaacagcccttgccccctggccccattgggacagaacgctcacagcgcactgacagaggcactgaacctggacccattcgcccgtcacacagaccaggcccaccagtgcagtttggcacatctgataaggattctgatttgcggctcgtggtgggtgatagcctgaaggctgagaaggagctgactgcttctgtaaccgaagctattcccgtttctagagattgggagctgctgccttctgctgccgcatccgctgagcctcaatccaaaaacctcgacagtggccattgtgtccctgagccctcctcttcagggcaacgcctgtatcccgaagtgttctatggaagcgctggccccagctcaagccagatatctggtggcgccatggattctcagttacaccctaattcaggcggctttcgcccgggcacaccttcactgcacccttaccgaagccaaccactgtatctgcctcctgggccggctcccccgtccgctcttctgagcgggctggctctcaagggccagttcttggatttcagtaccatgcaggctaccgagcttggcaagctgcccgctggtggagtgctctacccgccaccgtcttttctctattcacctgccttttgccctagccccttaccagataccagtctgttgcaggtgagacaagacctaccttcgccttccgacttctactcaactccgctccaaccaggcgggcaatctggcttcctcccgtcaggggctcctgctcagcaaatgttgctgccaatggtggattctcaactgccagtcgtaaacttcgggtcactgccccctgcccctccccccgctccaccaccactgagcttgctgccagtggggcctgccttacagcccccttctctggccgtccgccccccaccggctcctgcaacgagggtgctcccgtcccctgcccgaccattcccagcctcactaggccgtgctgagttgcatcccgtagagctcaagccgtttcaggattatcaaaagctgtcctctaacctcggtggccctggaagctcccgaactccccccactggacgcagtttcagtggcctgaatagccggctgaaagccaccccatctacttactctggagtattccgcacacagcgcgttgacctgtaccagcaagcgtcccctccagacgccctgagatggatccccaaaccttgggaaagaactggtcctcccccccgggaagggccatctcgacgggccgaagaacccggaagcaggggagacaaggagcccgggctccctccacctcggtag

SEQ ID NO: 130030 - DNA, 6474 bp, synthetic construct
  misc_feature 1..6474: note = Description of Artificial Sequence: Synthetic coding sequence
  source 1..6474: mol_type = other DNA
atgtccgaccgctccggacccacagccaaaggcaaagatggaaagaaatatagctcactgaatctctttgatacatacaagggcaaatctttagaaattcagaagccagctgtggcaccacggcacgggctgcagtcgctaggaaaagtggccattgctagaaggatgccaccccccgctaacctgccaagcctgaaagcggagaacaaaggaaacgaccccaatgtgagtttggtccctaaggacggcacgggctgggcctcaaaacaggagcaaagcgaccctaaaagctccgatgcttcaactgcgcagccacccgaatcccaaccactgcccgcatcgcaaacaccagcatctaaccagcctaagcgtcctcccgcagcccctgagaatactccactcgtgccttcaggcgtgaaatcatgggcacaggctagcgtaactcatggagcccatggcgatggaggccgggcctcctctctcctgtcccgattctcgagagaagagtttcctacattgcaggccgccggagaccaggataaagctgcgaaagagcgcgaatcagcggaacagtcaagcggaccggggcctagcttgagacctcagaatagtacaacgtggagggacggcgggggccgcggtcctgacgagctcgagggccctgacagtaaattacaccacggccacgacccacggggtggtcttcagccctctggcccgcctcagtttccaccttatagagggatgatgccacccttcatgtatcctccatatttgcccttcccccctccttacgggccacaggggccataccgctaccccacccccgatgggcctagtcgtttccctagagtcgctggaccccgcgggagcgggcccccgatgcgtctcgtggagcctgtagggcgccctagcattctgaaggaagacaatctgaaggaattcgatcaactggatcaagagaacgacgatggctgggccggagcccacgaggaggttgactataccgaaaagttaaaattttccgacgaagaggacggccgggactctgacgaagagggtgctgaaggacatagggactcgcagtcagcatccggagaagagcggcctcctgaggctgatggcaagaaaggaaactccccaaacagtgagcctcctacgccaaaaacggcctgggccgaaacgtcacggccaccagaaacggagcccggtccgccggctcctaaacctcccctacccccacctcacaggggccctgcgggaaactggggtccaccaggcgattatcccgaccgagggggtccaccttgtaagcctcccgcccctgaagacgaagatgaagcatggcgccagcggcgcaaacaatctagcagcgagatcagcttggcagttgaacgtgcccgtcggcggagggaagaagaggagaggaggatgcaggaagaaaggcgcgctgcctgcgccgagaagttgaagcgcctagacgaaaaattcggagctcctgataaaagattgaaagcagagcctgcggcccctcccgccgccccaagtactccagcgcctccgcctgctgtgccaaaagagctgccagcaccgcccgccccaccccctgcttccgccccaaccccggaaacagaacccgaggaaccggcccaagctccaccggcacagtcgacgcctacccctggggtggcggctgccccaacgttggttagcggcggagggagtacatcgagtaccagttccgggagcttcgaagccagccccgtggagccacagcttccatccaaggagggccctgagcccccagaggaagtgcctccccccactacacctcctgttccaaaggtcgagccaaagggagacggtataggcccaaccagacaacccccaagccaaggattgggctaccccaaatatcagaaaagcttacccccacgcttccagagacaacaacaagaacagcttttaaagcagcagcagcaacaccagtggcaacagcaccaacagggaagcgcccctccaacacctgtccctccaagcccaccgcaaccagtgactctgggagccgtccccgctccacaggcgccccccccaccaccaaaagccttgtatcctggggctcttgggagacctccccctatgccacctatgaacttcgatcctagatggatgatgattcctccttacgtcgatcctcggctgctccaggggcggccacctcttgacttctatcccccaggcgtacatccctccggtctcgtgcctagggagcggtccgattctggaggcagctccagtgaaccgttcgaccggcatgcgccagccatgctgcgtgagagaggaactccgcctgtcgatccaaagcttgcctgggtcggcgacgtgttcactgctaccccagctgaacctcggcccctgacgagtcctctcaggcaggccgctgatgaggatgacaaaggaatgcggtcagaaaccccacctgttccacctcctcctccgtatctcgcctcttaccctggattcccagagaatggagcaccaggccctccgatcagcagattccccctggaagaacccggaccacgacccctgccctggcctcctgggagcgacgaggttgccaagatccagacaccacccccgaagaaggaaccccctaaagaggaaacagcccagctcactggccccgaggcagggcgcaagccagcacggggcgtgggcagtggcggtcagggcccacctcctcccagaagggagtccagaacagaaacacggtgggggcctaggccggggagttctcggcgaggaattccgcctgaagagcccggagctcccccccgccgggccggccccatcaagaaacctcccccaccaacgaaggtggaagagctgcccccaaagccactcgagcagggcgatgaaacccctaagcctcctaagcctgaccccctgaagattacgaagggaaagctgggcggacctaaggagactccaccaaatgggaacctctcccccgccccccgtttacgccgtgactattcttacgagcgggtgggtcccacaagttgtaggggcaggggccggggtgaatatttcgctcgcggcagggggttccggggcacctacgggggcaggggacgtggcgcacgatctcgcgaatttagaagctaccgagaattccgcggggatgatggccggggcgggggaacagggggtccaaatcatcctcctgcacctaggggccggactgccagcgagacccgatccgagggctctgagtatgaagagatacctaagcggcggagacagcgtggctcagaaactggctccgagactcacgagtccgatttagccccctctgacaaggaagcacccacacccaaggagggcaccctcacccaagtgcccctggcccccccccccccaggggcacccccctctccggccccagctcgtttcacagctaggggcggccgtgtgtttaccccacgcggggtaccgtccaggcgcggcagaggaggaggcagaccacctcctcaagtatgtcccggctggtcacctcccgctaagagcctggccccaaagaaacctcccaccgggcccttaccaccctccaaagagcctctgaaggaaaagcttatcccaggacccttgtctccagttgccaggggcggaagcaatggtggctctaatgtcggaatggaagatggtgagaggcctcggagacgccgacatggcagggcgcagcaacaagataagcctcctcgctttagaagactaaaacaggagcgcgagaacgcagcccggggcagtgagggtaaaccatcgctgacattgcccgcatcagcccctggacctgaggaagccttgacaaccgtgacagtcgccccagcccctagacgcgcggctgccaaatcaccagacctgagtaatcaaaattccgaccaggccaatgaggagtgggaaactgcgagcgaatctagtgatttcacgtcggaacgccggggggataaagaagctccccctcccgtcctgcttactccaaaagcagtgggtacacccggcggaggaggagggggcgccgtgcctggcatttccgctatgtcaagaggggacctctctcaaagagccaaagatctatccaagaggagcttttcatctcagcgtcccggcatggaaaggcagaatagacgtccgggccctggcgggaaggcaggctccagtggctccagctctgggggcggtggcggaggtccaggaggtcggaccggacctgggagaggcgacaagcggagttggccatctcctaaaaatagaagtagaccacccgaggagaggccacctggcctccccctcccccctccccccccttccagctccgcggtgtttcgcctggatcaagtaatacacagcaacccagccgggattcagcaggcactcgcacaattgagtagtaggcagggttccgtaacagccccaggaggacatcctcggcataagcccgggttaccccaggcccctcagggaccctctccccggcctcctacacggtatgaacctcagcgggtgaattctggtctgagctccgatcctcattttgaagaaccaggtcctatggttcgtggagtgggcggcactccccgcgattcagctggtgtgtcgccatttcccccaaagcggcgtgagcggccaccacgaaagcccgagctcctgcaagaagagagcttaccgcctccgcactcatccggcttcctcggatctaagccagagggaccaggaccccaggccgagagccgagacactggcaccgaggccctgaccccccacatttggaacaggcttcacacggccacttctcgaaagtcatatagaccctcatcaatggaaccatggatggagcctctgagtccattcgaggacgttgccggaactgaaatgagccagtccgacagcggtgtagacctttctggtgattctcaggtgtctagcgggccttgttcacaaaggtccagtcccgacggcggtcttaagggtgcagccgagggacctccaaagcgccccggcggaagctcaccacttaatgcagtgccttgtgagggaccccctggctccgaacccccccggagacccccccccgccccgcacgacggcgacagaaaggaattgccacgagaacagccgctgcccccaggccctattggaacagaacgctcccagcggactgaccgaggtacagaaccggggcccataagacctagtcacaggcctggacccccagtgcaatttggcactagtgataaggacagcgacttgagactcgtcgtaggggatagtctgaaggcagagaaagaactcaccgcaagcgtaactgaggccatccctgtctctcgggactgggagctccttcccagtgcggccgcctcagccgagccacaatcgaaaaacttggatagcggccactgcgtcccagaaccgagctccagtggtcagcgtctgtaccctgaggtgttctacggttccgctgggccaagctcctcccaaataagtggcggggccatggatagccagctacatcccaatagtggcgggttccgacccggtacgccatccttacacccttaccgatcacaaccactgtaccttcctcctggccccgcaccccccagcgcactgctcagcggtttggctcttaaaggacaattcctcgatttctccaccatgcaggccacggaactaggtaagttgccagccggcggggtcctctatccacccccgtcctttctatatagcccagccttctgcccgagcccgctgccggacacaagtttgttacaggtcagacaagatctaccatcccccagtgacttctattccactcctttgcagcctggcggccagtccggattcttgccctcaggagctccagcacaacagatgctcctccccatggtggattcacagctcccggtcgtaaactttggatctttaccaccggcaccaccacccgctccccccccgttaagcctgttgccggtgggcccagcactccagcctccgtccctggcagtgcgcccgcctccagcccctgccacccgcgttttgccttctcctgccaggccttttcccgcctcgctggggcgcgccgagcttcaccccgtcgagcttaagccttttcaggattaccagaaactgagcagcaatctgggtggccctgggtcgtcaagaaccccacccaccggacgatctttctctgggttgaactctcgcctcaaggctactccgtcgacctactcaggagtattccgaacccagcgagtcgacttgtatcaacaagcatctccgcccgacgccctgcggtggattccgaaaccttgggagcgcacaggccctccacccagggagggaccctctaggcgcgcagaagaaccaggatcacgaggcgacaaagaaccgggcctcccccccccccgctag

SEQ ID NO: 130031 - DNA, 6474 bp, synthetic construct
  misc_feature 1..6474: note = Description of Artificial Sequence: Synthetic coding sequence
  source 1..6474: mol_type = other DNA
atgtctgacagatcaggccctactgctaaagggaaggatggcaaaaagtactcttctctgaatctgtttgatacctacaaagggaagagtctagagattcaaaagcctgcggtcgcgcctaggcatggcctacagagcctggggaaggttgccattgccagacggatgcccccacctgcaaaccttcctagtctgaaagctgagaacaaagggaatgacccaaacgtcagcctggtaccgaaagacgggaccgggtgggcttccaaacaagaacagagcgatccgaagtccagcgatgcatctaccgctcaaccccctgaatctcaaccacttccagctagccagactccggcgagcaaccaacccaagcgccctccagcagctcctgagaatacccctcttgtcccgagcggtgttaaaagttgggctcaagcctctgtgacccacggggcacatggcgacggcggtcgagcttcatctctactaagtcgcttcagtagagaggagttccccacactgcaagccgccggcgaccaggacaaagccgcaaaagagcgcgaaagcgccgaacagtcaagtggtcccgggccctcactccgacctcagaacagcaccacgtggcgcgacggcggggggcgcgggcccgacgagcttgaggggcctgacagtaagttgcaccatggtcacgatccccgtggaggcctgcagccgtccggccctccccagttccccccctaccgaggcatgatgcctcccttcatgtacccgccttatctgccatttccacccccttacggcccgcaagggccttaccgctaccccacacctgacggaccaagtcggttccctcgcgtggctggccctcggggaagcggacctcctatgaggctcgtggagccagtcgggcgaccctctatcctgaaggaggataacttgaaagaattcgatcagctggaccaggaaaatgacgacggatgggccggggctcacgaggaagtcgactatacagagaagttaaagttttccgacgaggaagatggtagagacagcgacgaagagggagccgagggacatcgggactctcaaagcgccagcggtgaagaacgtccgcccgaagcagatggtaagaaggggaattcaccaaactctgaacctccaacccccaaaactgcttgggctgagacgtctaggccgcctgaaactgagccgggaccacccgctcccaagccccctctgccgccacctcaccgcggacctgcgggcaactggggccctcctggggattacccggatcggggcggccctccctgcaaaccccctgctcctgaggatgaagatgaggcctggcgacagaggcgcaaacagtcttcatccgagatatctctcgcggtggagcgtgcacggaggcggcgggaagaggaggagaggcgcatgcaagaggagcggagggccgcatgtgccgaaaagctcaaacgactggatgaaaagtttggagctcccgacaagcgactcaaggctgagcccgccgctcctcctgccgcgcccagcacccctgcccccccaccagcggttcctaaggaacttccagccccaccagcacccccaccagcttccgctcccacacctgaaaaagagcccgaagagcccgcccaggccccccctgcccagagcacacctacacccggcgtagctgccgctcctacattggtcagtggtggtggtagcacttctagtactagcagcggaagcttcgaagcatctccagttgaacctcagctcccgtccaaggaaggcccagagccccccgaggaagtgcctccccctacgacaccaccggttcctaaggtcgaaccaaagggggacggaatcggccccacccggcagcccccttcccaggggctgggttacccaaagtaccaaaagtccctgcctcctaggttccagagacagcagcaagagcagctgttgaagcagcagcagcagcatcaatggcaacagcatcaacaggggagtgccccaccaacccccgtgcctcccagccctccacaacctgtcactcttggtgcagtaccagcacctcaagctcctccacctccacctaaggccctctacccaggagccctgggacgcccgccccccatgccccccatgaattttgacccccggtggatgatgattccgccatatgtggatcctaggctcctccagggccgcccacccttagatttttatccccccggggttcacccatccggtctggttccacgtgagcgatccgactcaggcgggagtagttccgaaccttttgatcgacatgcccccgcaatgctccgcgagaggggcacaccgcccgtcgaccccaagcttgcgtgggtcggagacgtgttcactgcaacacccgctgaaccacgacctctcacaagtcctctgcgccaggccgcagacgaggacgataagggcatgcgttccgaaacgcctcccgtgccacccccccccccgtatctggcctcttaccctgggttccccgagaacggtgcacccggccccccaatctcccgatttcccctggaggagccaggtccaagacccctgccatggcctccaggcagtgatgaggtggccaagatccagactcctccccctaaaaaagaacctcctaaagaagagacagctcagctgaccggccccgaagctggcaggaaacctgctagaggagtgggctcaggagggcagggaccccccccaccccgtagggagtcgagaactgagactcggtggggcccgcgtccgggcagtagcaggcgcgggatcccacccgaagaaccaggtgccccaccgcggcgcgcgggccccattaaaaagcctccgccccctacgaaagtggaagaattgccgcccaaaccactggagcaaggggacgagaccccaaaaccaccaaagcctgatcctctgaagattaccaagggtaagctagggggaccaaaggaaaccccaccgaacggcaacctgtctccagctccaaggctgagacgggactactcctacgagcgcgtcggtccaactagttgtcgaggccgaggcagaggggagtattttgcccggggcagaggctttagaggaacctacggtggtagaggcaggggcgccagatcaagagagttccggtcctatcgggagttccgaggcgacgacggacgcggcggaggtacaggaggcccaaaccacccccccgctccgcggggccggacagcctccgagacaaggtctgagggttcagagtacgaagaaataccaaagaggcgacgccaaaggggcagtgagaccggatccgaaacccatgaatccgatcttgctccaagcgataaagaagcacctacgcccaaagaggggacgcttacccaggtacccctggcccctccccccccaggcgctcctccaagccctgcacctgctcggtttaccgcccgtggcgggagggtctttacccctcggggggtaccctccaggcgcggtcgaggcggaggacggccccctcctcaggtgtgccccggatggtccccacctgcaaagagtctggcacctaaaaagcctccgaccgggcccctgcctccatccaaggagcctctgaaggagaaactcattcctgggcccctgagtcctgtggctcgtgggggcagcaacggtggaagcaatgttggcatggaggacggcgaacgtcctagaaggcgacgccacggccgagcacagcaacaagataagccacccagattcagaagattaaaacaggaaagagagaatgcggctcggggaagtgagggaaaaccaagcctcacattgcctgcatcagcacccggccccgaagaagctctgactacagtgaccgtggccccggcgccacgtagggccgccgccaaatcaccagacttgagtaaccaaaattccgaccaggccaatgaggaatgggaaacagcatcagagtcgagtgacttcacatccgagagacggggagataaggaggcccctccgcctgtcttgcttactcccaaggccgtgggcacaccaggaggcggaggggggggggctgttcctggaatatctgctatgagccgaggcgatttatcccagagggcgaaggacctgtccaaacgtagtttcagttcacagcgcccaggtatggagaggcagaatcggcggcccggcccaggaggtaaagccggctcctcgggttcctcgtccgggggggggggcgggggaccgggcgggcgcaccggtccaggacgcggggataagcgttcgtggccctcccctaaaaaccgctctagaccccccgaagagaggccacctggcctgcctcttccccccccccccccgtcctcttccgccgtcttccgccttgatcaagtgatacacagtaaccctgccggaatccaacaggcactcgcacagctgtcctcacgccagggctccgtgactgcacccggggggcatccacgccacaagccgggacctcctcaggccccccagggcccaagtccacggccaccgactcgctacgagcctcagagggtcaactctgggctaagttctgacccacacttcgaagaaccaggtccaatggttcgcggggtcggcggaacaccaagggatagcgcgggagtctctcccttcccaccaaaaaggagagagcggccaccccggaaacctgagctcctacaagaggaatccctgccacctccacacagcagcggctttctaggatccaaacccgaaggcccggggcctcaagccgaaagccgtgatactggtacagaggcgttgacccctcacatctggaacagactgcacaccgccactagcagaaaatcgtacagacccagcagcatggagccatggatggagcccctgagcccttttgaggatgtggctggcacagagatgtctcagagcgacagtggggtggatctcagcggagattctcaagttagtagtggcccgtgttcgcagcgctccagccccgacggcggcctgaagggagccgccgaaggcccccctaaacgtcccggagggtcttcccctctgaacgccgtaccttgcgaaggcccaccgggttcagaacccccccgcagacctcctccagctcctcatgatggggacaggaaggagctgcctcgcgaacaaccgcttccacccggccccattggaacagagcgaagtcagcacaccgaccgcgggactgagcctggtcccataagaccctcccaccgtcctggccctcctgtgcagttcggcacatcagataaggactctgatctacgattggtcgttggagattccttgaaggccgaaaaagagcttactgcgagtgtaaccgaagccatcccggtttcccgcgactgggagctgctgccctccgctgccgctagcgctgagcctcaatccaaaaacctggactctgggcattgtgtacctgaaccatcctcatcaggtcaacgattgtaccctgaggttttttatggcagcgccggacccagctcttctcagatctctggcggggctatggattcacagctgcatccgaattcagggggctttaggcctggcacaccaagtctgcacccttacaggtcacagcctttgtatttacctccggggccagccccaccttcggccctgctgtccggtgttgcattgaagggacagtttctggatttctccaccatgcaggccacggagctgggaaagttgccagcgggcggcgtgttgtatcctcccccgtcctttctgtattcgccggccttctgcccttcacccctgcctgatacatccctgctgcaggtgcgccaggacttgccttcccctagcgacttttattccacccctttacaaccgggcgggcagagcgggtttctcccctctggagcccctgcccagcagatgttactgcccatggtggactcccaattgcccgtggttaactttggtagcctcccacccgcacccccaccagccccaccctccctcagcctgctcccagtcgggccggcactccagccacccagcttggccgttagaccccctccagcccccgccacgcgagtcttgcctagccccgccaggcccttcccggcaagtttaggtcgagctgagcttcatccagtggagctaaagccattccaagattatcaaaagttgagttctaacctcgggggccctggatcctctcgtaccccgcctaccggcagatcttttagtggtttaaacagccgccttaaggccaccccaagcacctattctggcgtttttcgcacacagagggtggatctataccagcaggcctcccctcccgatgcgttgcggtggatccctaaaccatgggaaagaacgggacccccccctcgggagggccctagtcggagggccgaagagccaggcagcaggggagataaagagccaggcttgccccccccgcgctag

SEQ ID NO: 130032 - DNA, 6474 bp, synthetic construct
  misc_feature 1..6474: note = Description of Artificial Sequence: Synthetic coding sequence
  source 1..6474: mol_type = other DNA
atgtctgaccgaagtggtcccaccgctaaaggcaaagatggtaaaaagtattcttctctaaacctctttgacacctataagggaaagtcactggagatccagaagcccgccgtcgccccacgtcatggcctccagagcctgggcaaagtagcaatcgctcgtagaatgccaccccccgcgaatctccctagccttaaggccgagaataagggtaacgacccgaacgtcagcctagttcccaaggatggaaccggatgggcatccaagcaggaacagagcgaccctaaaagtagtgacgcaagtacagcccagcctcccgagtctcaacctctccccgcctcacagacccctgcatctaatcaaccaaaaagaccacccgccgcaccagagaatacacctctcgtgccatcaggggttaaatcttgggctcaggccagcgtaactcacggcgcccacggagatggtggtcgggcgagctccttgctgagccgtttctcacgtgaggaatttcccacgttacaggctgcaggagaccaggataaagccgccaaagagcgagaatcagcggaacagtcatccggtcctgggccatctctgagaccccaaaatagtaccacctggagggacggagggggcagggggcccgacgagctcgagggacccgatagtaaattgcaccatggccacgaccccagaggggggctacagccaagtggtcctcctcagttccccccataccgtgggatgatgcctcccttcatgtacccaccttatctccctttccctcctccatacggtccccagggaccctataggtaccctacacccgatggaccgtccaggttccctagagttgcaggcccccgtgggagcggacctccaatgcgcctagtggaaccagttggtcgccccagcattttaaaggaagataacctgaaagaattcgaccagttagaccaggagaacgacgatggttgggcaggggcccatgaagaagtggactacactgagaagcttaaattctcggacgaagaagacggtcgggatagtgatgaggaaggggcggaaggccacagggacagccagtcggcttccggagaggaacggccccccgaagcggatggcaagaaggggaactcaccaaactctgagccacccaccccaaagacagcgtgggccgaaaccagtagaccccccgaaaccgaacccggcccacctgcacctaaaccccccctgcccccacctcaccggggccccgcgggcaactgggggccgccgggggactacccagaccgagggggccccccatgcaaacctccagcacctgaagatgaggacgaagcgtggcgtcagcggcgtaagcaatcaagttccgaaattagcttggccgtggaaagggcacgtcgacggagagaggaggaggagaggcgaatgcaggaggaacgtcgagccgcgtgtgccgagaagctgaaaaggcttgacgagaagttcggggctcccgataagcgcctaaaggccgaaccagctgcccctcccgccgctccatcgacgcccgctcccccgcccgctgtgcccaaggaacttcccgcacccccggcccccccacctgcgtccgcccctactcccgaaaaggagcccgaagaacctgcacaagcaccccctgcacaaagcacacctaccccaggtgtggccgccgctcccacactggtctcaggaggaggctctacaagctccacttcgtcaggcagcttcgaagcgagtcctgtcgaaccccagttgccctccaaagaaggtccagaaccacccgaagaggttcccccccctacgacaccccccgttcccaaagtagaacctaagggcgacggcattgggcccactcgacagccacctagtcagggcttggggtacccgaaataccagaagagtctgccaccgcggtttcagaggcagcagcaagagcagctgctaaagcagcagcaacaacaccaatggcagcaacaccagcagggaagcgcccctcccacaccggttcctcccagtccaccccaaccagtgactttgggcgcggttccagccccacaggctccaccacctccccctaaggccctgtacccaggagcacttgggagacccccacccatgcctccaatgaactttgaccctcgctggatgatgatccccccctacgtcgacccgaggctcctgcagggtcggcctcctttggacttctaccccccaggcgttcatcccagtgggctggtgccacgcgaaaggtcagactctgggggatcctccagtgagccttttgacaggcacgcaccagctatgctgcgcgagcgaggaactccacctgtagaccctaaactagcatgggtcggcgatgtctttactgccacaccagctgaacctcggcccctcacttcacctttacggcaagcagccgacgaggacgataagggcatgcgaagcgaaacgccgcctgttcctcccccccccccctacttggcgtcctatcccggcttccccgagaatggggctccgggccccccaataagcagattcccactagaagagccaggaccgagaccccttccgtggccacccggttcagatgaggtcgccaagatccagacaccaccacctaaaaaagagccacccaaggaagaaaccgcccagctcacaggacccgaagccgggagaaagcccgctagaggagttgggagcggtggccagggtcctcctcccccacgacgcgagagtcgcaccgagaccaggtggggcccacggcccgggtcaagtaggcggggcatcccccccgaggaaccaggggctccgccgaggagggcaggacctattaagaaaccaccacccccgacaaaggtggaagaactgcctccaaaaccccttgagcagggagacgaaacgcctaagcccccgaaaccagaccccctgaagattactaaggggaaactcggcgggccaaaggagacacctccgaatggtaatctgtctcctgctccaagactccgtagagattattcatatgaaagagtgggccccacctcctgtcgcgggcgcggccgtggtgagtattttgcccgcggccggggatttagaggaacatacggcggacgcggcagaggcgcacgtagtcgcgagtttaggtcctatcgggaatttcggggagatgatggtcgtgggggggggacggggggccctaaccatccccccgctcctcgggggagaaccgcctctgagactcgcagcgaaggaagtgaatatgaggaaatcccaaagcggcgccgccagcgcggaagcgaaacgggttcagagacacatgaatctgacctagctccatccgacaaagaggcaccaaccccaaaggaaggcacactgacacaagtgccccttgcccccccaccccccggggcccctccgtcgccggcgcctgctcgcttcactgcaaggggaggaagagtcttcaccccgcgtggggtcccctcacggagagggcggggcggtgggcgaccccctcctcaggtttgccccggttggtctccccccgcaaaaagtttagctccgaagaaacccccaacaggcccgttgcccccgtccaaggagcccctcaaggaaaaactcatcccggggccactcagccccgtcgccagggggggatctaacggcggaagcaatgtaggcatggaggacggcgagcgaccaaggaggcggcgccatggtcgagcacagcagcaagataaacctccgcgcttccggcgcctgaagcaggaaagggagaacgctgcgcgaggcagcgagggcaaacctagccttacgctgcctgcgagcgcccctggcccagaggaggctcttacaaccgtcacagtggcacctgcaccccgcagggccgcagccaagtctcccgacttatcgaaccagaactctgatcaggcaaatgaagagtgggagactgcatcagaaagtagcgattttactagcgagaggaggggcgacaaggaagcaccgccccccgttctgctcacccctaaagctgtaggtacacccggcgggggaggggggggcgctgtccccggaatcagtgccatgagtagaggggatctaagtcaaagggccaaggatctgagcaagcgcagctttagctcgcagagacctgggatggagcggcagaaccgtcgccctggccctgggggaaaggctgggtcttccggctctagttccggtggtggggggggcggccccggcggacggaccggaccggggaggggagataagagatcctggccaagccctaagaatcgctccagaccacctgaggagcggccaccaggcctgcccctgccccctccaccccccagctccagcgccgtgttccggctggatcaggtcatccattctaatcccgcgggaattcagcaggccctggctcagctgtcgtcacgccagggcagcgtgacagctcctggtggccacccacggcacaagcccgggccaccacaggcccctcagggcccatccccacgccctcctactagatacgagccacagagagtcaacagcgggcttagctcggacccccatttcgaagagcctggtccaatggtgcgcggcgtcggtgggacgccacgcgattcagctggagtgtcccccttcccaccgaaaaggcgagaaagaccgccacggaagccagagttactacaggaggaatccttgccacctccccactcttccggcttcttagggagcaagcccgaaggcccaggtccgcaggcagagtctcgcgacactgggacggaagcgctaacaccacacatctggaacagactccatacagccacatctcggaagtcttatcgaccatcatcaatggagccttggatggagcccctgagcccttttgaagatgtggccgggacagaaatgtcccagtccgattcaggagtcgacttatcaggcgactcccaggtgtctagcgggccctgcagccagcgttcgagcccagacgggggactgaagggagcagctgagggccccccaaagagacccggaggttcgtcgccactcaatgctgtgccgtgcgaggggccacccggaagcgagccaccccgacgcccacctccagcccctcatgacggggaccggaaggagttacctcgggaacagcccttgccaccagggcccatcggaaccgagagaagtcagcatacagacaggggtacagagcctgggcccatcaggcccagtcaccggcccgggccccctgtgcagttcggcacctccgataaggacagtgatctcaggctcgtggttggggacagcttaaaggccgagaaggagctaaccgcctccgtgacagaggcgattcccgtgtctagggattgggaactgctgccaagcgcggccgcttccgcagaaccccagtcgaaaaacctcgattcagggcattgtgtgcccgagccctccagttctggccagcgtctgtatcctgaggtgttttacggctctgccggcccttccagtagtcaaattagcggaggtgctatggactctcagctgcatcccaattcaggcggctttaggccgggaacacctagtctacatccctatcgttctcagcctctatacctgcctcccggccccgcaccacccagcgcccttctatctggggtcgctctcaaggggcagtttctggattttagcaccatgcaagccactgaactcggtaaacttcccgcaggcggagtcttatacccacccccttcattcctgtactcacccgcgttctgtccatctccgctgcctgacactagtctgctgcaagtgagacaggacttaccttctcccagcgatttttatagtacccctctgcaaccaggaggccagagtggcttcctcccaagcggtgccccggcgcagcagatgctcctgccaatggtagactcccagctccctgtggttaatttcgggtccctgcccccagcaccacctcccgccccacctagcctctctttgttgccagtgggacctgccttacaacccccatccctcgccgtgcgcccaccccccgcaccggcgacacgagtcctaccatcccctgctaggccttttccagcatcactgggccgggcagagctccacccggtcgagctcaaaccgtttcaggattatcaaaaactgtcctcaaaccttggaggccccggaagctctcggacgccccctacagggcggtcttttagtgggttgaactctcgcctcaaggcaacgccgagcacgtatagcggcgtatttcgcacacagagggtcgacctgtaccagcaggcaagcccgcctgatgccttgcgctggatacctaaaccctgggagagaaccgggccaccgccgcgcgagggcccctcaaggcgtgctgaagagccaggcagtcggggagacaaggagccagggctgccacctcctcggtag

SEQ ID NO: 130033 - DNA, 6474 bp, synthetic construct
  misc_feature 1..6474: note = Description of Artificial Sequence: Synthetic coding sequence
  source 1..6474: mol_type = other DNA
atgtcagaccgcagtggaccaaccgcaaaaggtaaagacgggaagaaatattccagtctgaacctgttcgacacctacaaaggaaagtcactagagatccagaagcccgctgtcgcaccccgccacggacttcagtctttaggcaaggtcgctattgcccgtcggatgccccccccagctaacctgcctagcttgaaggccgagaacaagggcaacgatcctaacgtgagtttggttcccaaggatggcacaggctgggctagcaaacaggaacaatccgaccctaagtctagtgacgcctccaccgctcaaccaccagaaagtcagccattaccagcttcacagacccccgcctccaatcagcccaagagacccccggcagcccccgaaaacaccccactggtgcccagtggggttaagagttgggctcaagcatccgtgacccacggcgctcacggtgacggaggaagggcttcttccctgctgtctcgattttctcgggaggaattccccacgcttcaggctgctggagatcaagataaagcagctaaagagcgcgagtccgctgagcagagcagcggacctggcccttccctgcgaccacagaactccacaacttggcgggacggagggggtagggggcccgacgaactggaagggccagactctaaattgcatcacgggcacgatcctcgtggcggtctacagccctccggcccaccacaattccccccataccggggcatgatgccacctttcatgtacccaccataccttccgtttcctccgccgtacggcccgcaggggccgtatagatatcctacaccagacggccccagccgctttccccgggtggctggtccacggggatctggaccccctatgcgcctggttgagccagtcgggaggccctccatcttgaaggaggacaatctgaaggagtttgaccagctcgatcaagaaaatgacgacggatgggctggggcccatgaggaggtggactacacagagaagctcaaatttagtgatgaggaggatggacgcgacagcgacgaagagggcgccgagggccatagagacagtcagtcagcttcgggtgaggagcgaccccctgaagccgacggtaagaaaggaaattcccctaatagcgaacctccaactcccaagaccgcatgggcggaaacttccagaccaccagaaactgaaccagggcccccagctccaaagcccccgctgccacccccacacagggggcctgcaggtaactggggccctcctggggattacccggatcgaggtggtccgccatgtaagccgccagcacccgaggatgaagatgaagcatggcggcagcggcggaagcagtcgagctccgagatttctctcgcagtggagcgtgcaaggcgccgccgagaggaagaagagcgtcgcatgcaggaggaacgacgggctgcctgtgctgagaagctgaaaaggctggacgagaaattcggtgctccagataagcgactgaaggccgaaccagctgctccgcctgcagccccatcaaccccggccccgcctccagcagtgccaaaggagttgccagcccccccagcaccccctccagccagtgcacctactccagaaacagaacctgaggagcccgcgcaggctcccccggcccagtctactccaactcctggcgtggctgctgctcccacgcttgtatcagggggggggagcaccagctctacctcatccgggtcatttgaggcatctccggtggagccccaactgccaagcaaggagggaccagaaccccccgaggaggtgccacccccgacaacccctccagtccctaaggtagagccgaagggtgacgggattggccccacacggcaaccccctagccaggggctcggctatcccaaatatcagaagagcctgccccctagattccaaaggcaacaacaagaacagctcctcaagcagcagcaacagcaccagtggcagcagcaccagcaaggttctgctccccctactcctgtgccaccctctcctcctcagccggtgacacttggagccgtccccgccccacaggctcctccaccacctccaaaggctctctaccctggcgcactgggcaggccacctcccatgcctcctatgaacttcgacccgcggtggatgatgataccaccatacgtagatccaagactccttcagggtcgtccaccactagatttttacccaccaggagttcacccttcggggctcgtgcctcgcgagagatccgacagcggtggtagtagttcagaacctttcgatagacatgcccctgcaatgctgagagagagaggaacaccacctgtggaccccaaactcgcctgggttggcgacgtctttacagctacgcccgcagagcctaggcctctgacaagccctctgaggcaagcagcggacgaagatgacaaggggatgaggagtgaaacacctccagtgccccctcctccaccgtacctggcctcatatcccgggtttcctgaaaacggcgccccaggaccacccatcagccgctttcctttggaggagcccgggcctagacctctgccctggcctcccggctcagacgaagttgccaaaattcaaacgcccccccccaaaaaggagccccctaaggaagaaactgctcagctgacgggtccagaggcgggcagaaaacccgcacgaggtgtgggtagcggtggccaggggccgccccctccccggcgggagagccggactgagactaggtggggacctcgccctggcagtagcaggcgcgggatccctcccgaagagcctggggccccacccagacgagctgggccgatcaagaaacccccaccgcctaccaaagtagaagaattgccaccaaaaccgctagaacaaggagacgagacccccaagccacctaagcctgatcccctgaagattaccaagggaaagcttggaggccctaaagaaacaccccctaacgggaatctctctccagcccccagactgcgtcgcgattattcttatgaacgcgtcggccctacaagttgtcgcggccgcgggagaggcgaatactttgcccgcgggagaggcttcagaggaacatatggaggcagaggtaggggcgccagatcccgtgagtttcgttcttacagggaatttcggggcgacgatggacgagggggtggaaccggcgggccaaatcacccccccgcgcctcggggcagaaccgcaagcgagaccagatccgagggctcggagtatgaagagataccaaaacgaagaaggcaacgagggtcagaaactggaagcgagactcatgagtccgatctcgctccttcagataaggaggcgccgacacccaaggagggcactcttactcaggtgcctttggctcccccacctcctggagctcccccgagccctgcccccgctcggtttacagccagaggcggcagggtgtttacccccaggggcgtacctagtagaagggggcggggaggaggccggccacctccccaagtgtgtcccggatggagtcctcccgcaaaatctttggctcccaaaaaaccacctaccggccctctcccgccgtctaaagagccacttaaggaaaagctcatccctggccccttgtcgccagttgccaggggaggcagcaatggtggcagcaacgtgggcatggaggacggcgaacgtccgagacgccgacggcacggacgcgcccagcagcaggataagcccccacgcttccgaagactaaagcaagaacgagagaacgcagcccggggttccgagggtaaaccatccctgactctgcctgcctctgcaccgggacctgaggaggcactgacaaccgtcactgtcgcacctgcaccaaggagggctgcagccaaatcccccgatttgtcaaatcagaactcggaccaggctaacgaggaatgggagacagccagcgagtcctcagactttacctccgaacgcagaggagataaagaagcccctcctcctgttctcttaacacctaaggccgtgggaacccccggtggcggaggggggggcgccgtgcccggaatttccgcaatgagtcgcggagatctgagtcagcgggctaaagacctgagtaaaaggtctttcagttcgcagcgccccggcatggaacgccagaaccgcagacctggccctggcggtaaagctgggagctccggttctagctctgggggtggcgggggtggccccggcggccgcacggggccgggtcgcggggacaaacgaagttggccttcccctaaaaatcggtctcggccccctgaggagagaccccccggacttccccttcctcccccaccaccctcttcatccgctgtgttcagattggaccaggtgatccattctaatcctgcaggcattcaacaggcgctggcacaactctcttccaggcagggctccgtgaccgcaccaggcggccaccctcggcataaaccaggactgccgcaggctccgcagggaccaagtccgcggccacctaccaggtatgagcctcagagggtcaattctgggctctcgtccgacccccatttcgaagaacccgggccgatggttcggggagtgggcgggacaccccgcgacagtgcaggcgtgtccccctttccgccaaagcgccgggagcgcccgccgcggaaacccgagttattacaggaggagtcccttcccccgccccactccagcggattcttgggatccaaaccagagggtcccggtccccaagcagaaagtcgcgacacagggactgaagctctaactccacacatatggaatcggctacatacagccaccagcaggaaatcttacagacccagcagtatggagccatggatggaaccccttagtccctttgaagatgtggccggcacggaaatgtcccagagcgattccggtgtggatttgagcggagactctcaggtctcttcaggcccatgtagtcagcggtcgagtcccgacggaggactgaagggcgccgctgaaggaccgccaaagaggcctggggggtcctcccctttaaatgctgtcccttgtgaaggcccccccgggtctgagcctcctcggcgtccacccccggcaccgcacgacggtgatcgaaaggaactgccaagggagcagccactgcctccaggccccatcggcactgaacgctcacagcggaccgatagaggcaccgagccaggcccaattagaccaagccatcgaccaggccctcctgtgcagtttggtactagtgacaaagactccgatctgcggctggtggtgggggatagcctcaaagcagagaaggagctcacggcaagcgttaccgaggccattcccgttagccgagactgggagctcttgccaagcgccgccgcctctgcggaaccacagtctaaaaacctggactcaggacattgcgttcccgagccctcaagtagtggtcagcgcctgtatcccgaggtattctacggcagcgctggcccaagctcttcacagatttccggcggagcaatggatagtcagcttcatccaaacagcggaggttttcggcccggtaccccgagtttacatccctatcggagccaaccattgtacttaccccccgggcctgcgccacccagcgctttgctgtcaggggtggcactcaaggggcagtttctcgatttctccacaatgcaggcaaccgaacttggtaagttacctgcggggggcgtgttgtatcctcccccttccttcctgtacagtcccgcattttgtccctcacctctgcccgatacatccctgttgcaggtgcgtcaggatctcccttcccctagcgacttctactccacacccctgcagcctggcggtcagtctggatttttaccgagcggggcacctgcgcagcagatgcttctcccaatggttgactcgcaactcccggttgtgaactttgggagccttcctccggcgcccccacccgcgcctccgccactgagcctcctcccagtcggcccagccttgcaacccccctctctggcagttcgtcctccaccagcacctgccacgagagttcttccatctcccgcacggcccttccccgccagtcttggccgggctgagttgcatcccgttgagctgaaaccatttcaagattatcaaaaactttcatccaacctgggtggacctggatcaagccgaacacctccaactggtagaagctttagtggacttaacagccgcctgaaagcaaccccctcaacgtatagcggggttttcaggactcaaagagttgatttataccaacaggccagcccgcccgacgccctaaggtggatccccaagccctgggaaaggactggtccacctcctcgggaagggccgtctcgtagagccgaagaacctggctctcgtggagataaagagcccggcctaccccctccccgatag

SEQ ID NO: 130034 - DNA, 6474 bp, synthetic construct
  misc_feature 1..6474: note = Description of Artificial Sequence: Synthetic coding sequence
  source 1..6474: mol_type = other DNA
atgtccgatcgctctggacccaccgccaagggaaaagacggcaaaaaatacagctcgctcaacctcttcgatacctataaggggaagtcactggagattcagaaacccgctgtcgcacctcggcacggcctgcagtccttgggaaaggtcgctattgccaggcggatgccaccgcctgctaacctaccatccttgaaggctgaaaataagggaaacgacccaaacgtatcactcgtgcctaaagatggtacaggctgggctagtaaacaagagcagtcagatcctaagtcttctgatgcctctacggctcagcccttagaaagtcaaccgctccccgcatcccagacaccggccagcaatcagcccaagaggcccccagctgcccccgaaaataccccgctggttccaagcggggtgaaatcctgggcccaagcgtcagtgacacatggtgctcacggtgatggtgggagagcaagctctctactctcccggttcagccgggaagagttccccacactgcaggccgcaggggatcaggataaagctgccaaggaacgcgagtctgctgagcaatcttcagggccaggaccctctcttagaccccagaatagcacaacctggcgggatgggggggggcggggaccagatgagctggaaggccccgatagtaagctgcaccacggccatgacccaaggggaggcttgcagcccagtgggcccccccagtttccgccatacagaggcatgatgccaccgttcatgtatcctccctatttgccctttccccccccatatggaccccaggggccgtataggtaccccacccctgatggcccatcccgatttccaagagtggcgggcccccgaggaagtgggcctccaatgaggttagtggaaccagttgggcggccatccattctgaaggaagataatctgaaagaattcgatcagttagaccaggagaacgacgatggttgggcgggtgctcacgaggaggtggattataccgagaaactgaaattttctgacgaggaggatggcagagattctgatgaggaaggcgctgagggccatagggattcccagtctgccagcggagaagaacgccctcctgaagcagacggaaagaaagggaatagtcccaactccgaacccccaacacccaaaacggcatgggctgaaacctctaggccccctgagacagaacctgggccgcccgctcctaagcctccactgccacctcctcacaggggccctgctggtaactggggacctcccggggattatcccgatcgcgggggccctccctgcaaaccgccagctcctgaggacgaggatgaagcatggagacagagaagaaagcaatcttcatcagagataagcttggctgttgaacgggctagacgccgacgggaggaggaggaaaggagaatgcaggaagagagacgggcggcatgcgcagagaaactcaagcgcctggatgaaaaattcggagccccagacaagcgcctcaaggcagaacccgcagcaccgcccgcagcaccaagcacaccagcacccccacccgccgtgcctaaagagttacccgccccccccgcgccgcctccagcaagcgctcccacacccgagaaggagcctgaagagccagctcaggcccccccagcccaaagcacccccacacctggggttgctgctgccccaacactggtgtcaggaggtgggtcgacgtcatccacatcatcaggtagctttgaggctagtccagttgaaccccagctgccaagtaaggaagggccagaacctcccgaagaagtgcctcccccaactacccctcctgttcccaaagtggaaccgaagggagacgggatcggacctaccaggcagccccctagccaggggctgggatacccgaaatatcaaaaatcactgcccccaagatttcagcgccagcagcaggagcagcttctcaaacagcagcagcagcatcaatggcagcaacaccagcagggctctgccccccccactcctgtgccaccctcccccccccagccggtgaccctgggggctgtgccagccccacaggcccctcccccaccgcccaaggccttgtaccccggtgcacttggccgccctccgcccatgcccccaatgaatttcgaccctaggtggatgatgattcccccatatgtggatccaagattattacagggcaggccaccactagatttctatcctccaggagtacatccaagcggacttgtacccagagaaaggtcagactctggcggcagttcctccgagccattcgaccgacatgctccagcgatgctaagagagaggggtacacctccagttgatccgaagctcgcctgggtgggcgatgttttcactgcaacacccgcagagccaaggcccttaactagcccattacgccaagccgcagacgaggacgacaaggggatgagaagcgagacgccgcccgtgcctcccccacctccctacctcgcttcttatcctggattcccagagaacggcgcccccggtccccctatatctcggttccctctggaggagccgggccctcggccgctgccctggcctcctgggagtgatgaagtggccaaaattcagactccaccccctaaaaaagagcctcctaaagaggaaacagcccaactcacagggcccgaggcaggacggaagccggccagaggggtgggatctggcgggcagggccctccgcccccaagacgagagagccgaaccgaaacgcgctggggcccacgaccaggttcctcgaggcgaggaattccaccagaagagccaggggccccccctcgacgtgcaggccccatcaaaaaacctcccccacctaccaaggtcgaagagctgccccctaaacccctcgagcagggcgacgagactccaaagccaccaaaaccagacccacttaagattacaaaagggaaactggggggccctaaggagactcccccaaatggcaatctgtctcccgcccccagacttagaagagactacagctacgaacgggtcggcccaactagctgtcggggcagaggtcgtggggagtacttcgcccgagggagaggattccgtggaacctacggggggcgaggacgcggtgcccgtagccgcgagtttcggtcataccgcgaattccggggcgatgatgggaggggcgggggcaccggtggccctaatcatcctcccgctcctcggggccgcacagctagcgagacaaggagtgagggcagtgagtatgaggagattccaaaaaggagaaggcagcgtgggtccgaaacaggaagcgagacccatgaaagtgacctggctcccagcgataaagaggctcccactccgaaagaggggactctcacccaagtcccactggctcctccaccacctggcgcacccccgagccccgccccagccaggtttaccgcacggggggggcgagtcttcaccccgcggggagttcctagcaggcgcggtcgcgggggcgggagacccccgccccaagtctgccccgggtggtctccccctgctaaatctctggctcctaaaaagccacctactggtcccctccccccgagcaaggagcctttgaaagagaaactaattccaggcccactaagtcccgtcgcaaggggaggaagtaatggaggcagcaatgttggaatggaggatggggagcgccctcgccgccgacgacatggccgtgcgcagcagcaggacaagcctccgaggttcaggaggcttaaacaagaaagggaaaatgctgctagaggatccgagggaaagccgtctctgacactgcccgcctccgcacccgggcctgaagaggctttaactactgtgaccgtggctccagctccgaggagagccgctgccaagagcccagacctaagtaaccagaatagtgatcaggccaacgaagagtgggagaccgcctcagaatcatctgactttacaagcgagcgccggggcgataaggaagctccccccccagtcctcctgactcccaaggccgtcggaacacctgggggcggtggcggtggagcagtgcctggcatttcagccatgtctcgaggggacctgtcacagagggccaaagatctcagcaaacggtcattcagcagccagcgacctggaatggagaggcagaaccgacgccccgggcccggcggaaaagccggctccagcggatccagcagtggcgggggcggtggtggaccaggcggacgaaccggcccaggacgaggggacaaacggtcttggccatcaccgaagaacagaagtcgcccgccagaggagcggcccccagggctgcctctcccgccacctcctccctctagcagcgcagtattcagattggatcaagtgattcatagcaatccggcagggatccagcaagctctggcccagctcagttcgaggcaggggtcagttactgccccgggtgggcacccgcggcacaagcccgggccccctcaggctccacagggtccttcaccacgcccaccaactcggtatgagcctcaaagggtcaatagcggcctttccagcgacccgcacttcgaagaacctggcccaatggtgagaggcgtaggtggaactcccagggactccgcgggcgtgtcaccctttcccccaaaaaggcgtgaaagacctccaagaaagccagaacttctgcaggaagagagtctgccgcctccccattcctcagggttcttaggttccaaacccgaaggtccagggcctcaggccgaaagcagggatacggggactgaagccctcaccccccatatctggaaccgcttgcacacggccacttcccgtaaaagctataggccctcctccatggagccatggatggagccgctgtcacctttcgaggatgtggcaggtactgaaatgtcccagagtgactcaggcgtggacctatctggtgactcacaggttagctcaggtccctgctcgcaacgaagcagcccggacggtggattaaagggagctgcggagggacctcccaagcgcccaggtggttccagcccgctgaacgcagtcccatgtgaaggaccccccggctctgagccccctcgacggccccctccagcacctcacgatggggataggaaggagttgccccgtgagcagcccctgccccctgggccaattgggacagaacgttcacagagaactgatcggggaacggaaccgggtcctatccggcccagccaccggcccggaccccccgtgcagttcggtacatcagataaggactctgacttgcgtctggtagttggcgactctcttaaagcagagaaggaactcaccgctagtgtgacagaggctattcctgtttctcgcgattgggaactcctcccctccgccgcggcatccgccgagcctcagtccaaaaatctggatagtggtcattgcgtgcccgagccgagtagcagcggccagagactgtacccagaagtgttttatgggtccgcaggcccatcttcaagccagatcagcggaggggcaatggactcccagctccacccaaattcagggggatttagacccggtacaccatcactccatccgtaccgttctcagccattatacctgccgccggggcctgcaccaccttcggctctcctttcgggagttgccctgaaggggcaattcctcgatttcagcaccatgcaggcaacagagctagggaagctgccagcaggtggagtcctgtatccccctccaagttttttgtactctcccgcattctgtcctagtccgctacctgacacctctttattgcaagtccgtcaagatcttccctccccctctgacttttacagcactcccctccaacccggaggacagtctggattcctgccaagcggggctcccgctcagcagatgctactcccaatggtcgactcccagttgccagtagtaaactttggcagtctaccacccgctccaccccctgcgccgccccctttatcactactgccagtgggtccagctttgcagcccccatccttggcagtgcggccgccgccagccccagccacaagagtcttaccaagtccggcgcgcccattccccgcttccttgggcagagccgaattgcacccggtggagctgaagccgtttcaggattatcagaaactctctagcaatctgggaggccccggttcctcacgcacacccccgaccgggaggtccttctcaggcctcaactcccgcctcaaggcaacccccagcacgtattccggggtgtttcggacccagcgtgtggatctataccagcaggccagccctccagatgccttgcggtggattccaaaaccttgggagagaacaggacctcctccaagagaggggccctccaggagagctgaagaaccaggctctaggggcgataaagaaccaggactgccccccccaagatag

SEQ ID NO: 130035 - DNA, 6474 bp, synthetic construct
  misc_feature 1..6474: note = Description of Artificial Sequence: Synthetic coding sequence
  source 1..6474: mol_type = other DNA
atgagcgatcgctctggacctacggctaaagggaaagacggtaagaagtacagctctcttaatttattcgacacctacaaagggaagtctttggagatccagaaaccagctgtggcacctagacacgggttacagtcgctcggcaaagtggctatcgcaaggcgaatgccaccgccagcgaatctcccctccctcaaagctgaaaacaaaggcaatgacccaaacgtgtctctggtgcctaaggatggcactggttgggcgagtaaacaggaacagagtgatcctaaaagttctgacgcttcaaccgcccagcctcctgaatcacagcctctccccgccagtcagactcctgcatcgaatcagcctaagcgacccccagcggcccctgagaacacccctttggtaccctctggggttaagtcatgggcccaggcctctgttacccatggcgcacacggagatggcggcagagcttcgtctctgctgagtagattcagccgcgaagaatttcctacgctccaggccgcgggcgatcaggataaagccgcgaaggaaagggagagcgcagagcagtcatcagggcccggcccatctctccggccacaaaatagcactacctggagagacggcggcgggcggggaccagatgagttggaaggcccagacagtaagctccatcatggccacgatccgcgagggggacttcaaccctctggtccaccccagtttccaccctaccgcggcatgatgccaccctttatgtatccgccatatctgccttttccacctccatacggccctcaagggccataccgatacccaactcccgatgggccctccaggttcccccgggtggctgggcctagaggatctggccccccaatgcgactcgtggagcctgtcgggaggccttccatcctcaaggaggacaacctgaaggaatttgaccaactcgaccaggagaacgatgacggttgggccggagctcatgaagaagttgattataccgaaaaactaaagttctctgatgaggaagacggcagggacagcgacgaggagggcgcagagggacaccgtgactcacagagcgccagcggcgaggaaagaccccccgaggccgatgggaaaaaaggaaactccccaaatagcgagcctcccacccctaaaactgcctgggcagaaacatcccggccacccgaaacggaacctggccctccagctccgaaaccaccgttgcctcctcctcaccgggggccagccgggaattgggggccccccggggattaccccgataggggcgggcccccgtgtaaaccccctgcccccgaggatgaagacgaagcttggagacagcggagaaaacagtcaagcagcgagattagtctggctgtggagcgcgcgagaaggaggcgagaagaggaggagagacggatgcaggaagagcgtagggctgcctgtgccgagaaactgaagaggctggacgagaagtttggggccccagacaagcggcttaaagctgaaccggccgcaccgcccgccgccccgtctactccggccccgccaccagccgtcccaaaagagctccccgcaccaccagccccccccccagcttctgcacccacaccagaaaaggaaccggaggagccagcccaggcccctcccgcgcagtctacgcccactccaggcgttgctgccgcccccacactagtaagtgggggcggctcaacaagtagcaccagtagcggctcctttgaggcctctccggtggagccacagctcccatccaaagaagggcccgaacctcccgaagaagtgccaccacccacaactcccccagtcccgaaggtcgaacctaagggggatggaattgggcctacaagacagcctccatcgcaaggtctgggctaccccaagtaccagaaaagtttgccccctagattccagaggcaacaacaggagcagctgttgaaacaacagcaacagcaccagtggcagcaacatcaacaggggtccgccccgcctactccagtccccccgagcccgccgcaaccggtaactttaggtgctgtgccagcacctcaggctcccccacctccacccaaagctctgtaccccggagctcttgggcgaccaccacctatgcccccaatgaatttcgatcccagatggatgatgatccctccttatgttgacccacgcctcctccagggccggccccccctagacttttatccacctggcgtccatccctccggcctggttcctcgagagcggagtgactctggcggctccagctccgagccgtttgaccgacacgctcctgccatgctgagagaacgtggcacccctcctgtcgaccctaagcttgcctgggtcggagatgtgttcaccgccaccccagcggaaccaaggccccttacaagtccgcttaggcaggccgccgatgaggatgacaaaggcatgaggtcggagacgccgcctgtcccccccccgccaccatacctcgcttcatacccgggtttccctgagaatggcgcgcccgggccaccaattagccgtttcccactagaggaaccgggtccgaggccactcccatggccccctggcagcgatgaagtagcgaagattcagacaccccctccgaagaaggagccaccgaaagaggagaccgcccaactaacgggcccagaggccggaagaaaacctgctagaggcgtcggctctggaggacaggggcccccccccccacggcgggaatcccgcaccgaaacgcggtggggcccgcgccctgggtcatccaggagaggcattcctcccgaagagcccggcgccccaccaaggcgcgctggccctattaaaaagcctccccctcccaccaaggttgaagaactcccacccaagccactcgagcaaggagatgagacgcctaagccaccgaaacctgacccgctcaaaataaccaagggcaaactggggggacctaaagaaaccccaccgaacggaaatctgagcccagcgccaagactgcgtcgcgattacagctacgagagggtgggcccaactagttgtcgtggcagaggacgcggagaatactttgcaagaggacgaggcttccgcggaacctacggcggaaggggcaggggagcaaggtctcgggaatttagaagctatcgagagtttagaggcgacgacgggaggggcgggggtacaggggggcccaatcaccccccagcacctcgcggtcgcacagcctccgagacacgttccgaagggagtgagtatgaggagattcctaagagacgcagacagcgcggctcggagaccggctccgaaacgcatgaatctgatcttgcccctagcgacaaagaggccccaacaccgaaggaggggaccctgacacaggtacctctcgcgccacccccccctggagcacccccaagcccagcccctgcgaggttcacagcacgcggggggcgagttttcacccctcgcggggtccctagtcgccgggggaggggcggcggtcggcccccaccacaggtgtgccctggttggtccccccccgctaagagcttagcaccaaagaagcctcccacagggcccctcccacccagcaaggaaccactgaaggaaaagctgattcctggacccctgtctccagttgctcggggtgggtccaatggaggctccaatgtggggatggaggacggcgagcggcccagaagacgtcgccatggcagggctcagcaacaagataaacctccacggttccgcaggctgaagcaggagagagaaaacgcggcgcgagggagcgaggggaaacctagcctaaccctccccgcctccgctcccggcccagaagaggcgctgactactgtgactgtggctccggcacctcgccgagctgcagccaaatccccagacctgtcaaatcagaattctgaccaggcaaacgaggagtgggagacagcatccgagagtagcgacttcacttcagaacgcaggggagacaaggaagccccacctcctgttctcttaactcctaaggcggtcggaacacccggagggggtggagggggcgcagtgcccggaatcagtgctatgtcgcgcggcgatctgtctcagcgggccaaggatctgagcaaaaggtccttcagtagccagcgcccgggaatggagcgccagaaccgtagacccggacccggaggcaaggccgggtcctctggctcatcatccggcggcgggggcggggggccaggagggcgtacaggtcccggacggggcgacaagaggagttggccaagcccaaagaaccgatcaagacctccagaagagaggccacctggtctccccttgcctcccccgcctccaagcagctccgccgttttcagattggatcaggtaattcatagtaatcccgctggcatacaacaggccctggcacagctctctagcaggcagggcagcgtgacggcccctgggggccacccacgccataaacccggtcctcctcaggcaccacagggtccatctccaagaccccccacccgttacgaaccacagcgggtgaatagtggattgtcttccgacccacactttgaggagccgggccccatggttcgaggagtgggaggaacaccgcgcgatagtgccggagtgtctccgtttcctcccaagcgaagggagcgaccaccaaggaagccggagttgctgcaagaagagagtcttcctcctccacatagttccggtttccttggcagcaaacctgaaggtcctggaccacaggcagaatcaagggatactgggaccgaagctctcacccctcacatctggaatcggctgcacacagcaacctccaggaagagttaccgcccctctagtatggaaccgtggatggaaccactttctcccttcgaggacgtggctggcaccgagatgagccagtctgactcaggggtggacctgagcggggacagtcaggtgtcttcagggccctgtagtcaaaggtccagtcctgacggcggcttaaaaggggcagcagagggccctcccaaaaggccaggaggcagtagcccgctcaatgccgtcccctgtgaggggccccctgggagtgagcccccacgaagacctcctccagccccacacgacggcgacaggaaggagctacctcgcgagcagccattgcccccgggcccaattgggaccgaacgatctcaacatactgacagaggaactgaacccggacccattcgacctagccatcgccctggtcctcctgtacaattcggcacctctgataaggacagcgacctccggcttgttgtgggcgacagtctaaaggccgagaaagagctgaccgcatcagtgaccgaggccatcccagtaagtcgagattgggaattgttaccctctgccgctgcaagcgccgagccacagagcaagaatctggattcaggtcactgcgttccagagcctagctcttccgggcagcgcctttatccagaagtgttctacgggtctgccggaccctctagcagccaaatcagtggaggcgctatggacagccagctgcacccaaattctggaggctttcgtcccggtacaccctcgttacacccgtataggtcccagcccttatacctgcctcctgggcctgccccaccttccgcccttttatccggcgttgcactgaaaggccagtttctggatttctcaaccatgcaggccacagaacttgggaaactgcccgctggcggggtgctgtatccgccgccaagctttttgtactcccctgctttctgccctagtccactccccgatacaagtctgctccaggtcaggcaggatttgccatctccttcagatttctacagcacacccctccagcccggaggacagagtggattcctcccaagtggtgcgcccgcacagcagatgttgcttccgatggtggatagtcaactgcctgttgttaatttcgggtcactaccaccagcccctccacctgcccccccttccttatcgctgctgcccgtgggccctgctctacagcctcctagccttgctgtgcggcctcccccggcacccgccacacgagtattgccatcaccagcccggccattccccgcttccctggggcgcgcagagcttcacccggtcgaactcaagccctttcaggactaccagaagctctcttctaatctgggaggacctggaagctcccggacaccacctacgggccgctcattttcggggctgaattcgcgattaaaagccacaccctcaacttactcaggggtattccgcacgcagcgggtagacctgtatcagcaggcctctccccctgatgccctgcggtggatcccgaaaccatgggaacgtacagggccccctcctagagaaggccctagtcgcagggccgaggagcccggctcccgcggtgacaaagagcccggtttgccacccccaagatag

SEQ ID NO: 130036 - DNA, 6450 bp, synthetic construct
  misc_feature 1..6450: note = Description of Artificial Sequence: Synthetic coding sequence
  source 1..6450: mol_type = other DNA
atgtcagatcgctcagggcctacagcgaagggtaaggacggaaagaaatacagctcactcaatctattcgacacatataagggaaaaagcctcgaaattcagaaaccagccgtggcccctaggcatggtctgcagagtctgggtaaggtcgcgatcgcgaggcggatgccacctcccgcaaatcttccctcactcaaagccgaaaacaagggaaatgaccctaacgtgagcctagtgcctaaagacggcacgggctgggcttccaagcaggaacaatccgaccccaagtctagtgacgcctctactgcccaaccacctgaaagccagcctctgccggcttctcaaacccccgcttccaaccaaccaaagcgaccccctgctgcaccagaaaataccccactggtgccctctggcgtgaagagctgggcacaggccagcgtcacccacggagcacatggggacgggggtcgcgccagttcgctgttgagcagattttcccgcgaggagtttcccaccctccaggccgcgggggaccaggacaaagccgctaaagagagggaatctgcagaacaatccagcggtcctggcccaagtctgagacctcagaactctacaacttggagggacggcggtggccgaggacccgacgaattggaagggcccgattccaagctgcaccacggacacgacccccggggaggactgcaaccaagtgggccacctcaattccccccctaccgggggatgatgcccccttttatgtatccaccgtacttgccgtttccaccaccgtacggccctcagggcccctatagatacccaactcctgatggcccaagtagattccctcgagtagccgggcccaggggcagtgggccgccaatgagacttgtcgaacctgtaggaaggcccagcatactgaaggaggacaacctcaaggagtttgatcagctggaccaggaaaacgacgacgggtgggccggtgctcatgaggaggtcgattacaccgagaagcttaagttctctgatgaggaagacggtcgagactccgatgaagagggcgccgagggtcatagagattcgcaaagcgcatctggtgaagaacgccctcctgaggccgacggcaagaaggggaatagcccaaattcggagcccccaacacctaaaactgcctgggcggagacatccaggcccccagaaaccgaacccggcccccccgcccccaagccgcctctgccaccacctcaccgggggcccgcgggaaattggggaccgcctggtgattatcctgacagaggtggacccccctgcaagccaccggccccagaggacgaggatgaagcttggaggcagagaaggaagcagtctagtagtgaaatctctctcgcagttgagagggccagacggagacgggaagaggaggagcgtcgcatgcaagaagaaaggcgggccgcatgcgcagaaaagttgaaaagactggatgagaaattcggcgcgcccgataaaaggttgaaagccgagcctgctgcccctcctgccgcccccagcacaccagccccgccgcctgcggttccaaaagaactacccgcacccccagcacctccaccagcgagcgcacctactccagaaacagaaccagaggaacccgcccaggcccctccagctcagagcacacctacgcctggtgtcgcagcggcccctacgctggtgagcggcggcggatctaccagcagtacaagctcgggcagcttcgaggcctcaccagttgaaccacaactacctagtaaagagggcccagagccgcctgaagaagtgcccccccctacaacaccaccagtgcctaaggtagagccaaagggtgacggcatcggtcccacaagacagcctcctagccagggccttggctatcctaagtaccagaagtctctcccgccaagattccagcgtcaacaacaggagcaactcctcaagcagcagcagcagcatcaatggcagcagcaccagcagggaagcgccccacccacaccagtcccccccagtccgcctcaaccagttacactaggagctgttccagctccacaggcacccccccctcccccaaaagcattatacccaggagcactcggcaggcctccaccaatgccgcctatgaacttcgatccgaggtggatgatgattcctccctatgtagacccaagactgctgcagggtcgcccccccttagacttttacccaccgggggtgcacccaagtggccttgtgccaagggagcgcagcgatagcggcgggtcatcgtctgagcccttcgataggcacgcacccgctatgcttagggaaagagggacacctccagtggatcctaaactcgcttgggtgggggacgtatttacagccacccccgcggaaccccgccccctgacctccccattgaggcaagccgcagatgaggatgacaaaggaatgcgtagtgagacgcctcctgtgccaccgcctcctccttatctggcatcttatcctggcttccccgaaaacggggccccaggcccccctatttccaggtttccactggaggagccaggcccccgtcccctgccttggcctcccggatccgacgaagtggccaaaattcagacgccaccgcccaaaaaggagcctcccaaagaagagacagcacagctgacggggccagaggcaggtcggaaaccagccaggggagtcggctccgggggacaaggaccacccccacccagacgggagagccgcacggaaactagatgggggcccaggccaggatcctcccggaggggcatcccacccgaagaacctggcgcccctccaagaagggccggaccaattaaaaagcctccacctccgactaaggtggaagagttgcctccaaaacctctcgagcaaggtgacgaaactccaaaacccccaaagccagaccccctgaagataaccaaaggcaagcttggcggccctaaagagacacctcctaacggcaacctgtcgcccgcaccgaggctgagaagggactactcttatgagagagtgggaccaacttcgtgtcggggacggggacgcggcgaatacttcgccagaggccgcggatttcggggcacttatggaggtcggggtagaggtgcggcaggcaatagtgcagttaccgaatcatttgaagagatgatgggggtcgaggtaggacagggcgaccagacgaccctgctgttaccagaggcggccctccctgcacgccatggagcccgggtccagagcatgcggaagtcaccatcaggcgccgggtccggtgcccagaaacaagctgctagaccaatgagagtcatttggctgctgcagactagaaggctgccccacccccggcgagagcacagcccgagatccagatccccgacaactaggagccccacatttcctgctcccgcccggtttacacctggcgtgggggagtcatcactcccagaaggcatttctccagggcctcgacggcgggagccacctcaggtgtgccccggatggagccctccagctaaatccctggctcccaaaaagccacccaccggacctctcccccctagcaaagaacccctgaaggagaaactaattcccggaccactctcacctgtggccaggggaggcagcaacggagggtcaaacgttggtatggaggatggagagagacctcgtaggaggaggcacggtcgcgctcagcaacaggataaaccaccccgttttaggcgtctcaaacaggagcgtgagaatgcagcccgtggctccgaaggaaagccatccctgactttgccagcatctgccccaggccccgaagaggccttgaccaccgttaccgtagctcccgcaccgcgcagggccgccgccaaaagcccagacctgtccaaccagaatagcgatcaagccaatgaggagtgggagaccgcctcagagagctctgattttactagcgaaagacgaggcgacaaagaagccccccctcccgtcctgcttaccccaaaggcggttggaacgcctggtggcggcggcgggggggccgtccccgggatctccgcaatgtcaaggggcgatctcagccagagagccaaggatctgagcaagaggtccttttctagccagaggccaggtatggaacggcagaacaggcggccaggcccgggaggcaaggccggatcaagcgggagctctagtggtggaggcggaggtggacccggaggccgcacagggccaggccgcggcgataaacgttcctggccttcacccaagaacaggtcccggccccctgaggaacggcctcccggactgccactgccaccaccaccccctagcagctccgccgtttttcgattggatcaggtgatccactccaatccagctggtatccagcaggccctggcacagttgtctagccggcaggggagtgtcacagctccgggcggccatccaagacataagcctggcctgccacaagccccacaggggcctagcccgaggcccccgactcggtacgagccacagcgtgtcaactctggcttatcttcagatccgcactttgaagagcctgggcccatggtcaggggagtcggcggaacccctagagattcggctggggtcagccccttccctccaaaacgcagagagaggccgcctcgcaaacctgagctgctgcaggaagagagcttgccaccaccacattcttccggctttttaggctcaaaacctgaaggccctggaccccaagcggagagccgagataccggaacagaggctctgactccacacatttggaatcgtctacacaccgctaccagccgcaaatcttataggccaagctctatggaaccttggatggagcccttgtcacctttcgaagacgttgccggcacagagatgagtcagtcagactcgggcgtcgacctgtccggcgacagccaagtgtcgtcaggaccttgctcccaacggtcttcaccagacggcggacttaaaggtgccgctgagggaccacccaagcggccaggaggttcttctccactgaatgccgtgccatgcgagggacctccgggttcagagccgcccaggcgtcctccacccgcccctcacgatggagacaggaaggagctgcccagggaacagccgctcccgcctgggcccattgggactgaaaggagccagcggacggatcggggtaccgaacccgggcccatcaggccatctcacaggccagggcctccagtgcagttcggcaccagtgacaaagattctgacctgcgtctggttgtgggggacagtctgaaagccgaaaaggaactgacggcttctgttactgaggctattccggtctctagggattgggagctgctgccttctgcagccgcctcagcagagccgcagagcaaaaatcttgactccggacattgcgttcctgagccctcatctagcggccaaagattataccccgaggtgttctacgggtccgccggccccagcagcagtcagatttccggtgggcatggactgtccatcacttccaaacagtggcgtagacccggcactccttccctgcatccttacagaagccagcctctttatctgccacctggtccggctccaccatcagccctgctctcgggactggcgcttaaaggtcaatttttagattttagtacaatgcaggccaccgaactaggaaaattgcccgcagggggtgtattgtatcctccgcccagctttctttactctccagccttctgcccttctcctcttcccgacacttctctgttacaggtaagacaggacctgccttcccctagcgacttttactcaaccccacttcaacccggaggccaatctgggtttctcccctctggagctcccgctcagcagatgctgctgcccatggtggatagccagttaccagtggtaaatttcggaagcctaccacccgcacctcctcccgctccccccccactgagtctactgccagttggaccggcgcttcaaccacccagcctggccgtccgaccaccccccgcccccgccacgcgggtccttcccagtccagcccgccccttcccagccagtctgggccgggccgaactacaccccgttgagcttaaaccattccaggattatcagaagctctccagcaacctagggggtcctgggagttctcgcactcctccgactggaaggagcttctccgggctcaattcgagactcaaagccacaccctccacatacagtggggtctttcgcactcagcgcgttgatctgtatcagcaggcctctccccctgatgccctgaggtggatcccaaagccttgggaaaggaccgggcctcccccaagagaagggcccagtagaagggctgaagagccgggctctcggggagataaagagcctggactgccaccaccaaggtag

SEQ ID NO: 130037 - DNA, 6474 bp, synthetic construct
  misc_feature 1..6474: note = Description of Artificial Sequence: Synthetic coding sequence
  source 1..6474: mol_type = other DNA
atgagcgaccgaagtggcccaactgcgaaaggcaaggatggaaaaaagtattccagcctgaatttgttcgatacttacaaggggaagagcctcgagattcagaagccagcagtagcccccagacacggcctacagagccttggcaaggtagccatagcacggagaatgccaccacccgccaacctgcctagtctgaaggccgagaacaaaggtaacgatccaaatgtgtctttggtgcccaaggatggtactggatgggcgagcaaacaggaacagtccgacccaaagtctagtgatgcctcaacagcacagcccccagagagccagcccctgcctgcatctcagacaccagcgtctaaccagccaaagcgacccccagccgcaccggaaaacacccccttggttcccagtggcgtgaagtcctgggcccaggcttccgtgactcacggagcccacggcgacggaggcagagcctcatcccttctctcccgtttctcccgggaagagtttccaacgttacaagctgcgggagatcaagataaagcagccaaggagcgcgagagcgctgagcagtcatcaggccctggcccgtctttgcgtccgcaaaacagcaccacttggagggacggaggggggaggggtccagacgagctggaaggccctgacagcaaattgcatcatggccacgatcctcgcggcggtctgcagccttctgggccacctcagttccctccttacagaggcatgatgccgcccttcatgtatccaccataccttcccttcccccctccttacgggcctcaggggccctacaggtatcctacacctgatggcccaagcagattccctcgggttgcaggccctagaggctctggccccccaatgcgcttggtggaacctgtgggccggccctcgattctcaaggaagataatctcaaggagttcgaccagctcgatcaggaaaatgatgatgggtgggcaggagcccacgaggaagtcgactataccgagaaattgaaattctccgatgaagaggatggccgggattctgacgaggagggcgccgaaggtcatcgcgactcccagtccgcctcaggggaagagaggcctccagaagccgatggcaaaaaggggaattccccaaactctgagccacctacccccaagacagcctgggctgaaacctcccggccacccgagaccgagcccggtccgcccgctcccaagcccccattgcctcctcctcaccgcggacccgcaggaaattgggggccccccggtgactatccggatcggggagggcccccctgcaagcccccagcacctgaggatgaggatgaggcctggcgccaaaggcgcaaacagtcctcatcggagatctcactggccgtcgagagagctcggcgccgcagagaagaagaggagcgcaggatgcaggaggaacggagggccgcgtgtgctgaaaagttgaaacggctagatgaaaaattcggagctcctgacaaaagactgaaagctgagcctgcagcgccgccagctgcacccagcactcccgcgcctccgcccgccgtcccaaaggaactgccagcccccccggcacctccgcctgcttccgcacctactccggaaaaggagcctgaagagcctgcacaggcccctcctgctcaatccacaccaactccgggagtggccgctgctccaactctggtatccggcggcggatcaacctcaagcacatcctccggttctttcgaagcctctcccgtagaaccccaacttccatccaaggaggggcctgagcctcccgaggaggtccctcccccgaccactccacccgtcccaaaagtcgaacctaaaggagacggaataggccctactagacagccaccgtctcaaggactcggatatcccaagtaccagaagagtctccccccccgtttccagcggcagcaacaggagcaactgttaaagcagcagcagcagcaccagtggcagcagcatcagcagggctccgctcctcctaccccagtacccccttcacccccgcagcccgtcacccttggtgccgttccagcgccccaagctccaccaccgcctcccaaggccctgtaccctggcgcattaggccgtcctccaccaatgcctcctatgaacttcgacccaagatggatgatgattccaccttatgtggatcctcgattgctacagggacggccacccctggacttctatcccccaggcgtccatcctagcgggctagtgccccgtgaaaggtctgatagcggggggagttcaagcgaacccttcgaccgccatgccccagccatgcttagagagagaggtactccgcctgtcgatcctaaactagcttgggtcggggacgtgttcactgctacaccagccgaaccccggccattgacgagccctctgcgccaggccgcagatgaagatgacaagggcatgagatctgagaccccacccgtgccgccccctcccccttatttggcctcttatcccggattccctgagaatggtgcgcctggtcctcctatctctcgcttccccttggaagagcccgggccccgacccctgccatggccgccaggctctgacgaggtggccaaaatccagactcccccaccaaagaaggaaccgccaaaggaggagacagcccagctcaccggtccagaagccgggcgcaaaccggccagaggggtcggctcaggaggccagggcccacctccacctcggagggaaagcaggactgagacgcgctgggggcctagacctgggtcttctcgacgaggaatacccccagaggagccaggtgccccacccaggagggcgggaccaattaagaaaccacctcctccgactaaggtggaggaactgccaccgaaacccctggaacagggggatgaaacgccaaagcctcctaaacctgacccccttaaaattactaagggcaagctaggaggtcccaaggagaccccgcctaatgggaatctttctcccgctcccaggttgcgtagggattatagttatgagcgagtggggcctaccagctgcagaggcaggggtcgaggagaatacttcgctcggggacgagggtttaggggcacttatggcgggcggggtcggggcgctcggtcccgggaatttagaagctaccgtgagttcagaggcgatgatggaaggggcggcggtactggcgggcccaaccatccccctgcacctagagggaggactgcttctgaaactagatcggaaggctctgagtacgaagaaattccaaaacgcaggcgacagagaggttctgagaccggaagcgaaacccacgagagtgacctcgcaccatctgataaagaggccccaactccgaaagaagggacattgactcaagttccactggcccctcctccaccgggcgcccccccgagtcccgcccccgctcggtttaccgcgcgtggtggacgggtatttactccacgcggcgtgccctcaagacgcggaagaggcggtggccgacccccaccgcaagtgtgtccgggatggagcccgccggcaaaatcgctggctcctaaaaagccaccaaccgggcccttacctccttctaaagaacccctgaaagagaagctgatccctggaccgttatcccccgtcgcacgcggcggaagcaacggaggaagcaatgtcgggatggaggatggagaacgcccgcgcagaagaagacatggtagagcccagcagcaagataaacctccccggtttagaagacttaagcaggagcgcgagaacgcagcaagggggagcgagggaaagccctcactgactcttcccgcaagcgctccaggcccggaagaagcccttacaacagtgacggttgctcctgcaccaagaagggcagcagcaaaatctccggatcttagtaatcaaaactccgaccaggcaaatgaagaatgggagaccgcatccgagtcctcagatttcacaagcgaacgccgcggggataaagaagccccaccaccagtgttgctgacccccaaagctgtgggcacccctggaggagggggaggtggcgccgttcctggaatctccgcgatgagtcgcggagatttgagtcagcgcgccaaggatctctccaaacggtctttctcatcacaaagacctgggatggagagacagaaccgacgtcccggccccgggggcaaggcaggcagctctggaagcagtagtggagggggtggcggcggtcccggggggaggacaggtccagggcgtggcgacaagaggtcatggcctagccctaagaaccggtctagacctccagaagagcggcctcccggactgccgttgcctcccccaccaccatcttccagtgcagtttttagattggaccaagtgattcattctaacccggcaggaatccagcaggccctggcccagctctcctcccgtcaggggagcgtaacagcgccggggggccatccccgccataagccgggccctcctcaggcgccgcagggcccatcaccccggccacccactcgctatgagccgcaaagagtgaactctggcctttccagtgatccgcatttcgaagaacctgggcctatggtcagaggtgtgggcggcaccccccgggactcagcaggcgtgtccccgttcccccccaaacgtcgagagaggccgcctcgaaagcctgaactcctccaagaggagtccctgccacccccacattcatctgggttcctcgggtcgaaaccggaaggtccaggacctcaggccgagagcagggatactggcacagaagcactgactcctcacatctggaataggctgcataccgctaccagccgtaaatcctacaggccgagtagcatggagccctggatggagcctctatctcccttcgaagatgtcgcaggcaccgaaatgtctcagtccgacagcggtgtggacctctctggagactcacaagtcagctctggcccatgcagtcagcgatctagtccagacggaggacttaaaggtgcagccgagggcccaccaaagcgtcctggcgggtcttccccccttaacgcagtaccatgtgaagggcctcccggctctgaaccaccacgcaggcccccaccagccccccacgacggcgatcgcaaggaactgccgagagagcagcccctcccgccggggcccattggaacagagaggtctcagcacacagatcgtgggacggaaccaggccctatcagaccatcccaccggcccggcccccccgttcagttcggaacaagtgacaaggactctgatctgaggctggtagtcggggactcactgaaggcggaaaaagagctgaccgcttccgttacagaagcgatcccagtgagtagggattgggagcttctgccaagcgctgcagccagtgccgagccgcagtccaaaaacctcgatagcgggcactgtgtgcctgaacctagttcatcaggccagcggctgtacccagaggttttctatggaagcgcggggcccagttcatcccagatatctggaggggccatggactctcagctccatcctaatagtggcgggttccgcccaggcacacctagtctgcatccctaccggtcacagcctctgtacctgcctccaggcccggcacctcccagcgcacttctgtccggggtggcccttaaaggccagttcctggatttcagcaccatgcaggccaccgagctgggcaaactgccggccgggggagttctttacccaccaccgagttttctgtactcaccggccttttgcccttcaccgttgcctgatacctccctactgcaagtaagacaagatctgcccagcccatcggacttttatagcacccccctgcagccaggaggccagagtggatttttgcccagtggagcccctgctcagcagatgctgctgccaatggtggatagccagctccccgtcgttaactttgggagcctgcccccagcacctcctcccgctccccccagtctctctctcctacctgtgggcccagcgcttcaacctccctccttggccgtgcggcctcccccggctcccgctactagagtgttaccctctcctgcccggcctttccctgccagcctcggcagggccgagctgcatcccgtggaactgaagccctttcaggattatcagaaactgtcctctaacctgggtgggccaggttcgtcaagaactccgcctactggccgatcattttccggcttgaactctcgcttaaaagcgacccctagcacatactccggcgtttttcggactcaaagagtggatttgtatcagcaggccagtccacctgatgctcttaggtggattccaaaaccttgggaaaggactggacctcccccacgcgagggaccatcccggcgtgcagaagaaccggggagtagaggagacaaagagccaggactgccgcccccacgctag

SEQ ID NO: 130038 - DNA, 6474 bp, synthetic construct
  misc_feature 1..6474: note = Description of Artificial Sequence: Synthetic coding sequence
  source 1..6474: mol_type = other DNA
atgtccgacagatccggtccaacagccaaaggtaaggacggaaaaaaatatagctctttgaacctgtttgacacctataagggtaaatccctggagatccagaagcctgccgtggcaccgcgccacggactgcagtctttgggtaaggtggctatagcaagacgaatgccacctcccgcgaaccttccttccttgaaggctgagaataaggggaacgacccaaatgtttcgctggtgccaaaagacgggaccggctgggcttccaaacaggaacaatccgatccaaagagttcagatgcatccacagcgcagccacctgaaagccaacctcttcctgcaagccagacacccgcctccaaccagcccaaaaggccccccgcggccccggagaacacacctctggttccttcaggtgttaaatcctgggcacaggccagcgttacccatggggcacacggggacggcgggagagccagctccctgctaagcagattctcacgtgaagagtttcccacacttcaagctgcaggcgaccaggataaggcagccaaggaaagagaaagtgcggagcagtcttctggccctgggccaagcctgcgtcctcaaaactccaccacttggagagacgggggcggtagggggcctgatgagttggaggggcctgattccaagctgcatcacggccacgatcccagggggggactccagccctctggacctcctcagtttcccccctacagggggatgatgccaccgtttatgtacccaccttaccttcctttccctcccccttacggcccgcaaggcccttataggtatcctactcctgatggtcctagcaggttccctcgggttgctggcccaagggggagtggccctcctatgagactcgtcgagcccgtgggccgacccagtatcctgaaggaagataatttgaaagaattcgaccagttggatcaggagaatgatgatggctgggccggcgcgcacgaggaggtggactatacagagaagctgaaattctccgatgaagaagatggaagggattcagacgaagagggagccgagggacaccgggactcccagtctgcctctggcgaggaaaggcctcccgaagcagacggcaagaagggtaactctcccaactcggagcctccgactccaaaaactgcttgggccgagacatctcggccccccgagacagagcccggcccgcccgcacctaagccacctctgccccctccccatcggggccctgccggtaactgggggccacccggcgattacccagacagaggggggcctccctgtaaacctcctgctcctgaagacgaagatgaagcatggaggcagcgaagaaagcagagctccagcgagatcagcctcgccgtggagcgcgccaggcgtagacgcgaggaggaagaaaggcgcatgcaggaagagcgcagagccgcgtgcgccgagaagcttaaacgccttgatgaaaagttcggcgcacctgacaaaaggttgaaagccgaaccggcagctcctccggcagcaccatctacccccgctcctccaccagccgtgccaaaggagctcccggccccaccagctcctccccctgccagcgcccctacaccagaaaaagagcctgaggagcccgcccaggcacctcctgcgcagtccactcccacccctggcgtggccgctgcaccaaccctagtaagcggagggggttccacctcatcaacatcctcaggctcctttgaagcttctccggtcgaacctcagctaccctcaaaagaaggtccagaaccccccgaggaagtcccccccccaacgactcccccggtccctaaggttgaacctaagggagacgggatcggccctacacggcagccgccatcccagggcctggggtatccaaagtaccaaaagtcgctaccacctcgttttcagcgccagcagcaagagcagctcttgaaacagcagcagcagcatcagtggcagcaacaccaacaggggagcgcacctcccaccccagtgcctccatctccaccacagcctgtgactctgggcgcagttcccgctcctcaagcaccacccccccccccaaaagcactctacccaggggccctcggacgacctcccccaatgccaccaatgaacttcgatccgaggtggatgatgattcctccttacgtggacccccgattgcttcagggccggccacccctcgacttctatccacctggggtccacccctccggactggtacctcgtgagcggtccgattcggggggaagtagctctgagccattcgaccggcacgctcctgccatgctccgagagcgaggaactccgccagttgaccccaagttagcctgggtcggtgatgttttcacggccactccagccgaacctcgcccgctgaccagccctctacggcaagcggcagatgaggatgacaagggcatgagatcagagacgcctccagtgccacccccccctccatacctggccagctacccggggttccctgaaaatggggcaccaggtcctcctatatcacggtttcctcttgaagagccagggcctaggccactcccatggccccccggatccgatgaagtcgcaaaaattcagaccccacctccaaaaaaggagcctcccaaggaggagacagctcagctgaccggccccgaagcaggacgtaagcctgccagaggagttggcagtggcggacagggaccacctccgccccggagagagtctagaacagaaactcgttggggaccaagaccagggtccagccgccgtggaattccacctgaggagcctggtgctcccccgcggcgtgccggccccattaaaaagccccctccccccaccaaggtagaagagttacccccgaagcccctggaacagggggatgaaactcccaagccccccaagcccgaccccctgaaaattacaaaagggaagcttggcggccccaaagagacgcctcccaatggaaacctttcacctgcccctagactgaggcgggactacagctatgagcgcgtaggccctaccagctgccgaggccgggggcgaggggagtactttgcccgcgggcggggcttccggggtacctatggtggcagaggtaggggggcgcgctctagagagttcagaagctacagggagtttagaggcgacgatggtagaggtggtggtacaggcggaccaaatcacccgcccgcacctcgcggccggactgcctcagaaaccagaagcgaaggatcagagtatgaagagattcccaagaggaggcggcagcgcgggtccgaaacagggtccgaaacacacgagtccgacctagcgccatcagacaaggaagcaccaacaccaaaggaaggtacgctgacccaggtccccttagcacctcctccccccggtgcccctccctccccagcgccggccagattcaccgcccgggggggcagggtcttcacaccaaggggtgtgccctcacggagaggccgcggaggaggcagaccgccaccccaggtgtgtccgggatggtccccacccgccaagtcccttgccccaaagaaaccaccaaccggcccactgcccccgagcaaagagcctctcaaggagaagcttattcccggacccctcagccctgtagccaggggcgggtctaatgggggcagcaacgtcggcatggaagacggcgaaagaccccgcaggaggagacacggccgcgcacaacagcaggacaagcctcctaggtttagacgcttgaagcaggagagagaaaacgcggcgcgaggctcagagggaaaaccttcactcacgctccctgcctcagcacccggacccgaggaggctttaacgaccgtgacagttgcacctgcaccccgacgagccgcggcaaagtctcccgatctaagcaatcagaactccgaccaggcaaacgaagagtgggagaccgcctcagaatcctccgattttaccagtgaaaggaggggagataaggaagcccctcctcccgtgttgctgacccctaaagccgtcgggactcccgggggtggcggtggaggcgccgtgccaggaatctcagctatgtctcgtggagacctgtctcaacgagctaaggacctaagtaaacgtagcttttccagccagcggccgggaatggaaaggcagaatcgacgaccgggacctggcggaaaagccggaagctccggatccagttcgggagggggcggcggcggcccaggcggacgcactggaccagggaggggggacaaaagaagctggccttctcctaagaatcgttcaagaccccctgaggaacgtccacctggcctgccgctaccacccccccctccaagttcaagtgcagttttccgactggatcaggtcatccactcaaaccccgcgggcattcagcaagccctggcgcagctttcttcaagacaggggagcgttaccgcccctggagggcatcccaggcataagcctggtcctccccaggccccacagggtccgagccccaggcctccaaccagatatgaaccccagcgtgttaatagtggcttgtcctcagacccgcatttcgaagagcccggaccaatggtccgcggcgtaggcggaacgcctcgcgattccgctggcgtctcacccttcccgcctaaacgcagggagagaccaccacgcaaacctgaactgctgcaagaggagagtctgccaccgccacattcttctggcttcttgggctcaaagcctgagggtccaggcccacaggcagagtcgagggacacaggcaccgaggccctgacaccacatatctggaacaggttacacaccgctacttcacggaagtcttaccggccatcaagcatggagccctggatggaaccgttgagtccctttgaggatgtagcaggaactgagatgagccagagcgatagtggcgtggacttatccggcgacagtcaagtgagctctggaccatgctcacagcgcagctctcccgacggaggcctcaaaggagctgcggagggaccccctaagagaccaggtgggagctctcccctgaatgcggtgccctgtgaaggtcccccagggagtgagccgccacgccggcctcctccggcgccccatgacggggaccgcaaagaattgccccgcgaacaacctttgccccccgggccaattggtactgaacggtcccaacataccgaccgggggacagaacccggtcccatacgccctagccaccgtcccgggccacccgtgcaattcggcaccagtgacaaagacagtgatcttaggctggttgtgggtgactctctgaaggctgaaaaggaacttacagcctccgtgacagaggccatacctgtctctagagactgggaacttctgccatctgctgctgcaagcgctgagccccagtccaagaatctggatagtggccattgcgtgcctgagcccagtagctccggccagaggttgtatcctgaggtgttttacggtagcgcaggtccctccagctctcaaatctctggaggtgctatggattctcagctgcaccccaactccggcggtttcagacctggcacgcctagcctgcacccctatcggtcgcaacctctatatctgccacctggacccgctccaccatccgctttgctgtcaggtgtagcactaaaaggccaattcctggattttagtaccatgcaggctacagagctgggaaagttgcctgcaggaggagtgctgtacccaccaccttcgttcctatatagcccagctttctgcccttcaccgttacccgatacctctttacttcaggttcggcaggacctaccctctccttccgacttttactctacacccttgcaaccagggggacagagcggttttttgccttcaggcgcccccgctcaacagatgttgctgcctatggtagatagccaactgccagtcgtaaactttggatcactgccacccgcccccccccctgccccaccaagtctatcactgcttcccgtcgggccagctctccaaccccctagcctggcggtgcgcccaccccctgctccggcaactagggtgctcccttcacctgcccgcccattccctgcttccctgggacgcgccgaattgcatcctgtggagctgaaaccattccaggactaccagaaactaagttccaatctgggggggccaggatcctcaaggacacctcccaccggccggtcctttagtggcttgaattcccgcctgaaagccacgcccagtacatatagcggggtcttccggacccagcgggttgacctttaccagcaggcatcccctcccgacgcgctccgttggatccccaagccatgggagcgcacaggcccgccgcctcgggagggcccatctcgaagagcagaggaaccaggttccaggggagacaaagagcccggactcccacctccacgctag

SEQ ID NO: 130039 - DNA, 6474 bp, synthetic construct
  misc_feature 1..6474: note = Description of Artificial Sequence: Synthetic coding sequence
  source 1..6474: mol_type = other DNA
atgtcagaccgatccgggccaacagctaaagggaaggatggaaaaaagtattccagtttaaacctttttgacacttacaaggggaaaagcctggagatccagaaacctgccgtggctccacgacacggactccaatctctgggcaaagtggccatcgctaggcggatgcccccgcctgctaacttgcccagccttaaggccgagaacaaaggaaacgatcctaatgtgtctctggtccctaaggacggaacaggttgggcctccaagcaggaacagagcgacccaaaatcttcagacgcatctaccgcacagccgccggaatctcagccactgccagccagtcaaacacctgcctccaaccagccaaagcgccctcccgccgcccctgagaatacgccgctagttccatccggcgttaagtcttgggctcaggcaagcgtgactcatggggctcatggcgatggagggcgcgccagctcgctgctcagcaggttttcgagagaagaatttccgaccctccaggctgccggcgaccaggacaaggcagcaaaagagcgtgaatcagctgaacagtcatcagggccaggaccttccctacgcccacagaacagcacaacatggcgcgacgggggggggagaggtccggacgagctggagggaccagactcaaagctccatcacggccatgacccaaggggaggactgcagccttctggcccaccccagtttcctccatacaggggaatgatgcccccctttatgtacccgccctatctgccttttccccctccctatggcccacaaggcccgtacagatacccaacgcccgatggaccctcaaggttcccccgggtggcaggccccagaggatcagggcctcccatgcgtttggtagagccagtgggtagacctagcatattgaaagaggataatctgaaagagtttgaccaattggatcaggaaaacgatgatgggtgggccggcgcccacgaggaagttgattatacagaaaagctgaaattttcagatgaggaggatggccgcgatagcgatgaagaaggagcagaaggccaccgagatagtcaatctgcttccggggaggaacgaccccctgaagccgacggaaaaaaaggaaacagcccaaatagtgagccgcccactccaaagacggcttgggccgagacaagtcgaccccctgagactgagcctgggccccccgcacccaagcctccactgcctcccccacaccgggggcccgcaggaaattgggggccacctggggattatccggaccgaggcggcccaccctgcaaaccgcctgctccagaggatgaagacgaggcatggagacagcgcagaaagcaaagctcctcggagattagcttagcagttgaaagggcccggcggagacgagaagaagaggagagacgcatgcaagaagaaaggcgcgccgcttgtgcggaaaagctgaagcgacttgacgagaagttcggcgcacctgataagcgcctgaaggctgagcctgctgcaccaccagccgctccttcaacccctgcacctcctcccgcagtgcccaaagagttaccggctccccctgcacccccacctgcatcggccccgaccccagagaaggagcccgaagagcccgctcaggccccgcctgctcagagtacgccgactcccggtgttgccgccgcccctaccctggtcagtggcggcggctctacatcctctacatcctctgggagtttcgaggcttctcccgtcgagccacaactgccaagtaaagaaggccctgagccacccgaggaggtgccaccccccacaacaccacctgtgccaaaggttgagccaaagggagatggtatcgggcccactcgtcagccaccctcacagggattaggctatcccaaataccagaagtcactgcccccccgctttcagagacagcagcaggagcagttactgaaacagcaacagcagcaccagtggcagcaacatcaacagggctctgctccccccaccccggtgcccccctcaccaccccagccggtgactctcggggctgttccagcgccacaggccccaccgcccccccccaaagcgctgtaccccggtgccctaggtcgccctccacctatgcccccaatgaacttcgaccctcgatggatgatgatacctccttatgttgatcctagactgctgcagggaaggcctcctctcgatttctatccccctggtgtgcacccctctggcctagtgccaagggaacgctccgactcaggcggaagttccagcgagcctttcgatcgccacgctccggcgatgcttagagagagaggaaccccgcctgtggatccaaaactggcgtgggtcggagacgtttttaccgccaccccggccgagcccagaccattgacgagcccactcagacaggcagccgatgaggatgacaaagggatgcgttcagagacaccacctgtacctccaccacctccatatctcgcctcctacccagggtttccagagaatggagccccgggcccgcctatcagtcgattccccttggaggaaccaggacctagaccattgccgtggccacccggcagtgatgaggtggccaagatacaaacccctcctcctaaaaaggagccgcccaaagaagagacagcgcagctcacaggtcccgaagccgggcggaagccggccagaggagtcggctcggggggacagggacctccgcctccacggagagagtctcgcaccgaaacacggtggggacctaggccaggctcttctcgtcgcggcattccccctgaggagccaggtgccccccccaggcgggctggtccgataaagaagccgcctcctcctacaaaggtcgaagaattaccacctaaaccgctggagcaaggcgatgaaaccccaaaacctcccaagcctgatccattaaaaataacaaaaggaaaactgggcggtcccaaagaaactccacctaatggaaacctctccccagcacctcgcctgcgcagggattatagctatgagcgggtcggccctacatcctgtagaggccgcggacggggggagtactttgcacgaggtagggggttcagaggaacctatggcggtagggggagaggtgcgcgctctcgcgagtttcgctcgtacagagaatttagaggagacgatgggaggggcgggggaactgggggaccaaaccacccccccgcgccacgaggacgcacggcaagtgagaccagatcagagggatctgaatatgaggaaattcctaaaagaaggagacagagggggagcgagaccgggagtgagacgcatgaatccgacctggcccctagcgacaaagaggccccgacccctaaggaaggcactttaacccaggtcccactggcgcctcctccacccggagctccccctagtcctgcacctgcacgctttacagcgcgaggcggcagggtgttcaccccgcggggagtacccagccgaagaggacgcggcggtggaagacctccccctcaggtgtgtcccggatggtcaccgcccgcaaagtctctggcacctaagaaaccaccaaccggaccactgccgcccagtaaagaacccttgaaagaaaagttgatccccgggccattgtctccagtggctcgcggcggtagcaatggaggatccaatgttgggatggaagatggcgaacgtccacggcggaggagacacgggagagcccagcaacaggacaaacctccccgatttaggcgcctcaagcaggagagggagaatgccgctcgaggctccgaggggaaaccttcccttacactgccagcctccgcgcctgggccggaggaggcactgacaactgtcacagtggcacctgcaccaagaagagctgcagccaagtcccccgatctgagcaatcagaacagcgatcaggctaacgaggagtgggagacggcctccgagtccagtgacttcacttctgaacgaagaggcgataaggaagcgcctccaccagtgttgctcaccccgaaagctgtcggtacgccgggcggcggcggtggaggtgcggtgccaggcattagtgctatgtcccgaggggatctctcccagcgtgcaaaggatctcagtaagaggtcatttagcagtcagcggcctgggatggagcggcagaatagaaggcccgggcccggaggcaaagccggatcatccgggagctctagcggggggggcggagggggcccaggcggccggaccgggccgggaagaggcgataaaagatcttggccgtctcctaaaaatcgatctagacctcccgaggagcggccccccggattgcccctcccacctccccccccttcatcctccgcagtcttcaggctggaccaagtcattcacagtaaccctgccggaatacagcaggcactagcccagcttagcagcagacaggggtccgtgacagctcctggggggcaccctcgacacaagcccggccctcctcaggcacctcagggcccatcgcccagacccccaactcgctacgagcctcagcgggtcaatagtggactgtcttccgacccccattttgaggaacccggacctatggttagaggcgtgggcggcaccccgagagatagcgccggcgttagcccattccctcctaaacgacgagagagaccacctagaaagcccgaactgctgcaggaagaatcactgccccccccgcacagctcaggctttttggggagcaagcccgaaggtcctggcccacaggctgagtcaagagacaccggcactgaggcactcacacctcatatctggaaccgcctgcatacggctacctccaggaaaagttaccgccccagctccatggagccctggatggagcccctgagtccattcgaggatgtggccggcaccgaaatgagccagtcagacagtggagtcgatctgtccggtgatagtcaggtaagttccggaccttgctcccaacgaagctctcccgacggtggactgaaaggcgcggcagaggggccccccaagcgacctgggggaagcagtcctctcaatgctgtgccttgtgagggtccaccaggatcagagcccccccgccgcccccctccagccccccatgacggcgaccgtaaagagctgccacgggagcagcctcttccgcccggccccatcgggacggagcgcagtcagcggacagataggggaacagaaccaggccctattcgaccttcacatagaccaggaccacctgtccaatttggcacctcggacaaagatagcgatcttaggctcgttgtcggagactcccttaaggcagaaaaggaactgacagcgagtgtgaccgaagccatcccagtgtcccgggactgggagctgctgccctccgccgctgcttcggctgaaccccaatctaaaaaccttgactcagggcactgtgtcccagaaccatcttcttcgggacaacgtctgtatcccgaagtgttctatggatctgctggtccctcctctagccagataagcggaggcgcaatggacagccagctgcaccccaattccgggggctttcggcctggcactcccagcctgcacccctacaggagccaacctctatatctccccccaggaccagccccaccatctgctctgctgtctggcgtggctctgaaaggacagttcctggacttctccacaatgcaggccactgagttgggtaagttacctgctggcggcgtcctttatccacccccatcattcctctattcccccgccttttgcccctctcctctgcctgacacctctctcctgcaggtccgccaggaccttccctcaccgtcagatttttattcgacccctctacagccgggaggtcagagtggcttcctaccatccggggccccagcacaacagatgctcttacctatggtggacagccagctcccagtagtcaacttcggtagccttcctcccgcccccccacccgctccccccccactgagcctgctgcccgtcggtcccgccttgcagcctccttccctcgctgtgcgcccccccccggcccccgccacccgtgtcctgccctctcctgctcggcctttccccgcaagcctcggcagggcagaattgcaccccgtcgagctcaaaccttttcaggactatcagaagctctcctctaatctgggaggacccggttccagtagaacacctcccacgggacgatcattcagcgggctcaattctagactcaaggctactccctccacctacagcggggtttttagaactcagagggtggatctgtaccaacaggcctcaccacccgatgccctcagatggatccctaaaccttgggagcggaccgggccgcctcctcgagagggccccagcagacgggctgaggaacctggaagcagaggcgacaaagagcctggcttgccgccgcctagatag

SEQ ID NO: 130040 - DNA, 6417 bp, synthetic construct
  misc_feature 1..6417: note = Description of Artificial Sequence: Synthetic coding sequence
  source 1..6417: mol_type = other DNA
atgagtgaccgtagcggcccgacagccaaggggaaggacggtaaaaaatacagctcccttaatttgtttgatacatataagggaaagagtctggaaatccaaaagccagctgtcgctcctcggcacggcctgcagtctcttggaaaggtagctatcgcccgccggatgccacctccggccaacttgccatctctgaaggctgagaataagggcaatgaccccaacgttagtctcgtgccaaaagatggcactggctgggcctccaagcaggaacagtcagacccaaagtcctccgacgccagcaccgctcaacctcctgagtcacagccactgccggcctcccagactcctgcctcaaatcagccaaaaaggcccccagccgcccctgagaacaccccgctagttccttccggcgtcaaatcttgggctcaggcatccgtaacacatggggcccacggtgacggcgggcgcgcctctagccttctttcccgtttttctcgggaagagtttcctactctacaggcagctggagatcaagataaagctgccaaggagagagaatcagcggaacagtcttccgggcccggaccaagcttgcggccgcagaacagtactacatggcgggacggcggggggcggggtccggacgaactagaaggcccagatagcaagctgcaccacggacacgatccccgcggtggtctacagccaagcggtcccccccaattccccccttacaggggcatgatgccccccttcatgtatccgccttaccttcccttccctccgccgtacggacctcagggcccataccggtaccctacccctgatggaccgagcaggttcccaagagtagctgggccccgaggctccggtcctcctatgcgtctcgtcgaacctgtgggccggccaagtatactcaaggaggacaatctgaaagagtttgaccagctggaccaggagaatgacgatggatgggccggcgcccacgaggaagtagattatactgagaagctcaaattctctgacgaggaggacgggcgcgattccgacgaggagggggccgaaggccatcgagactcacaatccgcatcaggtgaggagcgtcctccggaggctgacggaaaaaaaggaaactctcccaactcagaaccacccacacccaagaccgcttgggctgaaacttcccggcccccggagacagaaccaggtccacccgctcccaagccacccctgcccccacccggggattatccggaccggggagggccaccctgtaagccacccgctccggaagatgaggatgaagcttggagacaaagaagaaaacaatcatcttcagagatatccctggcggtcgagcgagcacgccggcgtcgagaggaggaggaacgccggatgcaggaagaaagacgggctgcttgtgcggagaagcttaagcggttggacgagaaatttggtgctccggacaaacgcctgaaggcagaaccggcagcacccccagcagccccatccacacccgcacccccaccagccgttcctaaggaattgccagccccaccagccccaccccccgcaagcgcccctacgccagagactgagcccgaggaaccggcccaggccccccccgcacagtctacaccaacccctggtgtggcggccgcaccgacgctggtatcaggcggcgggtcgaccagcagcacaagctcaggctcatttgaggccagtcctgtcgaaccacagttgccgtccaaagaaggaccagagccacccgaagaggtccctccacccacaaccccaccagtgcctaaggtcgagcccaaaggagacggcattgggcccacccgacagcctccttctcagggcttaggctaccccaagtaccagaagagcctgcctccacgctttcagagacagcagcaagagcagctactaaagcaacagcagcagcatcaatggcagcagcatcaacaaggttcagctccgcccacacctgttccaccgtcacctccgcagccggtgacactgggcgccgtccccgctccccaggctcctccccccccccctaaggccctataccccggcgcgctggggagaccaccccctatgcctcccatgaatttcgaccctcgttggatgatgatacccccatacgttgatcctcgcctactacagggacgtccgcccctcgatttttatccccctggtgttcatccctccggccttgtgccccgtgaacgctctgattctggaggatcttcgagcgaaccatttgatcgccatgcacccgccatgcttagagagcgtggaacgcccccagtagatcctaagttagcttgggtcggagacgtgttcacagctacacccgccgagcctaggcccttgacatcacctcttcgacaagcggctgacgaggatgacaagggaatgagatctgaaaccccacccgttccccctccccctccatacttggcaagctatcccggctttcccgaaaacggcgctccaggacctcctatctccaggttccctcttgaagagccaggccctcgccccctgccatggcccccgggcagcgatgaagtggccaagatacagacacccccccccaagaaggaacctccgaaggaggagacagcccagctcaccgggcccgaagcgggtagaaagccagccaggggggtaggctctggcggtcaggggcccccccccccaaggagagagagcagaaccgagactcgctggggtcccaggcccggcagttctagacgggggattcctcccgaagagcccggcgctcctccgcgcagggccgggccaattaaaaaaccccccccaccgaccaaagtcgaagaactccccccaaagcccttggagcagggcgatgagacacctaagccgccaaaacccgatcccttgaaaataaccaaaggaaagctgggtggccctaaggagacgccccccaatgggaacctctcacccgcccctaggctccggcgagattactcttatgaacgggtgggacctaccagctgtcgaggacggggtagaggtgagtacttcgcacgtgggcggggctttcgaggtacctacggggggcgcgggcggggggccgccggcaatagcgccgtcaccgagagctttgaagagatgatgggcgtggaggtcggccagggtgatcagaccacgctgttattaccggaagccgccctgccggcacgtcacggggcaagggtccaatctatgcgcaaatctcctagtggcgccggctctggggcacagaaacaggccgcccgtcctatgagagtgatctggctgttgcagactcgccggctgcctcatccaaggagagagcacagcccaagaagcagatcaccaaccactaggtcacccactttcccagcccccgcacgttttacaccaggtgtgggcgagagctcactgccagaagggatcagccctggccctcgccgcagagaacccccacaagtgtgtcccggctggtctccccccgcaaaatcgctcgcccccaagaagccacctaccggacctctccctccttccaaagagcctctgaaggagaaacttattcccgggccactctcccctgtagccagaggtggatcgaatgggggttctaacgttggaatggaagacggggaaagacccaggagaagaaggcacgggcgcgctcagcagcaggacaagccccctagatttcgccgcctgaaacaggagagagagaatgcggctagaggttccgagggtaagccgagcctgacactccctgctagcgcacccggtccagaagaagcactgacaactgtgaccgtcgccccagccccccgaagggcagctgctaaatctccagacctgagtaaccaaaatagcgaccaggcaaatgaagaatgggagactgccagcgagtcctctgacttcacatccgagcgacggggggataaagaggcccctcccccagttcttctcacccctaaggcagtaggaactcccggtggcgggggcggtggggctgttcctggaatcagtgctatgtcccgaggtgacctcagccagagagcaaaggatctaagcaagcggagcttctcaagtcagagacccgggatggagcgtcagaatagacgtcccggcccggggggaaaggccggatcatcgggaagttctagcggggggggtggcggcggtcctggcggtcggactggacccggccgcggagataagcgatcctggccctcaccaaaaaatagatcacgccctcccgaagaacggcctcccggcctgccactccctccgcccccaccgtcatctagcgcggttttccggctggaccaggtgattcacagtaacccggctggtattcagcaagcccttgcccagttaagcagtcgccagggctccgtgacggccccaggcgggcatccccgacacaaaccaggcctgccacaggcaccacagggtccatcacctcggcccccaaccagatacgagccacagcgggtgaatagcgggctctcttctgatcctcactttgaggagccaggccctatggtaagaggagtcggcggtacgcccagagatagcgccggggtttctcccttccctcctaagcggagagagcgaccacccaggaaaccagaactgctgcaggaagaatctcttccccccccccattcatcgggattcttgggatcaaagccagagggaccagggccacaggcggaatctcgcgatacaggaacagaggcgctcacacctcatatctggaaccgactgcacactgctacgtccaggaagtcttataggccctcaagcatggagccttggatggagcccctttcccccttcgaggacgtcgctggaacagagatgtctcagagcgatagcggagttgacctgagcggagacagccaggtaagctcaggcccttgttcccaacgctcatcccccgacggcggtctgaagggtgcagccgaagggcccccaaaacggcctggcgggagtagccccctcaatgccgttccctgcgaagggccacccggctccgagccccccagacgacctccccccgcaccgcatgacggagatcggaaagagttacctagagaacaacccttgccgccaggacccataggaaccgagcgatcacagaggaccgacagggggaccgagcctggcccaattcgcccctcccaccgtccgggacctcccgtacagttcggcacgtcagataaagatagcgatctccgcctcgttgtgggagatagtctgaaggctgagaaggagctgaccgcatcggtgaccgaagcgataccggtatcccgagactgggagctgctgccgtccgcagcagctagtgccgagccccaaagcaagaacctggacagcggccattgcgttcctgaacctagcagtagcgggcaaagactttatcctgaggtgttctacggcagtgctggcccctcgtccagccaaattagcggagggcatggcttaagcattacctcaaaacagtggcggaggccagggacaccctccctgcacccttacagaagccagcctctctatctgccacccggaccggccccgcccagcgcgctgctgtcaggtctcgccctgaagggtcagttcctggacttctccacgatgcaggctacagagcttgggaaactccccgctggcggcgtgctctacccccctcccagcttcttgtactcccccgccttttgcccgagtcctctgccggatactagcctgctgcaggtacggcaggacctgccatccccttctgatttttacagcacaccgctacagcctggcggacagagcggctttttaccctctggcgccccagcacagcagatgttgctccctatggtcgattcccagttgcccgtggtgaatttcggttctctccccccggccccacccccagctccgcccccactatctcttctgcccgtagggcctgccctccagcctccatccctggctgtgagacctcccccggcccctgccaccagggtcttaccctccccagccagaccgttcccagctagtctggggcgggccgaactacacccggttgagttaaagcctttccaggattatcagaagctttctagcaacctaggcgggccggggagttccaggacccctcctacgggacgcagctttagtggcctgaattctaggctcaaggctactccatctacttattcaggggtcttcagaacccaacgcgtcgacctgtaccagcaggcttcccctccagatgcactccggtggatcccaaaaccatgggagcggacaggcccaccgcctagagaagggccgtcccgacgggcggaagaacccggctcgcgcggagacaaggaaccaggcctgccacccccacgctag

SEQ ID NO: 130041 - DNA, 6474 bp, synthetic construct
  misc_feature 1..6474: note = Description of Artificial Sequence: Synthetic coding sequence
  source 1..6474: mol_type = other DNA
atgtcagatcggtccgggcccaccgccaaagggaaggacggcaaaaagtattcttctctcaaccttttcgatacgtataaaggtaagagcctggaaatccaaaaacctgcagtggccccacgccacggactacagagccttggcaaagtcgctattgctaggcgaatgcccccccccgctaacctgccctccttgaaggccgaaaacaagggcaacgaccctaacgtcagcctggtccccaaagacggaacagggtgggcctccaaacaagaacagtctgatccgaagtctagcgacgcctccaccgcccagccgccggagtcccagcctctgcctgcctcccagacaccagcatccaatcagcccaagcgaccccccgccgcacccgagaacactccgctcgttccatcgggagtgaaatcctgggctcaagcctccgttacacacggagcccacggagacgggggccgcgccagctccctactttctcggttctcccgcgaagaatttcctaccctgcaagccgctggagaccaggataaagccgccaaggagcgggaatccgccgagcaatcatcaggacctggaccaagtcttcgacctcaaaatagtactacctggagagatggcggcggcagaggaccagacgaacttgagggccctgactccaaactgcaccatggacacgacccaagaggcggcctgcagccctccggccctccccagtttcctccctatcgtgggatgatgccccctttcatgtatccaccctacttgccctttcccccaccttacggtccgcagggcccctatagataccctacgccggatggacccagtcgatttcctagggtggcagggccccggggaagcggccctccgatgcggctggtagaacctgttggaaggcccagcattttaaaggaagacaatttgaaggaattcgatcagctggaccaggaaaacgatgatggttgggcaggagcccacgaggaggtcgactacacagaaaaactcaaatttagtgacgaggaggacggccgggactctgacgaggaaggtgcagaggggcacagagactcacaatcagcaagtggcgaagagcggccacctgaagccgacggtaaaaagggaaacagcccaaattctgagcctcccactccaaagacagcctgggccgaaacgagtcggccacctgagacggaaccaggcccccctgcccccaagcctccgttaccaccccctcatcgtggccctgctggcaactggggtccccctggggactatcccgacaggggtgggcctccctgtaagccccctgcacccgaggatgaagatgaagcctggaggcagagaaggaaacagtctagcagtgaaattagtttagcagtggaacgcgcccgaagaagaagagaggaggaagagcggaggatgcaggaggagcgacgggccgcttgcgcagaaaagctgaagcgcctggacgagaaattcggggcaccggataagcggttgaaggccgagcccgccgcccccccagccgcacctagtactcctgctccgccacctgctgtcccaaaggaactgcccgctccccccgcccccccccccgccagcgccccgacgccggagaaagagccagaagagccggcccaagccccacctgcccagagcacgccaactcctggcgtggctgcagcacctaccttagtgagtgggggtggctcaacttccagcacatcctccggtagtttcgaggcttcccctgtggaaccacaactccccagtaaagagggccccgagcctcctgaggaagttcctcccccaacaaccccgcccgttccgaaagtggaacccaagggagacggtatcggcccaacccgccagccacctagtcaggggttgggctacccgaaataccagaagagcttaccccccagattccagaggcaacagcaggagcagctgctgaaacagcagcaacaacaccagtggcaacagcatcagcagggctccgcgccacctacacctgttcctccaagcccaccccagcccgtgacactgggcgctgtccctgccccccaggcaccaccccctccacctaaagccctttaccccggggccttgggtaggccaccacccatgccccccatgaactttgatccccgctggatgatgattcccccatacgtcgaccctcgtcttctgcagggacgaccacccctggacttctatcctccgggcgtacatccttctgggttggtgccgcgtgagcggtctgatagcggtgggtcaagctctgagccctttgatcgccatgctcccgcaatgttaagggaacgggggacacccccggtggatcctaagttggcgtgggtgggagatgtgttcaccgctacacctgcagagcctcgtccgctcactagtcccctcagacaggcagctgacgaggacgataagggcatgaggtcagaaaccccccctgtgcctcctcctcccccatacctagccagctatccaggctttccagagaacggggcccctgggcctccaatttctcgcttccctctagaagagcccggtccccgacctctgccgtggcctccgggcagtgacgaggtggctaaaattcaaacacctccacctaagaaggagcctcccaaggaagaaacggctcagcttactggcccggaagcaggtaggaagccggccagaggcgtaggctccggcggtcaggggcccccgccgccccggcgggaatccaggacagagaccagatgggggccaagacctggaagctcccgccgggggatcccccccgaagagccaggtgcccctccccggcgcgctggtcccattaaaaagcccccacctccaaccaaagtggaagagctccctccaaaaccacttgagcagggcgatgagaccccaaagcctcccaagcccgatcctctgaaaattacaaaagggaagctcggaggtccgaaagaaacccctccaaatggtaatctgagccccgccccaaggcttcgcagagactacagctacgagagggttgggcctacaagctgcaggggccgtggccggggagagtattttgcacgcggcaggggctttcgcggcacctacggagggagaggaaggggcgcaaggtcgagagagttcagaagttatcgtgaatttaggggcgatgatggtcgggggggtggcactggaggaccgaaccacccccccgcgccccgcgggcgtaccgcttccgaaacgcgctcagagggatcagaatatgaggagatccctaagagaaggcggcagagagggagcgagactggctcagagacgcacgagtcagacttggcacccagtgataaagaagcgcccacaccaaaggagggaacactgacccaggttcctctcgcacctcctcctccaggagctccaccctcaccagcacctgcgaggtttactgcgcgcgggggaagggttttcactccccgaggagtaccctcccggcgcgggcgcggcggaggtagacctcctccgcaggtctgcccgggatggtccccgcccgctaagtctcttgccccgaaaaagccaccaacaggacccctaccccccagtaaggaaccactcaaggaaaaactcatccctggccctctgtctcctgtcgcccgcggtggcagcaatggcggatcaaacgtgggaatggaagatggcgaacgacccaggcggcgcaggcatgggagggcccagcagcaagataagccgccacggtttagacggctaaagcaggagagagagaatgcggcaaggggcagcgagggaaagcccagcctgacccttcccgcaagcgcgcccggccccgaagaggcacttactaccgtcacagtcgcccccgcccctcggcgtgccgccgcaaagagccctgacctgagcaaccagaactccgatcaggcaaacgaagagtgggagacagctagcgaaagttccgatttcactagcgagaggagaggggacaaggaggcccctcctccggtgctgttaactcctaaggccgtcggtacccccggaggcggcggtggaggagccgtgcctggaatatcggccatgtcaaggggagacctaagccaacgggcaaaagatcttagcaaacggagtttttcctcccagcgtcccgggatggagcgccaaaacaggcgtcccggcccgggaggaaaagccggcagctccggctcatcatctggcgggggcggtggtggccccgggggacggactggccccggtaggggggataagcggagctggcctagcccaaaaaatcggagccgtccacccgaagagagacctcctggcttgcctttgcctccccccccgcctagctcatctgccgtttttcggttggaccaggtcattcactctaacccagccgggatccagcaggccttggctcagctgagtagtcgccaaggttccgtgacagccccaggcgggcatccaaggcacaaacctgggccaccacaggcaccccaggggccctcgcccagacctccgactaggtacgaaccacaacgggtaaacagtggcctttcttctgatccacatttcgaggagccgggtcctatggtccggggcgtgggtggaacacctcgtgattcagcaggggtgtcaccctttcccccaaaaagacgggagcgacctccgcggaagcccgaactgttgcaggaagagagcctgcctccaccccattccagtggatttctcggatccaagcccgagggacccggaccgcaggccgagtcccgggatactgggacggaggcactgaccccccatatctggaaccgactgcataccgcaacctcgaggaagtcctataggccctctagcatggagccctggatggaacctctgtcccctttcgaagacgtggctggaaccgagatgtcccaatcagattctggcgtggatctatcaggagattcccaagtgagctcgggcccctgcagccagcggagctctccagatggcggattaaaaggcgccgctgagggcccacccaagcgccctggcggatcgagtcctttgaacgcagtgccttgtgagggacctcctggctcagagccacctcggaggcctccccctgctccacacgatggggatcgaaaggagctcccacgcgagcaacctctcccacccgggcccattgggaccgagagaagtcagcacactgataggggcacggaacccgggcccatcaggccctcacatcggcctgggcctccagtgcagttcggtaccagcgacaaagactctgacctgagactcgtggtgggcgatagcctcaaggctgagaaggagttgacggcctcagtgactgaagcaatcccagtttctagggattgggagcttcttccaagtgccgcagcttcagcggagcctcagtctaagaacctggacagcggccactgcgttcccgagccctcaagcagcggccagcgcctgtacccagaagtcttctatggaagtgctggaccttcatcatctcagatatcaggtggagccatggatagccaactccaccctaactcaggcgggtttcgtcccggaactcccagcctgcacccttaccggagtcagcccttatatctgccacccgggcccgcccctccctctgcgttactcagtggcgtcgctctcaaggggcagtttctggacttcagtactatgcaggcgaccgaactgggaaagttgcccgcaggaggagtcctctatccacctccatcatttctctatagtcccgctttttgtccgtcacccctgcctgacactagcctcttgcaagtgcgacaggacctacccagtcccagcgacttctacagcacccccctacagcccgggggccagagcggcttccttcctagtggggcgcccgcacagcagatgctgcttccaatggtcgactctcagcttcccgtcgtgaacttcgggagtttaccgcccgccccccctccagctccaccaagtctgagcttgctgcccgtggggcccgctctgcagcccccctccctcgctgtgaggccccctcctgctccagctactcgtgtgttacccagccctgcaaggccctttcccgcctccctgggccgagcggagctacatcctgtggagctgaagccctttcaggattaccaaaaattgtcttcaaatctcggtggacctggttcaagtcggactcctccaacgggccggtccttctccggtttgaattcccgcctcaaggctaccccgtccacctattccggggtgtttcgcacccagcgggtggatctctatcaacaagcctcgccacctgacgcgctaaggtggatcccaaagccctgggagcggactggcccccctcctcgcgagggaccgtcccgtcgcgccgaagaaccggggtctcggggagataaggagccgggactcccccctcccaggtag

SEQ ID NO: 130042 - DNA, 6474 bp, synthetic construct
  misc_feature 1..6474: note = Description of Artificial Sequence: Synthetic coding sequence
  source 1..6474: mol_type = other DNA
atgtccgatcgatccggcccaaccgctaagggcaaggatgggaagaaatactcttctctcaacctgttcgacacctataaaggtaaatcactagagatccagaagcccgccgtggccccgaggcatggattgcaatcacttggcaaagtcgcaatcgcaagaaggatgcctcctcccgctaacctgcccagcctgaaggccgagaataagggtaatgatccaaacgtctccctcgtaccaaaggacgggaccggctgggcctctaaacaagagcaaagtgacccgaagtcttcagatgcctctactgctcagcctctggagtcacagccgctgccggcatctcaaacccccgcctcaaatcagcctaaacggccgcccgccgccccagaaaatacacctctcgttccctctggcgtaaaatcctgggcccaggcttcagtcacccacggggcccacggcgacggcgggcgagcatcctccctgctgtctagattttctcgggaggaattcccaacactgcaggccgccggggatcaggataaggctgcaaaggagcgggaatcagctgagcagagtagcggcccaggtccttccctgagaccacagaactcaactacctggagggacggcgggggtcgtggacctgatgaactcgagggtcctgacagcaaactgcaccatggccacgaccctcgaggggggcttcagcccagcggcccaccgcagttcccgccatatcgcgggatgatgcccccttttatgtacccaccttacctccctttcccacctccatacgggcctcagggtccataccgctaccctactcctgacgggccctcacgcttcccccgggtggccggtccacgcgggtccggcccccccatgagattagtggaaccagtgggccggcctagtattttaaaagaggataatctgaaagaattcgaccagttggatcaagagaacgacgacgggtgggctggagcccatgaagaggttgattataccgagaaacttaaattctctgacgaagaagacggccgcgatagtgacgaggaaggcgccgagggccatcgcgactcacaaagcgcgagcggcgaggagagaccccccgaggcagacggaaagaagggaaactcaccaaacagcgagcctcctacgcccaagactgcttgggcggagacgtcacgcccacctgagacagaacctggaccccccgcccccaaaccgcccctgccgccaccgcataggggcccagcgggcaactggggcccccctggcgactatcccgataggggcggaccaccttgtaagcctccggcccctgaagatgaagacgaggcgtggagacagcgcaggaagcagagttcctctgaaatcagcctggcagtcgagcgcgctaggagacgccgggaagaggaagaaaggaggatgcaggaagagaggcgcgccgcctgtgcagagaagctcaagcgcctagatgagaaattcggggccccagataaaagattaaaagcggagccagctgccccccctgctgcaccatctactccagccccacccccagcagttcctaaagagctccccgcaccacctgcccctccaccagcttccgcaccaaccccagagaaggaaccagaagagcctgctcaagccccaccagcgcaaagcacccctacacctggcgtcgccgctgcaccgaccctggtgtctggcgggggctccaccagctcgacctcatccggctcatttgaggcaagccccgttgagccacagcttcccagcaaggaaggccccgaacctcccgaagaagtgcctcccccaacaactccccccgtgccaaaggtcgaacccaagggcgacggaatcggtcctacacgccaaccaccgtcacaaggcctgggatatcctaaataccaaaagtccctccccccacgcttccagcggcaacaacaggagcagctgctcaagcaacagcagcaacatcagtggcagcagcatcaacagggtagcgctccccccactcccgtgccaccctctcccccacagcccgttactctcggcgcggttccagccccacaggcaccccccccacccccaaaggccctgtaccccggtgctctgggccgtccacccccgatgccaccaatgaactttgaccctagatggatgatgattcccccctacgtggacccaaggttattgcagggacgccccccactggacttctatccacccggtgtccacccttcagggttagtgccgagagagcggtccgactctgggggctcctcttccgagccttttgaccggcatgcccccgcgatgctccgtgaacgagggacaccgcctgttgatccgaaactcgcatgggtgggtgacgtgtttactgcgacacccgccgaacccaggccactcacttcccccctccggcaagccgctgatgaggacgacaagggcatgagatcagagactcctccagtacccccgccaccaccatacttggcctcttacccgggattccctgagaatggagcaccagggccccctatatcaagatttccgctggaggaacccggacctagacctttaccctggcccccaggctcggacgaggtggcaaagatccagacaccacccccaaagaaagagccacccaaagaggaaactgcccagctcacggggcccgaggcaggaagaaaacctgcccggggagtcgggagcggcggacaggggccacccccaccccgacgggagtcacgaacggagacgagatggggcccacggcccggctcttcacgccgtggaattcctccagaagaacctggagcacctccaagacgggccggccctattaaaaaacccccgccacccaccaaggttgaggaactccccccaaaaccccttgaacagggcgatgagacccctaagccacctaagccagaccctctgaaaattactaaaggcaaactcggaggccccaaggagactccccctaatggaaatctctcaccggccccacggctgagacgtgattacagttatgaacgggtaggtccgaccagctgcaggggacgtggacggggagaatatttcgctcgtggccgcggttttcgaggaacatacggtggccgagggcggggggcccgtagcagggagttccggtcttacagagaatttcggggggacgacggccgcggcgggggcaccggagggccaaaccaccctcctgctccccggggccggaccgctagtgagacccggtctgagggatccgagtacgaagaaatcccaaaacggagacggcagagaggttctgagaccggatcagagactcatgaatcggacctggccccttcagacaaggaggcccccaccccgaaagagggcacgctcactcaggtacccctggccccccccccccccggagctcccccttcaccagcccctgcgcgttttaccgccaggggagggcgggtgtttacacccagaggggttccctcccgccgaggtcgcggcggcggaaggccacctcctcaggtgtgtccgggttggagcccccccgccaagtcccttgccccaaagaaaccccctacaggcccactacccccttccaaggagcccctcaaagagaaactcattcctggtcccctctctcccgtggcccgcggcggatcaaatggcggaagcaatgtcgggatggaggatggagagcgacctcgaaggcgccgccatggcagagcccaacagcaggataagccacctcgctttcgtcgactgaaacaagaaagggagaatgctgcccggggctctgagggcaagccttccctgacactcccagccagcgctccgggccctgaggaggctctgaccaccgtcaccgtcgcacccgcccctcgtcgagcagccgccaagtcaccagacctgtcaaaccagaacagcgaccaggctaatgaggagtgggagactgcatcagagagtagtgattttacctctgagcggcggggagacaaggaagcgcctccaccagttctgctgaccccaaaagccgtgggaactccaggggggggaggagggggagccgtgcccggcatatccgcgatgtcccgtggcgacttaagccagagggccaaggatctcagcaagcgtagctttagctcccaacggcctggtatggaacgtcagaatagacggcctggccctggtggtaaggccgggtcttcggggtcatcttcaggcggaggggggggaggtcctggcgggcgcacggggcctgggaggggtgataagcgatcatggccatctcctaagaaccgatcacggcccccggaggagcgacctcctggcctgccccttcctccaccacctccatcgagctcggccgtgttccggctggaccaggtaatccacagtaatcccgcaggtatccaacaggctttggctcaactgtcctcccggcaggggagtgttacagctcctggcggacatccacgccacaaaccaggacccccgcaggccccccaagggcccagccctcgcccccccaccagatatgagccccagagagtcaactccggactctccagcgatccgcacttcgaggagccagggccaatggtgagaggtgtgggcggaacccccagggattctgccggcgtctccccattcccgcccaagagacgtgagcgacccccccggaaacctgaactgcttcaggaagaaagtctgcctcccccccactcaagcggctttctgggatctaagcccgaaggtccaggcccgcaggcagaatccagggatacgggcaccgaggctctgaccccacatatatggaatcgattacacacggcaactagccggaagtcttacagaccatcatccatggagccatggatggaacctctgagcccattcgaggacgtggctggaactgagatgagtcagagtgatagtggtgtggatctgtccggcgatagccaggtctctagcggaccttgctcacaacggagctctcccgacggtggactcaaaggagctgctgaagggccacccaagcgcccaggcggttcctcgccattgaacgccgttccttgcgaggggccgcctggtagcgagcctccgagacgaccaccaccggccccccacgatggcgatcgcaaggagttacctagagaacagcccctgcctcctggtccaatcggcactgaaagaagccagaggactgaccgcggcaccgagcccggccccatccggccatctcaccggcccggacccccagttcaattcggaactagcgacaaggatagtgacctcagactggttgtgggggactccttaaaagctgaaaaagaactcacagcatccgtcaccgaagccattcccgtctctagagactgggagctgcttcctagtgctgccgctagcgccgagccccagtctaaaaacctggactccgggcactgtgtgccagagcctagtagttccggacagagactgtatccagaggtgttttacggatcagcaggcccttccagctcgcaaatctctgggggggccatggattcacagttgcaccccaatagtgggggctttcggccaggcaccccctccttacatccctatcgcagtcaacctctgtatctgccgccaggcccagccccacctagcgccctgctctccggggtcgccctcaagggccagttcctggacttcagcaccatgcaagcgacagaactgggaaaacttccggccggaggggttctgtacccgcctcccagcttcttgtacagccccgcattctgtccctcaccccttcctgacacctcccttcttcaagtacgccaagacctaccttcaccctccgatttctacagcacccctctccagcctggggggcagtccgggttcctccctagcggtgcccccgcacagcagatgttgctgccaatggtggacagccagttgcccgtggtgaacttcggatctttacctcctgcccctccaccggccccccccccattgtccctgctgccagtcggcccagccctccagcccccgtcactcgctgtgagacccccccctgcgccggctacgcgtgtgttgccctccccagcaagacccttccctgcctctctgggccgagccgaactgcatcccgtcgagctgaagccctttcaggattatcagaaactctcgtctaatctgggcgggccagggtcctccagaacccctcccactggccgttctttttctggattaaactctcgactgaaagcaacccctagtacctactcaggagtgttccgaactcaacgggtggacttgtatcagcaggcgagcccacctgacgcactgaggtggatccctaagccctgggagagaacagggcccccacctagagagggacctagccggcgggccgaggagcccggatctaggggggataaggaacccgggcttccaccaccccggtag

SEQ ID NO: 130043 - DNA, 6474 bp, synthetic construct
  misc_feature 1..6474: note = Description of Artificial Sequence: Synthetic coding sequence
  source 1..6474: mol_type = other DNA
atgtccgatcgttctgggcctaccgccaaggggaaggacggaaaaaagtattcctcacttaacctgtttgacacctataaaggcaagtccctcgaaatccagaagcccgccgtcgcccctagacacggtttgcaatctttgggcaaggttgccatcgcaaggcggatgccaccccctgccaatcttccctccctgaaagcggaaaataaggggaacgatcctaacgtgagcctggttccaaaggacggaaccgggtgggctagcaagcaagaacagagcgaccctaagtccagcgatgcctccaccgctcagccaccggagtcccaacccttgcccgcctctcagaccccagcctcaaatcagcctaagaggcctccagcagctccagagaatacgccacttgtcccatccggcgttaaatcatgggcacaggcttctgtaacacacggagcgcacggtgacgggggtagagctagtagcctgctgagcaggttctcccgtgaagaattccctaccctacaggcagcgggagaccaagataaagccgctaaggaacgagaatctgctgagcagtctagcggccccgggcccagcttgagaccccagaactctaccacctggagggatggaggaggtcgcgggcccgacgagctcgaaggaccagactccaagctgcaccacggacatgaccccagaggaggactgcaaccgtcgggtcccccacaattcccaccgtacagaggcatgatgcctccattcatgtaccctccctatctgccattcccccccccatatggaccacagggaccgtaccggtatcccacccccgacggccctagcagattcccccgggtggccggtccgcgaggaagcggcccccctatgcgcttggttgagccggtgggacggcctagcatattgaaagaagacaacctgaaagagtttgaccaattagaccaagaaaacgatgacggttgggccggagcccacgaggaggtagattataccgaaaaacttaaattctcggacgaggaggacggacgggactctgacgaagagggagcagagggacaccgggattcccagtccgcttcaggggaagagaggccacccgaagccgatggaaagaagggaaattcccccaacagtgagccccccacccctaaaaccgcatgggctgagacgagcagacctccggaaaccgaacccgggccaccggccccaaaaccccctcttcctcccccccataggggacccgccggaaattgggggccgccaggcgattaccccgaccgggggggacctccttgcaagcccccggcaccagaagatgaagatgaagcctggcgtcaacgaaggaagcagtccagctccgagatctccctggctgtggaacgggcaaggcggcgcagggaagaagaagagaggcgaatgcaggaggaacggcgcgcggcctgtgccgaaaaattgaagagactggacgaaaagttcggagcccccgacaaaaggttgaaggctgagcccgctgctccccccgccgctccatccacacccgcgccaccccccgccgttcccaaagagctccctgccccacccgcaccaccacccgcttcggcacctacgcccgaaaaggagcccgaggaaccggctcaagccccccctgcacagagtactcctactccaggcgtcgctgccgctcccacgctggtttccggcggagggtcaaccagtagcacaagttctggctcttttgaggccagtcctgtggaacctcagttgccctcaaaggaaggtccggagccgccggaggaagtgccacctcctaccactccaccagttccaaaggtcgagcccaagggagacggaattggacctactcggcagccgccttctcagggactcgggtaccccaaataccagaaatcccttccgcctcgctttcagcgtcagcagcaagagcagctgctcaagcagcagcagcagcatcagtggcagcagcaccaacagggctccgcaccgcccacgcccgtaccaccgtcgccacctcagccagtgaccttgggcgcagtgccagccccacaggccccaccgccacctcccaaggccctgtatcccggggccctgggcagacctccacctatgcctcccatgaactttgatccccgctggatgatgatacctccgtacgtcgaccctcgcctgttacagggccggccaccgctagacttttatcccccaggcgttcacccaagtggcctggttccgagagaacgttccgatagcggcggcagtagtagcgagccatttgaccgtcatgccccggccatgctccgcgagcgggggacacctccagtggacccaaagttggcttgggtgggtgacgtgtttaccgctacaccagccgagccccgccccctgaccagtcccttgcggcaggctgccgatgaagacgataaaggcatgcgatccgaaaccccaccagtgccaccacccccaccttacttagcttcttatccaggatttcccgagaatggggctccaggaccacccataagcagattccctctggaggagcccgggcctaggcccctaccatggccacccggctctgatgaggtggccaagatacagacgccccccccaaagaaagagcctcctaaagaagaaactgctcagctgacaggcccggaggcaggtcgaaagccggcacggggggtggggtcagggggccaaggcccgcctcctcctcgtcgagagagccggacggagaccagatggggcccgaggccgggcagcagccggcgaggaatacctccagaagagcctggggctccgcccaggagggctggtcccattaaaaaacccccgccacctaccaaggtcgaggagctgcccccaaagccacttgaacagggggatgaaactcccaagccccccaaaccagaccctttgaaaataacaaagggcaagctgggcggacctaaagagacgcccccaaatgggaatttaagtccagcacccaggctacgaagggattactcttacgagcgggttggtcctacaagctgtagggggcggggccgaggagagtactttgcgcgcgggaggggcttcaggggaacatacggtggacgaggcagaggggcccgatcacgggagttcagatcttatcgcgaatttcgcggagacgacggcagaggtggcggtacaggagggcctaatcaccccccagctccgcgtggacgcacggcttcagagaccaggtccgagggatcagaatatgaagagattcctaaaagacggcgtcagagaggctctgagaccggctcggagacacacgagtcggatctcgctccgtcagacaaggaggcaccaaccccaaaggagggtacgctgacacaggtgcctttagcgccaccccctcctggcgcccccccttctccggcccccgccagattcaccgcgcgtggggggagagtctttaccccaagaggtgtcccgtctcgcagggggcgcggaggaggtcgccccccaccacaagtctgtcccggttggtcacccccagctaagtccctggctccaaaaaaacctcccacggggccgctgcctccctcgaaggagcccctcaaggagaaattgatcccgggtccactgtcccccgtcgcccgggggggctcgaacggggggtctaacgtgggcatggaagatggagaacgcccccgaagacgccggcacggcagggcacagcaacaagataagccgccgaggtttagacgtctgaaacaggaaagggagaatgccgctcgaggaagcgaaggtaagccgtccttgacattaccagcttcagctcccggcccagaggaagccctcactacagttactgttgctcccgctccccggcgggccgccgccaaaagccctgatttgtccaaccagaacagtgaccaggcaaatgaagaatgggagaccgctagcgagagtagcgatttcacctcggagcgccgtggcgacaaggaggccccaccaccagtgttgctgacaccaaaagccgtcggcacgccaggtggagggggcggtggagctgtgccagggatatcggcaatgagcagaggagatttgagtcaaagagccaaggatctgtctaaaaggtcttttagctcccagcggcctgggatggaacgacagaaccgtcgacctggccccggggggaaggctgggagttctggctcaagctctgggggaggcgggggtgggccaggaggacgtacaggaccaggacgcggagacaaacggtcttggccttcacccaagaacagatctaggccacctgaagagaggcctccaggtctgcccctgccaccccctccaccatcgtcctctgctgtctttcggctggaccaggtaatccattccaacccagcaggcatccagcaagccctggcgcaattgtctagcagacaggggtctgtgaccgcaccgggggggcatccgcgccataagcctggcccacctcaggccccccagggcccaagcccgcggcccccgacacgttacgaaccacaaagggtgaacagtggattgtcctccgatccgcacttcgaagaaccgggccctatggtgcgcggggtcggaggcaccccaagagattccgcaggggtctcccccttcccacctaaaaggcgagaaaggcctcccaggaagcctgagctgttgcaggaagaaagtctgccccctccccattcctcaggcttcctcggttccaaacctgaaggacccggaccccaggctgaatcacgtgacactggcacggaagccctcacaccccacatatggaataggctgcacaccgctacgagccggaagtcatatcgtccgagctccatggagccttggatggagccactgtcgcctttcgaagacgtagcaggcacagagatgagtcagagcgacagtggagttgatctttcaggcgacagccaggtgagttcaggaccttgtagccagagaagttctcctgatgggggccttaagggagccgctgagggccctcccaagagacccggcggaagctctccactcaatgccgttccatgtgaaggacctccaggaagcgagcccccaagaagaccgccccccgcaccacacgatggcgataggaaagaactaccacgagaacagcctctccctccaggacccattggcaccgagaggagccaaaggactgacagagggacagagcccggaccaatacggccaagtcatagaccgggaccaccggtacagtttggtaccagcgacaaggacagtgatttaaggctcgttgtaggggattcactaaaggctgaaaaggagctaactgcgtctgtgacagaagccattccagttagcagagactgggagctgttgcccagcgctgccgcctccgccgagcctcagagtaagaatctagactctgggcactgtgttcccgagccctcctcctcggggcaacgcttgtaccctgaagtgttctacgggtctgccggcccgagtagcagtcaaatatctgggggcgcaatggactcccagctgcaccctaatagcggtggtttccgccccggcaccccatctctgcacccttacaggagtcaacccttgtatctgcctcctggaccagctcctccttcagcactgctgtcaggcgttgcattgaaagggcaattcctcgattttagtactatgcaagccactgaactcggcaagctccccgctgggggagttctgtacccacccccatctttcctgtacagccctgccttctgccccagtccattacccgacacatctcttcttcaggttagacaggacttgccctccccctctgacttttattctacgccattacaacctgggggccagtccggtttcctgccctcgggcgctccagctcaacaaatgctcctcccaatggttgactctcaactgcctgtggtgaatttcggaagccttccaccagccccccccccagcaccccccccactaagcctcctgccagtgggccccgccctccagccacccagtctggccgtgaggccaccaccggcgcctgccacccgcgtcttaccctctcccgcaaggccgtttccagccagcctgggccgagcggagctgcatcctgtggagctcaagccatttcaggactaccaaaagctgagtagtaatctgggtggccctggaagttctcgcacacctccaacgggaaggtcattctccggcctgaacagccgcctcaaggcaactccttccacttacagtggtgtgtttcggacccagcgcgtagacctataccagcaagccagcccgccagatgccctgcgttggatccctaaaccttgggaacgaactggtccacccccacgggagggaccttccaggagagcagaggagcctggatcaaggggggacaaggagcctggactaccccctcctagatag

SEQ ID NO: 130044 - DNA, 6474 bp, synthetic construct
  misc_feature 1..6474: note = Description of Artificial Sequence: Synthetic coding sequence
  source 1..6474: mol_type = other DNA
atgtcagatagatctggaccaaccgccaagggcaaggatggcaaaaagtattcatcactgaacctgtttgatacatacaaaggaaaaagcttagaaattcagaagccagctgtcgctccacggcacggcctgcagtccctaggtaaagtcgcgatcgcccgccgtatgcctcccccagcgaacctcccatcattgaaggcggaaaacaagggtaacgaccctaacgtttccctggtgcctaaagatgggactggctgggctagcaaacaggagcagtctgacccgaagtcctctgacgcgtctactgcccagcctccagaaagccagcccttgcccgcatcacaaactcctgcctccaaccagcctaaaagaccacctgcagctcctgagaatacccccctggtgccaagcggcgtgaagagctgggcccaggcctctgtgactcatggggcgcacggagacggtggtcgcgcctcctccttgctgagtagatttagcagggaggaattcccaaccctgcaggctgcaggagatcaggacaaagctgcgaaggagagagaatcagcggagcagagtagtggccctggcccgagtctgagaccgcagaactccacgacatggcgcgacggaggaggtagaggcccggacgagttagaaggcccagactctaagctgcaccacgggcatgaccctagaggaggtctgcagccctcaggtccacctcaatttcccccctatcgcggtatgatgcctcccttcatgtatcccccctatctccccttccctcctccatacggacctcaagggccgtatcggtacccgacacccgacgggccttctagatttcccagagtggccggacctcgtggtagtgggccccctatgcggctagtcgaaccggttggacggccgagcatcttgaaggaagataatttaaaggagttcgaccagctggatcaagaaaatgacgacggatgggcaggcgcacatgaagaggttgattacaccgagaagctcaagttctccgacgaagaggacggcagggactccgatgaggaaggagcagaaggtcatagagattcccagtctgctagtggagaggagagacccccagaggcagacgggaagaagggcaatagtccaaattcagagccccctaccccaaaaaccgcttgggccgaaacctccaggcctcccgagaccgaacctggaccccccgcccccaaacccccgctgcccccccctcacaggggtccagcaggaaactggggcccccctggagattaccctgatagaggcggcccaccatgcaagcccccggcccccgaagatgaggacgaagcatggaggcagaggcgcaagcagagttcatctgaaataagtctggcagtagaaagggctcggcggagacgagaagaagaggaaaggaggatgcaggaggagaggagagctgcgtgcgcagagaagcttaaaagactggatgagaagttcggggccccagacaaaaggctcaaggccgaacctgccgctccaccggccgcaccttcgaccccggcaccacctcctgcggtgcctaaagaactgcccgctccccctgctccaccacccgcctcagcgcctacccctgagaccgaacctgaggagcccgcccaagctcccccagcgcagtcgactcctacacccggcgtggccgctgctcccacactcgtaagtggggggggatctacctcttcaaccagctctggcagtttcgaggcctcaccggtcgagccgcagttgccatctaaagagggaccggagcccccagaagaagtcccgccccctaccacacctccagtgcccaaggtggaacctaaaggcgatgggattgggcccacccggcagcctccttcccaggggctgggataccctaagtaccaaaaaagcctgcccccccgcttccagcgccagcaacaggaacagttgctcaagcagcagcaacagcatcagtggcaacagcaccagcaggggtccgccccacctaccccggtacctccatctcctccccagcccgtgactctgggagccgtgcctgctcctcaggcgccgccccctccccccaaggccctttaccctggagcccttgggaggcctccacccatgccccccatgaactttgatccaaggtggatgatgatccctccctatgtggacccccgattgttacaaggccggccgcctctggacttttacccccctggcgtgcacccctcaggcctggtgcctcgagagcgatccgattccggcggctcttcgtcggagcctttcgacagacacgcccctgccatgttgcgagagaggggcaccccccccgtggatcctaaactggcctgggtgggcgatgtgtttactgccacaccagcagaaccccgtccgctcacatcacctctgcgccaggccgccgatgaagatgataaagggatgagatcggagactcctccggtgcctccaccacccccctacctagcttcctatcccgggttccctgaaaacggcgcccctggccctccaatatcacgtttccctctcgaagagcccggcccccggccgctaccatggccacccggctctgatgaagtggcgaaaattcagaccccgcctcccaaaaaggagccgcccaaggaggaaaccgctcagctcactggtcctgaggccggccggaagccagcccgcggagtgggttcaggcgggcagggtccaccacctcctaggagggaaagcagaaccgaaacccggtgggggccccgacccggtagtagtagaagaggtatcccgcctgaggaacctggggccccaccaaggagggcgggtccaataaagaaaccccctccacctaccaaagtcgaggaattgccacctaaacctttggagcaaggggatgaaactcccaagccacccaaacccgatcccttgaagatcaccaagggcaagctgggaggccccaaagagactcctcctaacggtaaccttagcccggccccacggctgcgccgcgattactcctacgaacgggtgggcccaaccagctgcagaggccgcggccgcggggagtatttcgctaggggccgcggctttcgcgggacatatggcggcagaggcaggggggcaagatcaagggagtttaggtcttacagagaatttcgaggtgacgatggacgagggggggggaccggaggccctaatcatccgcctgctcctcggggccggaccgcaagtgaaacgcgatctgagggttccgagtacgaggaaatacccaagcggcgtaggcaacgaggatctgaaaccggctcggaaacccatgagtccgatctagccccttctgacaaggaggcccctacaccgaaagagggaacactgacacaggtacccttggctccccccccacctggggcccccccctcgccagcccctgccagattcacagccaggggcggtcgagtctttacgccaagaggcgttccctcccgccgaggtcgggggggcgggagacctcctccccaagtctgcccaggatggagtccaccagcaaagtcgctcgctcctaagaaaccacctacaggaccactgccaccttcgaaggagccactgaaggagaagctgattccaggaccgctgtcacccgtggcccgcgggggcagcaacgggggcagcaatgtggggatggaagatggcgaaagaccgcgtcggagaagacacgggcgggcccaacagcaggataaacctccccgatttcgaagactgaagcaagaacgtgaaaatgcagcccgaggcagcgaaggcaagcctagcctcaccctgcccgcttccgccccagggcctgaagaggctttgactaccgtgaccgtggcacctgcccccaggcgcgctgccgccaagagccctgatctgagtaatcaaaattccgatcaggcaaacgaggagtgggaaactgccagtgaatcttctgacttcacctccgagcgccgtggcgacaaagaggcccctcccccagtcctcttaaccccaaaggctgtgggcacacctggcggcggtggtggaggcgctgtaccaggtatctcagcgatgtcccgaggcgacctgagccagcgagcgaaagaccttagtaagcgtagcttctccagccaaagaccaggcatggagagacaaaacaggagaccaggaccgggtggcaaggccggctcttctggatcaagcagcggagggggtgggggagggcccgggggtaggaccggcccagggagaggtgacaaaagatcctggccaagtcccaagaacaggagtaggcccccagaagaaagacctcctggccttccgcttccgccaccccctcctagcagcagcgctgtgtttaggttagaccaagtcattcactctaatcctgctgggattcagcaagccttggcccaactcagcagcagacagggaagtgtgacagcccctggcggccatccccggcataagcccgggctgccacaagccccccagggaccatccccacgccctcctactaggtacgaacctcagcgcgtaaatagtggtctgagttctgatccccattttgaggaacccggaccaatggttcgtggtgtcggaggcacgcctcgcgactctgcgggcgttagcccattccctccaaagagacgcgagaggccacctagaaagcctgagctgttacaggaggagtctctacctccaccccacagttccggcttcctgggctctaagcccgagggccccggtcctcaggctgaatcccgcgacacgggtacagaggcactaaccccgcacatctggaacaggctccacactgcgacctcaaggaaatcatatcgcccaagctctatggaaccgtggatggagccactctctcctttcgaagacgtggccggcacggaaatgagtcagagcgactctggcgtagatctgtccggcgattctcaagtaagtagtgggccttgcagccagaggtccagcccagatgggggcttgaagggagccgcagaggggcctccgaaaaggccagggggaagctctcctcttaatgcagttccctgtgagggcccgccggggtctgaacccccgcgcagaccccccccagcaccacatgatggggataggaaagagctccccagagaacaacccctgcctccggggcctatcgggacggagcgcagccagaggaccgaccgggggaccgaacctggaccaatcagaccttcacataggcccggccctcccgtgcagttcggaacctccgacaaggatagtgatctgaggctggtcgtcggagacagcctgaaagcggaaaaagaactgaccgctagcgtgactgaggccatacctgtgagccgcgactgggagcttttgcctagcgcggcagcaagcgcagagcctcagtctaagaatctggatagcggccactgcgttcccgagccctccagcagcggacaacggctgtacccggaggtgttctacggctccgccggcccgtcatcctcccagatttctggcggcgccatggattcgcagctgcacccaaattcaggcgggttccgacctggaaccccgagcttgcatccttacaggtcccaaccactttatctgccccccgggccggcgcctccttccgctcttttgtcaggcgtggcattgaagggccagttcctagactttagtactatgcaggctacagagttaggcaagctgccggccggaggcgtactgtacccgcctccatcctttctttactccccggcgttctgtccatccccactcccggatacaagcctcctccaggttagacaagatctgccttccccttcagacttttactcgactcccctccagccaggcgggcaatcgggattcttaccatccggagccccagcccaacagatgctactgccaatggttgatagtcagctgcccgtagtaaacttcggaagccttccacccgcgcccccacccgcaccacctcctctctctcttttgccagtcgggcccgccctgcagcctccttcattggcagttcgtccgccgcctgcccctgccactcgcgtgttaccttcccccgctagacccttccccgcttctctgggccgagcagagcttcaccccgtcgaattgaaaccatttcaggactaccaaaagctgtcatctaacctgggcgggcccgggtccagcagaaccccaccaacagggagaagcttcagtggtctcaatagccgtctgaaggccacaccctcaacctattccggtgtatttcgtacacagagagtggacctctatcagcaggcctcgccacccgacgcactgcgctggattccaaaaccgtgggagcggacagggccccctccaagagaaggcccctcccggcgcgcagaggaacctgggtcccgaggagataaggagcccgggctccctccgcctagatag

SEQ ID NO: 130045 - DNA, 6450 bp, synthetic construct
  misc_feature 1..6450: note = Description of Artificial Sequence: Synthetic coding sequence
  source 1..6450: mol_type = other DNA
atgtctgatcggtcaggtcctactgcaaagggaaaagacggaaaaaagtactcttcacttaacctgtttgacacctataagggaaagtctttagaaattcagaagcccgccgtcgcacctcgccacggattgcagtctcttggcaaagtagccatagctagacgcatgccaccaccagccaacctaccctccctgaaggctgagaataaggggaacgatcctaatgtgtccctggtaccgaaggacggcactggatgggccagtaaacaggaacaatctgacccaaaaagttcagatgcttccacagcacagcctccagagtcccaaccactgcccgccagccagaccccagctagcaaccaacctaagaggcctcctgcagcaccagagaatacaccccttgtgccctcaggagtgaaatcttgggctcaggccagcgttacccatggcgcacacggcgacggtgggcgagccagttctttgctgagcagattctcacgagaagaattcccaactcttcaagcagctggcgaccaggacaaggcagccaaggaacgcgagtccgctgaacagagcagtgggccgggcccaagtctccggccccaaaacagcaccacatggcgtgacggtggggggcggggtccagatgagctggaaggtcctgactctaagctgcaccacgggcatgatccccgtggtggccttcagccaagtggccctccacagttccctccctacagaggaatgatgcctccatttatgtatccaccatatctgccatttccacctccgtatggtccccaagggccataccgttatcccacgcccgacgggcccagccgctttccccgggtggccgggccgcgggggagcgggccacccatgagactagttgagcctgtgggcaggccaagcatcctcaaggaggataacctgaaggagtttgatcagctcgatcaagagaatgacgacggctgggcaggcgcacacgaagaagtggattacacagagaagcttaagttcagtgatgaggaggatggtagagactccgacgaagagggggcggaggggcatagggacagtcaaagcgctagtggggaagagaggcctccagaggctgatggcaagaaaggtaactccccaaactcagaacccccgactccaaagacagcctgggccgagacatccaggccacctgaaaccgaacccggtccaccagctcccaaaccacccttaccacctccgcaccgtggccccgccggaaactggggcccgcctggcgattaccctgataggggtggtccgccatgtaagccgcctgctcccgaggacgaggacgaggcgtggaggcagcgccggaagcaaagctcttccgagatttccttggccgtggagcgcgctaggcgtcgtagagaagaagaggagcgtcgcatgcaggaggaaaggcgtgccgcgtgcgctgagaagcttaaacgactggacgagaagttcggcgctcccgataagaggctgaaggctgaacctgccgctccaccagccgctccaagcacacccgccccccctcctgcagttcctaaggaattgcccgccccccctgcccctccgccagcatccgccccgaccccagaaacagagccagaagagcctgctcaggcccccccagcccagtccacccctaccccaggtgttgccgccgcaccaactttagtaagcggagggggatccacttcctcaacatcctccggctcatttgaggcgtccccggtagagccccaactgccttccaaagagggtccagagccccctgaagaagtccccccacccacgaccccgcctgtgcccaaggtagagcctaaaggggacggtatcggtcctacaagacaacccccttcccaggggcttgggtatccaaagtatcagaaatccctgcctcctagattccaacgccagcagcaggagcagctgctgaaacagcagcagcagcaccaatggcagcagcaccagcagggatccgctcccccaaccccagtgccaccatccccccctcagccagtgaccctgggagctgtccctgcgccccaggctccaccaccacctcccaaggctctgtacccaggcgcactggggagacctccaccaatgcctcctatgaatttcgacccgaggtggatgatgatccccccatatgtcgacccacgcctgcttcaggggcggcctccactggacttctatcctcccggagtccacccctctggcctggtgccccgcgaaaggagcgactcgggcggcagctcgtcagagccgttcgatcggcacgccccagcaatgctccgagagaggggcacgcctcccgtcgaccccaaactggcgtgggtgggggacgtgtttacagctacacccgccgagccaagaccattgacttctccgctgaggcaggccgcagatgaagacgacaaaggtatgagaagtgagacacctcccgtgcctccgccgcccccatatctggcctcctaccccgggttccccgaaaacggcgcacccgggcctccaattagccggttcccactcgaagagccaggtcctcggccccttccctggccaccaggtagtgacgaggtagctaagattcagacgcccccccctaagaaagaaccccctaaagaggaaactgcccagctgactggccccgaagccggtcggaaacctgctaggggtgttgggtcaggcggccaaggaccaccacccccgcggcgtgaaagcaggaccgagacacgctgggggcctagaccgggcagcagccgacgcggtatccccccggaagaacctggggcaccacctcggcgggctgggccaatcaagaagccccccccaccaacaaaagttgaggagctgcccccaaaacctttagaacagggagatgagacacccaaaccacccaagcccgacccgcttaagattacaaaagggaagctcggtgggccaaaagaaacaccaccaaatggcaatttgagccctgccccgcggctgcgccgggactactcctacgagagggtcggccctaccagctgtcgtgggcgcggccgaggcgagtatttcgcgcgtggacggggtttccggggaacctatgggggccgcggccggggcgctgccgggaacagtgccgtgacagagtcttttgaagagatgatgggcgtcgaggtcgggcagggcgatcagacgactctactcctgccagaagcagcactgccggcccgccatggagccagggtgcagtctatgaggaagagcccttctggcgctgggtcaggtgctcaaaagcaagctgcaagacctatgcgcgtcatctggctactgcaaacaaggagacttccccacccaaggcgcgagcactcccccagatctcgatctcccaccactcgatcacccacgtttcctgctcccgctagattcactcccggcgtgggggagagctcacttccagagggcatctcccccggaccccgacgtcgcgaaccacctcaggtatgccccgggtggagtccgccagccaaatcactggcccctaaaaagccaccaacagggcctctgcccccttccaaagagcccctgaaggagaagctcattcccggaccactctctcccgtagcaaggggggggtccaacggagggagcaacgtgggaatggaggacggcgaacgcccgcgacggagacggcacggccgagcgcaacaacaggataaaccgcctagattccgacgcctgaaacaggagcgcgaaaacgcagccaggggctctgagggcaaaccgtccttgaccctgcctgctagcgctccaggcccagaggaagccctgactaccgtcaccgtcgcgcctgccccccggagagcagcggccaagtccccagatctgtccaatcagaattcagatcaggccaacgaggagtgggagaccgctagcgagagtagcgactttacatccgagagaaggggggataaggaggcccccccacccgtgctactgacaccaaaagctgtgggcacccccggcggcggcggggggggagccgtgcccggcatctccgctatgtctcgcggagacttgtcccagcgcgccaaagatttatctaaacgctccttttccagtcagaggcctggcatggagcgccagaaccgccggcctggtccaggcggaaaagccgggtcttccgggagctccagcggggggggcggcgggggtccgggcggcagaaccggcccggggagaggcgataagcggtcctggccatctcctaaaaacagaagccgtccaccagaggaacgcccacccggtttgcccttacccccccccccaccctcttcctctgccgtgttcagattggatcaggttatccactccaatcctgccggcatccagcaggccctcgctcagctgtcctctcgccaggggagtgttactgcacctgggggacatccccgccacaagccagggctccctcaagctccacaaggcccttctccccggcctcccacccgctacgagccccagcgagttaatagcggtctgagttcagacccccattttgaagaacctggccccatggtcaggggggtggggggtacacctagagatagcgccggggtatcacccttcccgcctaaaagaagggaacgtccccctcggaaaccagagctgctacaggaagaatctctgcctcctccacacagcagtgggtttttgggttctaagccagagggaccaggcccccaagcagaatctagagacacaggaacggaagcattgaccccccatatctggaacaggttacacacagctaccagccgaaaatcgtacagaccaagctctatggaaccatggatggagccactaagccctttcgaggatgtcgctggcacagagatgtcacagtcagattctggagtggacctctccggcgatagtcaagtatcatcaggaccctgttctcagcgatcctcacctgacggcgggctcaaaggtgcagctgaaggcccgcccaagcggcctggagggtcaagcccactcaatgccgtgccctgcgagggacccccagggagcgaaccccccagacgccctcctcctgcgcctcacgacggagacaggaaggaactgcctagagagcagccacttcctccaggacccattgggacggaaagaagccaaaggacagatcggggcaccgaaccgggacctattcggccgtctcacagacccggcccccctgtccagttcggtacctcagataaagactcagacctcagattggtggtgggagactccttgaaggcagagaaagagttgactgcatcagtgacggaagcaatccccgtgtccagagactgggaattgctcccgtccgctgcggcaagtgctgaacctcagtccaaaaatctcgattcagggcactgcgtgcccgaacccagcagctccgggcagagactgtatccagaagtgttttacgggtcggccgggccaagcagctctcagatctctggaggccacggtctatccatcacttctaagcaatggcgccgccctggcacaccttccctccatccttaccgtagccagccactgtatctgccaccagggcccgcccctcccagtgctctgctttcaggtgtggcccttaaagggcagtttctggatttctcaacaatgcaggctacagagttaggaaagctgccggccggtggggttctttatccaccacctagttttctgtattcccccgcgttctgcccatcaccgctgccagatacttccctcctgcaggtacggcaagaccttccctcacccagcgacttctacagcactcccttgcagcccggtggccagtcaggattcttgccatcaggggcccctgcccagcaaatgctgctgcctatggttgactcccagttgcctgtggttaacttcggcagtctgcccccggcccctccacccgccccgccccctctgagcttgctgccggtcggcccagcactgcagcccccctctttggcagtacgccctcctcccgccccagctacgagagttctgccatcaccggcaagaccatttcctgcctccctgggtagggcagaattacaccctgtcgagctgaagccgttccaggattatcagaagctgtcatctaatctcggaggacccggctccagcaggactccccccacaggacggtcatttagtgggttgaattcccgattgaaagcaaccccttccacttattccggggtgttccgcacacagagagttgatctctatcagcaggctagcccaccagatgcgctcagatggatccccaaaccatgggaaagaacaggtccccccccacgcgaggggccatcccgtagagcagaggagccagggagtcggggagataaggaaccaggcttaccacctcccagatag

SEQ ID NO: 130046 - DNA, 1650 bp, synthetic construct
  misc_feature 1..1650: note = Description of Artificial Sequence: Synthetic coding sequence
  source 1..1650: mol_type = other DNA
atgtctgatcggtcaggccctaccgcaaaagggaaggacggcaaaaaatacagctcgttaaaccttttcgacacatacaaaggaaaaagtctcgagattcagaagccagccgtggctccgagacacggccttcagtcactgggaaaggtagctatcgctcggaggatgcccccacccgcaaatctgccatcgttaaaggcagagaataaggggaacgacccgaacgtctcactagtgccaaaggacggcaccggttgggcctccaagcaagaacagtccgacccaaaatcatcagatgcatctaccgcccaaccccccgagtcccaacctctgcctgcctctcagacccccgccagtaaccagccaaagcgccccccagcagcccctgagaacactccactggtgccaagtggggtgaagagctgggcccaggcttctgtaacccacggtgcgcacggcgatgggggcagggcaagctctttactcagtagattctcacgggaagaattccctacgctccaagccgcaggagaccaggataaagccgccaaggagagggagagcgcagaacaatccagtggacctgggccaagcttacggccacagaactcaactacgtggcgcgatggcggcgggcgtggccccgatgagctagaaggtccagacagcaagctgcaccacggacatgatccgaggggcggtcttcaaccctcagggccgccacagtttcccccataccgaggcatgatgccaccttttatgtaccccccctacctgccatttcccccgccatatgggccccaggggccctatcgctaccctacccctgatgggccgagcaggtttccaagagtggcgggccctagagggtctggcccccctatgcggcttgtggaaccagttggacgcccatccatcctgaaggaggacaacctgaaggagttcgaccagcttgaccaggagaatgatgacggctgggcaggagctcatgaagaagtggattataccgagaaacttaagttctcagacgaggaggatgggagggattccgacgaggagggtgccgaaggccatagggattctcagtctgctagcggcgaagagagacctcctgaagccgacgggaagaagggtaacagtcctaacagtgaacctccaaccccaaagactgcatgggccgagacatctcgcccgccagaaaccgagcctggaccaccggctcccaaacctccccttccaccaccccatagggggcccgctggcaactgggggccgcccggagactaccctgacaggggggggccgccttgtaaacccccggcccccgaagatgaagacgaagcatggagacagcggcgaaagcagtcctcttctgagatttccttggccgtagaacgcgctagacgaagacgtgaagaagaagaacggcgcatgcaggaggagagacgggccgcttgtgctgaaaagttgaagagactggatgaaaaatttggcgctcctgacaagagactgaaggccgaacccgctgcacctcctgccgctcccagtacacccgcgccacccccggccgcctctgaggtgcctctcatggaggactccaggggacagcagcgcgatccaccccgaggcttagaggcccctcatccctag

SEQ ID NO: 130047 - DNA, 6417 bp, synthetic construct
  misc_feature 1..6417: note = Description of Artificial Sequence: Synthetic coding sequence
  source 1..6417: mol_type = other DNA
atgagcgacaggagtggaccaacggcaaagggcaaggacgggaaaaagtattcgtcactgaaccttttcgacacctataagggcaagtctctggagattcagaagcccgcggtcgctccaagacatggcctacagtctcttggaaaggttgcaattgccaggcggatgcctccaccagctaatttaccctctttgaaggccgagaataaagggaatgacccgaatgtctcacttgtgcccaaggacggcacaggctgggcctccaagcaagaacagtctgatccaaagtctagtgacgccagcaccgcgcagccccctgagagccagcctctcccagctagccagactcctgcatctaatcaacctaaaaggccccctgcagcccccgagaacaccccactggtgccatcaggtgtgaaatcttgggcacaggcatccgtaacacacggggctcacggcgatggaggccgggcctcgtctctactctcccggttctcacgagaggagtttccaacgttgcaggctgccggcgatcaggacaaggccgccaaggaaagagaaagcgccgaacaatccagcggccctggccccagtctacgaccccaaaacagcacgacttggcgagatggcgggggacggggaccagacgagctggaggggcccgattctaaactccaccatgggcatgatccacggggcggcctgcagccaagtggaccacctcagttcccaccttacaggggaatgatgccaccttttatgtatccaccatatttgccattcccacccccctacggtcctcagggcccctatcgctaccccactccagacggacccagcaggttcccaagagtggcaggcccccgcggtagtggtccacctatgaggctggtggaaccagtgggccgtcctagtatccttaaagaagataatctcaaggagtttgaccaactcgaccaggagaacgacgacgggtgggccggtgcccatgaagaagttgactacacagagaagctaaagttttctgacgaagaggatggtagagactctgatgaggagggagctgagggccatagagactcacagtctgcctccggtgaggaacgccctccggaagctgatggaaagaaaggcaacagccctaattcagagccacccacacctaagaccgcttgggcagagacctccagaccacctgaaactgagcccggacctcctgctccaaaaccaccacttcctccaccgggagattatccagacaggggtggtcccccatgcaagcctccagcccccgaagatgaagatgaggcatggcggcaacgcagaaagcagagctcctcagaaatttctttagctgtagagcgtgcgcgacggagaagggaagaggaggagagaagaatgcaggaggagaggagagcggcgtgcgctgagaagctaaaacgcctggatgaaaagttcggcgccccagacaagagattgaaggccgaaccggccgccccaccggccgctccctcaactcccgcgcctccgccagccgtcccgaaggagttgcctgccccgcccgccccgccccccgcatccgctcctactccagagaaggagcccgaggaaccagctcaggctcctcccgcccagtcaaccccaactcccggggtcgccgcggcgccgactctcgtgtccgggggcggaagtactagctcaacctcatcgggaagttttgaggcgtctcccgtggaaccccagttgccttctaaagagggacccgaaccccctgaggaggtgccacctcccaccaccccacccgtgccgaaggtggaacccaagggggatggcatcggcccgacgaggcagcctccctctcagggactgggctatccaaagtaccagaagtcccttccccctcggttccagagacagcaacaagaacaacttctgaaacagcagcagcagcaccaatggcaacagcaccagcaagggtcagccccacctacgcccgttcccccaagcccccctcagcccgtgacactgggcgccgttcccgctccccaagcccccccgccgcccccaaaagctctataccccggcgccctcgggcggcctccccccatgccgccaatgaacttcgacccgcgatggatgatgattcctccgtatgtagacccccggctcttgcagggcaggccaccccttgatttttatccaccaggggtgcatccctcagggcttgtaccacgcgagaggtcagactcaggggggtcgagcagcgaacccttcgataggcacgctccagcaatgctgcgagaaaggggcacacctcctgtggatcccaaattagcttgggtaggcgacgtgttcactgcaacccctgctgagcctcgtccattgacatcgcctctgaggcaggccgcggacgaggatgacaaaggcatgcggtctgaaacccccccagttccgccaccgcctccgtatctggcttcctacccaggctttcctgaaaacggagcaccagggcccccaatctctcgattcccactggaggaaccaggtcccagacccctgccttggccgccaggttccgacgaggttgctaaaatccagacccctcctccaaagaaagaaccaccgaaagaagagactgcgcagctcaccggccctgaggcaggccggaagccagctagaggagtgggtagcggcggccaaggacccccaccaccgcggagggagagccgcactgagacacggtgggggcccaggccaggaagctcaagaaggggtatcccaccagaggagcctggagcacccccacgccgcgctggaccgatcaagaagcccccgcctcccaccaaagtggaggagcttcctccgaaaccgcttgaacagggcgacgaaacacccaaaccgccaaagccagatccactgaagataacaaaagggaaactcgggggtcccaaggagacgcctcccaacgggaacttgtctcccgctccacggctccgtcgcgactatagttacgaaagagtgggccctacttcttgtcgtggaagaggcagaggtgagtacttcgccagaggccggggattccgcggcacatatggaggacgcggaaggggcgccgcgggcaacagtgccgttacggagtctttcgaggaaatgatgggcgtcgaagtcggacagggcgatcagacaacacttctgctgccagaagccgcgcttccagctcgtcacggggctcgcgtgcagtccatgcgcaaatctccgagtggcgccgggtcaggagctcagaaacaggctgccaggcccatgagagtgatatggctgcttcagacacgccgcttaccccaccctcgccgcgaacatagtcccagaagtcgatctccaaccacaagaagcccaactttcccagctccagctcggttcactcccggagtgggagagtcttctttgccggaaggaatctccccaggtcccagaaggagagagccccctcaagtatgccccggctggagccctccagcaaagagcctcgccccgaaaaaaccacccactggccctctacccccttccaaggaaccccttaaagagaagcttatcccaggtccgctgtcaccagtagcaagggggggctcaaacggcgggtccaacgtgggaatggaggatggtgagagacctaggagaaggcgtcatggtagagctcagcagcaggataagccaccgagattccggcggcttaagcaggaaagagagaatgctgctcgtgggtctgaaggaaaaccttcactgaccctgcctgcctcagcgccgggccccgaggaggctttgaccacagtcactgttgcaccggcacctaggagagctgcagcgaaatcccctgacctcagcaatcagaatagtgaccaggccaacgaggagtgggaaacagcctcagagtcatcagactttacttcagaacgtaggggggataaggaagcaccaccccctgtgctcctgacaccaaaagccgtggggactccggggggtggcggcggaggagcggtacccggaatctctgccatgtctcgcggcgatctgagccagcgggcaaaggacttgtcaaagaggtctttctcgtctcagcgtccgggcatggaaagacagaatcggcgccccggaccaggcggcaaagctggcagctcagggagctctagtggcggaggcggagggggccctggaggtcggaccgggccgggccgcggagataagaggtcttggcctagtcctaagaacaggagtcggccaccggaagaacgacctcctggcctccccctgccaccaccacctccgtctagctccgcggtgttccggcttgaccaagtgatccatagcaatcccgccgggatccagcaggcgctggcccaattgtcgtcccgccaggggtcagtgaccgctcctggcggacatcctcggcacaaacccggtccacctcaggctccgcagggtccctctccacgacccccgactaggtacgagccccagcgggtgaactccggacttagttctgatcctcattttgaggaacctggccccatggttcgcggggttgggggaacaccacgcgatagcgcaggcgtctctccgtttccccccaagcgacgtgaaaggccaccgcgcaaacccgaactgcttcaagaagagtcactgccgccgccgcattcctctggtttcctagggtcaaaacccgagggtcctggtccacaggctgaatctagggacactgggaccgaagcgctgactccacatatttggaaccggctccataccgccacatcgcggaaatcctaccggcccagtagcatggagccctggatggaacctctttcacctttcgaagacgtggctgggaccgagatgtcccaaagtgactccggagtggatctcagcggagacagccaggtaagttcagggccttgtagtcagaggtcttcaccagatggcggtctgaaaggggccgcagaaggcccacctaaacgccctggagggtcttcgcctttgaacgctgtgccctgcgaaggcccaccaggaagcgaacccccccgaaggccacctcctgccccacatgacggtgatagaaaggaactcccaagggaacagccactgccgcccgggccgatcggaaccgagagaagccagcacacagaccggggaactgagccaggcccgattcgacccagccatcgcccaggtccacctgtgcagtttggtacgagcgataaggactcggatctcagactcgttgtcggcgacagtctcaaagccgaaaaagaactcacagctagtgtaaccgaggctattcccgtgtcgagggattgggaacttttaccgtctgccgctgcctcagcagagccccagagcaagaacctggactccggacactgcgtgccagaacccagcagctcaggtcagcgactgtaccctgaagtgttttacgggagtgccgggcccagttcgtctcaaataagtggcggccatggcctgtcagtcacgtcgaaacaatggcggcgtcctggcacaccgagtttacatccttatcgctctcagcctttatatttgccccctgggcctgcaccccccagtgcactgctgagcggggtcgctcttaagggtcaatttctcgactttagtactatgcaggcaaccgaactggggaagctgccggctggtggagtactctaccctcctcctagtttcttgtactcccctgctttctgcccctcacctctgcccgacacctctctcttgcaggtacgccaggacctgccctcgccttcggacttctactcaacccccctgcagccaggcggccagtctggattccttccaagtggcgctccagctcaacagatgttattgcccatggtggactcccagttgcctgttgtcaatttcggtagtctgccgcccgcccctcccccagctcctccctctctgtccttgcttccggtaggtcccgcacttcaaccaccatctcttgcggtgcgccccccccctgctccagctacacgtgtgctgccttcacccgctcgcccctttcccgcatccctaggacgcgccgaactgcatcctgtggaacttaagccattccaggattaccagaaattaagctcaaatttggggggtcctggaagctccagaacacccccaaccggtcgatcattctctggccttaattctcgccttaaggccaccccctcaacgtatagtggggtgtttaggacccagagagttgacttataccagcaggcgtcgcctccagatgcattacgctggattccaaagccctgggaacgtacaggccctcctccccgggagggtccctcacggcgggctgaagagcctggttcaagaggcgataaggagcctggacttccaccgccacgctag

SEQ ID NO: 130048 - DNA, 6450 bp, synthetic construct
  misc_feature 1..6450: note = Description of Artificial Sequence: Synthetic coding sequence
  source 1..6450: mol_type = other DNA
atgtccgatagaagcgggccgaccgccaaagggaaggatgggaagaaatacagcagcctcaacctctttgatacctataaagggaagagtctggaaatacaaaagcctgccgtcgccccccgccacgggcttcagagccttggcaaagtggcaatcgcacggaggatgcctcccccagccaatttaccaagtctgaaagcggagaacaagggaaacgaccccaatgtgtcattggtgcccaaggatggcacaggatgggcctcaaaacaggaacagagtgacccgaagagctcggatgcttctactgcccagccccccgaatcccagccactcccggccagccagacacccgcctcaaatcaacctaagcgcccccccgccgcccctgaaaataccccgttagtacctagcggggttaagtcatgggctcaagctagcgtgacacacggggcacacggagatggagggcgagcaagcagtttgctgagccggttttctcgagaggagttcccaaccctgcaggcagcgggggaccaggataaagctgccaaggagagggagtcagcagagcagtcatccgggcccggtcccagccttaggccacagaactcaaccacatggcgagatggcggagggcgagggcccgacgagctagaagggcccgatagtaagcttcatcatggacacgatcctcgcggcggcttacagcctagcggccctccacaatttccaccttatagaggcatgatgcccccatttatgtatccaccttatcttcccttcccacctccttacgggccccaaggtccctatagataccccacgccggacgggccatctcgctttccccgggtagccggtcctcgaggtagcggcccacctatgagacttgtggaacctgtcggccggccaagcattctgaaggaggacaatctgaaggagtttgaccagctggatcaggagaatgatgatggttgggccggcgcccacgaagaggtggattacacggagaagctgaagttcagcgacgaagaggatggccgtgactcagatgaggagggggccgagggacatagagactcccagagcgcatcaggagaggagagaccccctgaagccgacggcaaaaagggcaattctccaaacagcgaaccccccacgccaaaaactgcctgggccgaaacatcacgaccccccgagactgaacccggcccaccggctccgaagccgcctctgccacccccccacagaggtccagccgggaattggggcccccccggcgattacccagataggggcggtcctccctgtaagccccctgctcctgaggacgaggatgaggcctggcgccagaggcggaaacagtcctcctccgaaattagtctcgctgtggagagggcccgacgacgccgggaggaggaggagaggaggatgcaggaagagcggagggccgcctgtgcagagaagctcaaacgccttgacgagaaattcggagcaccagataagaggctgaaagccgaacccgctgctccccccgccgctccctcaactcctgctcctccccctgccgtgcccaaggagcttccagccccccccgcacccccaccggcatctgcccccacccctgagaaggaacctgaggagcccgcccaggctcctcccgcccagagcacacctacccccggcgttgccgcagcccctacgctggtctcaggcggcggatcaaccagttccacatccagtggttcatttgaggcctcccccgtggagccccaactgcccagcaaggaagggcccgaacccccagaggaggtaccgccacctaccacccccccggtgcccaaggtggaacctaagggggatggaattgggcccacacgtcagcctccttcacaaggcctgggctatcccaagtatcagaagtctctccctcctagatttcagcgacagcagcaagagcagctgctcaagcagcaacagcagcatcagtggcagcagcatcagcagggaagcgctccccctacaccggtccctccttctccaccccagcctgtgacactcggcgctgttccagccccacaggccccaccccccccccccaaggccttgtaccccggggctctgggcagacctccgcccatgccacccatgaattttgatccaagatggatgatgatccccccctatgtggacccccggctgctccaagggagaccgccactggatttctatcccccgggtgttcacccctcaggtctggttcctagggagcgctccgattctggcggttcaagctctgagccattcgacagacacgcaccagcgatgcttcgagaacgtggcactccccccgtagatcctaagttggcatgggtgggggacgtctttacggctacgcctgccgaaccgaggcccttaacatccccgctgcgccaagctgccgatgaggacgataagggaatgcggagcgagacccctcccgtgccgccacctcccccttatctcgcttcatacccaggctttcccgagaatggcgcccccggaccaccaataagccggttccctcttgaggagccagggccacgaccactgccttggccacccgggagtgacgaggtcgcaaaaattcagacaccacctcccaaaaaggagccaccaaaggaagaaaccgcccaactgacaggacccgaagccggtcgaaaaccagcacgcggcgtcggcagtggcggacagggccctccaccgcctagacgcgaatccagaaccgagactaggtggggtccgcgcccaggcagctctagacgagggatccctcctgaggaacccggagcgcctccccgcagggccggccctattaagaaacccccgccaccaacaaaggtggaggaactgccccctaaacccctagagcagggagacgagacacccaaacctcccaagccggatccattaaaaatcactaagggcaagcttggggggccaaaagaaacacctcctaatggaaacttatcacccgcgccaagactgcgaagggactactcctacgaaagagttgggcccacctcgtgccggggcaggggacgaggggagtacttcgctcgcggcaggggatttcgggggacctatggcggaagaggtagaggggcagcgggaaattcggcggtcaccgagtcctttgaggagatgatgggggtagaggtcggacagggagaccagactacgcttttgttgccagaggctgcccttcccgcgcgccatggggcacgcgtgcaatccatgcgaaagtctccttcaggcgccggcagcggagcacagaaacaagccgcaagacctatgcgggtgatttggcttctgcaaacacgtaggctgccacacccgaggcgggagcactcccctcgcagcaggtcacctaccaccaggtctccgacattccccgcccccgctagatttaccccgggcgtcggtgaaagctctcttcccgaaggtatttcacctgggcccaggaggagagaacctcctcaggtctgtcccggatggtctccgcccgctaaaagcctcgctccaaaaaagccccccacaggccccttacccccatccaaagagccgttaaaagagaaattaattccaggccctttgtcacccgtagctaggggaggaagtaacgggggcagcaatgtcggcatggaagatggagaacggcccaggcgtaggcggcatggccgggcgcagcagcaggacaaacctccgcgcttccgcagactgaaacaggaacgggaaaacgcagccagaggatccgagggcaagccctccttaacacttcctgccagcgcgccaggaccggaagaagctctaacaaccgtgactgtagctccagccccacgcagagccgctgccaagagccctgatctatctaaccaaaatagcgatcaagccaatgaagagtgggagaccgcctccgagtcttcagacttcacaagtgagcgaaggggagacaaggaggcgccaccgccggtgcttttgactccgaaggccgtaggcacccctggaggaggaggcggtggagccgtgcctggaattagcgcaatgtcgcgcggcgacctcagtcagcgcgcaaaagaccttagcaagaggagtttcagttctcaacgccctgggatggagagacagaaccggcgccccggcccaggcgggaaggctggcagcagcggctctagctcaggcggcggcggcggagggccaggaggaagaaccgggcctggaagaggagataagaggtcatggccgtcccccaagaaccgctctcgccccccggaagagcgaccccctggtctccctcttccgccacccccaccaagctcttcagctgtctttcgcctcgatcaggtgatccactcaaacccagctgggatacagcaggcattggcccagctaagcagcagacagggttccgtgactgctcctggaggacatcccagacataagccgggccctccacaggcaccccagggaccctcgcctcggccccctacccgttatgagcctcagagagtaaattccggactcagcagtgatccacactttgaggagcctggtcctatggtccgtggagtggggggtaccccccgagacagcgctggagtgtcaccctttcccccaaagcgtagagagagaccccctcggaagccagagttgctgcaagaagaaagtttgccccctccccattcatctggtttcttaggatcaaagcctgagggccccgggccccaagctgaaagtcgggacacagggactgaggctttgacaccccatatttggaaccgtcttcacacggccactagtcggaagagctatagaccaagctcaatggagccctggatggagcctttgagcccgtttgaagacgtggccgggacggaaatgtcccagtccgattctggcgtggacctcagtggggatagccaagtatcatccgggccatgtagtcagcggtcttctcccgatggaggtctcaagggggcagccgagggtcctcctaaaagaccagggggctctagtccgctgaatgctgttccatgcgagggacctccagggtcggaaccaccacgtcgccctccaccagccccccacgacggagatcggaaggaattgccgcgagaacagcctctccctcctggccctatcggcaccgagagatctcagcatactgatcgaggtacggaacccggacctatccggccctctcacagacccggacccccggtgcagttcggcacatccgataaagactccgacctgaggctcgtcgtcggagattccttaaaggccgaaaaagaactgacggcgtcagtgactgaagcaatccctgtgtcacgtgactgggaactccttccttcggctgccgctagcgccgagccgcaaagcaaaaacttggactctggtcactgcgtgccagaaccctccagcagtggccagcggctctacccagaggtgttttatggatctgctggaccatcttctagccagataagtgggggccatggattgtccgtgacttctaagcagtggcgccggccagggactcctagcttacacccataccggtcgcagcccctttacctgcctcccggccctgccccaccgtcggccctgctctcaggagttgccctgaagggtcaattcttggacttctccacaatgcaggcaaccgagctaggaaaactgccagcaggaggggtgctgtacccccctcccagctttttatactcaccagccttctgccccagccctctgcccgatactagcctgctccaggtccggcaggacctgccctccccctccgacttctactcaacaccacttcagcccggaggacagtctggattcctcccatcaggtgcacctgcacaacagatgctgctccctatggtcgattctcaactgcctgtggtcaacttcggctctctgccaccggctcctcctcccgcgccgccctccctaagccttctacctgtcggccccgcactccagccaccgtctctcgccgtgcggccgccacctgcccctgctactcgtgtgctgccatcaccagcacgcccttttcctgcgtcgctgggcagggccgagctgcatcctgtggagctgaaaccattccaagactatcagaagttatcgagcaatttgggcgggccggggagttctcgtacgccacctacagggagatccttttcgggtttgaactccagactgaaagccacaccttccacctactcaggagtgttccggacgcagcgggttgacttgtatcagcaggcatcaccaccagatgctctgcgttggatcccaaaaccatgggagagaaccggcccacctccccgggaaggcccctccaggcgggctgaggagcctgggtctcgtggcgacaaggagccagggctgccccctccccgttag

SEQ ID NO: 130049 - DNA, 1650 bp, synthetic construct
  misc_feature 1..1650: note = Description of Artificial Sequence: Synthetic coding sequence
  source 1..1650: mol_type = other DNA
atgagcgataggagcggaccaactgctaagggcaaagacgggaagaagtactcatccctcaacctgtttgacacttataaaggaaagtcactggagattcagaagcctgcagtagcgccccggcacggactgcaatccctgggaaaagttgcaatcgccaggcgcatgccaccacctgccaacctgccatccctgaaggcagagaacaaggggaacgacccaaacgtctccctggtgccaaaggatggcactggctgggctagcaaacaagagcagtcagaccctaagagctcagacgcttctactgcacagccacccgaatcgcaacccctgccagcctcacaaacacctgcttcaaaccagcctaaaagaccccccgcagcaccagagaacaccccactggttccatccggagtgaagtcatgggcacaggcatctgtcacccacggagcccatggcgacggcgggcgtgcgtccagtctgctgagtcgattttccagagaagagtttcctacacttcaggctgccggcgatcaagataaggccgcaaaggagcgcgagtcggcagagcaatcgagtggtcctggtcctagtctaaggccacagaacagcacgacttggagggatggaggcggtagaggccccgatgaactcgagggacctgattccaagctccaccacggccacgaccctaggggtggattacaaccatctggccctccccagtttccaccatacaggggcatgatgccgccattcatgtaccccccctatctcccgttccctcctccttacggcccccagggaccatataggtatcccacacccgatggccccagcagattccctcgtgtcgcgggccctcggggctcgggacctccaatgaggttggtggagcccgtcgggagaccctctatcctgaaggaggacaacctgaaagagttcgatcagcttgaccaggaaaacgacgacggctgggccggcgcacatgaagaagtggactacaccgagaaacttaagtttagcgacgaggaggacgggcgagactctgatgaagaaggggccgaggggcacagggacagccagtctgcctctggcgaagaaagaccaccagaggcagatggaaaaaaggggaatagccctaattcagagcctcctaccccaaagaccgcttgggctgagactagtaggccccctgagacggagccaggaccgcctgcccccaaaccaccactgccaccacctcatagaggacctgccgggaattggggtccccctggtgattatcctgaccgcggaggaccaccatgtaagccaccggcaccagaggacgaggatgaagcctggcgccagcgaagaaagcagtctagtagcgaaatctctttggccgttgaacgcgctaggcgcagacgggaggaagaggagagacggatgcaggaagaacggcgggccgcctgtgcagagaagcttaagaggctagacgagaaatttggcgcacccgataaaaggctgaaagccgagcccgccgctcccccagccgctcccagtacacctgcccctccacccgcagctagcgaggtgcctttgatggaggacagtagaggtcaacagagggaccctccacgtggtttggaggcgccacacccctag

SEQ ID NO: 130050 - DNA, 1650 bp, synthetic construct
  misc_feature 1..1650: note = Description of Artificial Sequence: Synthetic coding sequence
  source 1..1650: mol_type = other DNA
atgtccgacagatcgggtccaacggcgaagggaaaagatggcaaaaagtacagttcactgaacctgttcgatacctataaagggaagagccttgaaatccaaaagcccgccgtagcaccccgtcacggccttcagagccttgggaaggtcgccattgctcgccgcatgccccctcccgccaatctgcctagcctcaaagctgaaaacaagggaaatgacccgaatgtgtcacttgtgccaaaggatggtaccggctgggctagcaaacaggagcagtcagacccaaaaagctccgatgcttccacagcccagccgcccgagagccagcccctgccggcttcacagacacctgcttcaaaccaaccaaagcggccgcctgcggctccagaaaatacccctctggtgccgagtggagtcaaatcttgggcacaggcatccgtgacccacggcgcgcacggagatggcggtagagcgtcatccctgctgagcaggttttctcgtgaagaattcccaacactgcaggcggccggggaccaggataaggcagccaaggagagagaatcggcggagcagtcctcagggcccggaccttccctccgccctcagaacagcaccacttggagagacggtggggggaggggtccagacgagctcgaaggcccagactctaagcttcaccacgggcatgatccacgcgggggcttgcagccctcaggaccaccgcagttcccaccctacagaggtatgatgccccccttcatgtacccaccatatctgcctttccctcctccatatgggcctcaggggccatatcgctatcctaccccggatggcccctctcgcttcccccgagtggccggccccagagggtctgggccacccatgagactggtggagccagtaggtcgccctagcattctgaaagaagacaatctgaaggagttcgaccagctagatcaagagaatgatgatgggtgggctggcgctcacgaagaagttgactacactgaaaagttgaaatttagcgatgaggaagacggacgggactcagatgaagaaggtgccgaaggccaccgcgattctcagagcgcctccggcgaagaacggcctccagaggctgacggaaaaaaaggcaactcccctaactctgagcccccaacccccaagactgcttgggctgagactagcagaccgcccgagaccgagccgggcccacctgcccccaaacctccgctcccacctccccaccgcgggccagccggcaactggggccccccaggagactatcccgatagggggggtccaccatgcaaaccccccgcccccgaggatgaagatgaggcctggagacaaagacggaagcagtcaagctcagaaatcagtctcgcagtggaacgggcccgacggagaagagaggaggaggagaggagaatgcaagaagagcggcgggcagcctgtgctgaaaagctgaaacggctggacgagaagtttggtgctcccgacaagaggctgaaagcggaacccgccgccccacctgccgccccaagtactccggctccgccccctgccgcatccgaggtgccgttgatggaggattcacgcggccaacagcgtgaccctcctcgcggactggaggccccacatccatag

SEQ ID NO: 130051 - DNA, 4149 bp, synthetic construct
  misc_feature 1..4149: note = Description of Artificial Sequence: Synthetic coding sequence
  source 1..4149: mol_type = other DNA
atgctgcgtgagcgcggcactccaccagtcgatcccaagctcgcctgggtcggtgatgtcttcaccgccacacccgctgagccaaggcccttgacctccccactgagacaggctgctgatgaagacgacaaaggaatgcgctctgaaaccccccctgtgccacctccgcccccttatttggcctcttaccccggcttcccagagaatggagcaccaggaccccctatttctagatttcccctggaagagcctggaccacggcctctgccctggccacctggatccgacgaagtcgcaaaaattcagactccacctcctaaaaaagagcccccaaaggaggagaccgcacagttaacaggacctgaagcaggaagaaagcccgctcgcggggtagggtcaggcggccagggcccaccgccgcctcgccgggaaagtcggaccgagacgcgttggggcccccgccccggatcgtcccggcgggggattccccctgaagaaccaggagccccccctcggcgggcaggaccaattaaaaagcctccgccacccacaaaagttgaagagctacctcccaagcctctggaacagggggatgaaactcccaaaccaccaaagcccgatcccctgaagattaccaaaggcaagctgggcgggcccaaggagactccgcccaatggtaatctaagtccagccccacgcctccggcgcgactactcgtatgagagagtcggtcctacatcctgcaggggacgtggaaggggggagtactttgctcgaggccgcggatttcggggcacatacggagggagaggcaggggagccagatcgcgggagtttagaagttatcgcgagttcaggggagatgatggccgcggcgggggcaccggagggccaaaccatcccccagcacccaggggcaggacggcctcagagacgcgctccgagggctcagaatatgaagaaattcccaagcggcggagacaacggggcagtgagacagggagcgagactcacgaatcagacttggctccttccgacaaagaggctcccactcctaaggagggcaccttgacgcaagtgccgctagcaccaccaccccccggggctcctccttctccagctcctgcacggtttaccgctagaggcggcagagtgtttaccccccggggcgtaccttcacgcagggggcggggaggcggacgaccaccacctcaggtttgtccagggtggtccccacccgccaagtcactcgcacccaagaaaccacctacaggacccctccctccctccaaggagccattgaaggagaaactcattcccggacctttgagtcccgtcgcccgcggcgggtccaacggaggtagtaacgtaggaatggaagacggagagagacccagacgacggagacacgggcgagcccagcagcaggacaagcccccccgatttcgccggctcaaacaggagagggagaacgctgccagagggtctgaaggcaaaccctctctaactttacctgccagcgcccccgggccagaggaggctctcaccacggtcactgtggcgcccgctcctaggcgggccgccgccaaatcacctgatttgagcaatcaaaatagtgatcaggccaatgaagagtgggagacagcctcggagagcagtgactttaccagtgaaagacggggcgataaagaggcccctccccccgtgttgctcactcctaaagccgttggcaccccaggcggcggcggcggaggggccgtacccggcatttctgccatgtcaagaggggacctcagccagcgtgcaaaagacctgagcaagcggagtttctcgtcccagagacccggaatggagcggcagaacagacgcccagggcccggcggtaaggctgggtcctccggctcttcaagcggaggaggcggcggagggccaggcgggcggaccggtcctggcagaggagataaaaggtcatggccttccccaaaaaatcggagccggccacccgaagagcggcctccggggcttcccttgccaccgccaccaccctcctccagtgcagtgtttaggttagaccaggtcattcatagcaatcccgccgggatacagcaggcccttgctcagcttagcagtaggcaggggtcagtcactgctcccgggggacatccacgacacaagccgggacctcctcaggctccccaaggcccctcccccagaccacccactaggtacgagccccagagagttaattcaggactgtcctctgacccgcactttgaggagcctgggccaatggtgaggggggtaggtggcaccccacgcgattcagccggggtgtcacctttccctcccaaaaggcgtgagcgacctccacgcaaaccggagctgctgcaagaggagtcactgccgccacctcactctagcggattcctggggtctaagcccgagggacccggcccccaggcggagtcaagagacacgggtactgaggcccttacgccacacatctggaacaggctgcatacagccacctcgcgcaagtcataccgaccaagctccatggagccctggatggagcctctctccccttttgaggacgtcgctggcactgaaatgtcacagagcgattcaggcgtggatttgtccggagatagccaggttagctcaggcccctgctcccagagaagttctcccgatggtgggctaaagggggccgccgaggggccccccaagaggccagggggctccagccccctgaatgccgttccatgcgaaggccccccaggatctgaacctcctcgtcgacccccccctgcaccacacgatggcgatcgcaaggaactgccccgagagcagcccctgcccccaggcccaattggcaccgagaggtcccagcacacggatagaggcactgagcccggacccataagaccaagccaccggccaggacctccagttcagtttggtacatccgacaaagacagcgacttgaggctggtggtgggcgattctttgaaggctgagaaagaactcacggcttctgtgaccgaagcgatccccgtctcacgtgactgggaactgttaccaagtgctgcagcctcagccgagccacagagtaaaaatttggattctggacattgcgttcccgagcccagttcctcaggacagaggctttaccccgaggtcttttacggttccgccggcccttcctctagccagattagcggtggggcaatggactcccagctgcatcccaattccggtggattcaggcccggcacaccgagcttacatccatatcggagccagcccttgtacctgccacctggaccggctcccccttctgcccttctgtcgggtgttgcgttgaagggtcagtttctggacttctccacaatgcaagccacagagttgggcaaactccccgcagggggagtgctgtacccgccaccctcattcctgtacagtccagcattctgtccctccccacttccggacacaagccttctgcaggttagacaggaccttccgagtccaagcgacttctattccacgccactccagccgggcgggcaatctgggttcttgccttctggtgctcccgcccaacagatgttactgccaatggtggacagtcagcttcctgtggtgaactttggctctctgccaccggccccaccgccagcgcctccgtccctgagcttgctcccagtgggcccggctttgcagcctccctctctggctgtgcgccctccaccggctcccgccactcgcgtcctgccctctcctgcgcggcctttcccagcctctctggggagagcagagctgcacccagttgagttgaagccctttcaggactaccaaaaactcagctccaatctagggggtccagggtcttccaggacacctccaactgggaggtccttcagtggcctgaactcccgcctgaaggctactccctcgacttattccggggtgttccgcacccagagagttgatttgtaccagcaggcttctccccccgacgctctgcggtggattcccaagccctgggaacggacggggccccctcccagagaggggcctagtcgtcgggcggaagagcccggtagtaggggtgacaaggagcctgggcttcccccaccccgatag

SEQ ID NO: 130052 - DNA, 6417 bp, synthetic construct
  misc_feature 1..6417: note = Description of Artificial Sequence: Synthetic coding sequence
  source 1..6417: mol_type = other DNA
atgtccgacagatcagggccaaccgctaagggaaaggatgggaaaaaatactcctctctgaacctttttgacacctacaaagggaagtccctggaaattcagaaacctgcagtggccccacgtcatgggctgcaaagcctaggaaaggtcgccatcgcacgcaggatgccacctcccgcgaacctgccttctctcaaagccgagaataaaggcaatgacccaaacgtaagcctggtgccaaaggacggaaccggatgggcctctaagcaggaacagtccgatcccaagtcgagtgatgcttctacagcacagcctctggagtctcaacccctgcccgcatcccagactccagcttctaaccagcccaaaaggccacctgcagcaccagaaaatacacccctggtcccaagtggcgttaagtcttgggcccaagcgtctgtgacccatggggctcacggagacggcggtagggcaagcagtttgctgagtcgattctcccgtgaagaattccctactctgcaggcggctggcgatcaggacaaagccgcaaaagaacgcgaaagtgcagagcagtcaagtggcccaggtcccagtctgcgaccacagaactctacgacctggcgagacggcggtggaaggggccccgatgagctggagggcccagactctaaattacaccatgggcacgacccacggggtggacttcagccctccggcccacctcagtttcccccctatagaggcatgatgccgccctttatgtacccaccatatctgcccttcccccccccctacggaccacagggaccctatagatacccaacccccgacggcccttctcgcttccctagggtcgccggtcctagaggcagcggccctcccatgcggcttgtggaaccggtgggacgccctagcattctgaaagaggacaacctgaaggagttcgatcagctggatcaggagaatgacgatgggtgggcaggcgcacatgaggaggttgattatactgaaaagttgaaattttcggatgaagaggacggacgggactcagacgaagagggggcagagggacaccgagactcacagtccgctagtggagaggagaggccaccagaagccgacggaaaaaaaggcaacagccccaacagcgagcccccaacacccaagaccgcttgggccgagacctcccggccgcccgagaccgaacccggcccacctgctcccaagcccccgctgccccctcctggagattaccccgatcggggcggccccccttgtaagcccccagcacccgaagatgaagatgaagcttggagacaacgccgcaaacagagcagctccgagatttcactggccgtggaacgcgccaggcggcgcagggaggaagaggagcggagaatgcaggaggaacgccgggctgcctgcgcagagaagcttaagcgcctggacgaaaaatttggggccccagacaagaggctgaaagcagaacctgcagctcccccggctgctcctagcacgcctgctcctccacctgcagtgcctaaagagcttccagcccctcccgccccaccacccgccagcgccccaacccccgaaaaagagccagaggaacctgcgcaggctcctccagctcagagcacacccacgcctggagtggccgctgctcctactctggtgagcggaggcggttccacgtctagtacctcctctggctcttttgaagcgagtcccgttgagccccagttgccatctaaagaaggccccgagcccccggaggaggtgcctcctccaaccactcccccagtcccaaaagttgaaccaaagggagatggtatcggcccaacccggcagccaccctcccaaggcctgggataccctaaataccagaaaagcctgcccccgcgttttcagaggcagcagcaggagcagcttctgaaacagcagcaacagcaccagtggcagcaacaccagcaagggtccgctcctcccacccctgtgccaccctcccccccacagcctgtgactctcggagctgtaccagcgcctcaggcaccgccaccgccccccaaggcactctaccccggcgccctgggacggcccccccctatgccccccatgaatttcgaccctcgatggatgatgattcctccctacgttgatcccaggctgctgcaggggcggcccccactggacttctacccccctggagtgcatccaagcgggctggttccacgcgagcgttctgatagcggtggttcctccagcgagcctttcgatcgacacgcgccagctatgctgcgcgagcgggggacacccccagtcgatcctaagctggcctgggtaggtgacgtgttcaccgctactcctgctgagccccgccctctcacttctcctttaaggcaagccgcggacgaagatgacaaaggaatgcgatctgaaaccccccctgtgccccccccacctccatacctagcttcataccccgggttcccagagaatggggcacctgggcctcctatatctcgcttccctctggaagagcccgggcccaggcccctgccatggccgcctggatcggatgaggttgcgaagattcagacacctccccccaagaaggagcctccgaaagaggaaaccgcccagctgaccggcccagaagccggacgcaagcctgctcgcggagtgggcagcggaggccagggacctccccctccccggcgcgaatcacgcacagagacacggtggggtcctaggcccggttcctcgcgtagaggaattcctccggaggagcctggcgctccaccgcggagagctggacccatcaaaaagccacctcccccaacaaaagtcgaagaactgccaccaaaacctctagagcagggggatgagactcccaaacccccgaagcccgacccacttaagattactaaggggaagctgggtgggccaaaagaaactcctcctaatggaaacctcagccccgcccctcgacttagacgggattatagttatgaacgagtgggaccaacttcttgtcgtggcagagggcggggcgagtatttcgctcgagggcgcgggtttagaggaacctacggaggcaggggcagaggcgcagctggcaatagcgctgtcaccgagtcattcgaggaaatgatgggggtcgaggtaggtcagggggaccaaaccaccctactgctgccggaagcagcactccccgctcgccatggagctagggtccaaagcatgcggaagtctcctagcggcgccggctcaggggctcaaaagcaggcagctagaccaatgagagtgatctggctgctgcagacaaggcggttgccgcacccccggcgtgagcattccccacgctcaagaagtccaactaccagatcccccacattccctgccccagccagattcacacccggggttggagagtccagcctgccagagggtataagccccgggcccaggcggcgggaaccaccccaggtttgcccgggttggagccctcccgctaagtcactcgcacccaagaagcctcccactggacctcttccgcctagtaaagagcctctgaaggaaaaattgattccagggcccctgtccccggtggccaggggtggcagcaacggaggcagtaacgtggggatggaggacggtgagcgaccgagacgtaggcggcacggccgcgctcaacaacaagataagcccccaagattccgtaggctcaaacaggagagggagaatgccgcccgcggatcagagggtaaacctagcttgaccttgccagcatccgctcccggtccagaggaggctctgactactgttacagtggctccagcgccgcgaagggctgccgcaaagtctccggatttgtcaaatcaaaacagcgatcaggcaaacgaggagtgggaaaccgcctccgagtcttcagatttcacttccgaacgaaggggtgacaaagaggctccccctcccgtcctgctcacacccaaagccgtgggcacgccgggcggaggcggtgggggcgccgtgcccggaatctccgcaatgagtcggggagacttatcccagagggctaaggacttaagtaagagatctttcagttcacagcgcccgggaatggaacgccaaaataggcgtcctggccctgggggcaaggccggcagttctggaagcagctcaggtgggggaggtggcggtcctggaggcagaaccggtcctggccgcggcgataagaggtcatggccatctcctaagaaccgcagtcgacctcctgaagagcggccacctgggctgccgctcccccctcctcctccttcctcctctgccgtgttccgcctcgatcaggttattcattcaaacccagcagggatacagcaggctctggcccagcttagcagcagacaaggatccgtgaccgctcccggaggccaccccaggcataagccgggcccaccacaggctccccagggcccgtccccccgtcccccgacccggtacgaaccccagcgggtgaactcaggcctatccagtgacccccacttcgaagaaccaggacctatggtgagaggtgtcggggggacgcctagggacagcgccggagtttctccattcccgccaaagaggagggagcgccctcctcgaaaacctgagctcctgcaggaggaaagcttgcccccacctcacagttcagggtttcttgggtccaaaccagagggaccgggtcctcaggccgagtcccgcgacacaggcactgaggccctaacacctcacatatggaatcgactgcacacagctacatcacgcaagagctataggccatcgtccatggagccatggatggagcccttgtctccgttcgaagacgtggcaggaactgaaatgtctcagagtgacagtggcgtcgatctgtctggggacagccaggtcagcagcggcccctgtagtcagagatcttccccagacggtggactgaaaggagccgcagagggacctccgaagagacccgggggctcatcacctctaaatgctgtgccttgtgagggtccccctggtagtgagccaccccggagacccccaccagccccacacgacggggaccgaaaggaactgccaagggagcaaccattgccgcctggccctatcggcacggagaggtcgcagcgcaccgatcgggggacagagccaggaccaataaggccaagccaccggcccgggccacccgtccagttcgggacaagcgataaagacagtgatctcaggctggtcgtgggcgacagtctgaaggctgaaaaggagttgacagcttcggtcacggaggccattccagtttccagagactgggagcttcttccgagcgctgccgcctccgccgaaccccagtcgaagaacctcgactccggacattgcgtgcccgagcccagttcgtctgggcagcggctgtacccagaagtgttctatgggtcagccgggccatccagcagccagatctcgggggggcatggtctctcaatcacgtccaagcagtggcgacggccaggcaccccctccctgcacccatacagatcccagcccctttacctgccgcccgggcccgcaccgcccagcgccctactgtccggagtagctcttaagggccaattcttggacttttctaccatgcaggctacagagctcggcaagctcccagcggggggcgtcttgtacccacctccctctttcctgtattcaccagcattctgcccatctcccctgcctgatacctcccttcttcaggtgaggcaggacctgcccagcccttctgacttttactccactccgctccagccagggggccagagcgggtttctccctagtggagcaccagcgcaacagatgctccttcccatggtggactctcagcttcctgttgtcaatttcggaagcctgccccctgcccctcctccagcccccccacccctcagcttgctgcccgtgggccctgccctgcagcccccttccctggcagtcagaccaccgcctgcccctgctactcgggtgctgccctctccagcaaggccattccctgccagtctggggcgcgctgaactacaccccgtggaattaaagccctttcaggactatcaaaaactttcaagcaacctcgggggccccggaagtagcaggacccctcccactggtcgctctttctctggcttgaactccagactcaaggcaacaccctccacttacagtggagttttccggacccaaagggtcgatttgtaccagcaggcctctccgccagacgcattgcgctggatcccaaagccttgggagcggacaggtcccccaccaagggaagggccctctaggcgggcagaggagccaggaagcagaggggataaggagccaggtctgccccccccaaggtag

SEQ ID NO: 130053 - DNA, 6417 bp, synthetic construct
  misc_feature 1..6417: note = Description of Artificial Sequence: Synthetic coding sequence
  source 1..6417: mol_type = other DNA
atgtctgacaggtctgggccgacagcaaaaggcaaggatggcaaaaagtactccagcctgaacttatttgacacttataaaggaaaatcacttgaaatccaaaagccagccgttgcccccaggcacggactgcagtctctgggcaaggtggccattgcccggagaatgcccccccccgctaatctcccatcgctgaaggcggaaaacaagggaaatgacccgaatgtgtcactcgtgcctaaggacggcactggctgggccagcaagcaggagcagtctgacccaaagtcttccgatgcttccactgcccagccccctgaatcccagcccctgcccgccagccagactccggcgtccaaccagccaaaaaggccacctgcggcccccgaaaacactcctctggtgccctccggtgtgaagtcttgggctcaggcctcagttactcacggggcacacggcgatggggggagggcctcatcccttctaagtaggttttcaagggaagaatttcctaccctgcaggccgctggcgatcaagacaaggctgcaaaagagagggagagtgccgaacagtcctcagggcccggcccgagcctacgacctcagaattccaccacgtggagggatggcggaggacgggggccagacgagctcgaggggcctgacagcaagctgcaccatggtcacgaccctagaggaggactgcagccgtcagggcccccgcaatttcctccatatcggggaatgatgccaccattcatgtatcctccctatttaccgttccccccaccctacgggccgcagggcccgtataggtaccctaccccagatgggccctcgcgcttccccagggtggcggggccacgagggagtggacctcccatgaggctggtggagcctgttggacgaccatccattctgaaagaggacaatctcaaagagtttgaccaacttgaccaggaaaatgacgatggatgggcgggtgctcacgaggaggtcgactacactgagaagctgaagttttccgatgaagaagatggaagggattcagatgaggagggcgccgagggccacagggactctcagtccgcaagtggcgaagaaagaccccccgaggccgacggaaaaaagggaaactcccctaattcagaaccccccactcctaaaacagcctgggcagagacgtcccgccccccagaaaccgagcctgggcctccagcgccaaaaccgcctttgccacctcctggggattacccagacagagggggcccaccttgcaagccgcccgctcccgaggatgaggatgaggcctggcgccaacggcgaaagcagtcttcttcagagatttcactcgcagtagaacgggcacgccgcaggcgggaggaggaggaaagaaggatgcaggaagagcgtcgcgccgcctgcgcagagaaactaaaacgcctcgatgaaaagttcggcgcacctgacaagagactgaaggcggaacctgcagcccctcccgctgccccgagcaccccagcgccacccccagccgtcccaaaagagctccccgcacctcccgctccacctcccgcctcagcaccgactccggagaaggaaccagaggaaccagcacaggcgccacccgcacagtctaccccaactcctggcgtggccgccgcgcctactctggtctctgggggagggtccaccagctctaccagtagcggcagcttcgaggcttcccccgtggaaccccagctcccatccaaagaggggcccgaacccccggaagaggtcccaccaccgaccacaccccccgtgccaaaggtcgaaccaaagggagatggcatcggacccacgagacagcctccatcacagggactgggataccccaagtatcagaagtctctacccccccggtttcagaggcaacagcaagagcagttactgaagcaacaacagcaacatcagtggcagcagcatcagcaagggtcagctcctcccacaccggtgcctccctctccgccccagccagtcactctaggtgctgtgcctgccccccaggccccccccccaccgcccaaggctctttaccctggcgctctagggagacccccgccgatgcctccaatgaattttgatccccgctggatgatgatccccccctatgtggacccacggcttcttcaaggccggcctcctctggacttttaccctccaggggtccatccctctggcctggttccaagagaaagaagcgacagcggtggctcgtcatctgagccgtttgaccgccacgcaccggctatgttgcgcgaacgaggaacgccacccgtagaccctaaactggcatgggtcggagacgtctttaccgcgacgccggccgagccacggccacttacatctcctttaaggcaagctgcggatgaagacgacaagggcatgaggagtgaaacaccaccggttccccctcctcctccctacctggcgagctacccgggatttcctgaaaatggggcacccgggccaccaatttccaggttcccgttggaggagcctgggccccggcctctgccctggcctcctggcagtgacgaggtcgccaaaatccaaacccctccaccgaaaaaagaaccacctaaagaggaaacagcccagttaactggtcccgaggcaggaaggaaacctgcccggggggtggggtccggcgggcaggggccccccccacctagacgcgaatcgagaacagagacccgatgggggcctcgacctggatcatcaaggaggggaatccccccagaggagcctggagcgcctccccggagagctgggcccattaaaaaaccaccgcctccaaccaaggtcgaggagctccctcccaaaccccttgagcagggggatgaaaccccgaaaccccctaagcctgaccctctgaaaataaccaagggaaagttgggtgggccaaaggaaacacctccaaatggaaatctctcgcctgcaccccggctgcgaagggactactcctacgaaagggtgggaccaacgagctgtcgcggtagaggccgaggggagtattttgcacgggggcgcggcttccgggggacctatggcggacggggcaggggcgccgcaggtaactccgccgtcacggaatcttttgaagagatgatgggggtggaggtgggccaaggcgaccagacaacactactcttgcccgaagctgcccttcccgcccggcacggcgcgcgggttcagagcatgcggaagtccccatcaggcgccgggtcaggagcgcagaagcaagctgccaggcctatgcgggttatctggcttctgcaaacaagacggctgccccaccctcgccgggagcactccccaaggtcccgatcccccactacgaggagtcctacattcccagctcctgcccgattcacccccggcgtaggggagagcagcttgcccgaggggatctcacccgggcctcggcgtcgcgagccacctcaggtgtgtcccggatggtctcctccagcaaagtccctggctcccaagaagccaccgaccggccccctgcccccctcaaaggagccgctgaaggagaagctcatacccggtcccctctccccggtcgcccgaggtggcagcaatggcgggtccaacgtcggaatggaggatggggagaggcctagacgcagacgacacggacgggcacagcagcaagataaacctcccagattcagacggcttaaacaggagagggagaacgcagctaggggtagtgaaggcaaaccatctctcaccctcccagcttccgccccaggccccgaagaagcattgacaactgtgacagtggcgcctgccccccggagggctgccgccaagtccccagacttgagtaatcagaattccgaccaggccaacgaggaatgggaaacggccagtgagtcatccgacttcacttctgaacggcgtggagataaggaagcaccgccgcccgttctcttaacgcctaaggccgtcgggacgccagggggcggcggcggcggcgcagttcctggtatttctgcaatgagcaggggggacttgtcacagagagcaaaagatctgtctaagcgttctttctccagccagaggcccggaatggagagacaaaaccgccggcccgggcctgggggcaaggcaggctccagcgggagttccagtggggggggtggagggggacctggtggccgtactggcccaggccgtggggacaaaaggagttggcccagtcccaagaatagatccaggccccccgaggagcgcccaccgggcctaccgctccctccgccacccccatccagcagcgcagtttttaggcttgatcaggtaattcatagtaatcctgcgggcatccagcaggcacttgcgcagttatcttctaggcagggatccgtgactgccccgggaggtcatccccggcataaacctggacccccccaagctccccaaggaccaagccccagaccacccacccgctatgagccacagagggtgaatagcggtctctccagcgacccgcacttcgaagaaccaggcccaatggtacggggggtggggggcacaccacgcgactccgccggggtgtcaccctttccacccaagcgacgggaacgcccacccaggaagccagaactgctccaggaggagtctttaccgcccccacactcaagcgggtttctcggttctaagcctgaagggccagggcctcaggcagagtctcgcgacacaggaactgaagcgctcacaccacatatctggaaccggctgcatacggccacgtctcggaagtcctacagaccgtccagcatggaaccctggatggaaccactttctccttttgaggacgtggctggtacggaaatgtcccagagcgacagtggagttgacttgtctggtgatagccaggtgagcagtggtccatgttcacagcgtagcagtcccgacggcggactgaaaggcgccgcagaggggccccccaaaaggccaggaggatcctcacccctcaatgctgtgccctgtgaaggaccacccgggtcagaaccgccccggaggcccccgcctgcaccacacgacggcgaccgcaaagagttacctagggagcagcccctacctcctgggcccataggtaccgaacgatcccagcacacagatcgggggaccgagccaggccctatccgaccgtctcaccgacccggccctccagtacagttcggtacgagtgacaaggactccgatctgaggttagttgtgggcgactcactgaaggccgagaaggagctcacagccagtgtcaccgaggcaatccctgtctctcgcgattgggagcttttgccctctgcggccgcctctgcagaacctcaatcaaaaaatctcgacagcgggcactgcgtgcccgaaccttctagcagcggacagaggttgtaccccgaggtgttctatggctctgctggtccttccagctcacagatcagcggtggacatggcttgtccgtcacgtccaagcagtggcggcgccctggcactccctcactgcatccctatcgcagccagcccttgtatctgcctcccggacccgccccacctagcgctctcttatctggcgtggctttaaagggtcagttcttggattttagtacaatgcaagcaaccgaactcggcaagttacctgctggtggggtcctttacccgcctccctctttcctgtattctcctgctttctgtccctcgcctctgcccgatacttcattgctgcaggtcaggcaggacctcccttccccctccgatttctattccacacctctgcaacctgggggtcagtccggattccttccttcgggggctccagcccagcaaatgctgttgcctatggtagattctcagctgcctgtcgttaacttcggatccctccctcccgcaccaccacccgcccccccctcactgtccctcctcccagttggtcccgccctgcagcctccttccctggcggtgcgcccgccccccgctcctgctacacgcgtattgccatcacccgccagaccttttccagcctctctcggtcgggccgaactgcatcccgtggaactcaaacctttccaggactaccaaaaattgtcaagcaatctcggcggtcctggttcaagtagaactcctcccaccggaaggagcttctctggactgaactcccgcttaaaggctaccccaagcacctacagcggcgtctttcgtactcagagagtagacttgtaccagcaggcctctcccccagacgccctccggtggattcccaagccctgggagaggactggccccccgcccagagaagggccaagcagacgagcggaggaacctggatcacggggcgataaagagcctggactgcctcctcccaggtag

SEQ ID NO: 130054 - DNA, 6417 bp, synthetic construct
  misc_feature 1..6417: note = Description of Artificial Sequence: Synthetic coding sequence
  source 1..6417: mol_type = other DNA
atgagcgaccggtctggtcctacagcaaagggtaaggacgggaaaaaatactcttctctcaacctgtttgatacatacaagggaaagtcgctagaaatccaaaagccagctgtcgccccaaggcacggtttgcaatcattaggcaaagtggccatcgctagacgtatgccccccccagcaaacttaccatcactcaaggccgagaataaaggaaatgaccctaacgtgtcactggtcccaaaagacggtaccggatgggcctcgaaacaggagcagtcagacccaaagagcagtgatgcctccaccgcacagcctccagagtcccagccgttgccagcaagccagactcccgcgagcaatcagcccaagcgtccaccagctgccccagagaatacccccctggtcccttctggggtgaagtcatgggcacaggcctctgttacacacggcgcccatggggatggtggccgcgcaagctccctgttgtctagattttcccgggaagagttccctaccctgcaggccgctggcgaccaggacaaagccgccaaggaaagagagtccgcagaacagtcctccggtccaggacctagcctgcgaccccagaatagcaccacctggcgggacggaggcgggcggggacctgatgagctggagggccccgattccaagctccatcatgggcatgacccgaggggcggcttgcagcctagcgggccaccccagtttccaccatatagggggatgatgcctcctttcatgtaccccccttaccttcccttcccaccgccgtacggccctcagggcccatatagatacccaactccagacggccctagccggttccctcgggtagcagggccccggggatccgggccccccatgcgactagtggagccggtcgggcgtcccagcatcttgaaagaggataatttgaaagagtttgaccagctcgatcaagaaaatgatgacggctgggctggggctcacgaggaggttgactatactgagaagctaaagttcagcgatgaggaggatggcagagatagcgacgaggaaggagccgagggccatcgggattcacaatctgcatccggagaggaaaggcctcccgaggcagacggaaagaaaggcaatagccccaattctgagccacccaccccaaagaccgcctgggcagagacaagccggccaccggagaccgagcctggacccccagcacccaaaccacctctgccccctccgggggactaccccgacagagggggcccaccctgcaagcctccagcccctgaagatgaagatgaggcctggcgccaacgccgcaagcaatcaagcagcgagattagcctggccgtagaaagggcgcggcggagacgggaagaagaggaaaggagaatgcaagaggagcggagagccgcctgtgccgagaagttaaagaggctggacgaaaagttcggtgctcctgataagcgcttaaaagccgagcctgccgcaccgcccgcagccccatctactcctgctccgcctcccgccgtgcccaaggaattaccggcccctcccgcacccccgcccgcatcggcccctaccccagagacggaacctgaggagcccgcccaagctccgcctgcccagtccacccccacacccggggtggctgcggcgccaacactggtgagtgggggcggcagcacaagttccacatcttcaggttcgtttgaggcctcccctgtcgagccccagctgccttccaaggaagggcctgaaccacctgaagaggtgcctcctcctacaactccccctgtgcccaaagtggaacccaaaggcgatggaattggaccaacacgccagccacctagccagggattagggtatccgaaataccagaagtcgctgcctcctaggtttcagcgacaacaacaggagcagctcctcaaacagcagcagcagcaccagtggcaacaacaccagcagggctcagctcccccaaccccggtgcctccgtcccctccccagcccgttacactaggcgctgtgccagctccgcaggccccaccgcccccccccaaagctttatacccaggagcattggggaggccccctcccatgccgcccatgaattttgatccccggtggatgatgatccctccctacgtcgatccacgactgctgcagggtcgcccaccacttgacttctacccacctggggtgcatccatcaggcttggttcctcgggagagatcagattctggaggatcctcctctgagccatttgatcgccacgcccctgccatgctccgggagagagggacacctcctgtcgatcctaagctggcttgggtgggcgatgtcttcactgccacgccggcagaaccccgcccattgacatcccctttgcgacaggccgcagacgaagacgacaagggcatgagaagcgagacaccccctgtccctcctccccccccttaccttgccagctatcccggcttccccgaaaacggcgccccggggcccccaatctccagatttccactggaggaacccgggccgaggcctcttccttggccacccgggagcgatgaggtcgcgaaaatccagacccctcctcctaagaaagagcccccaaaagaagagaccgcccagctgactggcccagaagccggccgtaaaccagcccggggagtgggctcagggggccaggggcctccgcccccaaggagagaaagtcgcactgaaactaggtggggtccaaggcccggtagctcacgtagagggatcccacctgaggagcccggcgcaccacctcgaagggccgggccaatcaaaaaacctccccccccgacaaaagtggaggagcttccgcccaagccacttgagcagggtgacgagacaccaaagccaccaaagcccgatcctctcaaaatcacaaagggcaaactcgggggccctaaggaaacaccccccaatgggaacctgagtcctgccccaaggctgcgccgcgactactcatatgagagggtgggccccacgtcctgccgcgggcgcgggcgcggggaatattttgctagaggccggggatttagagggacctacggtggtagaggccgcggcgcggcaggcaatagcgctgtgacagagagctttgaagagatgatgggcgttgaggtcggccaaggagatcaaaccacactgcttctgcccgaggctgccttgcctgccaggcacggggctagggttcagtctatgcgaaagtctcccagcggagcagggtccggggcacagaaacaggccgcaaggcccatgagagtcatatggctattgcaaacgagacggctgccccatcctcgaagggagcactcaccccgctccaggagtccaaccacacgtagtccaaccttccccgcccctgcaagattcacgcccggagtgggggagtcgagtctgcccgaaggaatcagccctgggccgaggcgcagggaaccccctcaggtctgcccaggctggtctccgcctgcaaaaagtctggctcctaagaagcctccaactgggcccctccccccgagtaaggagcctctgaaggaaaagctgattcccggaccactctccccagttgccagaggcggaagcaatggcgggagcaacgtgggaatggaggatggcgagcgcccaagacgccggcgccatggcagagcacagcaacaggacaaaccgccgaggttcagacggcttaaacaagaaagggagaacgcggcaagagggtccgagggcaagccctctctgactctgcctgcttcagcccctggacccgaagaggcactaacaacagtgaccgtggctcccgcaccgagacgcgccgcagctaaatctcctgacctgagtaatcagaatagcgatcaagcaaacgaagaatgggaaacagcctctgagtcctcggacttcacttctgagagacgtggtgataaggaggcacctccccccgttctgctaacaccgaaggcagtaggaacccccggaggaggcggaggcggcgccgtccctggaataagcgcgatgtccagaggcgacctgagccaacgggccaaggatctctccaagcggtcatttagctcacagcgcccgggtatggagaggcagaaccgaagaccaggccctggtggcaaggctggtagcagcggcagttcatcaggcggtggcggaggaggccctgggggacgcacagggcccggaaggggggacaagcgatcctggcctagcccgaagaatcgttcccgacctccagaagagagaccccctggtctgccactgccaccacctccgccttctagtagtgcggtgttcagactagaccaggtcatacacagcaacccggccggaattcaacaagctctggcccaactgtctagtaggcagggcagtgtaacagccccaggggggcatccgcgccataagcccggacttccacaggcccctcaaggacctagtccacgaccccctacgaggtacgagccacagagggtgaattctggcctcagctccgatcctcattttgaagagcccggaccgatggttagaggtgtaggcggcacaccccgagattcagccggtgtttctccattcccgcccaagcgccgcgagagaccccctcggaagcccgaacttctgcaggaagagagtctgccacctccacatagctctggatttctgggatcaaaacccgaagggcccggaccacaggctgagagtagagacactggaacggaagctctcacacctcacatatggaatcgtttacacaccgctaccagccgcaagagctatcgtcctagcagtatggagccctggatggaacccttgtcccccttcgaggacgtggcagggacggagatgagccagtccgattctggtgtcgacctgagtggcgacagccaggtgtcttccggcccctgtagtcaacggagctcgcccgacggtggactaaagggagcagcagagggccctccaaagcgtcctggtggtagctcccctttgaacgccgtgccatgcgaaggccctcctgggtcagagcctccacggcggccaccccctgccccgcacgacggcgatcgcaaggaactgccaagggaacagccactgccccccggacctataggcaccgagcggagccaacgaacagatcggggcaccgagccggggccaataaggccatcccatcgaccaggaccacccgtgcaattcggtaccagtgacaaagacagcgatctacgcctcgtcgtgggagacagtctgaaggcagagaaagagctaaccgcctcagtgactgaggccatccccgtgagcagagattgggaactccttccaagcgcagcagcttcggccgagccccagagcaagaatctcgattctggtcactgcgtgccggagccttcttcgtcaggacagaggctttacccagaggttttttacggctccgctggaccatctagttcccagatcagcgggggccacggcctgtcgattactagtaagcagtggcggagacctggtactcccagcctgcacccttaccgaagtcagcccctgtatttacctcctggtcccgcccccccttccgcactgctgtctggcgtcgcactgaagggacaattcctcgatttttcgaccatgcaagcaaccgagctgggaaagctaccagccggcggcgtgctgtacccaccacccagctttttatacagtcctgcattttgtccgagcccactgccagacactagcctcctgcaggttagacaggacctgccatcaccttctgatttctactcaacacctctgcagcccggcggtcaatccgggtttttaccatcaggagcgccagcccagcagatgctgctcccaatggtcgactcccagctgccagtggtgaattttggttccctgcccccggctccacccccagcaccaccaccattgtctcttctgcccgtgggtccggccctccagccaccatcgctggctgtgcgtccacctccagctcccgcaactagggtgctacctagtccggcgagacctttccctgcatcattgggccgcgcggagttgcacccagtggagctcaagccattccaggactaccagaagctgagctctaacctgggggggcccggctcatccaggacgccaccaaccggtcgatcgtttagtggtctcaacagtcggttgaaagctacgccttctacctattccggggtctttagaacacagcgagtggatctctaccagcaggcaagccctccagatgccctgcgctggatccccaaaccctgggagcgaaccggtccgccccctcgtgagggtccctctaggcgggctgaggagccaggaagtcggggagataaggagcccggcctgccaccgcctaggtag

SEQ ID NO: 130055 - DNA, 6417 bp, synthetic construct
  misc_feature 1..6417: note = Description of Artificial Sequence: Synthetic coding sequence
  source 1..6417: mol_type = other DNA
atgagtgatcgcagcgggcccacagcaaagggcaaagacgggaaaaagtactcctcgctgaatttgtttgatacctataagggcaagagccttgagattcagaaacctgctgtggccccccgccacggcttgcagagtttgggcaaagtggcaattgcccgtaggatgccaccccctgccaacttaccatctcttaaggcagaaaataagggtaacgaccccaatgtgagtctcgtgcccaaggatggaacaggctgggcttccaagcaggaacagtccgatcctaagagtagcgacgcgtccaccgcgcagccccccgaatctcagccacttcccgcctcacagactccagcgtcgaaccagcccaaaagacctcccgctgctcccgaaaacactcccctcgtgccctcaggcgtaaaatcatgggcccaggcctctgtcactcacggggcacacggcgacggtggtagagcctccagcttgctgagccgttttagcagggaggagttcccaaccctgcaggcagccggcgatcaggacaaggcggctaaggagagggaaagcgctgaacagtcttctggtccaggcccgagtttacggccacagaattcaacgacctggagagacggaggcggcaggggccctgatgaactggagggacctgatagtaaactccatcatggacatgatcccagaggcggtctccaaccatctgggcccccccagttcccaccttaccggggtatgatgcctcctttcatgtaccctccgtacttgccctttccacctccctatggcccccagggtccataccggtaccccaccccagacggcccttccaggttccctcgggtggccggaccgcgcggatcaggacctcctatgcgactggtggaacctgtgggacgaccaagcattctcaaggaggacaatctcaaggaattcgaccaattagatcaggagaacgatgacggttgggcgggagctcatgaagaggtggactatacggagaaactgaaatttagcgacgaagaggatgggcgggacagcgacgaggagggagctgagggtcatagagatagccagtccgcgtccggggaggagcggcccccagaagctgacggtaagaagggcaattcgcccaatagtgagccacctactcccaagacggcttgggccgagacctccaggccccccgagaccgagcctggcccgccagccccgaaaccccccctgccccctcccggggactatcccgaccggggtggacccccttgcaaaccccccgcccccgaagacgaagatgaggcatggcggcagagacggaaacagagcagctctgagatctctttggccgtggagagagcccgacgccgccgcgaggaagaagaaagacgcatgcaggaggaaagaagggcagcatgcgccgaaaagctgaagagactggatgagaagtttggcgccccagacaaaagattgaaggcagaacccgctgctccaccagccgccccgagcacaccggccccccctcccgccgtgcctaaggagttgcctgccccgcccgctccaccacccgcctccgcccccacaccagagaaagaacctgaagaacccgcccaagccccgcccgcccagtctaccccgacacctggggtggctgccgcacctaccttagtctcagggggcggtagcactagcagcacctcttccggctcatttgaagcaagtcccgtcgagccccaattgcccagcaaagaaggcccagaaccacccgaggaggtgccgcctcccactacgccccctgtgccaaaggtggagcccaagggagacggaattggccctaccagacaaccaccatcacaaggactgggataccccaaatatcaaaaatctcttccgcctagattccaaaggcagcagcaagagcaactcctgaagcagcagcagcagcaccagtggcagcagcaccagcagggaagcgcacctcctacgccagtcccaccatctccacctcagccagtcacactgggggctgtccccgcaccccaggctccaccgccccctcccaaagccctgtaccccggcgcccttggcagacctcccccaatgcctcccatgaatttcgacccccgctggatgatgatcccaccctatgttgatcccaggttgctgcaaggcagacctccgttggacttctacccacccggggtgcacccgtctgggttggtcccccgagagcggtctgattccggcggctcctctagcgagcctttcgataggcatgcccccgccatgctccgtgagagaggcacccccccagtggaccctaaactagcgtgggtcggcgacgtgttcacagccactccggccgaacctcgccctctcacatctcctttacgtcaagccgctgacgaggatgataaagggatgcgttcagagactccacccgtgcccccaccgcccccttatttggcatcataccctggcttcccagaaaatggagccccaggccctcccatatcccgcttcccgcttgaggagccaggacctagacctttaccttggccacccgggtccgatgaggtggccaagattcagacacccccaccgaaaaaagagcccccaaaggaagagactgcacagctcacgggtcctgaggcaggtcggaaaccggcacgtggagtcgggtccggtggccagggcccgccccctccccgcagggagtctcgcaccgaaacaaggtgggggcctagacctggcagctcccgccgagggatccccccggaagagccaggagcccctccacggcgtgcagggccaataaaaaaaccacctcctcccactaaggtcgaggagctcccacccaagccattggagcagggcgacgaaactcctaagccccccaagccagaccctctgaaaattacaaaaggaaagctcggtggtcctaaagagactccgcccaacggaaatctgagcccggcgccaaggctgagacgcgattattcttacgaacgggtgggacctacaagttgccggggaaggggtcgaggcgagtacttcgcacgtggcagaggcttcagaggcacatacggggggagaggacggggcgcggcaggaaactcggccgtgaccgaatccttcgaggaaatgatgggggtcgaggttggacagggagatcaaaccaccctgctgctgccggaggcagccttgcctgcgcgtcatggggcaagggtccagagcatgaggaagtcgccatctggagctggatccggagctcagaagcaggccgccagacctatgcgtgtaatttggctcctgcaaacacgaaggctgccccaccctcggcgcgaacacagcccaaggagtcggtcccctacaacaaggagtcctacctttcctgcccccgctcgattcacccccggggtgggtgaaagctctctgcctgaaggtataagccccggacccagaaggcgtgaacctccgcaggtctgccccggctggtcccctccagctaagtctctggcccccaagaagccccctaccggacccctgccaccatccaaagaaccccttaaagagaaattgatcccgggcccacttagtcctgttgctcgcggcggctccaatgggggctccaacgtaggtatggaggacggcgagagacctcgacgtcggcggcatggtcgtgcacagcagcaggataagcctcccagatttaggaggctgaagcaggagcgtgaaaacgcggcaagggggtccgaaggcaaaccaagcttgactctgccagcctcagcaccaggacccgaggaagccctgaccaccgtgacagtagctccggctccacgcagagcggctgccaagtcaccagaccttagtaaccagaacagcgatcaggcaaacgaggaatgggaaaccgccagtgaatcttcagactttacatctgaacgcagaggcgataaggaagcaccccccccagtattgctaactccaaaggctgtgggcacccccggaggtggggggggaggcgccgttcctggaattagcgcaatgtcccggggcgatctgtcacagcgcgcaaaggacctgtctaagcggtctttttcctcccagcgtcccgggatggagagacagaatcgccgtccaggcccgggcggaaaggccggctcctccggcagttctagtgggggcggcggtggagggcctggtggacgaaccggacccggaaggggtgataaacgcagctggccatctccaaaaaatcggagccggcccccagaagaacgtccgccagggctcccactcccccccccccctcctagcagctccgccgtattcagattggaccaggtgatccactctaaccctgctggcatccagcaggcactggcgcaattgagttccagacagggctcggtcaccgcccccggaggccacccacgccacaagcctggccctcctcaggcacctcaaggccctagtcctcggccacctaccagatacgaaccccaaagggtgaactcaggcctatctagcgatccccacttcgaagagccaggccctatggtacgcggagtaggaggaactccaagggacagtgccggggtttccccatttccacctaaacggcgtgagcgaccgccaagaaagcctgagctcctgcaggaggagagcttgcctccaccacatagcagtgggtttctgggatctaaaccagaaggcccgggaccacaggctgagagccgcgatacaggaacagaagccttgactccacacatatggaaccgactgcacactgcgacatcacggaaaagttaccgcccctccagcatggagccctggatggagcctctctcaccattcgaagatgtggctggtacagaaatgagtcaaagtgactctggtgtagatctgtccggagactctcaggtttcttctggtccttgctcccaaaggagcagcccagacggcgggttaaagggcgctgccgaagggcctcctaagaggcctggtggatcttccccgttaaacgcggtgccatgcgaagggccgcccggatctgagccccctagacgaccaccgccggcacctcacgatggcgatagaaaagagttaccccgggagcagccactgccccccggccccattggaactgagcggagccaacacactgacaggggaactgaaccggggccaatccgcccgtcacatcgcccaggccctcctgtgcaatttggcaccagcgacaaggactctgatctgaggctggtggtgggtgacagtctaaaagccgaaaaagagcttacagcgagtgtgacagaggcgatcccagtgtctagggattgggagctcttgcctagcgctgctgcttcagccgaaccccagagcaagaatctggatagcggtcattgtgtgcccgaaccctcctcctctggacaacgcctctaccccgaggtgttttatgggtccgctggaccctcatcaagtcagatatctggggggcacggcttgtcagtcactagcaaacagtggcggagacctggaacaccgtctcttcacccctacagatcccaacctttatacctcccccctggtcccgccccaccgagcgcacttttatcaggggtggccttaaaggggcaattcttggatttctccaccatgcaggctaccgaactagggaagctccccgcaggcggagtgctgtaccctccaccatcctttctctatagccctgctttttgtcccagcccactgcctgacacaagcttactgcaggtgcggcaggatctgccctccccaagcgatttctacagcactccactgcagcctgggggccagagtggatttctcccatctggtgccccggcacagcagatgttactgcccatggtcgacagtcagctccctgtggtgaattttggcagcctgccccccgcccccccacctgcacccccttccctgagcctgctgccagtcggccccgcattgcagccccccagtcttgccgtgagacctcccccggcgcctgccacccgcgtgctccccagcccggcgaggccgtttcctgcctcgcttggacgtgccgaacttcatccagtggaactgaaaccattccaggactaccaaaaactgtcctccaacttggggggccccggcagcagtaggacgccccccaccggccgctctttttctggacttaatagtaggctcaaggccacaccttcaacctactccggcgtctttagaacccaaagagtggacttgtatcagcaggcgtccccccccgatgctctccgctggatccccaagccatgggagcggacgggaccaccccctcgtgagggcccgagccggagggccgaagagcctggatcgcgaggagataaggagcccggccttccgcccccacgatag

SEQ ID NO: 130056 - DNA, 6417 bp, synthetic construct
  misc_feature 1..6417: note = Description of Artificial Sequence: Synthetic coding sequence
  source 1..6417: mol_type = other DNA
atgagtgaccgatctggcccgacagccaaaggtaaagatggcaaaaagtactcctcactgaatctttttgatacctacaaggggaagtctctcgagattcagaagccggccgtggccccacgtcacggcttgcaaagcctgggcaaagtggccatcgcccgtagaatgcctccccctgcaaatctgccgtccttgaaagcagaaaataaaggcaatgatcccaatgtttctctggtccctaaggatggaacaggctgggcttcaaagcaggagcaatccgatcctaagagctccgatgcttcaactgcccagcccccggaatcacagcctctgccggccagtcagactccagcatcgaaccagcccaaacggcctccagccgctcccgaaaatacgccgcttgtgccctcaggagtgaagtcatgggcacaggcatccgtcacacacggcgctcacggagatgggggacgggcatcctccctattgtctagattttctcgcgaggaattccctacccttcaggccgctggcgaccaagataaagccgctaaagaaagggagtcggccgagcagtcctcgggccctggccctagcttgcgacctcagaactcaaccacctggagagacggaggcggaaggggacccgatgagttagagggcccagactccaaactgcatcacggccatgatccccgcggaggcctccagcccagtgggccgccccagttcccaccgtatagaggaatgatgcccccgtttatgtaccccccgtatctgccctttcctcctccctatggcccccagggtccttatcggtacccgacccccgatggaccaagccgttttccaagagtggccggccctcgtgggtccggtccaccaatgaggctggtggagccagtgggcaggccatccatcctgaaggaagacaacctgaaggaattcgatcagttagatcaggaaaacgacgatgggtgggcgggcgctcacgaggaagtggactacactgaaaaactaaaattcagtgacgaagaagacggccgggactctgatgaggagggcgcagagggccatcgggactctcagagcgcgtctggcgaggagcggccccccgaggctgatggaaagaaaggcaattctcccaactcagagccccctacgcctaaaaccgcctgggctgagacaagcagacctcccgagaccgaaccaggacctccagctcccaagccgccactgccccccccaggcgattacccagatcggggcggtccgccgtgcaagcctcccgcccccgaagatgaggatgaagcctggcgacagcggcgaaaacaatcatctagcgaaatttcgctagccgtggagagggccagacggcgaagggaggaagaggaacgacggatgcaggaggaaaggcgtgcagcctgcgccgagaaactgaagaggctcgacgagaagtttggggcccctgacaaacgactgaaggccgaacccgccgcacctccagccgcccccagcacccccgcgccaccccccgctgttcccaaagagctgcctgcgcctcctgcaccaccacctgcatctgccccaactccagaaaaagagccagaggaaccagcccaggcccccccagcacaatccacccccacgcccggtgttgccgccgcacccactctagtctccggtggcggctccactagttccacttcgtccggatcctttgaggcaagcccagtggagccacaactgccttcaaaggagggccccgaaccccctgaggaggttcctccacccacaacaccgcctgtccccaaggtcgaaccgaagggagacggcatcggccctactcgacaaccaccatcccagggactgggttatccaaaataccagaaatctctgcctccaagattccagcgccagcagcaggaacagctcctgaagcagcagcagcagcatcaatggcaacagcaccagcagggaagcgctccacccactccagtgcccccctctccacctcaacctgtgacgctcggagcagtgcccgcacctcaggccccaccccccccccctaaggcactctaccccggagctcttggaagacccccccccatgcctcctatgaattttgaccccaggtggatgatgatacccccatatgtcgacccgaggctccttcaggggagaccgccactggatttctacccacctggggtgcaccctagtggactggtgcctcgcgagcgttcagattccggtggatcttccagtgagccctttgacagacatgcacctgcaatgttaagggagagaggaaccccccctgtggacccaaaattggcctgggtgggggacgtattcaccgcgacgcctgctgagccacgcccactgacatcccctctgaggcaagccgccgacgaggacgacaaaggtatgaggagcgaaactccccccgtaccacccccgcctccctatttggcctcataccccggcttccctgagaacggcgctcctgggccacccatttcccgttttccgctggaagagcccgggccccgccccctgccgtggccgccaggttcagacgaggtggccaagattcagaccccaccccctaagaaagagcctccaaaggaagagacagcccagctcaccggaccggaagccgggcggaagccagcccgtggcgttgggagcggtggacagggaccaccaccaccacgtagagagagtaggactgaaacaaggtggggtcctaggccaggcagcagccggaggggcattccacccgaggagccaggcgccccacctagaagggcgggccctatcaaaaagccgccacctcctaccaaggtagaagaattgcccccgaaacctcttgagcagggagatgagactcctaagcccccaaagcccgatccgctgaaaattactaaggggaagctgggcggacccaaagaaactccaccaaacggcaaccttagccctgcacccaggctgcgtagagactactcctacgagcgggtaggccctaccagctgtagagggagaggtcggggagaatacttcgcacggggacgcggctttcggggcacatacggaggacggggcaggggcgccgctggcaattccgccgtcaccgagtccttcgaagaaatgatgggcgtggaggttggtcagggcgaccagacaacactgctactccccgaagcagccctgcccgcccgccatggcgcacgagtacagtccatgaggaagtcaccgtctggggctgggtctggagcccagaagcaggccgcccgccctatgagagttatttggctactccagacaagacgattgcctcatcccagacgggaacactcgccaaggtcccgatctccaacaacacgttccccaacattccctgctccagctcgctttactcctggcgttggtgaatcctctctacctgaggggatttctcccggaccaaggaggcgggaaccaccacaggtgtgtccggggtggtccccgccagcaaaatcccttgcgccaaaaaagccccccacaggccccttgcctccatcgaaggaaccactcaaagagaagttgatccccgggccgttgtcccccgtggctcgtgggggaagcaatggcggttcaaacgtcggcatggaggacggtgaaagaccccggaggcggcgccacggtagagcccaacagcaggacaagcctccaaggttcaggagattaaagcaggaaagagagaatgctgcccgcggctccgaagggaagcctagcctgacccttccggcaagcgccccaggccctgaagaggccctgactaccgtgactgtggcccccgccccaaggagggcggccgctaaaagccctgacctaagcaatcagaactcggaccaagcaaacgaggagtgggagactgcgagtgaaagcagcgatttcaccagcgaacggcggggcgacaaggaagctccaccccctgtcttactgacacctaaggcagtgggtactcccggcggaggtggtggcggggcagtccccgggatcagtgctatgtcccgtggggatctgtctcagagagcgaaggatttatcgaaacgcagctttagctctcagcgtcccgggatggagcggcagaaccgcaggcccggacccgggggcaaagccgggtctagcggtagctcatccgggggtggtggcggcgggccaggcgggcgaacgggacccggtcgaggggataagagaagttggccgagccccaagaacaggtctcggcctcctgaagaaagacctcctgggcttccattgcccccacctcctccttcctcgagtgcggtgtttcgactcgatcaagtcatccatagcaatcccgccggcatccagcaggcattagcccaattgagctcgcgccagggctccgtcacagcacccggcggccatcccaggcacaaacctggtccaccccaggcacctcagggtccttctccccgcccgccgaccaggtacgaaccccagagagtaaattcaggcctgtctagcgatccacattttgaagagcctggaccgatggtgcgcggcgtgggaggaacaccccgggactctgccggagtgtctcctttcccacccaagagaagagagcggcctccacgtaaaccagaactcctacaggaagaaagtctgccccctcctcactcttcaggatttcttgggagcaaaccagaggggcccgggccccaggccgagtccagagataccgggaccgaggccttaactcctcacatctggaatagattacacactgctacaagccgcaagtcctaccgccccagctctatggagccctggatggagccattgagtccatttgaagacgtagccggcactgaaatgagccagtccgacagtggagtcgacctgtccggagactctcaggtttctagtgggccttgttcccagagaagctcaccggacggcggtctgaagggagcagccgagggtccacccaagagaccaggggggtccagccccttgaatgctgttccctgtgaaggcccacctggctcagagcctccacggcgacctccccccgcccctcacgatggggaccgtaaagaacttcctagagaacaaccccttcctcctggcccaatcggtacagagagatcccagcggacagaccgcggaacagaacccgggcccattagaccgtctcatcgtccaggacctcctgtccagtttggcacttccgacaaggattccgacttaagacttgtggtgggggatagcctgaaagccgagaaagaactaaccgcgtccgtcactgaggctatcccggtgagcagagactgggagcttctacctagcgcggccgcatctgccgaaccacagagcaagaaccttgattcggggcactgcgtgcccgaaccctcatcttcaggtcaaagattgtacccagaagtcttttacggctcagctggcccaagctcttcccagattagtggagggcacggcctgtctatcacaagtaagcagtggcgccggccaggcacgccaagtttgcatccgtacagaagtcaacctttgtacctgcctccaggaccggctcctcccagcgctttgctgtctggtgtcgctttaaaggggcaattcctcgatttcagcaccatgcaggcaaccgaactagggaaactccctgctggtggggtactttaccctccaccatctttcctatatagcccagcattttgtccatctcccctacccgacaccagtctgctccaggtgcgacaggacctgcctagcccctccgacttctactccaccccgctccaacccggcgggcagagtggcttcttgccatccggagcaccggctcagcaaatgctgctgccaatggttgattcccagctccccgtagtgaattttggcagtctgccacctgcccctccgcctgcacctccacctctcagcctcttgccagtggggccggccctccagcctcccagcctagccgtgaggcctccccccgctcccgccaccagggtccttcctagtcccgctagacctttccctgcgagcctaggacgcgctgagctacaccctgtggaactcaaacccttccaggattaccaaaagctctccagtaatctgggaggccctggcagcagccgcacgccaccgaccggtagatctttctcggggctaaactcaaggctgaaggctacaccatccacctactccggagtctttcggacccaaagagtcgatctgtaccaacaggcctctcctcccgatgctctaagatggatcccaaagccctgggagaggacagggccaccaccacgcgaagggccgagtagaagagccgaggaacctggaagccggggtgacaaagaacccgggttaccgcccccccgctag

SEQ ID NO: 130057 - DNA, 4149 bp, synthetic construct
  misc_feature 1..4149: note = Description of Artificial Sequence: Synthetic coding sequence
  source 1..4149: mol_type = other DNA
atgctccgggagaggggcaccccgccagttgacccaaaattggcttgggtcggcgatgtctttaccgccactcccgctgaaccaaggccgctcacatctcccctccgccaggctgcggacgaagatgacaaaggaatgaggtctgaaacaccccccgtgccgccaccccctccttatctcgccagctatcccggattcccggagaacggggcgccaggtcctccaatatcacggtttcctctggaggagcccggccctcgcccactcccctggcccccagggtccgatgaagtcgctaagattcaaacaccccccccgaaaaaggagccacctaaagaagagactgcccagcttaccgggcctgaggcagggcgcaagcctgccaggggggtcggttccggtggtcaagggcccccaccccctcgccgcgaatcaaggacagagaccagatggggccctcgccccggatcctccaggagagggattccccctgaagagcctggcgctcctcccagacgcgcggggccaataaagaagcctccccctccaacaaaggtcgaagaactgccacccaaacccctggaacaaggggacgagaccccaaaacctccaaagccagatcctctcaaaatcacaaaagggaagcttggtgggcccaaggagacacctccaaacggaaatctgagccccgctcctcgtttaagaagagattactcatacgagcgcgtggggccaacttcgtgccgaggacgtgggagaggagaatatttcgctcgcggtagaggcttccgcggaacgtatggaggaaggggacgaggggcacgatcccgggaattccgctcttatagagagttccgcggcgatgacggcagaggagggggtaccggcggtccaaatcacccacctgccccacgtggaaggaccgccagtgagacgagatccgaaggatcagagtacgaagaaatccccaagaggcggcgacagcggggctccgaaaccggaagcgaaacacacgaatcagatctggccccttccgacaaggaggccccaactcccaaagaaggcactttaacgcaggtgcccctagcccccccgccgcctggggctccacccagccctgcgcccgccagatttacggccagggggggtagagtgtttactcctcggggggttccctcccgaagaggccgcgggggcggcagaccaccccctcaggtgtgtcccggctggagccctccagcaaaaagtctggcacccaagaagcccccaaccggaccgctgccaccatcaaaagagccacttaaggagaagctaattccggggcccctatcccctgtggctagaggaggaagcaatggaggctcgaatgtgggtatggaagacggcgagcgccctcgcagacgccgacacggaagagctcagcaacaagataagcccccccgttttagacgcttgaagcaggaacgagagaatgccgctcggggctccgaaggaaaaccaagtctgactctgcctgcatctgcgcccggtccagaagaagctctgacaacagttaccgtggcccccgctccgcgtcgcgctgcagccaagagtccagatttgagtaaccagaactcagaccaggcaaatgaagagtgggagaccgcatccgaaagttccgacttcacttcagagaggcgtggcgataaggaggctcctcctccagttctgttgacccccaaagcagtgggcaccccagggggaggtgggggcggcgccgtacccggcatcagcgcaatgtccagaggggatctgtcacaacgcgcaaaggacctgtcgaagagatcctttagctctcagcggcctgggatggagcggcaaaaccgcagaccaggcccaggcggaaaggcaggatcatcggggagctcctccggtggtggaggcggcggccccggaggccgcaccgggccaggccggggcgacaagagaagttggccaagcccaaagaaccgttctaggccccccgaggaacggccacctggcctgcccctaccgcctcccccgcctagttcgtcagccgtgttccggcttgaccaagtcattcattctaacccagccggcattcaacaggcactcgctcaactgtcttcccgacagggatcagtcaccgcacctggcggccacccacgtcacaagcccgggctgcctcaggcccctcagggcccttctcctagacccccaacacgctatgagccacagcgggttaattccggactgagctccgatccgcatttcgaggaacccggcccaatggtaaggggcgtgggcggaactccaagagacagcgctggtgtgagtccattcccccccaaaagacgggagcggccaccccgaaagccagagctgctccaagaggaatcactccctccgccacattccagtggttttctgggttccaagcccgaaggtccgggccctcaggcggaatctcgagacacaggcacggaagcactgacccctcacatttggaatcgcctgcacactgcgacaagtaggaagtcttatcggccatcgagcatggagccgtggatggaacccctctcgccatttgaagatgtagccggaaccgaaatgtctcagagcgactcgggtgtagatttaagcggcgactcacaggtgtcatctggcccttgcagccagcggagctccccagacggaggcctgaagggagcagccgagggcccaccaaaaagacccggcggaagcagtccacttaacgcagtcccttgcgagggacctcccggctcagagcctccgaggcgccctcctccagccccgcatgacggcgatagaaaagaattgcctcgagaacagcccctaccccctgggcctatcgggacagagcggagtcagcgtaccgatcgtggtaccgaaccgggccccattcgtccttcgcaccgcccaggcccaccggtgcaatttggaacatcggacaaagacagcgatctgaggctggtcgtgggcgatagcttaaaggccgagaaggaactaacggcgtcagtgaccgaagctatcccagtgtccagggactgggagctcctgccaagcgcggctgcatccgcagaaccgcagtcaaagaatctggattctgggcattgtgtgcccgaaccctccagttccggacagcggctctaccccgaagttttctatggttccgccgggcctagtagttcccaaatcagcggcggcgcaatggactcccagctacacccaaatagtggaggtttccgccccggaaccccctccctacacccttacagatcccaacccctgtatctgccaccaggacctgcccctccatccgccctcctcagcggggtcgccctgaagggccaatttctggactttagtactatgcaggctaccgagttagggaagcttcccgccggaggggtgctctatcccccacccagcttcctctattcccctgcattttgtccctcacccctcccagataccagcctgcttcaagtaaggcaggacttgccgagcccttcagatttttactcaaccccattacagcctggcggccagagtggattcctcccatcgggggcacctgcccaacagatgttgttacctatggtggactcccagctgccggtcgttaactttggaagccttcctcccgcgcctcccccagctcccccaccactgagcctcctccccgtgggtcctgccctccaacccccaagcttggccgtgcgtccaccacccgccccagcgacaagagtcctcccaagccctgcaagaccttttccagcctccctggggcgcgccgaacttcatcctgtagaactgaagccctttcaagattaccaaaaactgtcctctaacttagggggccccggaagtagcagaacccctcccactgggcgcagctttagtggactgaacagccgcctgaaagccacaccaagcacttattccggtgtttttcgaacgcagagagtggacctctaccagcaggcaagtccgcctgacgccctgcggtggataccaaagccctgggagcgcacaggtccaccgccgagagagggtccatcccgtcgggccgaggaaccgggcagccgcggggataaagagccaggtctgccgcctcctagatag

SEQ ID NO: 130058 - DNA, 6450 bp, synthetic construct
  misc_feature 1..6450: note = Description of Artificial Sequence: Synthetic coding sequence
  source 1..6450: mol_type = other DNA
atgagtgaccgctctggacctaccgcaaagggcaaggacggaaaaaagtacagttccttaaatttgttcgatacctacaagggaaaaagtctcgaaatacagaaaccagccgtcgccccccggcacgggctccaaagcctcggaaaggtagcaatcgcccggagaatgccaccccctgccaatctaccctcacttaaagcggaaaacaaagggaatgatcctaacgtcagcctggtccctaaagacggaacgggatgggctagtaaacaggaacagtctgatcctaagtcctcagacgcatcaactgcccagcctccagaatcgcagcccctgcccgcctcacagacaccggccagtaatcagcctaagaggccccccgctgctcctgaaaacaccccactggtgccgtcgggcgtgaagagctgggcccaggccagcgtgacacacggagctcacggcgacggcggtcgagccagttcattgttatctagatttagtcgggaagagtttccgacattgcaggccgccggcgatcaggataaagcagctaaggagcgcgaaagtgcagaacaaagttcaggacccgggccaagtctgcgcccccaaaactctaccacctggagagacggtggaggaagagggcctgacgagctcgagggtccagatagcaaactgcatcatggccacgacccccggggaggcctccagccatccggccccccccaattccctccataccgagggatgatgccccctttcatgtaccccccttacttgcctttcccgccgccatacggcccgcaggggccttataggtatcccacccccgacggcccttcgagattccctcgtgtagccgggccacggggctcgggcccccccatgaggctggtagagcccgtgggacggcctagtattctaaaggaggacaacctgaaagagttcgatcaattggaccaggagaacgatgatggatgggcgggagcacacgaggaggtcgattatactgaaaagctgaaattctcagatgaggaggatgggagggactcagatgaagagggcgccgaggggcaccgcgacagccagtccgctagcggtgaggagcggccccccgaggcagacggcaaaaaaggcaactccccgaattccgaacctcccacccccaaaaccgcttgggccgaaacctctagacccccagaaaccgaacctggccctccggctccgaaaccccccctgcctccaccccatagagggccagcaggaaactggggccctcctggagactacccagacaggggcggccccccctgcaaaccgcccgctccggaggacgaagacgaggcctggcggcagagaaggaaacagtcttcgagcgagattagcttggctgttgagcgggcacgaagaaggcgggaagaagaggagcggagaatgcaggaggaaagacgcgccgcctgtgccgagaagctgaaaaggctagatgagaaattcggggcaccagataaacgcctgaaagctgaacctgctgcacctcctgcagcccccagcacacccgccccaccccccgcagtgccgaaggaactccctgctcctccagcgccaccacctgcatctgccccaacccctgaaaaggaacccgaagagcccgcacaggcccccccagctcagagtactcctaccccaggcgttgcggccgctcctacactggtctcgggggggggatccacatcttcaacctccagcggcagtttcgaagcgagcccagtggaaccacaactaccctctaaggagggcccagagcctcctgaagaagttccccccccaacgacccctcccgtgcccaaagtggagcctaagggggacggcatcggtcctacgagacagcccccgagtcagggactaggatatcctaaatatcagaagtctctgccccctagatttcagaggcagcagcaagagcagttacttaagcagcagcaacagcaccaatggcaacagcaccagcagggctccgcaccacctacccccgtgccaccaagtccacctcaacctgtcacactcggggcagtccccgccccacaggcacctccacctcctcccaaggccttataccccggagcattaggccgcccaccgcccatgccacccatgaatttcgatccacgttggatgatgatccccccatatgttgatccaagattgctgcagggcaggcctcctctagacttctaccccccaggtgttcatcccagcggactggttcccagggagcggtccgactccggagggagttcaagcgaacccttcgaccgccacgcccctgccatgttgagggagagaggcacacccccagtggatccaaagctggcttgggtcggtgacgtcttcaccgccactccagcggaacctcggcccttgacctcaccactgcgccaggcagccgacgaagacgacaaaggaatgagatctgaaaccccccccgtaccaccaccacctccctacctcgctagttacccgggatttccggagaatggcgcccccgggccacctatatcccggtttcccctggaagaaccagggccacgccctctgccttggccgcctggctctgacgaggtagccaaaattcagactccacccccgaagaaggaaccaccaaaggaagaaaccgcccagctgacaggcccagaagcaggccggaagccagcccggggggtgggatccggcggccagggcccaccacctccgcgccgagaatcaaggactgaaactcggtggggtcctcgacctggaagcagccggagagggatcccccccgaggaacctggtgcccctccaagaagggcggggcctataaagaagcctcctccgccaactaaggtcgaggagcttccacctaaacccctggaacaaggcgacgaaacacctaaaccccccaagcctgatcctctgaaaattactaaagggaagttaggcggtccaaaggagacccctcctaacgggaacttatcacctgctccgcgcctgcgccgggattattcatatgagcgcgtgggacctacgtcatgcagaggtaggggtaggggggagtacttcgcccgtggtcgaggcttccggggcacgtacggagggcgaggcaggggcgcagcagggaattctgctgtcactgaaagttttgaggagatgatgggcgtcgaagtgggccagggagatcagaccaccctccttcttcctgaagcagcactgcccgcaagacacggtgcaagagtgcaaagtatgagaaaaagtccatctggggcgggcagcggggcgcagaagcaggcagcacgcccaatgcgggttatctggctacttcagacaaggcggctccctcaccctcgaagggagcactctcccagatccaggagtccaaccactcgcagtcctacctttcctgcccctgccagattcacgccaggggtgggtgaaagcagcctgcctgagggcatttccccgggaccccgccggcgagaacccccccaagtctgccccggctggtcccccccggcaaaaagcctggcaccaaaaaaaccgcccaccgggcccctacctccctccaaggaaccactgaaggaaaaactgatcccaggaccattatcacccgtggcacgcggggggtctaatggaggctccaatgtgggtatggaagatggcgagcgaccacgccgaagacggcacggacgggctcagcaacaggacaagccaccacgattcagacgattgaagcaggagagggagaatgcagctcgcggatccgaaggcaaaccttccctgaccttgcccgccagtgcgcccgggcccgaagaggcccttacgactgtgaccgtcgcccctgccccgagacgtgccgcagcaaaatcaccagacctgtccaatcagaatagcgaccaggccaacgaggagtgggagacggcctccgaatcgtctgacttcacttctgagcgacgcggggacaaggaggcccctccccccgttctcctgacaccaaaggccgtgggaacacctggcggcggaggaggcggggccgtgccaggcatctctgcaatgagccgtggcgacctgtcacaacgtgccaaggacttatcaaaaaggagcttctctagtcagcggcctggcatggagaggcagaaccgcaggcctggtcctggaggaaaggccggttcttctggctcgtcttcaggtggtggaggaggtggacctggtggcagaaccggtccgggccgtggagacaagaggagctggcctagtcctaagaaccgcagccggcctccggaggagagaccaccaggcctgccactgccacctcccccaccatcctcgagcgctgtgttcaggctggaccaggttatacactctaacccagctggcatccagcaggctctggcccagctcagttcccggcagggctcagttaccgctcctggtggacacccgagacacaagccaggccctccccaggccccccagggcccatcgcccagaccgccgacccggtatgaaccacagcgtgtaaactcaggactatccagtgatccacacttcgaagagcccggtcccatggtacgcggagttggtggaacgccccgggattctgctggagtgagtcccttccctcctaagcggcgcgagcgcccaccacgaaagcctgaactgctgcaggaggagagcttgccacccccccacagttccggctttctggggtccaagcccgaggggcccggaccccaggccgagtctcgggacaccggaacagaggctttgacaccccacatttggaacagactgcatactgccacgtctcgcaagagctatagaccaagctctatggaaccctggatggaacccttgagcccgttcgaggacgtcgcaggcactgagatgagccagtccgactccggagtggatctctccggggatagtcaggtgagcagcgggccctgctctcagagaagctcaccggacgggggactgaaaggtgccgccgagggaccaccaaagcggcctgggggtagttcccctcttaacgccgtgccttgcgaaggcccccccggttctgagccacctcgccgaccaccccctgctccgcatgatggtgacaggaaagagctgcccagggagcagcctctcccacccggacctataggcactgagcgctcacagcgaactgataggggcactgaaccaggtcccatccggcctagccatcgacctggccctcccgtgcagttcgggacgtcggacaaggactctgatctaagactcgtggtcggggatagcttgaaagccgagaaagaactaacagccagtgtaactgaggcgatacccgtgagtcgcgactgggagctgctgccaagtgctgctgctagtgctgagccacaatcaaagaatctggattctggtcactgcgtccccgagcccagctcctccggccaacgactctacccggaagtgttttatggctccgcaggccccagtagcagccagatcagcggcggccacggcttgagcatcacctcgaaacaatggcgaagaccagggaccccctctcttcacccctatcgatcccagcccctgtacctcccaccaggacccgcgccaccgagcgcacttttatccggtgtcgcactgaaggggcagttcctagatttcagcacaatgcaggcaacggagttaggaaaactaccagccggcggcgtcttatatccacctccgtcctttctctattctcccgccttttgtcccagccccttacccgacacttcccttctgcaggtaagacaagatctcccttctccatcggacttttacagcaccccacttcagccaggcggccagagcggctttctgccctccggggccccagcccagcaaatgttgcttccaatggtggatagccagcttcctgtggtgaatttcggtagccttcccccagctccccctccagcacctcccccactctctcttctgcccgtggggcccgcactgcaacctccctccctggctgtgagaccaccccccgccccagcaacaagggtattgccttcaccagcacgccctttccctgctagcttaggtagagctgaattacatcctgtggagctgaagccgttccaagattaccaaaagctgtctagtaacctcggcgggcctgggtcctcacggactcctcccaccggcaggagcttctccggcctgaattcaagactgaaggcaactccttccacttactcaggcgtgttccggactcaacgcgttgatctctatcaacaagccagcccgcctgatgcactccggtggatacccaagccttgggaacggaccggccctcctccaagagagggaccgagccgaagggccgaggaacccggttctagaggtgacaaggagcccgggctacctccaccccggtag

SEQ ID NO: 130059 - DNA, 6450 bp, synthetic construct
  misc_feature 1..6450: note = Description of Artificial Sequence: Synthetic coding sequence
  source 1..6450: mol_type = other DNA
atgagtgaccgcagcgggcctacagccaagggtaaggacggcaagaaatattcttctttaaatttgtttgatacctacaaaggcaagtccctggagatccagaagccggctgtggcaccccgacatggactgcaaagcttaggtaaagtcgctatcgctcgccggatgccgccaccggccaacctgccctcactgaaggccgaaaacaagggtaatgacccaaatgtgagcttggtccctaaagatggcaccgggtgggcatccaagcaagaacagtccgacccaaagagttcagacgcatcaacagcccagccactggagagccaaccccttccagcctctcagactcccgcttctaatcagcccaagcgcccaccagctgctccagagaacaccccactcgtgccctccggtgtcaagtcctgggcacaggccagcgtgactcacggggctcatggcgatggaggtagggcctcaagcttacttagccgcttttccagggaagagttcccaacactgcaggctgccggtgaccaagataaggcagccaaggagcgggagtctgcagagcagtcatccggacccggcccatccttacgacctcagaatagcacaacctggagggacggtggaggacgagggccagacgagttagaaggccccgactcaaaacttcaccatgggcacgacccacgcgggggtctccagccatctggccctccacagttcccgccgtacagggggatgatgccacctttcatgtacccaccgtacctgccattccctccaccatacgggcctcaggggccttataggtaccccacccctgacggaccttctaggttcccacgggttgctggcccccggggctctggccctcctatgaggctagtcgagcccgttggtagaccgagcattctcaaggaagataatttgaaagagtttgatcagttagaccaggagaacgacgatggctgggccggtgcccacgaagaggttgactatacggagaaattgaaattttccgatgaggaggacggccgcgatagcgacgaggaaggggccgagggccatagagattcacaatcagctagtggggaggagaggcctcccgaagccgatggaaagaagggaaacagtcccaacagtgaacctcccaccccaaaaactgcctgggctgagacctcaaggccccctgaaactgagcctgggcccccggcccccaagcccccactcccaccgccacatagaggccccgccggaaattgggggcctcccggagactaccccgatcggggcgggcccccgtgcaagcctcccgcccctgaagacgaggatgaggcctggagacagcgccgcaagcagagcagtagcgaaatttctctggcagtggaacgggcacgtcggcgtagagaggaagaggagcgtcggatgcaggaagagcgacgcgcagcctgtgctgagaaattgaaacgcctcgatgaaaaattcggagcacccgataagcgcctgaaggccgagcccgctgcgccacccgctgcgccctccacccctgccccgccgccagcagtgcctaaagagctgcccgccccccctgctcctcctcccgcgtccgccccaactcctgaaaaggagccagaggagcccgcacaggctccccccgcacagtccacaccaacaccgggagtcgccgcggcacccacactagtatccggtgggggaagtacctcatccacttcctcaggctcatttgaagcaagccctgtggagccacaactgccaagtaaggagggcccagaacccccagaagaggtgcctccaccgactacacctccagttcccaaagtggagcccaaaggtgatgggattggaccaacaagacaacccccgagtcagggtcttggctacccgaagtaccagaaatccctgccacctaggtttcaaaggcaacaacaggaacagctgcttaaacagcagcagcagcatcagtggcagcagcaccaacagggtagcgccccacctacccctgtgcctcctagcccccctcagcctgtcaccctaggggcagtgccggcaccccaggcccctcccccacctcctaaagccctgtatcctggagcacttggtcgcccaccccctatgccgccgatgaatttcgaccctagatggatgatgatacccccttatgttgacccccgcctgctccagggacgccctcctctcgacttctatcccccaggagtgcatccatccggattggtccccagggagcgctctgactccgggggctcctcatccgagccgttcgatcgccacgccccagccatgctcagagaaagaggaactcctcccgtggatcctaaacttgcctgggtaggcgacgtctttacagctacccccgctgagcctcgcccgttgacgtcacctttgaggcaggccgcagacgaggatgataaggggatgcgatccgagactcctccagtgccccctccccccccttacctggcaagctatccagggttccctgaaaacggggcccccggaccccctatctcacggttccctttggaggaacccggtccacggcccctgccttggccacccgggagcgacgaagtggcaaagatccagacccccccgcctaaaaaggagcctcccaaggaggagaccgcccagctaaccggcccagaagctggccgtaagcccgcccggggagttggcagcggcggccagggcccccctccacctagaagagagtcgcgcacagagactcggtggggtccacgccctggatctagtcgaagggggatccccccggaggaacctggcgcaccacctaggagggccggacctataaaaaagcctcctcccccaaccaaagtggaagagctcccacctaagcctttagagcaaggagatgagacacccaaacctccgaagcctgaccctctcaagatcacaaaggggaaactgggaggtcccaaggagacgcccccaaacggtaacttatcccccgcacctcggctgcggagggactacagttacgagagagtaggacccacatcctgcaggggcaggggtaggggggaatatttcgccagaggccgcggcttccgcggcacttatggaggaaggggtcggggagcagcgggaaattcggccgtcactgaatcatttgaagaaatgatgggggttgaagtgggacagggtgaccagacaactctcctgcttccagaggccgcacttcccgcgcgacacggggcccgggtccagagcatgcgaaaaagccccagcggggccgggagcggggcgcagaaacaggccgcccggcccatgagagtgatttggttattacagacacggcgactccctcatcctaggcgagagcactcgccaagatcacgatcacccactacccgcagcccgacctttcccgccccagctcgcttcacaccaggtgtgggcgagagctccctgcccgaaggaatttctccagggccccgccgccgtgaacctccccaggtgtgtccagggtggtctcctcccgccaagtctctcgccccaaaaaagccacccaccgggcccttgccaccatcgaaagagcccctgaaggagaagcttatcccagggcccttgagtccagtggctagagggggatcaaatggaggtagtaacgtggggatggaggacggcgagcgcccccgccgccgcaggcacggcagggcccagcagcaggacaaaccgccccgctttcgcagattaaagcaagagcgggagaacgcagcgcgtggttcggaagggaaaccttctctcaccctgcctgccagcgcaccaggaccagaagaggcgctgacgaccgtaacggtcgcacctgctcctcggagggctgctgccaagtctcctgacctaagcaaccagaattccgaccaggcgaatgaggagtgggagactgcaagcgaatcatctgacttcacatctgaacggcggggtgacaaggaggctcccccaccggttctgttgacaccaaaagcagtgggaacacctggcgggggtgggggtggcgccgtccccgggatcagcgcgatgtccaggggggacttgtcacagcgagccaaagatctctccaagcgatcatttagcagtcagcgacccggaatggaacgccaaaatcgacgacctggccctggcggtaaagccggaagttccggaagcagcagcggtggaggaggcgggggcccaggaggtcgtaccggcccaggtcggggcgacaagcgctcatggccatcccctaagaatcgtagtcgaccacccgaggaacggcctccaggactgccactgcccccccctcctccttccagcagcgccgtgtttcgtctggatcaagttatccactctaaccccgctgggatacagcaggccctggcccagctaagtagcaggcagggaagcgttaccgctcccggtggacacccgcgccataaaccaggccccccccaagcgccccagggcccatcaccacgcccccccacacggtatgagcctcagagggtcaattccggtctgagtagtgatcctcacttcgaggagcctggacccatggtcagaggagtaggaggcactccacgcgacagcgctggcgtgtcgcccttcccgcctaaaaggagggaacgtcccccgaggaaacccgaattgctccaggaagagtcgcttcccccaccacactcttccggcttcctggggtccaagcccgagggccccgggccccaggctgagagcagggacacaggcacagaggctctgacccctcatatctggaatagactccacacagcaacaagccgtaagagctaccggccaagcagcatggaaccgtggatggaacctctcagccctttcgaggacgtcgctggaactgagatgtcacagtccgacagcggagtggacctgagcggtgactcacaggtgagttccggcccctgctcacagcgttcatcccccgatggcgggctgaagggtgcagctgaggggccaccgaagaggccaggtggatcctcccctctgaacgccgtcccatgtgagggccctcccggatctgagccccctaggcggcctcctcccgccccacacgatggtgacagaaaagagctccctcgggagcagccactgcctcctgggcccattggcacggagagaagtcagcgcaccgacagaggaaccgaacccgggccgatccgcccaagtcacagaccgggcccgccggttcaattcggaacaagcgacaaggatagcgacctgcggttagttgttggggactccttgaaggccgaaaaggagctcaccgcttccgtcactgaagcaatcccagtctctcgggactgggaattactgccctccgccgctgcgtcagccgaaccacagagcaagaacctggatagcggacactgcgtgcccgagcctagtagcagcggccaacgcctttaccctgaagtgttttatggctctgcggggcctagctcttctcaaatttctggggggcatggcttgagcatcacttccaagcagtggagaaggccaggtactccctcactccacccctacagaagccaacccctttatctgccccccggtcccgccccaccctctgccttgttgagcggggttgcacttaagggccagtttttagattttagtaccatgcaggccacagagctgggtaagctgccagctggcggggtcctgtacccccctccaagttttttgtacagcccagcattttgcccctcccccttgcccgatacctcactgctgcaggtcagacaggacctcccaagtcccagcgatttttattctacacctttgcagcctggagggcagtccgggttcctcccctccggtgcgcctgcccaacagatgttactgccaatggtggattcccagctgccagtcgtgaactttggcagcctacctcctgctcctccgccggcccctccaccattaagtctcctgccagtcgggcccgcacttcagccaccatcactcgcagtgaggccgcctccagcgccagctaccagagtgctgccttcgccagctaggccttttccagcatctctcggtagggcagagttgcaccctgtggagttgaaaccattccaggattaccagaagctgtctagtaatctgggaggcccagggtcatccaggaccccaccaactggccggtctttttccggattaaacagccgtctgaaggccaccccgtccacttacagcggcgtgtttagaactcagcgcgtcgacctgtaccagcaggcaagcccacccgatgcactcaggtggatcccaaaaccctgggagaggactggcccccccccaagagaggggcctagccgccgagctgaagaacctggcagccgcggcgacaaggaacccggcctgccccccccgaggtag

SEQ ID NO: 130060 - DNA, 4149 bp, synthetic construct
  misc_feature 1..4149: note = Description of Artificial Sequence: Synthetic coding sequence
  source 1..4149: mol_type = other DNA
atgctgagagagcgcgggacaccaccagttgatccaaaactcgcttgggttggagatgtcttcacagccacaccagcagagccaaggccattgacttcaccactgcgtcaggcagctgatgaggatgataaaggcatgaggtctgagacaccaccagttccacccccccctccgtatctggccagctacccaggctttcccgagaacggcgcacccggccccccaattagccgcttccccctcgaagagcctggcccccgtcctttaccctggcctcctgggtcagacgaagtggccaagatccagactccgccgcccaaaaaagaacctccaaaagaggagaccgctcagctgaccgggcccgaggccgggagaaaaccggcaaggggagtgggctctgggggacagggacccccacctccgcgccgcgagagcagaaccgagacccgatggggacccagaccaggatctagccgtagaggcattccacctgaagagcctggtgcccctccacggcgagccggaccaattaaaaaaccaccaccccctaccaaagtggaagagctcccccccaaaccactggagcaaggcgatgagacccctaagccacccaaacccgaccctctgaaaattacaaaaggaaagctgggcggacccaaagaaacacctcctaacggcaacctctctcccgctcccagactgaggcgagactactcctacgagcgcgtcggccccactagttgccgcggaagaggtcgcggcgagtatttcgcacgcgggcggggttttcgagggacatatggcggcaggggcagaggcgctcggtcccgcgagttccggtcttatagagaattccgtggggatgatgggagaggcggaggaaccggggggcccaaccaccctcctgccccacggggccggacagcatcagagacgagatcagagggtagtgaatatgaggagataccaaaaaggcggaggcagcggggcagtgagactggctccgaaacacacgaatcagacctggccccctcggataaggaagcccccactccgaaagaaggcactctaacccaggtccccctggccccccccccacccggtgccccacctagcccagctcccgctcggtttactgcccggggcggcagagttttcacaccgaggggcgtgccctcacgtcggggccggggtggcggacgaccccctccgcaagtgtgccctgggtggagtccacccgccaagtccctggcccctaagaaaccccccactggcccactcccccccagtaaggagcctctgaaagagaaactgatcccaggaccactaagcccggtggccagaggaggcagcaacggcggatcaaacgtgggcatggaggacggggaaaggccacgaagaaggcgacacggccgggcgcagcagcaggacaaacctcctcgcttccgccggctgaaacaggaacgcgagaatgccgctcgtggatctgaaggaaagccgtccctgaccctgcccgcaagcgcacccggccctgaggaagccctcacaaccgtgacggtagctcccgctccccgacgggctgctgcaaagtcgcctgatttgtctaaccaaaattccgaccaagccaacgaagagtgggagactgcaagcgagtcctccgactttacatcagaacggcgaggcgataaagaggcacctccccctgtgctgctgactccaaaggcagtgggaacccccggtggaggcggaggcggggccgtgccaggaatttcagccatgtccagaggggaccttagtcagcgggccaaggatctgtcaaaacgcagcttttcctctcaaaggcctgggatggagagacagaacagaaggcctggaccaggaggcaaagctggtagtagcgggtcgtctagcgggggcggcggggggggacccgggggcagaactggtccaggcaggggagacaaaaggagctggccttcacccaagaatcgaagccgaccacccgaagagcgccccccaggactccctttacctcctccccctcccagctcttctgctgtgttccgcctcgaccaggtgatacatagcaaccctgccggtatccagcaagcactggctcagctgagctcacggcaaggatctgttacggcccccggggggcacccaagacacaaacccgggccaccccaggcgccacagggaccctccccccgcccccccacaagatatgaaccacaacgagtgaatagcggcctgagctcagatcctcatttcgaggaacctgggcctatggtgcgcggcgtggggggcacaccacgtgacagtgccggtgtcagcccgtttccgccaaaaaggagggagcgcccgccacgtaagcctgaactgttgcaggaggaatctctgccccccccacattcatcaggattcctcgggtccaagcccgaagggcctgggccccaggcagaaagccgagacaccggtaccgaggccttgacgccgcacatctggaatcggttacacacagccacttcccgaaaatcttatagaccaagctccatggaaccctggatggaaccccttagtccctttgaggatgtggcaggaaccgaaatgagccagtctgattctggggtggatttaagtggggattctcaggtgtcatcaggaccttgctcacagaggtccagccccgatggcggtctcaagggggctgccgaaggaccccctaaacgccctggtggctcttcacctctgaacgctgtgccatgcgagggccctcccggtagcgaaccaccccgcaggcctcctcctgcaccccatgacggtgaccgcaaggaattaccacgagagcagcctctgccacccggcccaattggcacagaaagaagtcagaggaccgacaggggcaccgaacctggccccattaggccttcacatagaccgggccctccggtccagtttggtacctcagataaggactccgaccttcgcctcgtagtgggcgactcactgaaggccgaaaaggagctgacagcctccgtgactgaagctatcccagtgtcacgggactgggaacttctaccaagtgcggccgcatccgcggagccccagtccaagaaccttgattcagggcattgcgttccggaacctagctcttctggacagcggctttaccctgaggtattttacggctcagccggaccgagcagttcccagatctccggcggagccatggattcccagctgcatccaaactcaggagggttccgccctggaactccttctctgcatccttataggagccagcccctctacctgcctccgggccctgctcctccctcggcccttttgagcggtgtcgcccttaaggggcaattcctggacttttccaccatgcaagcaaccgaactgggaaaacttccagcagggggcgtcctgtatcctccaccgtcattcctctactcgcctgccttctgcccgagcccgcttcctgatacctctttattgcaagtgcgccaggatctccccagcccatctgatttctactccacccctctgcagcccggaggacagagcggcttcttgccctccggggcccctgctcaacaaatgttgcttcccatggttgattcccagctgcctgtcgtgaactttgggagcctcccacccgctccccctcctgcaccaccccctctctctcttctcccggtcggccccgccctacaacctccctcccttgctgtcagacccccaccagctccggccaccagagtgttgccaagccccgctcgcccatttccagcctctctcggaagggccgaacttcatcccgtggagctgaaaccgttccaggattaccaaaagctctcaagcaacctcggggggccagggagtagccgcacacctcccacgggccgtagcttttcaggcttgaattcccggttgaaggccacgccttcgacttactccggtgtgtttcgaactcaacgggtggatctataccagcaggcctctcctccggacgccctcaggtggattccgaaaccatgggaacggactggacctcctccccgcgaaggacccagtcggcgagccgaggagcccgggagtaggggggacaaggagcctggtttgcctcccccccgctag

SEQ ID NO: 130061 - DNA, 4149 bp, synthetic construct
  misc_feature 1..4149: note = Description of Artificial Sequence: Synthetic coding sequence
  source 1..4149: mol_type = other DNA
atgcttcgagaaaggggcactccccctgtcgatccaaagttagcttgggtgggggacgtgtttactgctacacccgctgagccccgccctttaacaagtcctctaaggcaggccgccgacgaagatgacaaggggatgcgttcagagactccccccgtgcctcccccacctccttacttggcctcttaccccggctttcctgaaaatggagcaccagggccgcctatcagtcggtttcccctcgaagaacccggaccccgccccctgccttggccacccggcagtgacgaagtggccaagatccagacccccccgccgaagaaagagcctcctaaggaggagacagcccaactgacaggtccagaagccggacggaagccagccagaggcgtgggctcaggcggacagggccctccccctccgaggagagagtcacggacggaaactcgctggggccctcgccccgggtcaagcaggcgcggtattcctcccgaagagcccggagcgccgcctcggcgggcgggccctatcaagaagccacccccacccacaaaggtggaggagctaccaccaaaaccccttgaacagggcgacgagacacctaagcccccaaagccagatcctttgaagatcaccaagggaaagctgggcgggccaaaggaaacccctccaaatgggaatctctcccccgctcctaggctcagacgcgattacagctatgagagggtgggccccacctcctgtcgaggcagggggaggggcgagtacttcgcccggggcagggggtttcggggaacctacggtggacggggacgcggcgctagatcaagagaattcaggtcataccgagagttcaggggcgatgatggtaggggcggcgggaccgggggcccgaatcatccccccgccccccggggcaggacagcctctgaaactagaagtgaaggcagcgagtatgaagagatccccaagcggcggcgccagcggggaagcgagactggaagcgagactcacgagtctgacctggcaccttctgataaagaggccccaactccgaaggaaggcactctgacacaagtccctttggcccccccaccacctggagccccaccttcgccagcccctgcacgctttactgcccgtggcggtagagttttcacccccagaggggtgccatcacggcgcggcagaggcggcggaagaccccctccacaagtttgccccggatggtctcccccagccaagagcttggctccaaagaagccaccaactggccctttgcccccgtccaaggaaccattgaaagagaagcttatccccggaccactgtcacctgtggctaggggcggatcaaacggcggatcaaatgtaggcatggaagacggcgaaaggccgcgcaggcgcaggcatggaagggcccagcagcaagacaagccccctagatttcgacgtctgaaacaagaaagagaaaacgcggcgcgtggttcagaggggaaaccaagcctgacactgccagccagcgcgccgggacctgaagaggccctcaccactgtgacagtagctcccgcacccaggagggctgccgcgaagtcccccgatctcagtaatcagaatagcgatcaggccaacgaggagtgggagaccgcgagcgagagtagtgactttaccagtgaaaggagaggcgataaagaggcacctccgcctgtcttactcactccaaaggccgttggtactcctgggggagggggtggcggggctgtgccaggcattagtgctatgtctaggggcgatttgagccagcgtgccaaagacctttcaaagaggtcattcagttctcagagaccagggatggagagacaaaatcgacgacccggacctggaggtaaggcaggaagcagtggcagcagctctgggggaggcggtggagggcctggggggcgtacggggcccggtcggggcgacaagcgctcatggcccagtcccaaaaacagatcgcgccccccagaggaaaggccgcccgggctgccactgccacccccccctccgtcttcctctgccgtgttccgactggaccaggtgatccactccaatcctgcggggatccagcaagctctggcccagctcagctctcgccaaggatccgtgaccgctcccggcggacacccccgccataagcccgggccacctcaggcgccgcagggaccatcacctcgacctcctacccgttacgaacctcagcgcgtgaacagcgggctctcatccgacccccactttgaagaaccgggccccatggtgagaggagtgggaggaaccccccgagacagtgctggggtgagccctttccctccaaaacgccgggaaagacctcctcgaaagcccgagttactccaagaagagtccctcccccctcctcactcttctggatttttgggctctaaacctgaagggcctggaccccaggctgaaagtagggatacaggtaccgaggccctcacaccacatatttggaatcgtttacacacagccactagccggaagtcataccggcctagctcaatggaaccttggatggagccacttagccctttcgaggacgtggcagggacagaaatgagccaaagtgattccggcgtcgacctctcaggggatagtcaagtgtcctcagggccctgctcccagaggtcctctcctgacggaggcttaaaaggcgccgccgagggtcctcctaagaggcctggcggaagttccccacttaatgccgtgccttgcgaaggaccccccgggtcggaacctcccaggcgccctccgccagctcctcatgatggtgaccggaaggaattgccccgcgaacagcccctcccaccagggcccatagggactgaaaggtcccagagaaccgaccgcggcactgagcctggtcccattagaccaagtcaccggccgggcccacccgtccagttcggaacgagcgacaaagattccgatctacggctggtggtgggtgacagcttaaaagcagagaaagagcttacagccagcgtgaccgaggccattcctgtgagccgggactgggagctactgccttctgcggctgcgtccgccgagccacagtcgaaaaacctagattctggccattgtgtgcccgagccatctagttctggacagaggttgtatccagaagtgttctacggctctgccggcccctcctcgtcacagattagtggcggagcgatggattctcagttacatcctaacagcggcggattcagacctggaactccttctctacacccctatcggagtcagccactgtatctgcctcccgggccagcccctcctagcgccttactgtccggggtggcgctgaaaggacaatttttagatttttctacaatgcaggctacggagttgggaaaactgcctgctggaggagtactgtaccccccaccatccttcctttactcacccgcattctgtccctcccccttacccgacacctctctgcttcaggttcgccaggatctgcctagcccttcggacttctactctacacctctgcagccgggggggcagagtggatttttaccatcgggcgcgcctgcacagcaaatgctgctgcccatggtggattctcagctgcccgtggtcaatttcggaagcttgccccctgctcctccccctgccccccctcctctgtctcttcttcccgtggggccagccctccaacctccttcccttgcagtgaggccccccccagcgccagcgactcgagtgctccccagccccgcaaggccgtttcccgcaagcttgggccgcgctgagctgcatccagtggaactgaagcctttccaggactaccagaagctgtcgagcaacctcggcggacctgggtcaagccgcactcctccaacagggagaagtttttcagggctgaacagccggctgaaggccaccccctccacttatagcggcgtgttccggactcaaagagtggacctgtaccagcaggcttctcctcccgatgcactgaggtggatccccaaaccctgggaacgcaccgggcccccaccccgggaaggaccaagcaggcgagcagaagaaccaggctcacgcggcgacaaggagccaggtctgccccctccaagatag

SEQ ID NO: 130062 - DNA, 6450 bp, synthetic construct
  misc_feature 1..6450: note = Description of Artificial Sequence: Synthetic coding sequence
  source 1..6450: mol_type = other DNA
atgagcgatcggtcaggacccaccgctaaaggtaaagatggtaagaagtattccagcctcaacctgttcgatacatacaaagggaagagcttggagatccagaaaccggccgtggcccctcgccacggtttgcagagcttgggcaaagtggcgattgcgcgccgaatgccccctccggcaaatctcccttctttgaaagctgaaaacaaagggaatgacccaaacgtgagcttagtaccaaaggacggtaccggttgggcaagcaaacaggagcagagcgaccccaagtcatcggatgcttctacagctcaacccccagagtcacagccgctgcccgcaagccagacaccagctagcaatcagcccaaacgaccccccgctgcgcctgaaaatactcctctagtgcctagcggagtgaaatcctgggcccaggcctccgttacgcatggagcgcacggggatggggggagggcttccagtttgctgtcccgtttttcaagagaggaattcccaactctgcaagctgcaggcgatcaggataaggccgctaaagagagggaatccgctgaacagagctctggtccaggcccctctctgaggcctcagaactctactacctggagagatggcggagggcggggcccagatgaactggagggaccagattcaaaactgcatcatgggcacgacccaagaggagggctgcagcctagtggcccaccccagttcccaccctacagaggcatgatgccaccgttcatgtatcctccatacctaccctttccccctccgtacggaccccagggcccataccgatatccaacgcctgacggcccaagccgatttcctagagttgcggggccgcgcggttctggcccgccaatgcggctcgtggaacctgtggggagacctagcatactgaaggaagataaccttaaggagttcgaccagctggatcaggaaaatgatgatggctgggctggggcccacgaggaggtcgattacacagagaaactgaaattttcagatgaggaggacggcagggattccgatgaggaaggtgccgagggtcatagagatagccagtcagcatctggggaggagcgacccccagaggccgatggcaagaagggcaatagcccgaatagtgaacccccaacgccaaaaactgcgtgggccgaaacctctagaccccctgagactgagcctggaccccccgctccaaagcccccgctgccccccccacacagaggcccagcgggtaattgggggcctcccggcgattatccagacagggggggaccgccttgcaaaccacccgctcccgaagatgaagacgaagcctggcggcagagaaggaaacagtccagcagtgaaatttcacttgctgtcgaacgtgctcggaggcgtcgagaggaagaggagagaaggatgcaggaagaaagaagagctgcctgcgccgaaaaattgaagaggctggacgagaaattcggagctcccgacaagaggttgaaggcagaaccggccgcccctcctgctgcgcccagtactcctgccccccctcctgcagttcctaaagagctgcccgcacctccggctcccccccccgcttccgctcctaccccagagaaagagcccgaagaaccagcacaggcgcctcctgcccagagtaccccaacacccggggtcgcagcagctccaacactggtgtccgggggtgggagcaccagctccacatccagcgggagtttcgaggcttcccccgtggaacctcaactgccgagtaaagaggggcctgagcctcctgaagaggtacctccccccaccacccccccagtgcccaaagtcgagccgaagggagatggaatcggcccaacgaggcagcccccgagccaggggctaggttatcccaaataccagaaaagcctgccgccacggttccagagacagcagcaggaacagctgctgaaacagcagcagcagcaccagtggcagcagcaccagcaagggtccgctccacctacgccagtaccaccctccccgccgcagcccgtaaccctgggtgctgtgccagcccctcaggccccaccaccccctccaaaagcattatacccaggcgcccttggtcgcccaccaccaatgccgcccatgaactttgatccgagatggatgatgattccgccatacgttgaccccagattgctccaagggcgaccccctcttgacttctacccccccggggtacacccttctgggctcgtgccccgggaacgcagcgactcgggcgggagttccagcgaacccttcgatagacacgctccggcaatgctaagggagcggggaacccctcccgtcgatcctaagcttgcatgggtgggggatgtgtttaccgctacccccgccgagcctcggccccttacgagccctctgcgacaggccgcggatgaagatgataaaggaatgagatccgagaccccgcccgttcctccaccacctccctaccttgcctcttaccccggctttcccgagaacggcgccccagggccgcccatttctagattccctctcgaggagccgggccccagacctctcccttggcccccagggagcgatgaggtggctaagatccagactccccctcctaagaaggagccacctaaagaagaaaccgcacagttgacaggaccggaagccggcaggaaacccgctagaggcgtcggttcaggggggcagggccccccaccacccagacgagagtctagaacagaaactcgctggggcccgagaccaggctccagtaggcgaggaattcctcccgaggagcccggggctcctccaagaagggccggcccaatcaagaagccaccacctcctacgaaggtggaggaactgccaccgaaacccctggagcagggagatgaaactccaaaaccccccaagcctgatcccctaaaaattaccaagggtaagcttggtgggcccaaggaaacgcccccgaacggaaatttatctcctgcaccccgcctacgacgggactactcatatgaacgggtggggccgacctcatgtcgagggcgagggagaggcgagtattttgcgcgcggcagagggttcagaggcacatatgggggccggggtaggggcgcagctggaaatagcgccgtgaccgaaagtttcgaagaaatgatgggtgtcgaagtcgggcagggcgatcagacaacgctcctcctgccagaggcagccctcccagcacgccacggcgccagagtgcagagcatgaggaaatcccccagtggagccgggagcggagctcagaaacaggccgcccgccctatgcgggtgatttggttattgcagacgagaaggcttccgcacccccggcgggaacactccccccgctccaggtccccaactacgcggagtcccacctttcccgctccggctcgctttacccccggggtcggtgagagctctcttcctgagggtatttctcccggccctcgaagacgggagccaccccaagtgtgcccaggctggagccctcctgctaagtccctcgctccgaagaagcctcccaccggccctctgccacccagtaaggagcccctgaaagaaaaactcatcccaggtcccctaagccctgtggctcgcggagggtcaaacggaggatctaacgtgggtatggaagatggcgagaggccccgcagaaggaggcatggcagggcacagcagcaagataagcctccaaggtttcgacggttgaagcaggagagagaaaatgctgctaggggcagcgagggcaaaccaagtctaacactaccagctagcgcaccgggacccgaggaggcattgactacagtgaccgttgccccagcaccaagacgcgctgccgccaagagccctgacctcagcaaccagaattcagatcaggccaacgaggaatgggagactgcttccgagtcaagcgatttcaccagcgaaagaaggggagataaagaggcccctccaccggtgttacttacacccaaggctgttggtactcccggtggaggaggcgggggcgccgtgccaggcatatctgcaatgagcaggggggatttatctcaacgagctaaagatctgtctaagcggagtttcagctcacagcggccgggtatggagcgtcagaatagaaggccaggacctggagggaaggccgggtcttccggatctagttcaggggggggcggcggaggacctgggggacgaactggccctggccggggggacaagagaagctggcccagtccaaagaaccgcagccgccccccagaggagagacctccggggctgcccttgcctcctccacccccctccagttccgccgtttttcggcttgaccaggtcatccacagtaatcctgccgggattcaacaagctctcgcccagttgtcttctcggcaaggctccgtaacggcccccgggggccatcccaggcataagccgggaccccctcaggcccctcagggacctagccctagaccacctacccggtacgaaccccagcgtgtgaactccggtctctcctctgaccctcacttcgaagaacccggcccgatggtgcgtggtgtaggcggcaccccccgggattctgcaggtgtcagtccatttccacccaaacgccgagaaagaccaccacgtaaaccagaacttctgcaggaagagtctctcccgccccctcatagcagtggctttttagggtcgaagccagagggacccggtccgcaggccgaatcaagagataccggtaccgaggccctgaccccccacatctggaatcgcctccacaccgcgacaagcaggaagtcatacagaccatcatctatggaaccctggatggagcccctgtcccccttcgaagacgtggccggcacagaaatgtcccaaagcgacagcggtgttgatttgtccggcgattctcaggtcagtagcggaccttgctcacagcgctcctccccagacggggggctgaagggcgccgctgaggggccaccaaaacggccaggaggctccagcccccttaatgccgttccttgcgagggcccgcctgggtcggaaccacctcgcaggcctccaccagccccgcatgacggagacaggaaagaactccctcgggagcaacctctgccacccggcccaatagggacagaacggagtcagcacacagatcgtggcactgaacctgggccaatccgacctagccatcggccagggccgccagttcagttcgggacatccgacaaggattccgatctgagactagttgtcggggatagcctcaaagcagaaaaagaactcacggcctcagtgacagaggccatccctgtttctcgcgattgggagctgctgccatccgccgccgcttccgcggaaccccagtcaaagaatcttgacagtgggcattgcgtcccagagccttcttccagtgggcaaagactgtatccagaggtgttttacggttcagcggggccctccagttctcagatcagtggaggacacgggcttagtgtcaccagcaagcagtggcggcgccccggcacaccttcactgcatccctaccgttcacagccactatatttgccacctggccctgcccctccctcagccctgttaagcggcgtcgcactcaaaggacaatttctcgacttcagcaccatgcaggctaccgaactgggcaaactgccagcaggcggcgtcctgtaccctccaccatcgtttctgtacagccccgccttttgtccttcacctttgcctgacacttctctgctgcaagtgagacaggacttgccctcacccagcgatttttattccacacccttgcagcccgggggacaaagtggatttctaccaagcggagccccagcacagcaaatgcttctccctatggttgacagccagctccctgtggtgaatttcggcagtctgccacctgcaccaccgcccgcaccacccagcctgagtttgctgcccgtgggccctgctcttcagcctcccagcctagctgtgcggccacctccagcaccagcaacacgggttctgccatcgccagcacggcccttccctgcatcgttaggccgggctgaactgcaccctgtcgagctgaaaccttttcaggattatcagaaactaagtagtaatttgggcgggcctggatcttctaggacgcctccaaccggaagatctttttcaggtttgaattcaagactcaaggccactccctcaacgtattcgggagtttttcgtacccaacgcgtcgatctttaccagcaggccagtccacctgacgccctgcgctggattccgaagccctgggaacgcacaggacccccacctagggagggtccgtcccgtcgcgcagaggagcccgggtccaggggagataaggagcccggccttcctcctccaagatag

SEQ ID NO: 130063 - DNA, 4149 bp, synthetic construct
  misc_feature 1..4149: note = Description of Artificial Sequence: Synthetic coding sequence
  source 1..4149: mol_type = other DNA
atgctgcgggagcgagggacacctcccgtggatccaaagcttgcctgggtcggcgacgtgttcacggccactccggccgagccccggccacttaccagccccctgcgccaggcagctgatgaagatgacaaaggcatgcgctcagagaccccaccagtaccgcccccgccgccctatcttgccagctaccctggttttccggagaatggagcaccagggccgcccatatcgagatttccactagaggagccaggacccagacccctgccatggccgccaggtagtgacgaggttgcgaaaatccaaacccccccgcccaagaaggagccacctaaggaggagactgcccagctcacaggccccgaggctggcaggaagcctgctcgcggagtaggaagcgggggccagggccccccgccgccaagaagggagtctagaactgaaacgcgctggggaccccgacccggtagttctcgaaggggaatcccacccgaagaacccggagcgccccccagacgcgctggaccaatcaagaaaccacccccaccaacaaaggtggaggagctcccccctaaacccctggaacagggagacgagaccccgaagcctcctaaaccagacccactaaagatcactaagggaaaactgggcggccccaaggagactcctcccaacgggaatcttagtcctgccccccgactccgccgtgattactcctatgaaagagttggtcccacaagctgcagggggcgcgggcgcggtgaatatttcgcccggggtagggggtttcggggaacctacgggggcaggggaaggggagctcggtcacgggagtttcgtagctatcgggaatttcgcggagatgacggtagaggaggggggacaggcggacccaaccatccacctgccccccgtggaagaacagcgagcgagactagaagcgagggcagtgagtatgaggaaatccctaagcgtcggagacagagaggatccgagactggtagcgaaacgcacgagtccgatctggctccttctgataaagaggcacccaccccgaaggaaggtacattaacgcaggttccactggcccccccaccacccggcgctcctcccagccccgcccccgctcgctttactgccagagggggtcgggttttcacccctaggggagtcccctcacgaagaggacgaggtggcgggaggcctcccccccaggtttgccccggctggtccccgcccgcaaagtctttggccccaaagaagcctcccacgggcccgttgcccccatctaaagagccactgaaagagaaattaattcctgggcccttaagtcctgtagccagggggggctctaatggagggagcaatgttggcatggaagacggcgaacgcccaaggcgtcgcagacatgggcgagcacagcagcaagacaaacctcctcgtttccgaaggctgaagcaggagcgggagaatgcagccagaggatccgaggggaaaccctccctaacactgcctgctagtgcccctggtcccgaagaggcactcactactgtgacagtggccccagctccgagacgcgccgccgcaaaaagcccagacttgtccaaccagaactccgaccaggctaacgaagagtgggagactgcgagcgagtcatctgacttcacctccgagcgccggggagacaaggaggcccccccccccgtcctgttgaccccgaaagcagtaggcacccccggaggcggcggaggcggcgctgtgcccggaattagcgccatgtcgaggggcgatctatctcaaagggctaaggatctttccaagcggtccttctctagccagcggcctgggatggagcgacagaatcggcggccaggcccaggaggtaaagctgggtccagcggctcttcctctggaggcggggggggaggtcccggaggacgtacaggccccggcagaggtgataagcgctcatggccaagccctaagaaccggtctagaccaccagaggaaaggccccccggactacccctcccccccccacccccaagttcaagcgcggtgttccggcttgatcaggtcatccatagcaatcctgcaggcattcagcaggccttggcccaattatccagccggcaaggatccgttaccgcccctggcggtcacccccgccataagccaggccctccacaggccccacagggcccatcaccaaggccacccacacggtacgagccacaacgtgtgaatagcggcctgtccagcgacccccattttgaggagcccgggccaatggtccgaggtgtagggggtaccccccgggattcggctggcgtgagtccattccctcctaaacggagagaaagacctcccaggaaaccagaactgttgcaggaagaatctttgcctccccctcactccagcgggtttcttgggtctaaacccgaaggaccgggaccccaggccgaaagtcgcgacactggaacggaagcgctcacacctcacatttggaatcgtctgcatactgctacgagcagaaaatcctacaggccgtccagcatggagccttggatggaaccgttgagtcctttcgaggacgtggctggtactgagatgagtcaatccgattcaggggtagacctcagtggcgactctcaggttagctccgggccttgttcccaaaggagcagtcccgacggcggcctcaagggagccgctgagggtccacctaaaaggcccggcgggtcatccccattgaacgcggtaccgtgcgaggggccccccggctcagagcctcccagacgaccaccccccgccccacacgacggtgatcgaaaggaactaccccgggagcagcctctgccccccgggccaattggcacggaacgttcacaacacacagatcgagggactgagcccggcccgatcagaccctctcacagaccgggtcctcctgtacaatttggaacaagtgataaggacagcgacctcagattggtggtgggtgacagcctgaaggcagaaaaggaactcaccgcctccgttacagaagctattcctgttagtcgcgattgggagctcttgccatccgcagccgctagcgccgagccccagagcaaaaacttggacagcgggcattgcgtgccagagccatcttcctctggccagaggctttaccccgaggtgttttatgggagcgctggacctagcagttcacagatctccggaggtgccatggatagccagctgcaccctaacagtggaggttttcgcccaggaacaccctccctgcacccctaccgatcacaacctttatacctgccacctggacccgccccacctagcgccctgctatctggggtggccctgaaaggccaattcctggattttagtacaatgcaggcaactgaacttgggaaactgccggctggtggagttctctatcctccacccagtttcttatattctcccgcgttttgcccctcccccttgcctgacacttctcttctacaagtccggcaggaccttccatccccttcagatttctactcaactccgcttcaacctgggggtcaatctgggtttctaccgtctggtgctccagcgcaacagatgttactacctatggtcgactcccagctcccggtggtgaactttggctctcttcccccggctcctccacccgcccctccttcattaagcctgctgcccgtgggacctgccctgcagccaccctccttggctgtgcgacctccaccggccccggctacacgcgtcctgccatccccggctaggccctttcccgcatcattaggccgagctgagctccacccagtggagctcaaacccttccaggattatcagaagcttagcagtaacctggggggcccggggtccagcagaactccacccaccggtcgtagcttctccgggctcaattcccgactcaaggccacgccatcgacctactcaggcgtcttccgcacccagagggtcgatctgtaccaacaggcttcaccacctgacgctctcaggtggattccaaagccctgggagagaactggcccacctccacgggaaggaccatcccgtcgggctgaagagccggggtcccggggggataaagagccgggcctgcctcccccacgatag

SEQ ID NO: 130064 - DNA, 6450 bp, synthetic construct
  misc_feature 1..6450: note = Description of Artificial Sequence: Synthetic coding sequence
  source 1..6450: mol_type = other DNA
atgagcgacaggtctggcccgacagccaagggtaaggatgggaagaagtactcttctctgaatctctttgatacctataaagggaagagtctggaaatccaaaaacccgccgttgctcctaggcatggcttgcagagcttgggcaaggttgccattgccaggcgtatgcccccaccagccaacctaccatctctgaaggctgagaacaagggaaacgatccaaacgtgtcccttgtgcccaaagacgggacaggttgggcctctaaacaggagcagagcgatccaaaatctagcgatgcctccactgctcagcctcccgaaagtcagcctctgcctgcaagtcagacaccagcttcaaatcagcccaaaagaccaccagccgctcctgagaatacgcccttggtgccaagcggcgtcaagtcctgggcccaggcctcagtcacacacggtgcccatggtgatggtgggcgggcgagcagcctgctgagccgctttagtcgcgaagagttccctactttacaagcagccggagaccaggataaagccgccaaagaaagggagtcagccgagcagtcctccggaccggggccgtccctgcgcccacaaaactccacgacttggcgtgatggaggagggagaggacctgacgaactggaaggacctgactcaaaattgcatcacggccacgacccacgagggggcctccagccttctggccccccccagttccccccttataggggaatgatgcctccgttcatgtatcccccctacttaccttttccacccccttatggtcctcagggaccatatagatatcctacaccagacgggccttcgaggttccccagggtggcaggacctcgcggatccggacctcccatgcggctggtcgagccggtggggagacccagcatcttgaaggaggataacctaaaggaatttgatcagctggatcaggagaatgatgatgggtgggccggggcccacgaagaggtggattatacagaaaaactgaagttttcggacgaggaggatggccgggatagcgatgaggagggcgctgagggccaccgcgacagccagagtgctagtggggaggaacgcccacccgaagcagacgggaagaaaggaaactcccccaactcggaacctccaaccccaaaaactgcctgggcagagaccagtaggccacccgagaccgaacccggacctccagctcctaagcctcctttgccacccccccataggggaccagccggcaactggggaccgcccggagattatccagatcgggggggtccaccctgcaaacctccagcaccagaggatgaggatgaagcttggagacagcgacggaaacagtcaagttcggagatatcactggccgtggaaagagcaagacgaaggcgggaagaagaggagcggcgcatgcaggaggagagacgcgcggcgtgcgctgagaaactcaagcggcttgatgaaaagtttggcgcacccgacaaaagactgaaggcagagcctgcggctcctccagctgcaccctccactcccgcgcctcccccagcagtgccgaaggaacttcccgcccccccagcacccccaccagcgagtgctccaactcctgagaaagaacccgaagagcctgctcaggccccaccagcacaaagcaccccaacacccggtgtggctgccgcacccacactggtgtcagggggcgggtcaacatctagtacaagttccggctcctttgaagcttcacccgtggagcctcagcttcccagtaaagaggggccagagccccccgaggaagtgccacccccaaccacaccccctgtcccaaaggtggaaccaaagggggatggcatcgggccaacgaggcagcccccatcacaaggcctgggctatccaaaataccaaaaatccctcccccctcgatttcagcggcaacagcaagagcagctgctgaaacagcagcaacagcaccaatggcaacaacaccagcagggttccgcgcctcctacacccgtgcccccaagtcccccccaaccagttacattgggggctgtgccggccccacaggctccaccccctcctcctaaggcactgtatcccggggcccttggaaggcccccgccaatgccccccatgaacttcgacccaagatggatgatgatccctccatatgtggaccctcgcctactgcagggaagaccccctctggatttttacccaccgggggtgcaccctagcgggctcgtcccacgcgaacggtcagattccgggggtagctccagcgagccatttgatcggcatgctcccgcaatgctcagggaacgcggaacccctccagtagatcctaaactagcttgggtgggtgatgtgttcaccgcaacgcccgccgagcctagaccactaacctctccattgagacaagctgctgatgaggatgacaaaggaatgagatcagaaacacctcctgttccaccacccccaccctatctggcgagctatcccggcttccccgaaaatggcgctccaggaccacctatcagtcgctttcctctcgaggagccggggccaaggcctctcccctggcctcctggatcagacgaagtcgcaaagattcagacccccccacccaaaaaggaaccccccaaggaggaaacagcccagttgaccgggcctgaggccggacggaagccagcacgaggcgtcggttccggcggacaaggcccacctcctcctcgccgggaatcgaggaccgagacacggtggggaccccggcctggatcatctcggagggggattcctccagaggagccaggtgcgcctcctagacgcgctggcccaataaaaaaacctcccccacctacaaaggtagaagaactgcctccgaagccgttggagcagggcgacgagacgcccaagccgcctaagccagatcccctcaaaattaccaagggaaagctaggagggcccaaagagactcctcccaatggaaacctgagcccagctcctcgactgcgccgtgattacagctacgagcgcgtcggccccacttcctgcagggggagagggcgcggcgagtactttgctagaggaagaggctttaggggaacgtatggaggacgcggccggggcgctgccggaaatagcgctgtcactgagtcttttgaagagatgatgggcgtggaggtcgggcagggggatcagacgacgctgttgctgccagaggctgcgttaccggctaggcacggggcccgggtgcagtctatgcggaagagcccatctggtgcaggaagtggcgcacagaaacaagcagccagaccaatgcgggtcatctggctcctccagacccggcggctaccgcatccacgccgagagcattctcccaggtcgcggtcaccaactacgaggtctcctacctttccagcgcccgccagatttactcccggggtgggtgagagctcactgccagagggcatcagtcctggaccaagaaggagagagcctccgcaggtgtgtccagggtggagtcctccggcgaagagtctggcccctaagaaaccgccaacaggcccactgccgcccagcaaagaaccattgaaggagaagcttatccccggcccattgtcccccgtggcccgtgggggatcaaatggcggatcaaatgtgggaatggaagatggcgaaagaccacggcggaggcggcacgggcgggcacaacagcaagacaaaccccctcggttcaggcgcttaaagcaggaaagggaaaacgccgctcgcgggtcggagggcaagcccagcctgaccttacctgcctccgcccctggcccagaggaggccttgactacagtcactgtggcaccagctcctagaagagccgccgcaaagtcccctgacctgtccaaccagaatagcgaccaggcaaatgaagagtgggaaacagcctctgagagttctgatttcacgagcgaaaggcgcggtgacaaggaagcccctcctcccgtgttattgacccccaaagcggttgggacaccaggggggggcggagggggtgcagtgcccggcatctctgctatgtcacgcggagatttgagccagcgggcgaaggacttgagcaaacgttccttttcatctcaacgcccaggaatggaaagacaaaatcggcgccctggccccggtggcaaggcagggtcttctggctcctctagcggtgggggcggtggaggcccaggaggacgtaccggcccaggccgaggcgataagcgcagctggcctagccccaagaaccgttcgcggccacccgaagagagaccacctggtcttccattgcccccaccccctccgagttcaagcgccgtgtttaggctcgatcaggttatacattctaacccggctgggatacaacaggccctggcccagctcagcagccggcaaggatccgtgaccgctcccgggggacatccccgccataaaccagggcctccccaggcacctcagggcccctccccccgcccacctacgcgttacgagccccagcgcgtgaactctggactgtcctctgatccgcactttgaagaaccaggtccgatggttaggggggtggggggcacacctagagacagtgctggagtatcccctttccccccaaagcgcagagaacggcctcctagaaagcccgagttgctccaggaagagtcgttaccacccccgcacagctcaggctttctgggatctaagccggagggcccagggccccaagcagagagcagggatacaggtacagaggcgttaactccacatatatggaatcgccttcataccgccaccagccggaaaagttacagacccagttctatggagccatggatggagccactgagtccattcgaagatgtggctggtactgagatgtcccagagtgactccggtgttgatctatctggtgactcacaggtgtcatctggcccatgttctcagcgctcttcgccagacgggggccttaagggggcagcagaaggcccacctaagagaccagggggaagctcccccctcaacgccgtaccctgtgagggccctccagggtctgagcctccccgaagaccaccacctgctcctcacgatggcgaccgaaaagagctgcccagagaacagccacttcccccagggccaatcggcaccgagagatcccaacatacggaccgaggcaccgaacctggccctatccgccccagccatcggcccggtccacccgtccaatttgggacttctgataaagacagtgacctgcgcctcgtcgtgggtgactcactgaaggccgagaaggaactgaccgccagcgtaacagaggctattcctgtcagccgcgactgggaactcctgccctcggcggcagcttccgctgaacctcaaagcaaaaatctggacagtggccattgtgttcccgaaccctcctcttccgggcaaaggctttatcccgaggtgttctacggatctgcagggccctcttctagccaaatcagcggaggtcacggactttcagtgaccagcaagcaatggaggcgcccggggacgcccagtctgcacccttaccgtagccagcccctctacctaccacccggcccggccccaccaagtgccctgctctctggggtagccctcaaggggcagttcctggacttctcaaccatgcaggcaaccgagctgggaaagctgcccgctggaggtgtcctttatccacccccgagttttttgtatagccccgccttttgcccatcacccctgcctgacacctccctgctccaggtgaggcaggacctaccctccccatctgacttttacagcacccctctgcagcctgggggccagagcggcttcttgccgtcaggagcccccgctcaacagatgttacttcccatggtggatagccagctccctgtggttaattttggatctctgccaccggctccccctcctgcgcccccctcactgtccctcttgcccgtgggccctgccctacagcccccatcgctcgcagtccgacctcctcccgctccagcaacacgggttcttcctagtcctgctaggccgtttcccgcctctctcgggcgagccgaacttcaccctgttgagctgaaacccttccaggattaccaaaagctctctagcaacttgggaggtcctggcagctcacgcactcctcccacgggcaggtcattttctggactgaattcacggctgaaggccacaccaagtacgtactccggtgtgttccggactcaaagggttgacttataccagcaggcttctccccctgacgccctccggtggattcccaagccctgggagcgcaccggtccaccccctcgagaaggcccatcgcgaagggcagaggagcccgggagtcggggtgacaaagaaccaggtttacctccaccaagatag

SEQ ID NO: 130065 - DNA, 1650 bp, synthetic construct
  misc_feature 1..1650: note = Description of Artificial Sequence: Synthetic coding sequence
  source 1..1650: mol_type = other DNA
atgtctgacaggtccggtccaactgctaaagggaaagacgggaaaaaatacagtagcctcaacctgttcgacacatataagggtaaatcacttgaaattcagaagcccgctgtagcccccaggcatggactgcagtccttaggaaaagtggcaattgcaagacgcatgcccccccccgccaatctgccgagtctcaaggctgaaaacaaaggaaatgacccaaacgtctctttggtcccgaaggacggaacaggatgggctagcaaacaggagcagtccgatcctaagagtagtgatgcaagtaccgctcagccccccgaatcacaacccctgcctgcttcgcagacacccgcatctaaccagccaaaacggccacccgccgcaccagaaaatacaccactggtgccctcaggggtgaaatcgtgggcccaggcaagcgtgacacacggggcacacggggatggagggcgcgcatcgagcttgctttcaaggtttagcagagaggagttccctacactccaggcagcgggcgaccaagacaaggcggcgaaagaacgcgaaagtgccgagcagtcctctgggccaggaccctcactgcgtccacagaactcaacaacctggcgcgatggcggcggccggggccctgatgagcttgaaggccccgactctaagttacatcacggacacgatcccaggggcggacttcaaccctcagggcccccccagtttccaccatatcgaggcatgatgcccccgttcatgtatcccccctacttaccatttcccccaccgtacggccctcaggggccttatcggtatccaacccctgacgggccttccaggttcccccgcgtagccggtcctcgtgggagcggaccacccatgagactagttgagccagtcggtcgaccgtcaatcctgaaggaagacaatttaaaggagtttgaccagttggatcaggagaacgatgacggctgggcaggtgctcacgaagaagttgattatactgagaagttgaagttcagtgatgaggaggacggccgcgattctgatgaggagggagcagaaggacaccgggactctcaatctgcgtctggcgaagaacggccaccagaagcggacggaaagaaaggtaatagccctaactccgagccgcccactccaaaaactgcgtgggcagaaacctctagacccccagagactgaaccaggccccccagctcctaagccaccactcccccctccccatcgcggaccagctggaaactggggtccccccggggattatccagaccgtggtgggcccccgtgcaaaccacctgcccctgaggacgaagatgaagcttggcggcagcggcgtaagcagagtagttctgaaattagtttggccgttgagagggcgaggcggagaagagaggaggaggagagacgtatgcaggaagagcggcgtgccgcatgcgccgagaaactgaaaagactggatgagaagtttggcgccccggataagcgactgaaggctgaacccgcagctcccccagcagccccttctaccccggctcctcctccggcagcgtcggaggtaccactgatggaggattcccgagggcagcagcgtgatccccccagaggccttgaggctccccacccttag

SEQ ID NO: 130066 - DNA, 1650 bp, synthetic construct
  misc_feature 1..1650: note = Description of Artificial Sequence: Synthetic coding sequence
  source 1..1650: mol_type = other DNA
atgagcgatagaagcggtccaactgctaaggggaaggacggcaaaaaatattcatccttgaaccttttcgatacctacaaaggaaagagccttgagatacagaaaccagcagtcgcgcctaggcatggattgcagtcactaggtaaggttgccatcgctcgtaggatgccaccacctgccaacttaccgtctctgaaggcggagaataaaggaaatgatcctaatgtgtcgctggttcctaaagacgggaccgggtgggcttctaagcaggagcagtcagacccaaaatccagtgacgcttctaccgctcagcctcccgaatcgcagcctctgcctgcgtcacagactcccgcttcaaatcaacctaaacgaccacccgcggcaccggaaaacaccccattagtcccttccggggtgaagagctgggctcaagctagtgtgacccacggagctcatggcgatgggggccgcgcatccagcttgttgtcaaggttcagccgcgaggagttccctactttgcaagccgccggagatcaagacaaagcagctaaagaacgtgagagcgctgaacaaagctcagggcccggtccctctttgcgcccccagaattccacaacatggagagacggcgggggaaggggccccgacgagctcgaaggtccagacagtaaattgcaccatggtcatgacccaaggggtgggctgcagccctcaggcccacctcagttcccaccctacagaggtatgatgccccctttcatgtacccgccttatctgcccttccctcctccttatgggccacagggcccctaccggtatccaacccctgacggccctagtaggttccctcgggtcgcggggcccaggggctctggacctccaatgcgcttagtggagcctgtcggtaggccttcaattttaaaggaggataatctgaaagaattcgaccaactcgaccaagagaatgacgacggatgggcgggggcacatgaagaagtagattatacagagaaactgaagttttcagatgaagaggatggccgcgactccgatgaagagggtgctgaaggacatcgggatagccagtccgcaagtggggaggaaaggccccccgaggctgatggtaagaaaggaaactccccgaatagcgagcccccaactcccaaaaccgcctgggctgagacaagtcgcccgccagaaactgaaccgggccccccagcacctaaaccacccctgcccccgccacacaggggacctgccggaaattgggggcctcctggtgactacccagatagaggaggacccccttgtaaaccaccggctccggaagacgaggatgaagcatggcgacagcggaggaaacagtcttctagtgagatttcactggctgtggagagggctcgacgacgcagagaggaggaggagagacgcatgcaagaagaacgtagggcagcttgtgccgaaaaactgaagaggctcgacgagaagtttggagcccccgacaaaagactcaaggctgagccggcagctccacccgcagcaccgtctacgcctgcgccgccacctgccgcaagtgaagtacctctgatggaggattctcgcgggcagcagagagatccacctagaggcttggaggctccacacccttag

SEQ ID NO: 130067 - DNA, 4149 bp, synthetic construct
  misc_feature 1..4149: note = Description of Artificial Sequence: Synthetic coding sequence
  source 1..4149: mol_type = other DNA
atgctgcgtgaacgtggtacaccacctgtggaccctaagctcgcctgggttggcgacgtgtttaccgcgacgcctgccgagcctcggccactcacaagccccctgagacaagccgctgatgaggatgataaaggcatgcgatccgagaccccccctgtgcctcccccacctccttaccttgcgagctacccaggattccctgagaatggagcgcccgggccgccaattagccgattcccgctggaggaacctggcccacgccccttgccttggccacccggcagtgatgaagtcgccaagattcagactcctcctccgaagaaggagccaccaaaggaagaaaccgcccagctaacgggaccagaggctggccgcaagcctgcccgaggggtcggttctgggggacaaggacctccaccacctagaagagagagcaggacagagaccaggtggggtccaagacccggctcctctagaaggggcattcccccagaggagccaggcgccccaccgcgccgagctggacccattaaaaagccgccaccacctacaaaggtggaggagctgccgccgaagcctctggaacagggagacgagacacccaagcccccaaagcctgatcctctgaaaatcacaaaaggaaaactcgggggccccaaggagacgcctccgaatggcaacctttcacctgctccccgactcaggcgagactatagctacgaacgtgttgggcccacgagctgtcgcggtagaggtagaggtgagtactttgctcgtggacgggggttcagaggaacctacgggggtcggggcaggggtgcccgctctcgcgagtttcggtcctaccgggagttcaggggagatgatggaagaggagggggcaccggcggcccaaatcacccccctgctccccggggtcggacggcttcagaaaccagaagcgaaggaagcgagtatgaggagattcctaaacgccgccgccaaaggggatctgagactggttctgagacgcacgaaagtgacctggcgcctagtgacaaggaagcccctaccccaaaggaaggcacgctcacccaggtgccgctggcccccccaccccccggtgctccaccttcccctgctccagccaggttcacagctaggggtgggagagtctttaccccccgaggcgtgccttcacgcagggggagaggtgggggacgtcctcccccccaggtttgccccggatggtctcccccagctaaaagcctcgcccccaagaaacccccaaccggcccactgccgccaagcaaggaacccctgaaagaaaagctcatccccgggcctttatccccagtcgctcggggtggaagtaacggaggatcgaatgtgggtatggaggatggagagaggcccaggcgacggaggcacggaagagctcagcagcaggacaagccaccgcgatttcgaaggctgaagcaggagcgggagaatgccgcccgaggatccgaaggcaagccctcgctcaccctcccagcttccgcacccggccctgaagaggcactgactaccgtgaccgtcgctcccgcacccagacgcgctgccgcaaagtccccagatctgtccaatcagaacagcgaccaggcaaatgaggagtgggagactgccagtgagagctccgatttcaccagcgaaaggagaggcgataaggaagcccctccccccgtccttctgacacctaaggcagtcggcactccaggcggaggcggaggaggcgctgttccgggaataagcgcgatgagcagaggggacctgtctcagagagccaaggacctgagcaaacggagttttagcagccaacggccagggatggaaaggcaaaatcgacgccctgggccaggagggaaagctggcagttcaggttccagcagtgggggaggcggaggaggacctggcgggagaaccggacctggtcgaggtgacaaaaggtcatggcccagtcccaagaataggtctaggcctcctgaggaacggccccctgggctgcctttgccccctcctcccccttcttcctccgctgtcttcaggcttgatcaggttattcactccaaccctgctggaatacagcaggcgctagctcaattgtcatctaggcagggttcggtgactgctcctggagggcatcctaggcataaacccggcccaccacaggcccctcagggtccctccccaagaccgcccacacggtatgagcctcaaagagttaattccggcttaagcagcgatccacatttcgaggaacccggccctatggtccgcggagtgggaggcactcctagagatagcgctggggtgtctcctttcccccccaagcggcgagaaaggccaccacggaaaccagaattgctgcaagaggagagcctgcctccccctcacagctctggttttctcggtagcaagcccgagggccctggcccgcaggcagaaagtagggacaccggcaccgaggcccttacccctcatatctggaatcgactccacactgcgaccagtcgaaagagttacagaccatcatccatggaaccgtggatggaaccgttaagcccatttgaggatgtggcagggactgagatgtcacagtccgactctggggtggacctctccggcgactcacaggtatcctcagggccatgctctcagcgcagcagcccagatggcggacttaagggagccgccgagggcccccccaagcggcccggaggctcatcacctctgaatgcggttccatgcgaaggcccaccgggctctgagccgccgcgacggcccccgcccgctccccacgatggagatcgcaaagagcttcctagagagcagcccctgcccccaggccccataggcactgagcgcagccagcacacagacaggggaaccgagcccggccccattcgtccttctcatcggcccggcccacccgtccagttcgggacgtctgataaggatagcgatctccggctggtcgtgggcgattctttgaaggcggaaaaggagcttacagcttcagtcacggaagccattcccgtaagtcgggattgggaacttctccctagcgcggccgcctcagctgagccccagagtaaaaatcttgatagcggccattgtgtcccagagcccagctcaagcggccagcggctgtaccccgaggtgttctacggcagtgcggggccctcctcaagtcagatatccggcggggctatggacagccagttgcatcccaactctggaggttttcgcccagggaccccatctttgcacccttatagatcccagcccctgtacctaccacccggtcccgctcccccctcggccctgctttcaggcgtggccctgaaaggtcaatttttagacttcagtactatgcaggccaccgaattaggcaaactgccagccggcggggtgctctatcctcctcccagcttcctttacagcccagcattttgtccttccccattacctgatacttctctgctacaagttcggcaagacttaccatcaccttcagacttctattctacgccgctgcagcctggagggcagtcaggcttcctgccttcaggcgcacccgcccagcagatgctgctccccatggttgatagtcaactgccggtggtgaactttggcagccttcctccagctccaccccccgcaccgccatcgctttcgctcctgccagttggccctgcccttcagcctccctctctcgcagtacggcctcccccagcaccagccaccagagtgctgcccagccctgcccgtccattccctgcttcgcttggccgagcggagctgcaccctgttgaactgaagcccttccaggattaccagaaactttcctcgaacctgggaggtcctggctcctcacggacgccacccaccggcaggtccttttccggcctcaacagccgcctcaaagcaactccctccacgtacagtggggtgtttaggacacagcgggtggacttataccaacaggcttcccccccagacgccttgagatggatcccgaaaccatgggagaggactggtccccccccccgtgagggcccttcccggagagcagaagagcctggctctaggggcgataaagagccaggtcttccacccccacggtag

SEQ ID NO: 130068 - DNA, 984 bp, synthetic construct
  misc_feature 1..984: note = Description of Artificial Sequence: Synthetic coding sequence
  source 1..984: mol_type = other DNA
atgaccgtggtttcggtgcctcagcgcgagcctctggtgctgggggggcggctggcgcccctcggattttccagtaggggatattttggcgccctgcctatggttacaacggcacctccaccgctgcctaggattcccgacccacgggctctgccaccgaccctgtttttaccgcactttctgggcggcgatggaccctgtctgactcctcaaccacgggctccagcggctctgccaaacagatctctggcagtggccggcggtactccgagagctgctcccaaaaagcgccggaaaaaaaaggtcagggcctcccctgctggacagctgccctcccggtttcaccaataccagcagcatagaccttccttggagggtggaaggtctcccgcgaccgggccctcaggcgctcaggaggtgccaggaccagcggctgcattggctccctcccctgctgctgccgctggaactgagggggcctctcccgatctggccccgctacggcctgcggccccaggtcagacccccctcaggaaggaagtgctaaagagcaagatgggcaagagcgagaagatagcgctccctcacggtcagctcgtccacggtatccacctgtatgaacagccgaagataaaccggcagaagagcaaatacaaccttccactcactaagataaccagcgctaagagaaacgaaaacaacttttggcaagattccgtttccagcgaccgaattcaaaagcaggaaaaaaaaccctttaaaaatacggagaacataaagaatagccacctgaagaagtcagcattcctaacggaagtcagccagaaagaaaattatgccggagccaagttttccgacccaccaagccccagcgttctgcctaagcccccgtcccattggatgggtagtacagtggaaaactccaatcagaatagggagctgatggctgtgcacttgaaaaccctacttaaggtgcagacctag

SEQ ID NO: 130069 - DNA, 429 bp, synthetic construct
  misc_feature 1..429: note = Description of Artificial Sequence: Synthetic coding sequence
  source 1..429: mol_type = other DNA
atgggcaagtccgaaaaaatcgccctgccacacgggcagctggtacacggtattcacttgtacgaacagcctaagattaatcgccagaagagcaagtacaatctgcccttaaccaagatcacaagcgccaagcgcaacgagaataatttttggcaggatagtgtgagttctgatagaattcagaaacaggagaaaaagccctttaagaacaccgagaatatcaaaaacagccacctcaagaagagcgcatttttgaccgaggtctcccagaaagagaactacgctggtgcaaagttttccgatcctccttctccatccgtcctccccaagccaccgagtcattggatgggttctactgtggagaacagtaaccaaaatcgcgagctgatggcggtgcacctcaaaaccctgcttaaggtccagacatag

SEQ ID NO: 130070 - DNA, 429 bp, synthetic construct
  misc_feature 1..429: note = Description of Artificial Sequence: Synthetic coding sequence
  source 1..429: mol_type = other DNA
atgggtaagtctgagaaaatcgccctccctcatggacaattggttcatgggattcacctttatgagcaaccgaaaatcaataggcagaagtcgaagtacaatttgcccctgaccaagattacatcagcaaagcgcaacgaaaataacttctggcaagattccgtgtcttctgatcggatccagaagcaagaaaaaaagccctttaaaaataccgagaatatcaagaattcacatttgaagaagtcggcattccttaccgaggtctcccagaaggagaactacgccggagctaagttctccgatccacccagcccatctgttcttcctaagcctcctagtcactggatggggagcaccgtggaaaattcaaatcagaatcgggagctcatggcggtgcacttgaagacactcctcaaggttcagacctag

SEQ ID NO: 130071 - DNA, 420 bp, synthetic construct
  misc_feature 1..420: note = Description of Artificial Sequence: Synthetic coding sequence
  source 1..420: mol_type = other DNA
atgggcggcggcgagagatacaacatccccgctccccagagccggaacgtgtctaaaaatcaacagcagctgaatcgccagaagaccaaggaacagaacagccaaatgaagatcgtccacaaaaagaaagagagagggcatgggtataactccagcgcggctgcgtggcaggccatgcagaatggcgggaagaataagaattttcccaacaatcagtcatggaacagcagtttgtctggccctcggctcttatttaaatcccaggcaaatcagaattacgccggtgccaagttctccgagcctccgagtccgagtgtgttgcctaaaccccctagtcactgggtgccagtcagcttcaatccttctgacaaggagataatgacatttcaacttaagaccttgctgaaggtgcaggtatag

SEQ ID NO: 130072 - DNA, 420 bp, synthetic construct
  misc_feature 1..420: note = Description of Artificial Sequence: Synthetic coding sequence
  source 1..420: mol_type = other DNA
atgggcggcggggaaaggtacaatatccccgctcctcagtcacgcaacgtaagcaaaaatcagcagcaactaaataggcagaagactaaggagcagaacagtcagatgaagatcgtgcacaagaagaaagaacgcggacacgggtataatagtagcgcagcagcttggcaagcgatgcagaacggggggaagaacaagaatttcccaaacaaccagtcctggaattcgagcctgtctggccctcgtcttttatttaaatcccaggctaaccagaattatgctggcgccaagttcagtgaaccaccctcgccaagcgtgctgccaaagcccccctctcactgggtccccgttagcttcaacccttctgataaagagatcatgacatttcagctgaagacacttctgaaggtacaagtgtag

SEQ ID NO: 130073 - DNA, 597 bp, synthetic construct
  misc_feature 1..597: note = Description of Artificial Sequence: Synthetic coding sequence
  source 1..597: mol_type = other DNA
atgcttttgattctgcttagtgtggccctgctagcactcagctctgcacagaacctgaatgaggatgtttcccaggaggagagtccctccctaattgccggtaatccccaggggccctctcctcagggcggtaacaagccgcaggggccacctcccccacctggcaaaccccaggggccaccaccccaaggcggcaacaaacctcagggtccacccccgcctggcaaaccacaggggccccctccccagggagacaagtccaggtcaccccggtcacctcctggaaaacctcaaggtccacctccgcagggcggcaagccacagggaccgccgccccaggggggcaacaaaccccaagggcctcctccccctggaaagccccagggcccacctgcgcaggggggatccaagagtcagtctgcccgaagcccccccggtaaaccacagggcccaccacagcaggaaggtaataaccctcaggggccacctcctcccgcaggggggaaccctcagcagcctcaggcgcctccagctggacaacctcaaggaccacctcggcctccacaggggggcaggccttctagacccccacagtag

SEQ ID NO: 130074 - DNA, 537 bp, synthetic construct
  misc_feature 1..537: note = Description of Artificial Sequence: Synthetic coding sequence
  source 1..537: mol_type = other DNA
atgttgctgatcctgttatccgtggctctgctcgccctgagctctgctcagaatttaaacgaagacgtgtcacaggaagagagtccttccctcattgctggcaacccacagggacctagtccgcagggaggaaacaagcctcagggaccaccccctcctccaggtaaaccgcagggtccaccgccacaaggcgggaataagccgcagggccccccaccgcctggaaaacctcaagggccaccccctcagggagataagagtagatccccacgctcccctccaggcaaacctcagggcccacctccccagggcggcaagccccaggggcctccagctcaggggggaagtaagtcccagtcggctcggagtccacctggaaagccccaaggcccaccacaacaggaagggaataaccctcaaggtccgcctcctcccgctggcggaaacccccagcaacctcaagcaccaccagccgggcagccacagggtccacccagacccccccagggagggcgacccagcagaccacctcagtag

SEQ ID NO: 130075 - DNA, 597 bp, synthetic construct
  misc_feature 1..597: note = Description of Artificial Sequence: Synthetic coding sequence
  source 1..597: mol_type = other DNA
atgttattgatcctgctctctgtggccctccttgccctgtcatccgcccagaatctgaacgaggacgttagccaggaagagagtccctcccttatcgccggtaacccacagggccccagcccccaagggggaaataagccccagggtccccctccccccccaggaaaaccccagggtcctcctccccaaggaggcaacaaaccacagggcccaccgcctcccggaaaaccccagggtccaccgccacaaggcgacaagagccgctctcccagaagtcctccagggaaaccccagggacctcctccccaaggcggaaagccccaaggtccacctccccagggggggaataagcctcaggggcctccacctccagggaaaccacaaggaccgccagcacagggtgggtccaagagtcagagcgcaagatctccaccgggcaagccccaaggacctccccagcaggaaggcaataatccacaaggtcctcctcccccagccggggggaaccctcagcaacctcaagcgcctcctgccggtcagccacagggaccgccaagaccaccgcagggaggacggccctcccgcccaccacagtag

SEQ ID NO: 130076 - DNA, 1251 bp, synthetic construct
  misc_feature 1..1251: note = Description of Artificial Sequence: Synthetic coding sequence
  source 1..1251: mol_type = other DNA
atgctgctgattttgctgagcgttgcccttctggccctgtcctccgcccagaacctgaatgaggacgtgagtcaagaagaaagtccttccctgattgccggcaacccgcagggtgcaccacctcaggggggaaacaaacctcagggcccgcctagccccccggggaaaccccagggacccccccctcaaggagggaaccagcctcagggccctccaccccctcctggaaagccgcaaggacccccacctcaaggaggcaataagcctcaaggacccccccctcccggaaagccccaggggccgccaccccagggcgataaatctagaagcccgaggtccccccccggtaagcctcaggggccacctccgcaaggaggaaatcaaccgcaaggccctccacctccaccaggaaaacctcagggcccgccgccacagggagggaataagccccaaggcccaccgcccccggggaaaccacaaggccctccgccccagggtgataacaagtcaaggtctagccggtccccaccaggtaaaccacagggtcctcctcctcagggcgggaatcagccacagggaccaccacctcccccaggaaagccccagggcccccccccccaggggggcaataagccccagggcccgcctcctcccggtaagcctcaaggccctcccccacagggcgacaacaagtctcagtctgcacgcagtcctcccggaaaaccccagggaccaccccctcaaggggggaaccagccacaaggccccccacctccccctgggaagcctcagggacccccaccccagggtggaaataaaccacaagggcctccaccacctggaaagcctcaggggcccccgccacaaggcggctctaaaagtaggtcttcgagaagtccgccaggtaagccccagggccccccgccccaagggggtaatcaacctcagggaccaccaccaccaccagggaaaccccaggggcctcccccccagggtggaaacaagcctcaggggcccccccctcccgggaagccccaaggcccccctccccagggcggctccaaaagcaggtcggctaggagccccccaggaaaaccccaggggcctcctcagcaggagggtaacaatccgcaaggcccaccaccgccggctggtgggaaccctcagcagcctcaggctcccccagccgggcaaccccaaggcccgccacgtcccccacagggagggcggccatcccgaccaccccagtag

SEQ ID NO: 130077 - DNA, 744 bp, synthetic construct
  misc_feature 1..744: note = Description of Artificial Sequence: Synthetic coding sequence
  source 1..744: mol_type = other DNA
atgctgctgattcttttatccgtggccctcctggccctgtcctccgctgagagcagtagcgaggacgttagtcaggaggagagccttttcttgatatccgggaagcccgagggtcggaggccacaggggggaaaccaaccacagaggcctccgccaccccccggcaagccccagggcccccccccacagggaggtaatcagtcacagggccctccaccacctccaggaaaaccagaaggccgccccccacagggcggcaatcagagccagggaccacccccccatccaggcaagcctgaacggccacctcctcaggggggaaatcagagtcagggaacacccccccctcccggcaaacccgagcgcccacctccgcaagggggcaatcagagccatagaccccctcccccaccgggaaaaccagagcgccctccgccacaggggggtaaccaaagccaggggccccctccccatccaggcaaacccgaaggaccacctccacaagaaggcaataagagccggtcagccagatcacccccagggaaaccccagggtccaccacagcaggaaggtaacaagccccaaggtcctcccccccctgggaagccccagggtcctccacctgcaggagggaatcctcagcaaccccaagccccccccgccggcaagcctcaaggaccaccgccgcctcctcaaggcggtcgcccccctcggcctgcacaaggccaacaaccgcctcaatag

SEQ ID NO: 130078 - DNA, 744 bp, synthetic construct
  misc_feature 1..744: note = Description of Artificial Sequence: Synthetic coding sequence
  source 1..744: mol_type = other DNA
atgttgctgatccttctgtctgtagcgctgctggccctgtcctcggccgagagctcctccgaagatgtaagtcaggaggagagcctcttcctgatatctggaaagccagagggtcgtaggccccagggcggcaaccagccccagcggcctccccctccgcccggtaagcctcagggccctccaccccaggggggcaaccaatcacagggccccccaccccctcctggtaagccagaggggcggcccccccagggcggaaaccagagccagggtcctccacctcatcccgggaagcctgagcggccaccacctcaaggcgggaaccagtcgcagggcacaccacctccacccggaaagcctgagcgccccccaccacagggagggaatcagagccacaggcccccccctccgcccggaaaaccagagaggccgcccccccaggggggtaaccagtcgcaaggaccaccaccacatcctggcaaacctgagggccccccaccacaggaaggcaataaatcgagatccgcaagaagcccccctggcaaaccccaagggccccctcagcaggaaggaaacaaaccgcagggcccacctccccctggtaagccacaagggcctcctcctgctggaggcaacccccaacagccgcaggcaccccctgccggaaagccccaaggacctcctccccctccccagggtggcaggcccccgcgccccgcccagggtcaacagcccccgcagtag

SEQ ID NO: 130079 - DNA, 537 bp, synthetic construct
  misc_feature 1..537: note = Description of Artificial Sequence: Synthetic coding sequence
  source 1..537: mol_type = other DNA
atgttgttaatcttactgtcagtggccttgttggcccttagctccgctgaatcttcctctgaggatgtgagccaggaagagagtctgttccttatttccgggaagcctgagggtcgtaggccacaaggcgggaatcagccccagagacccccccccccaccaggcaagccacagggacctccgcctcaaggaggaaatcagagccagggacctccgccacccccaggcaaaccggaagggagaccaccacagggaggtaaccagtcccagggacctccaccacaccctggaaaaccagagaggcccccccctcaaggaggaaatcagtcacagggtaagccccagggccctccccagcaagagggcaataagccacagggcccacccccgcccgggaagccccagggaccaccacctgccgggggcaacccacagcagccccaggccccacccgctggtaaaccccagggccccccacctccaccacaaggtggaagaccaccaaggcccgcacagggtcaacagccaccccagtag

SEQ ID NO: 130080 - DNA, 501 bp, synthetic construct
  misc_feature 1..501: note = Description of Artificial Sequence: Synthetic coding sequence
  source 1..501: mol_type = other DNA
atgctgcttatccttcttagcgttgcccttctggccttctctagcgcccaggatctaaacgaagacgtaagtcaggaggacgttcccttggtaattagcgacggcggagactcagaacagttcctcgatgaggaaaggcaaggacctccactgggcgggcagcagtcgcagcctagcgctggagacggcaaccaggacgacggacctcagcagggccctcctcaacagggaggtcagcagcagcaggggcctccacctccacagggaaagccccaagggcccccccagcaaggagggcacccgcctcctcctcagggtcgaccccaggggcccccccaacagggaggccaccctcgccccccgcgaggcaggccgcagggcccaccacagcagggcggtcaccaacagggccccccccctccaccacctggcaagcctcagggccccccgccacaggggggacggccgcaggggccaccccaggggcagtccccacagtag

SEQ ID NO: 130081 - DNA, 291 bp, synthetic construct
  misc_feature 1..291: note = Description of Artificial Sequence: Synthetic coding sequence
  source 1..291: mol_type = other DNA
atgctgctgattctactgtccgtcgccctgctggccttctcatcagcccaagacctcgatgaagacgtttctcaagaggacgtccccctggtgatctcagacggcggcgactctgagcagttcatcgacgaagaaggtcataaggatcaccccaaccgagaggctatcagcaaagttcttccacatctgctgctcgaaagcccaagggatcacctccccaagggggctgcccacaaggatttacaccgtgggtcgctactatcaaacctgggctttaacgatcgtaaatag

SEQ ID NO: 130082 - DNA, 501 bp, synthetic construct
  misc_feature 1..501: note = Description of Artificial Sequence: Synthetic coding sequence
  source 1..501: mol_type = other DNA
atgctcctgatcctgctcagcgttgcactgctcgccttcagtagtgcgcaggatttggacgaggacgtgtctcaggaggacgtacccctggtgatcagcgatggtggggattcagaacaattcattgacgaggagcggcaggggcccccgctgggcgggcagcagagccagcctagtgccggagatggcaaccagaacgacggtcctcagcagggtccaccacagcagggaggccaacagcagcaaggccctcctcctccacaggggaagcctcaggggccccctcagcagggaggtcaccccccacctccacagggtcgaccccaaggcccgcctcagcagggggggcacccaagaccaccccgggggcggccgcagggccctccccagcaagggggccatcagcagggacccccaccccccccgccgggaaaacctcagggccctcctccccaggggggacgcccccagggcccgcctcagggccagagcccacagtag

SEQ ID NO: 130083 - DNA, 501 bp, synthetic construct
  misc_feature 1..501: note = Description of Artificial Sequence: Synthetic coding sequence
  source 1..501: mol_type = other DNA
atgctgctcatcctgctatcagtggcactgctcgccttctccagtgcccaagacctcgacgaagacgtctcacaagaggacgtacccctcgtgataagcgacggaggcgactccgaacagttcatagacgaagagagacaaggcccgcctttaggaggccagcagagccagccctccgcaggcgatgggaaccagaacgacggacctcagcaaggtccaccgcagcagggaggacagcagcagcagggaccgccgccccctcagggcaagcctcagggacctcctcagcagggcgggcacccaccaccgccccaggggcgaccacagggccccccccaacagggcggccacccgaggccccctcggggaaggccccaaggccccccgcagcagggaggtcatcagcaggggccccctccgcccccacccggcaagccacaagggccaccgcctcagggggggcgcccccaaggacctccacagggccaaagtccgcagtag

SEQ ID NO: 130084 - DNA, 900 bp, synthetic construct
  misc_feature 1..900: note = Description of Artificial Sequence: Synthetic coding sequence
  source 1..900: mol_type = other DNA
atggctgccagtagtagcgaaattagcgagatgaagggagtggaagagagtcccaaggtgcctggcgagggacctggccattcagaggccgaaacaggacccccacaggttttggccggagtccctgatcagcctgaggcaccccagccagggcccaataccacagctgcacctgtggattctgggcctaaggctggtctggcccccgagactacagagacaccggccggagcgagtgaaacggctcaggcaaccgacctgagtttgtcgccaggaggggagtcaaaagctaactgctctcccgaggacccttgccaagagactgtgtcaaaaccagaggtctccaaagaagcgactgccgatcaagggagcaggcttgaatccgcggcacctcccgaaccggcccctgagcctgcaccccagcccgatcctcggcccgactctcaaccaactccaaaacctgcactgcagcctgagcttccaacccaggaggacccaactcctgagatcctttcagaatccgtgggcgaaaagcaagagaacggagcggtcgtgccattgcaagcaggggatggggaggagggccccgcccccgaaccacattcccctccctcaaagaaatctcctccggccaatggtgctcctccacgggtgctgcagcagctcgtggaggaggataggatgaggagagctcattcaggccatcccggctcgccacggggctcgctttctcgtcacccgagcagccagctagccggtcccggggtggagggcggggaaggcacacagaaaccgcgggactacattatcctcgccatcttaagctgcttttgccccatgtggccagtgaacattgtggcatttgcttatgctgtcatggtgtcgcctatgggcccttag

SEQ ID NO: 130085 - DNA, 1023 bp, synthetic construct
  misc_feature 1..1023: note = Description of Artificial Sequence: Synthetic coding sequence
  source 1..1023: mol_type = other DNA
atggctgcaagttcgtccgagatctccgagatgaaaggcgtcgaagagtcgcctaaggtgcctggagaggggcccggacattccgaggctgagacggggcccccccaggttctggcgggcgtacctgaccagcctgaagcccctcagcccggtcccaacacgactgccgcacccgtggatagcggacctaaggcaggactcgccccggagaccacagagacacccgctggagcgagcgagaccgctcaggccactgatttaagcctgtccccgggcggggagagcaaagcaaactgttctcccgaggatccctgtcaagagaccgtgtccaaacctgaggtgtccaaggaggcaacggccgatcagggcagccggctggaatccgcagcgccacccgaacccgcccccgagcctgcccctcagccagatcccaggcctgattcacagccaacgccgaaacccgccctgcagcccgaactgccaacgcaagaggaccccacacctgaaattctgtcagagtctgtgggcgagaagcaggagaacggggctgttgtgcccttgcaggctggggacggagaagaaggcccagcccctgagccgcatagtccccccagtaaaaaatcaccgcctgctaacggagcgccccctcgtgtgcttcaacagttggtggaagaagacagaatgcgccgagcccactcaggacacccaggcagtcctcgaggcagcctgtcccggcatcccagctcacaactggcagggcctggggtggagggtggcgagggaacgcagaaacctagagactacatcatccttgctatactctcttgcttctgtcctatgtggcctgttaatatcgtcgcattcgcgtacgctgtgatgtcacgcaacagccttcagcagggagatgttgacggggcacaacggctaggccgggttgcaaagctcctctccatcgtggcactggtgggcggagtgctgatcattattgcttcctgcgtgatcaacttgggcgtgtataagtag

SEQ ID NO: 130086 - DNA, 1191 bp, synthetic construct
  misc_feature 1..1191: note = Description of Artificial Sequence: Synthetic coding sequence
  source 1..1191: mol_type = other DNA
atgccacaactgcagttcaaagacgccttctggtgccgtgatttcacggctcacaccggctacgaagtcctgctccagcgtttgcttgacggacgtaagatgtgcaaagacatggaagagctgcttcgccagcgggcccaggctgaagaacggtatggtaaggagctcgtgcagattgccaggaaggccgggggccagaccgagatcaacagcctcagagcatcttttgacagtttaaagcagcagatggaaaacgtgggtagctcacatatccaactggcactcacccttagagaggaacttaggtccttggaggagttcagagagaggcaaaaggaacagagaaagaagtacgaggccgtaatggaccgggttcagaaaagcaagctgagcctctataagaaggcgatggagtcgaagaagacctacgagcaaaagtgtagagacgctgacgacgcagaacaggccttcgaaagaatcagcgcaaacggccaccaaaaacaagtggagaagtctcagaacaaggcgcgacagtgtaaagatagcgccacagaggcagagagggtttaccggcaaagtatagcgcaactggaaaaggtacgagctgaatgggaacaggaacaccgaacgacttgtgaggctttccagctccaggagttcgaccgactgacaattctgcggaatgcgctttgggtgcacagcaatcaactgagcatgcagtgtgtgaaggatgatgagctttatgaggaagtcaggcttaccctagaggggtgctcaatcgacgctgacatagattcattcatccaggccaagtccactggaacggagccaccaggcgaggtgcgccttgcagactcggccgcttctcgtttttctggactgctgcacgggagccctaaaaccacctcattggccgcctccgcagccagtacggagacactgactcctaccccggagaggaatgaaggggtgtacactgccatagcagtgcaggagatccagggcaaccccgctagtcccgctcaggagtacagggccttgtacgactacaccgctcaaaacccagatgagttggacctttcagcaggagatatcctggaggtgatactggagggtgaggatggatggtggaccgtagaacggaacggacagcgggggttcgtgcctgggtcttatttagagaagctctag

SEQ ID NO: 130087 - DNA, 1251 bp, synthetic construct
  misc_feature 1..1251: note = Description of Artificial Sequence: Synthetic coding sequence
  source 1..1251: mol_type = other DNA
atgatgccccagctgcagttcaaagacgccttttggtgtagagatttcacggctcatacaggctatgaggtgttgttgcagcgcttgctcgacgggcgcaaaatgtgcaaagatatggaggagctgctgaggcagcgtgctcaggcggaagagcgctacggaaaggagctggtccaaattgctcgcaaggctggcggccagacggaaatcaactccctacgcgcctctttcgattcccttaaacagcagatggagaacgtcggttcaagtcatatccagctggccctgacccttcgcgaagaactccgtagtctggaggagttcagagaaagacagaaggaacagagaaagaagtacgaggctgtgatggatagagtacagaagagtaaactttctttgtataagaaagcaatggagagcaaaaagacctatgagcagaaatgcagagatgccgacgacgcagaacaagcctttgagagaatcagcgccaatggccatcagaagcaagtcgagaagtcccaaaacaaggccagacagtgtaaagactctgcaacagaagctgagagggtatatcgtcagtccatagcacagctggagaaggttagggctgagtgggaacaggagcatcgcactacatgtgaggcctttcagctgcaggagttcgatagactgacaatccttcgtaacgctttgtgggtccatagtaaccagctgtcaatgcaatgcgttaaggacgacgagctatacgaagaggttagactcactctggagggctgctcaatcgatgcagatattgatagctttatacaagccaagtcaaccggcacagaaccccctgctccggttccttatcagaactactacgacagggaggtcacacctctcacatcaagtcccggtattcaaccgtcctgtggcatgataaagagattttccggactgttgcacgggagtcctaagactaccagcttggctgcgtctgccgccagcacagaaacattgacgccaacacctgagcggaacgagggcgtctatactgctattgccgtgcaggagatccaaggaaacccagcatcgccagcgcaggaataccgcgcactctacgattacaccgcccaaaacccagacgagcttgatctgagtgccggggatatactggaagttatcctggaaggtgaagatggctggtggaccgtcgagcggaatggacagaggggattcgtacccggttcatatctcgagaagttgtag

SEQ ID NO: 130088 - DNA, 1605 bp, synthetic construct
  misc_feature 1..1605: note = Description of Artificial Sequence: Synthetic coding sequence
  source 1..1605: mol_type = other DNA
atgatttggtatattctgatcatcggcatcctcctacctcaaagcctggcacatcctggatttttcaccagcattggccagatgaccgatctaattcatactgagaaggaccttgtgacctccctaaaagactatataaaagctgaagaggataagctcgaacagatcaagaagtgggctgagaagctcgacagactaacctctactgcaactaaagatccagaaggattcgtggggcacccggttaatgcatttaaattgatgaagaggctgaatacggaatggtcagagctggaaaatctggtgcttaaggatatgagcgatgggttcatatcaaatctaacaatccaaaggcagtactttcccaatgacgaggatcaggttggcgccgcaaaggctctcctgcggctgcaggacacctataacctggacaccgatacaatcagtaagggcaacctcccaggggttaagcataagagttttcttactgccgaagactgctttgagctgggaaaagtggcctataccgaggctgactattatcacaccgaattgtggatggaacaggccctgcggcagttggacgagggggaaattagtaccattgataaagtcagtgtgttggactacctctcgtacgccgtctaccagcagggagatttggacaaggccctgctgcttacgaaaaaactgcttgaacttgatcctgaacatcagagagctaacggaaatcttaaatattttgagtatatcatggctaaagaaaaagacgtgaacaagagcgcatcagatgatcagtcagatcaaaaaaccactcctaaaaaaaaaggggtcgctgttgattatctacctgagcgccaaaagtacgaaatgctgtgccgaggggaaggtattaagatgacgccccggcgccaaaagaagctgttctgccgataccatgatggcaaccggaatcctaagtttattctcgccccagccaagcaggaggatgaatgggacaaaccgcgcatcattcgctttcatgacattatttcggacgcagaaatagaaattgtgaaggatcttgctaagcctcgattgtccagggccaccgttcatgatcctgaaactgggaagttgaccactgcgcagtatcgggtctctaaatcagcatggctctccggctacgagaaccctgttgtctctaggattaacatgaggatccaagatctgaccggtctggacgtctctacggctgaggagctccaggtggctaattatggagtgggcgggcagtatgagccgcactttgattttgcccgcaaggacgagcctgatgcattcaaagaacttggaacagggaacagaattgcaacgtggctgttttacatgtcagacgttagcgcgggaggagcaactgttttccccgaagtgggcgcttccgtgtggccaaagaagggcaccgctgtgttttggtataacctctttgcaagtggtgagggagactacagcactcggcatgcggcttgccccgtcctggtgggaaacaagtgggtctctaacaaatggctgcacgaacggggtcaggaattccggagaccctgcactctcagcgagctggaatag

SEQ ID NO: 130089 - DNA, 1605 bp, synthetic construct
  misc_feature 1..1605: note = Description of Artificial Sequence: Synthetic coding sequence
  source 1..1605: mol_type = other DNA
atgatttggtacatcctcattatcgggattcttcttccacaatctctggcccatccaggctttttcacttcaatagggcagatgactgatcttattcataccgaaaaggatctggtgacatcactgaaggactatataaaggctgaagaagacaaactagagcaaattaaaaagtgggccgagaagctcgataggctcacctccactgctactaaagaccctgagggttttgttgggcacccggtgaatgcttttaaattgatgaagcggcttaacacagaatggagcgagcttgaaaatcttgtgttaaaagacatgtctgacggattcattagcaatctgactatccagcgacaatactttccgaatgacgaggatcaggtcggcgccgctaaggccttactgcggttacaggacacttacaacttagacacagacactatttccaagggcaacctgcctggggtgaagcacaagagcttcttaactgcagaggactgctttgaactcgggaaagtggcttataccgaggcagactactatcatactgagctgtggatggagcaggcgttgcggcaactagacgagggggaaatcagtacgattgacaaggtgtctgtgctggactatctgtcctacgccgtgtatcaacagggcgacttagacaaagcactcttgctaaccaagaagctgcttgaactcgatcctgagcaccaacgcgctaacggtaacctgaagtatttcgaatatatcatggctaaggagaaagatgtaaataagtcggctagcgatgatcagagtgaccaaaagactaccccaaagaagaagggcgtggctgtcgactaccttcccgagcgacagaaatatgaaatgctgtgccgcggagagggaatcaaaatgacccccaggcggcagaaaaaattattctgtagataccacgatggcaaccgcaatcccaagtttatcctggcgccagctaagcaggaagacgaatgggataaaccccgcatcattcggttccacgatattatcagtgacgcggaaatagagattgtcaaggatctggcaaagccccgtttgcgccgtgctacgatctctaacccgatcactggtgacttggagactgtccactaccgcataagcaagagcgcatggctatcagggtatgagaatcccgtcgtgtcaagaatcaacatgcgcattcaagacctcactgggttggacgtgtctaccgccgaagagctgcaagtcgccaattatggggtggggggacagtatgagccgcacttcgattttgctcgcaaggacgaacccgacgcttttaaagagcttggcacggggaatcgaatcgccacatggttgttctacatgtccgacgtgagcgcaggcggcgcaactgtgttcccagaagtcggagctagcgtttggcccaaaaagggaactgcagtgttctggtataatttgttcgcaagcggcgaaggggattactcaactaggcacgcagcctgccctgtattagtgggcaacaaatgggtgagcaacaaatggctgcatgagaggggccaagagttccgacgaccctgcacacttagtgaactggaatag

SEQ ID NO: 130090 - DNA, 1605 bp, synthetic construct
  misc_feature 1..1605: note = Description of Artificial Sequence: Synthetic coding sequence
  source 1..1605: mol_type = other DNA
atgatctggtatatcctcatcatcggaatactccttcctcagtctttagctcatccaggattttttacctccatcggtcagatgactgacttaattcatactgagaaggacctcgtgacctccctcaaagattatattaaggctgaggaggataagctggagcaaattaaaaaatgggctgaaaagttagatagacttacttctaccgcgacaaaggatcccgaaggatttgtcggccaccctgtgaatgcttttaagctaatgaaaagactcaatacagagtggtctgagctggagaacctcgtcctcaaggatatgagcgacggttttatcagcaatcttaccattcagagacaatacttccctaacgacgaagatcaggtaggcgcggccaaagccctactgagactgcaagacacctacaatctcgacaccgacactatctccaagggtaatctccctggtgtgaagcacaaatcgttccttaccgccgaggactgctttgagttgggtaaagtggcttataccgaggctgactactatcatactgagctgtggatggagcaggccctgagacagctggatgagggtgagatcagtaccattgataaggtttctgttcttgattatttatcctacgccgtttaccagcagggcgacttggataaggcacttctgctcactaagaaacttctggaactggaccctgagcatcagagagctaatggaaatctcaaatacttcgagtacattatggcaaaagaaaaggatgtgaataaatcagcctcagacgatcagagcgaccagaagacaaccccaaaaaaaaaaggtgtggctgtggactacctccccgaaagacagaaatatgagatgctgtgccgtggcgaaggcataaagatgacccctcgcaggcagaaaaaattgttctgcagatatcacgacggaaacagaaatccgaagttcattttagcccccgcaaaacaggaagatgaatgggataagccgcgaataattagattccatgacatcataagcgacgccgagatagaaattgtgaaagacctcgctaagcctaggttgtcccgagcgacggtgcatgacccggagacgggaaagctcaccaccgcccagtatcgggtttcgaagagcgcttggctgtctggttatgaaaacccagtcgttagcagaatcaatatgagaatacaggatctgactgggctggatgtgagcacagccgaagagcttcaagtggctaactacggggtgggcggccagtatgagcctcatttcgacttcgctaggaaagatgaaccagacgcgttcaaggagcttggtacagggaatcgtatcgccacttggctgttctatatgagcgacgtgtccgctggaggcgctaccgttttcccagaagtgggcgcctcagtctggcctaaaaaaggcacagccgtcttctggtataatctttttgcgtccggcgagggcgattacagtacccgccatgccgcctgccctgtgctggttggcaataaatgggtgtccaacaaatggctgcatgaacggggccaagagttccgacgcccctgtaccttatccgaactggaatag

SEQ ID NO: 130091 - DNA, 1605 bp, synthetic construct
  misc_feature 1..1605: note = Description of Artificial Sequence: Synthetic coding sequence
  source 1..1605: mol_type = other DNA
atgatctggtacattttgatcattgggatcctgctaccccagtctctggctcacccaggcttcttcacatccatcggacagatgactgatttaatccacaccgaaaaggatttggtgacctctctgaaggattacattaaagccgaggaagataaactcgagcagatcaagaagtgggccgagaagctggacaggctgacctccaccgctactaaagaccccgaaggatttgtgggccaccccgtcaacgcctttaagctaatgaagcggctgaatacagagtggtccgaacttgagaatttggtactgaaggacatgtccgacggattcatatcaaacttaacaattcagcggcagtacttcccgaacgacgaagatcaggtgggcgccgccaaagctttgctcagactgcaggacacatacaatctggacaccgataccatcagtaaaggtaatctgccaggagtgaagcacaaatccttcctgacagccgaggactgttttgagctagggaaagtcgcgtatactgaagctgactactatcatacagaactttggatggagcaggcgttaagacaattagatgagggcgagatcagcacaatagataaggtgtctgtcctggattatctgtcctatgccgtataccagcagggagatctcgacaaggctcttttgctgacaaagaagctgcttgaactcgaccccgagcaccagcgagccaacggtaatctgaagtactttgagtatattatggccaaagaaaaggacgtaaacaaatctgccagtgacgaccagagcgaccagaaaacgactcccaaaaagaagggcgtcgccgtcgactatctgcccgaaaggcagaagtacgagatgctctgtcgtggggagggcatcaagatgactccacgccgccagaaaaagctgttctgtagatatcacgacggcaataggaatcctaaattcatattggccccagctaaacaagaagacgagtgggataagccaagaattatccggtttcatgatatcatcagcgatgcagaaattgaaattgtaaaggatctggctaagccccgattgcggcgcgcaacgatatcaaacccaatcactggtgatcttgagactgtgcactaccgcatttcaaagtccgcctggttaagcggctacgagaatcccgttgtgagccggatcaatatgcgtattcaagacctgaccggcctggatgtgtcaacagctgaggagctgcaggtagcgaattatggtgttggagggcaatacgaaccccacttcgatttcgctaggaaggatgaacccgacgctttcaaagagctgggcaccggtaaccgtatcgccacctggctgttctacatgagcgatgttagcgctggcggcgccactgtgttccccgaggttggcgcttctgtttggcctaaaaaaggtacggccgtcttttggtataatctttttgcctctggcgaaggggactactctacccgccatgccgcttgccccgtgctggtcgggaacaaatgggtgtcaaataaatggttacacgagcgagggcaagaattcagacgcccctgtacgctatctgaactcgagtag

SEQ ID NO: 130092 - DNA, 1605 bp, synthetic construct
  misc_feature 1..1605: note = Description of Artificial Sequence: Synthetic coding sequence
  source 1..1605: mol_type = other DNA
atgatatggtacatccttatcataggaattttactgccacaatctcttgcacatccaggcttttttacaagcattgggcagatgaccgacctgattcacactgagaaggacttggttacgtcactgaaagactatatcaaggcagaagaagataagctcgagcagataaaaaagtgggctgaaaagctggatcggctgacgtccaccgccaccaaagatcctgaagggtttgttggacacccagtaaacgctttcaaactgatgaagagattgaatacagagtggagtgaactggaaaatctcgtgctcaaggatatgagtgatggctttataagtaatctgaccatccaaagacaatactttcccaacgatgaggatcaagtgggtgctgcaaaggcactgctgcgtctgcaagatacctacaatctggacactgatactatctccaaagggaacctacccggggtaaagcacaagagctttctaactgcagaggattgctttgagctgggaaaggtagcatacaccgaggcggactactaccataccgaactttggatggaacaggccctgagacaactggatgagggcgaaatttccacgattgataaagtgtcagttctggactatttgtcctacgcggtgtaccagcagggagatctggacaaagcactgctcttaacgaagaaactcctcgaactggaccctgagcatcagagggctaatggcaatctcaagtatttcgaatacatcatggccaaggagaaggatgtgaataagagcgctagcgacgaccaaagtgatcagaagaccacccccaagaagaaaggagtcgctgtagattacctccctgagcggcagaaatacgaaatgctttgccggggagagggcattaagatgacaccacgccggcagaaaaagcttttttgtaggtaccacgatggcaataggaatcctaaattcatcctggcacctgctaaacaggaggacgaatgggacaaaccccggattatccgattccatgatatcatctccgatgctgagatcgaaatagtgaaggaccttgccaagccccggttgcgccgggccacaattagcaatcccatcacaggggacctagaaactgtgcattatagaatttcaaaatctgcttggttaagtggttatgaaaaccctgtggtctcgagaatcaatatgaggattcaggacctcaccgggctcgacgtgtctaccgcagaggagcttcaagtcgccaactacggcgttgggggacagtacgaaccacattttgattttgcgagaaaggatgaacccgacgccttcaaagagctcgggaccgggaatcgaattgctacgtggcttttttacatgtcagacgtcagcgctggcggcgccactgtgtttccagaggtgggtgccagtgtctggcctaagaagggcaccgctgtcttttggtataatctgttcgcttctggcgagggtgactacagcacaaggcacgctgcttgcccagtgttagttggtaataaatgggtctccaacaagtggcttcacgagagaggccaagagttccgcaggccttgcaccctgagtgaactggagtag

SEQ ID NO: 130093 - DNA, 1551 bp, synthetic construct
  misc_feature 1..1551: note = Description of Artificial Sequence: Synthetic coding sequence
  source 1..1551: mol_type = other DNA
atgatttggtatatccttatcataggaattctcctaccacagagcctagcccacccaggcttcttcacttccatcggccagatgacagatctcatccatacagaaaaagacctggtgacctccctaaaggactacattaaggccgaggaagacaaactggaacagatcaagaaatgggctgaaaaactcgataggctgacctcgacagcaacaaaagatccagaaggctttgtcggccaccctgtgaacgcctttaagcttatgaagcggctaaataccgaatggtccgagctggagaacctggtgctgaaggatatgtctgacgggttcatttctaatcttactatacagagacagtattttcccaatgacgaggaccaggtgggcgctgccaaagccctactaagactccaggatacgtacaatctagacacagatactataagcaaggggaatcttcctggggtgaaacataagagctttctgaccgccgaggactgttttgaactcggcaaggtagcttacaccgaagccgactattaccacactgagctctggatggagcaggccctgaggcagctcgatgaaggcgagatctccaccattgacaaggtgagcgtgctggattacctaagttatgccgtgtatcagcaaggcgatctagacaaagcactgctgctgaccaagaagctgctggagctggaccctgagcaccagcgtgctaatggcaatcttaaatactttgagtacatcatggcaaaggagaaggatgtgaacaagtcagcgtccgatgaccagagcgaccaaaagaccaccccgaagaaaaagggcgtagccgtggattacctacccgagcggcaaaaatacgagatgctgtgtagaggcgaaggaattaaaatgacaccccggcggcagaaaaaacttttctgccgataccacgacggcaaccgaaaccctaagtttattttggcccccgcaaaacaggaggatgagtgggacaaacctcgcattattcggtttcacgacatcatttctgacgctgaaattgaaattgttaaggacctggccaaaccacgcctttcacgagccaccgttcacgatccagaaaccggcaaacttacgaccgcacagtaccgggttagtaagtccgcatggctgtcggggtacgaaaatcccgttgtctcaagaattaacatgaggatacaagacctcaccgggttggacgtgtccactgccgaggaacttcagaaagatgaacccgacgcattcaaggagcttggaaccgggaacaggatagccacctggctgttctacatgtccgatgtttcagccggaggggccaccgtgttcccagaagtgggtgcttctgtttggccaaagaagggtacggccgtgttctggtataacctattcgcatctggagaaggtgactactccacccggcacgcagcatgtccagtattagtgggtaacaagtgggtgtcgaacaagtggctccacgaaagagggcaggagttcagaagaccatgtactctcagcgaacttgagtag

SEQ ID NO: 130094 - DNA, 1608 bp, synthetic construct
  misc_feature 1..1608: note = Description of Artificial Sequence: Synthetic coding sequence
  source 1..1608: mol_type = other DNA
atgaaactatgggtgagcgcgttgctaatggcatggttcggcgtgttgagctgtgttcaggctgagttttttaccagcataggtcacatgaccgacctgatttatgccgaaaaggagctggttcaaagcctcaaggaatacatcctcgtagaggaagccaaactgtctaaaattaaaagttgggcaaacaagatggaagctctgacaagcaagagcgccgccgatgcagaggggtatctggctcatcctgtcaatgcatacaagctggtaaagcgcctaaataccgactggccggcactcgaggacctggtactgcaagatagcgctgccggcttcatcgctaacctcagcgtgcagcggcaattttttcccactgacgaggatgagataggagctgcaaaagccttgatgcggctccaagacacctatagactggatcccggcaccatcagccggggggagctgcccgggacgaagtatcaagccatgctctcggtagatgactgctttgggatgggacgctccgcctataatgagggggattactatcacacagtgttgtggatggagcaggtgttgaaacaattggacgcaggcgaggaagccaccactaccaagtcgcaggttctggactacctgtcctatgccgtgttccaattgggcgaccttcaccgcgcacttgaactgactagaaggctgttatctctcgacccctcccacgagagagcaggtggcaatctccggtactttgagcaactgctggaggaggagcgagagaagactctgaccaaccaaactgaagctgaactagctactcctgaagggatttatgagcgtcccgtcgattacctgccagaacgagacgtttatgagtctctgtgtcgcggcgagggcgtgaaactcacgccaagacgccagaaacgccttttttgccgctaccatcacgggaatagggcaccacaactcctgatagcacctttcaaagaagaagatgagtgggatagccctcacatcgttaggtactacgatgtgatgtccgatgaagagatcgagaggatcaaagagatcgccaagcccaaactggccagggccacagtccgggacccaaaaactggcgttctgacagtggcatcctacagagttagcaaatcgtcctggttggaggaggacgatgatcctgtcgttgcaagagttaaccgacggatgcagcatattacaggtctgactgtgaagacggcggagctactgcaggtggccaattatggggttggcggtcaatatgagcctcacttcgactttagcagaaatgatgagagggacacattcaagcacttaggcactgggaacagagtagctaccttcctgaactacatgtcggatgtggaggcgggcggcgcaaccgtgttccccgatcttggcgccgccatttggccaaaaaaggggactgctgttttctggtacaacttactccgctccggtgaaggtgattaccgtactaggcacgctgcctgcccagttctggttggctgcaagtgggtgagtaacaagtggtttcacgaacgcggacaagagttcctcagaccatgtggaagtactgaggtggactag

SEQ ID NO: 130095 - DNA, 1602 bp, synthetic construct
  misc_feature 1..1602: note = Description of Artificial Sequence: Synthetic coding sequence
  source 1..1602: mol_type = other DNA
atgaagctgtgggtgtctgctctcctcatggcctggtttggagtgctgtcctgcgttcaggctgagttctttacatctatcggtcacatgaccgacctaatatacgctgagaaggagctggttcagtcactcaaggagtacattctcgtggaggaagcaaaactgtcaaaaatcaaaagttgggccaataaaatggaggccctgacttcgaagtccgctgcggatgccgagggctacctcgctcaccctgttaacgcatataaactcgtgaagcgtttgaatacagattggcctgccttggaagacctggtgctgcaagattccgctgcaggattcatcgcgaatctcagcgtacaaagacagttctttcctaccgatgaagacgagattggcgcagccaaggctcttatgcgtttacaggacacctaccgcttggacccggggactatcagcagaggtgaactccccgggaccaagtaccaggctatgctgagcgtcgatgattgcttcggtatgggccgatccgcatacaacgagggtgactactatcacaccgtgttgtggatggagcaggtgttgaaacaactagatgccggcgaggaggcaacgaccactaagtcacaagtgctcgactatctgagttacgctgtgttccagttgggagatctccatagggcattggaactgacacggaggctgctgtctcttgatccaagccacgaaagggcggggggcaatctccgttattttgagcagctactggaggaggaaagggagaaaaccctcacaaatcagaccgaagcggaactcgcaaccccggaggggatttatgaaaggcccgtggactatctcccagagcgcgacgtctacgagagcctgtgtcggggagaaggtgtgaagctgaccccaaggaggcagaaacgactgttttgccggtaccaccatgggaatcgagcgccccagctgttgatcgctcctttcaaagaagaggatgaatgggactctccgcacatcgttaggtattacgacgttatgtcggacgaagagattgagcgaattaaagagattgccaaacccaagctcgcgcgcgccactgtgcgggaccctaaaacgggggtactgacggtggcctcttaccgcgtgagcaagagttcatggttagaagaagacgatgatcccgtggtggctcgggtgaatcgccggatgcagcatatcaccgggctgaccgtcaaaaccgcagaactgttgcaggtggccaactatggcgtggggggccagtatgagccccatttcgacttctcacgacgcccatttgattccggcttaaagaccgagggaaatcgactggctacatttttaaattacatgagcgacgtcgaagcaggcggagctactgtcttccccgacctcggcgccgcgatttggcctaaaaaaggcacagcagttttctggtataacttgctccgatccggcgagggtgattataggacacgccacgctgcttgccccgtgctcgtaggatgcaaatgggtctctaataagtggttccacgaacgagggcaagagtttctacggccatgtgggtcaacagaggtggactag

SEQ ID NO: 130096 - DNA, 1602 bp, synthetic construct
  misc_feature 1..1602: note = Description of Artificial Sequence: Synthetic coding sequence
  source 1..1602: mol_type = other DNA
atgaagctgtgggtgtctgccctgctgatggcatggttcggtgtgctttcatgtgtgcaggccgaattttttacctcaatcggacatatgacagatctgatctacgcagaaaaagagctggttcagtctctgaaggaatacatcctggtggaggaagccaagctcagcaagatcaagagctgggcaaacaagatggaggcccttacaagtaaaagtgcagccgacgcagagggatatctggctcaccctgtgaatgcctacaaacttgtaaagagattgaatacggactggcctgctctcgaggacctagttttgcaggactcagcagcaggtttcattgctaacctgtccgtgcagcgccagttctttcctaccgacgaggacgagattggtgctgcaaaagctctgatgcggctccaggatacatatagacttgacccaggaactataagccgcggggagctacctggtacaaagtatcaggctatgttaagtgtggatgattgttttgggatgggccgatccgcttacaatgagggcgactactaccacactgtgctgtggatggagcaagtcctgaagcagctcgacgctggcgaagaggcaactaccaccaaatcgcaggtactggattatctgagctatgctgtgttccagctgggtgacctccaccgggcattagagctgacacgccgtcttctgagtttggatcccagccatgagcgagcgggtggcaatctgagatactttgaacagctcctggaggaagagagggaaaagaccctgacaaatcagaccgaagccgagcttgccacccccgagggcatatacgaacgccctgtcgactatctgccggagcgggatgtctacgagtcactgtgccggggggagggcgttaaactgacccccaggagacagaaaaggctgttctgtaggtaccaccatggtaacagggccccacagcttttaattgcaccctttaaagaagaagacgaatgggacagtccacacattgtccgctattacgatgtgatgagcgacgaagagatcgagcgaataaaagagatcgccaaacctaagctagcaagagccacagtccgggatcccaaaaccggcgtgttgacagtggcaagctacagagtgagtaagagtagctggttagaggaggacgatgatcctgtcgtggcccgagtgaaccgccgaatgcaacacatcactggtctgacagtgaaaacggccgaacttcttcaggtggctaattatggagttggtggccagtatgaaccccatttcgatttttcacggaggccctttgatagcggcctgaagacagaaggcaatcgcctggccaccttcctgaactacatgtcagacgttgaggctggcggtgccacagtctttcctgacctcggggccgccatctggcccaagaaagggaccgccgttttttggtacaacctactgcggtcaggagaaggggactaccgaacgcggcatgctgcctgccccgttttggtgggttgtaagtgggtctcaaataaatggtttcatgaaaggggccaggagttcctgaggccatgcggcagtacagaggtagattag

SEQ ID NO: 130097 - DNA, 1602 bp, synthetic construct
  misc_feature 1..1602: note = Description of Artificial Sequence: Synthetic coding sequence
  source 1..1602: mol_type = other DNA
atgaagctctgggttagtgccttgcttatggcctggttcggtgtattatcttgtgttcaggccgagttcttcacgtcaatcgggcatatgacggacctgatatacgctgagaaggaactggtacaaagcttgaaagagtatatattggtggaagaagccaagctcagcaagatcaaaagctgggccaacaaaatggaggcgctgacatccaaatccgcagccgatgccgaggggtacctagcacaccccgtgaacgcatataagctggttaagaggctgaataccgattggcctgctcttgaagacctggtgctccaggactccgcagctggatttatcgctaatctcagtgtccagaggcagtttttcccaaccgatgaagacgagatcggagctgcaaaagccctaatgagactccaggacacttatcgcctcgacccagggacaattagcaggggagagctgcctgggacaaaataccaggcgatgttatccgttgacgactgtttcggaatgggtcggagcgcctacaacgaaggggattactaccataccgtgctctggatggaacaggtgttgaaacagctggacgctggcgaagaagctacaactaccaagagccaggtcttagactacctgtcttatgctgtctttcagctaggcgatcttcaccgtgcgcttgagttgacacgtcgactcttatcactggaccccagccacgaacgtgctggagggaatctgaggtacttcgaacagctgctggaagaagaacgtgaaaagacactcaccaatcaaacagaagctgagctggctacacccgagggcatctatgaaaggcccgtggactacctccctgagagggacgtgtatgaatctctatgtcgcggagagggggtgaagttgacaccccgcagacagaaaaggcttttttgcagatatcaccacggaaatcgggccccccagctgttgatagctccttttaaagaggaggacgagtgggattctcctcatattgttcgctattatgacgtgatgtccgacgaggaaatcgagcgtatcaaagaaatcgcaaaaccaaagctggccagagctacagtacgggaccctaagacaggggtcctgacggtggccagttatcgggtaagcaagtcctcgtggctggaagaggatgatgacccagttgtggcacgcgtgaaccggcgaatgcagcatattactggactgaccgtcaaaaccgcagagctgcttcaggttgccaattatggagtgggcggtcaatacgagcctcacttcgacttttcacggagaccattcgattctgggctgaaaacagaaggcaaccggctggccacatttctgaattatatgtctgacgtagaagcaggcggggctacagtgttcccagacttgggcgccgcaatttggcctaagaagggcacagccgtcttttggtacaacctcctgcggagcggggagggagactataggacacgacacgccgcctgtccagttctcgttggctgtaaatgggttagcaacaagtggtttcatgaaaggggccaggagttcctgagaccatgcggttctactgaggtggattag

SEQ ID NO: 130098 - DNA, 1608 bp, synthetic construct
  misc_feature 1..1608: note = Description of Artificial Sequence: Synthetic coding sequence
  source 1..1608: mol_type = other DNA
atgaagctgtgggttagcgccttgctcatggcatggtttggagtgctgtcttgtgtgcaggctgagttttttacctctatcggtcatatgacagatctcatctatgccgagaaggagctggttcaaagccttaaggaatacatcctggttgaagaggctaaactgtctaagatcaaatcttgggccaacaaaatggaggcactgacatccaaatctgcagctgatgccgagggctatctagcgcacccagtcaatgcctataagctcgtgaagaggcttaatacagactggccagcccttgaggatttagtgttgcaggacagcgccgcaggattcattgccaatttgtctgtccagaggcagttttttccaaccgatgaagatgagataggtgcagccaaggcactgatgcgcctgcaggatacatatcgactggaccctggaactatctcccgcggagagctcccaggtactaaataccaggccatgctcagtgtcgacgattgctttggaatgggaaggtcagcttacaacgaaggagattattaccataccgtcctgtggatggagcaagtcctgaaacagctagacgcaggcgaggaagccactacgactaaatcccaggtgctggactatctctcgtacgcagtgttccagttaggcgacctacaccgtgccctggagttgactaggcggctgctgagtctcgatccaagccacgaaagggctggcggcaatctccggtacttcgagcagctgttagaagaggaaagagaaaagaccctgaccaatcagactgaggccgagcttgcaacgccagaaggcatctacgagcgccccgtcgactatctgcctgagagggatgtgtacgaatccctatgccgaggagagggggttaagctgacccctcggcgacagaagcgtttgttttgtcggtaccatcacggtaatagagcgccacagttactcattgctccatttaaggaggaggatgagtgggacagtcctcacatcgtgcgctactacgatgtgatgtccgacgaagagattgagaggatcaaagagattgccaaacccaagctggcgcgggccacggttagggaccctaagaccggagtcctaacagtggcgtcttatcgtgtctctaaaagcagctggctggaagaggacgacgatcctgtggtggcacgggtcaaccgaagaatgcagcatataactgggttaactgtgaaaacagcggaactcttgcaggtggcgaattatggagtgggaggacagtacgaaccacactttgacttttccaggaacgacgaaagagataccttcaagcacctgggcactgggaatcgcgttgccacatttcttaactatatgtcggacgtcgaagccggaggcgctacagtttttccagatttgggggcagccatctggccaaagaagggaacagctgtgttttggtacaatctgctacgcagtggggaaggggactatcgcacacgtcatgctgcctgcccagtgctggtcggctgtaaatgggtgagcaacaagtggttccatgagcggggacaggagttcctgcgaccgtgtggcagcaccgaggtagactag

SEQ ID NO: 130099 - DNA, 504 bp, synthetic construct
  misc_feature 1..504: note = Description of Artificial Sequence: Synthetic coding sequence
  source 1..504: mol_type = other DNA
atgaagctgtgggtaagtgcactgctaatggcttggttcggagtgcttagttgcgtccaggccgaattttttacctcaattggtcacatgaccgacctaatctacgcggagaaggagctggtgcaaagcctgaaggagtatatccttgtcgaggaggctaagctcagcaagattaagagctgggccaataaaatggaagcactgacctcaaagtctgcagccgatgccgaaggttacttggcccatccagtgaatgcatataagctggtgaaacgcctgaatacggattggcccgccctggaagatctggtgctacaggattccgctgccggattcatagcaaatctgtctgttcagagacagttcttccctaccgacgaagacgagatcggggctgccaaggccttaatgagactacaagatacctaccgtctcgaccccgggaccatatctcgtggcgaactaccaggaaccaagtatcaggccatgctcagcgtggactag

SEQ ID NO: 130100 - DNA, 1608 bp, synthetic construct
  misc_feature 1..1608: note = Description of Artificial Sequence: Synthetic coding sequence
  source 1..1608: mol_type = other DNA
atgaaactttgggtctcggcattgctgatggcgtggttcggggtgctgagctgcgtccaagcagagtttttcactagcatcggccatatgaccgaccttatctacgcagagaaggagctagtgcagtccttgaaagagtatatcctcgtggaggaagctaagttgagcaaaatcaagtcctgggcgaacaagatggaagcactaacttccaagagtgcggcagacgccgagggatatttggcccaccctgtaaatgcttataaacttgtcaagcggctgaacaccgattggcccgccttggaagacttggttttgcaggactcagctgccggatttattgctaacctgtcagtgcagaggcagttttttcctaccgatgaagacgagatcggggcagccaaggcgctcatgaggttgcaggacacttaccgcctggatcctggcactatatcgagaggagagttgccaggtaccaaataccaggccatgctttctgtcgatgattgtttcggtatggggagatccgcctacaatgagggggattactatcacaccgtactgtggatggagcaggtgctgaaacagctcgatgccggcgaagaagccacgacgaccaaaagccaggtgctcgactacttatcttacgctgtttttcagttaggcgaccttcaccgggctctggagctgactagacggctcctttcattggaccctagtcatgaaagggccgggggtaacctgcggtattttgaacagctattggaagaagaaagagagaaaactctgaccaatcaaacggaggctgaactagccacccccgaaggaatttacgaacgacctgtcgactatttgcccgagagagacgtctatgagagtctttgccgtggggagggggtcaaactgaccccccgccgtcagaaacgcctcttttgtcgatatcaccatgggaatagagcacctcagttattgattgccccctttaaggaggaggatgaatgggactccccgcatattgtccggtactacgacgtgatgtctgatgaagaaatcgaacgaatcaaggagattgccaagccaaagctcgcacgggcaacagttcgagatccgaaaaccggtgttttgacggttgccagctacagggtcagcaaatcaagctggcttgaagaagacgatgatcctgtggttgcccgtgtcaaccgccggatgcaacacataactgggctcactgttaagaccgcagagttgttgcaggtggccaactacggcgttggcggccagtatgaaccacactttgattttagccggaacgacgaacgtgacacgtttaagcacctgggtaccggcaacagggtggccactttcctgaactacatgagtgacgtggaggccggcggcgcaacagtgtttcccgacctaggagccgcaatctggcctaagaaagggactgctgtcttctggtacaacctgctccgatctggggagggggattaccgcactcgccacgcagcttgcccagtcttagtgggttgcaaatgggtgtctaacaaatggttccacgaacggggtcaggaatttctgcgaccatgtggatccactgaagtggactag

SEQ ID NO: 130101 - DNA, 306 bp, synthetic construct
  misc_feature 1..306: note = Description of Artificial Sequence: Synthetic coding sequence
  source 1..306: mol_type = other DNA
atgaagctatgggtgagtgccctactgatggcttggtttggagtgttgtcatgtgttcaggcggagttttttacatcaattgggcatatgacagatctcatatacgcagaaaaagagcttgtgcaaagcctgaaagaatatatcctggtcgaggaggccaaacttagcaaaatcaagtcttgggccaataagatggaggctttgacctcaaagagtgcagccgacgccgaagggtacctggctcaccccgtcaatgcttacaagctggtcaagagacttaacacagactggcccgcactggaatag

SEQ ID NO: 130102 - DNA, 615 bp, synthetic construct
  misc_feature 1..615: note = Description of Artificial Sequence: Synthetic coding sequence
  source 1..615: mol_type = other DNA
atgaaactgtgggtgagcgccctcctcatggcctggttcggcgtgttatcatgtgtccaggctgaattttttacaagcatcgggcatatgacagacctgatctacgctgaaaaggagcttgtgcagtcacttaaggaatatatactggtggaggaggccaaactcagtaagatcaaatcctgggccaacaagatggaggcactgacaagtaaatccgctgccgacgcagaaggatacttggcacatcccgtgaatgcatataagctagttaagcggctgaacaccgattggcccgctcttgaggacctggtgctccaagacagtgctgctggcttcattgcaaacctctccgtgcagcgtcagttttttccgacagacgaagatgagatcggagcagccaaagctttgatgagactgcaggacacgtaccgcctggaccctggcaccatctcacggggcgaactgcccggtactaaataccaggctatgttgagcgtggacgactgtttcgggatgggccgaagcgcatacaatgagggggactattatcacacagtcctctggatggaacaagttctgaaacaattagatgccggggaagaggctacaacctag

SEQ ID NO: 130103 - DNA, 345 bp, synthetic construct
  misc_feature 1..345: note = Description of Artificial Sequence: Synthetic coding sequence
  source 1..345: mol_type = other DNA
atgaagctctgggtaagcgcgctgctgatggcctggtttggagtgctgagttgtgttcaagcagagtttttcacctcaatcgggcacatgacggatcttatctacgccgagaaagagttagtccagagcctcaaggagtatatcttagtggaagaggctaagcttagtaaaatcaagtcctgggctaataaaatggaggccctaaccagtaagtctgccgctgacgccgaaggttacctggctcaccctgtcaatgcctacaagttggtcaaacgcctgaataccgactggccagctctcgaggatctggtgttacaggacagtgctgctgggttcatcgcatag

SEQ ID NO: 130104 - DNA, 444 bp, synthetic construct
  misc_feature 1..444: note = Description of Artificial Sequence: Synthetic coding sequence
  source 1..444: mol_type = other DNA
atgaagctctgggtctctgcattgctaatggcctggtttggggtgctcagctgtgtacaggcagagttctttacgagcattggccacatgactgacctgatatacgctgagaaggaactcgttcagtcgctgaaggaatatatcctggtcgaggaggccaaactttcaaagattaaaagctgggcaaataaaatggaggcactcacttccaaatcagcggctgatgcggaaggctacctcgcacatcctgttaatgcctataaactggtcaagcgcctgaacacagattggccagccctggaagacctggtcctgcaggactccgcggccgggtttattgccaaccttagcgtgcaacggcaattcttcccaacagacgaggacgaaattggcgcagcgaaggccctgatgaggctccaggacacttataggctggacccctag

SEQ ID NO: 130105 - DNA, 153 bp, synthetic construct
  misc_feature 1..153: note = Description of Artificial Sequence: Synthetic coding sequence
  source 1..153: mol_type = other DNA
atgaagttgtgggtgtccgccttattaatggcctggtttggagtgttatcatgcgtgcaggctgagttttttacatccattggccatatgaccgacttaatctatgcggagaaggagctagttcagagcctgaaggagtatattctggtctag

SEQ ID NO: 130106 - DNA, 555 bp, synthetic construct
  misc_feature 1..555: note = Description of Artificial Sequence: Synthetic coding sequence
  source 1..555: mol_type = other DNA
atgaagttatgggtctcggctctgctgatggcttggtttggagtgttgtcgtgcgtacaggccgagtttttcacctccatcgggcacatgacagatctgatctacgctgagaaggagctggttcagagcctcaaggaatatattctggtggaggaggccaaactctctaaaataaagtcatgggccaacaagatggaggcccttacctccaagagcgccgccgacgcagagggctacttagcccatccagtcaatgcttataagctggtgaagcgtctgaacactgactggccagcgctagaggatcttgttctccaggattccgctgctggtttcattgccaatctatcagtgcagcggcagttctttccgacagacgaggatgaaatcggagccgccaaagccttgatgaggctgcaagacacctaccgcctggatcccggcaccatttctcgaggcgaactgccaggtactaaatatcaggctatgctgtctgtcgacgattgtttcggcatgggcagatcagcatataacgagggggactattatcactag

SEQ ID NO: 130107 - DNA, 462 bp, synthetic construct
  misc_feature 1..462: note = Description of Artificial Sequence: Synthetic coding sequence
  source 1..462: mol_type = other DNA
atgaaattatgggtgtccgcactcctcatggcctggtttggggtgctgtcatgcgttcaggctgaattctttactagcattgggcacatgactgatttaatctatgcagaaaaggagctggtgcagtctctaaaagagtatattcttgttgaggaggctaaactctcgaagatcaaaagttgggctaacaagatggaagcactgacctcgaagagcgccgccgatgccgagggatatttggcccaccccgtcaatgcctataaattggtgaagcgcctaaacactgactggcccgccttggaagacctcgtactccaggatagcgccgcgggattcatcgccaacctgtccgtccagcgtcagttttttccaacagatgaagacgaaattggagcagccaaggctctgatgagactgcaggacacatatcggttagaccccggaaccatttcccggggatag

SEQ ID NO: 130108 - DNA, 1635 bp, synthetic construct
  misc_feature 1..1635: note = Description of Artificial Sequence: Synthetic coding sequence
  source 1..1635: mol_type = other DNA
atgggtcctggggccaggctagccgccctgctagccgtgctcgccctcggaacaggggacccagagagggccgctgccaggggcgataccttttccgctctgacatccgtggcacgcgcacttgcccccgaacggaggctgctgggcttactccgacggtaccttagaggtgaggaggcgcggctccgcgacctgacccgattttatgataaggtgctatctctccatgaggatagcaccacgcctgtggccaatcctttgcttgccttcacattaataaagcggctccagtccgactggcggaacgtggtgcactccctcgaagcctctgagaacataagggcattgaaggacggctatgaaaaagtggagcaggacctgcctgcattcgaagacttggagggggccgcacgggccctcatgaggttgcaggacgtgtatatgctgaatgtcaaaggactggcccggggggtcttccaaagagtgacaggttccgcgattactgacctttacagccctaagagactctttagcctgactggcgacgattgcttccaggtgggtaaagtggcatacgatatgggcgattattatcacgccattccctggctggaggaagccgtgagtctgttcaggggcagctacggtgaatggaagacagaagacgaggcctctcttgaagatgctttggatcacctcgcttttgcctattttcgtgcagggaatgtctcttgcgcactcagcctgtcacgcgagttcctgctctactctcccgacaacaagaggatggctaggaatgtgctcaaatatgagagactgctggctgagtcacccaaccacgttgtggcggaggcagtgatccagagacctaatatcccccacttgcagacacgagacacatacgagggtctatgccagacactaggtagccagcctacactttatcagattccatccctctactgctcttacgagaccaatagcaacgcatacctgctgctccagccaatccggaaggaggtgatccacctggagccctatatcgcactttatcatgactttgtctctgactccgaagcccagaaaatccgagagctggcagaaccatggcttcagcgctcagtcgtggcctcaggtgaaaagcagcttcaagtcgaataccgaatcagcaagtccgcctggctgaaagatacagtagatcctaagcttgtgactctgaaccatcggatcgctgcgttgacaggcttggacgtgcgccccccttatgcggagtacctgcaggtcgtgaattatgggatcggtggtcattatgaacctcattttgaccatgccacatccccatcatctcctctttacaggatgaagtccggcaaccgagtggctacctttatgatctacctttccagcgtggaggcagggggcgcaaccgcttttatatacgcgaatctgtctgtacccgtggtgcgcaacgctgcgctgttttggtggaacctccatcggagcggcgagggtgattccgatacactgcatgctggttgccctgtgctcgtcggagataaatgggtggccaacaagtggatacacgagtacggacaggaatttcgcaggccatgttcttcatcgcctgaggactag

SEQ ID NO: 130109 - DNA, 1815 bp, synthetic construct
  misc_feature 1..1815: note = Description of Artificial Sequence: Synthetic coding sequence
  source 1..1815: mol_type = other DNA
atgggacctggcgcccgcctggctgcactcctggccgttcttgccctcggaacaggagacccggagcgggccgccgctcgtggggacaccttctctgcactcacgagtgtggctcgtgccctggcccccgaacgtcgcctcttaggactgcttcgccgataccttcgtggtgaagaagcacgcctgcgggatctgacccgattttacgataaagttctgagcttgcacgaggattcaaccacaccagtggcgaacccactcctggcgtttacattaatcaagaggctacaaagcgactggcgcaatgtggtgcattctttggaagcaagcgagaacatccgtgctctcaaagacggatatgaaaaggtcgagcaagacttgccagcatttgaagatttggaaggggcagccagggccctgatgcgcctgcaggacgtgtacatgctgaacgttaaaggattggctcgcggggtcttccaaagggtcactggctccgcgatcacagacctttactccccgaagcgcctcttttccctgacgggagatgactgttttcaggtgggtaaggtcgcttacgacatgggagactactaccacgccattccgtggttggaagaagctgtgtctctgttcagagggtcgtacggcgagtggaagacagaagacgaggcaagcctggaagacgccctggaccatctggccttcgcttatttccgagcaggaaacgtgtcctgcgccctgtccctttcccgggaatttcttctgtattctcctgacaacaaaagaatggctcgcaacgtgttgaagtatgaaaggctcctcgcggaaagtcccaaccacgtcgtggcggaagctgtgattcagcgacccaatattccccacctgcagacgagagatacatacgaaggcctgtgccagactttgggctcccagccaaccttgtatcagatcccttccctgtattgctcatacgagactaactctaacgcgtacctgttgcttcagcccattaggaaggaggtgatccacctggagccttacattgccctgtaccacgatttcgtgagtgatagcgaagcacagaagatccgtgagcttgcagagccctggctgcaaagaagtgtggttgccagtggtgaaaagcagctgcaggtcgagtacagaatttccaagtccgcttggctcaaggacacagtggacccgaagctggttaccctgaaccacaggattgctgcactcactggactcgatgtgagacccccctatgccgagtacctacaagtggtcaactacgggattggtgggcattacgaacctcatttcgaccacgcaacctctccatcttccccgctgtataggatgaaatcgggaaaccgcgttgccacttttatgatatacctcagttcagtcgaagccggaggggcaacagcgtttatctacgccaacctgtcagtaccagttgtcagacactgctttggcggcacatgcacaggcgttgttaaaggtaccgtcacccacttcatgctggctgttctgtcgtggtgggaaatctcagggtggccgacatctggttacatgtccatggacaggaattcagcagatcctgccgcgcccgctttaaaaaccgagcttcttgctgagcgttcgtggtggtctcccgtggcatttcagcggtctcaggagcccaaggcgggagtgggagaagaaaaagctgagcaacctccgggccgccggccttgtcagctctgcttgtgtctggctaatcagaggcagggacgggggtgttaccagggaactcttcgaatgtacatctag

SEQ ID NO: 130110 - DNA, 1527 bp, synthetic construct
  misc_feature 1..1527: note = Description of Artificial Sequence: Synthetic coding sequence
  source 1..1527: mol_type = other DNA
atgctgaggcgtgcactgttgtgtttggccgtggcagccctcgttcgagcagacgcaccagaggaggaggaccacgtgctggtgctgcgcaagtccaatttcgccgaggctcttgccgcacacaagtatctcctggtcgaattttacgctccgtggtgcgggcactgtaaggccctcgcccccgaatacgctaaggccgcagggaaactgaaggctgagggaagcgaaatcaggctcgctaaagtggatgctacagaggagtcagatctggcccagcaatatggagtaaggggctatcccactataaaattctttcgaaacggggacaccgcttcccctaaggagtacaccgctggacgcgaagctgacgacatcgtgaactggctgaagaagcgaaccggaccagccgctaccacactgccagatggagctgcagcagagtcactggtggaaagctcggaagttgcagttatcggattctttaaggacgtcgagagcgattccgcaaaacagtttttacaggccgcagaagcaatcgacgacattccttttggaattactagcaacagcgacgtttttagtaaataccagctggacaaggatggagtggtacttttcaagaaatttgacgagggccgcaacaatttcgaaggagaggtgactaaggaaaacctactggactttataaagcacaaccaacttccactggtgatcgagtttaccgagcaaactgcaccaaagatcttcgggggagagatcaaaacacacattctcctgttcctgccgaaatccgtctccgactacgatggtaagttgagcaattttaaaaccgctgctgaatcatttaagggtaagatcctttttatatttattgacagtgaccacaccgataatcagagaatattagagtttttcgggctcaagaaggaagagtgtccagccgttcgcctgataacattggaggaagagatgactaaatacaaaccagaatcagaagaactgaccgcagaacgaatcacagagttctgccaccgatttctggaggggaagatcaaacctcacctgatgagtcaggaacttccagaggattgggacaagcagccagtgaaggtgcttgttgggaagaatttcgaggatgtcgccttcgatgaaaagaagaatgtgttcgtggagttctatgcaccatggtgcgggcattgtaaacagctagcgcctatatgggataagctgggcgagacatacaaggaccacgagaacatcgtgattgctaaaatggattcaactgccaatgaagtggaagcggtgaaagtccatagcttccccaccttaaagttcttccccgcctctgcagacagaactgtgattgactacaacggtgagaggactttggatggatttaaaaagtttctcgaatctgggggccaggacggtgccggggatgacgacgacttggaggaccttgaggaagctgaagaacctgacatggaggaggacgacgatcagaaggcagtcaaagatgagctttag

SEQ ID NO: 130111 - DNA, 1479 bp, synthetic construct
  misc_feature 1..1479: note = Description of Artificial Sequence: Synthetic coding sequence
  source 1..1479: mol_type = other DNA
atgcttcggcgggccctgttatgtctggccgtcgcagccctggtaagggccgatgcccccgaagaggaggatcataaatacctcttagttgagttttatgccccgtggtgtggtcattgcaaagcactggccccagaatacgctaaggcggcaggtaagctaaaggctgagggcagcgaaatcaggctggccaaagttgacgctacggaggagtctgatctagctcaacagtacggagttcgcggataccccacgattaagttctttaggaatggggacaccgcttccccaaaagagtataccgcaggccgagaggccgatgatatcgtcaactggctaaagaagcggaccggccccgccgccaccaccctccccgacggggctgctgccgagtctctggtcgaatcttctgaagtggccgtcattgggttcttcaaagatgtagagtccgacagcgccaaacaatttctgcaagctgcagaggcgatcgatgatattccttttgggatcacgagtaattcagacgtgttttcaaagtatcaacttgataaggatggagtggtgctttttaaaaagtttgatgagggccgcaacaactttgagggtgaggtgaccaaggagaaccttctggatttcataaagcacaaccagctacccctggtgattgaatttactgagcagacagctcccaaaattttcggaggggaaattaaaacgcacattcttctctttctgccaaaatctgtaagcgactacgatggcaagctgtccaatttcaaaaccgcagcagaatctttcaaggggaagatcctctttatcttcatagacagcgaccatacagacaatcaacggatactggagtttttcggcctgaagaaagaggagtgccctgctgttcggctgatcaccttagaggaagagatgacaaaatataagcctgagtcagaagagctcaccgcagagcggatcactgagttctgccaccggtttcttgagggcaagatcaaaccacatctaatgtctcaggagctgcccgaagactgggacaaacaacccgtgaaagtgctagttggcaagaacttcgaggacgtggcatttgacgagaagaagaacgtgtttgttgagttttacgcaccttggtgtgggcactgtaaacagcttgcccccatctgggacaagctcggtgagacatataaggatcatgaaaacattgtgattgcgaaaatggattctacagccaatgaagtagaagctgtgaaggttcactcattcccaaccctgaagtttttccctgcgagtgccgataggaccgtcatcgactataatggagaacgtaccctggatggctttaagaagttccttgagagcggtggacaggacggagccggtgatgatgacgatctagaggacctggaggaagccgaggaaccagacatggaagaggatgatgaccagaaggccgtgaaggatgaactctag

SEQ ID NO: 130112 - DNA, 1356 bp, synthetic construct
  misc_feature 1..1356: note = Description of Artificial Sequence: Synthetic coding sequence
  source 1..1356: mol_type = other DNA
atgctgcggcgagccctcctctgcctggcagtggctgccctagtgcgagctgacgcgcccgaagaggaagaccacgttctggtgcttcggaaaagcaatttcgctgaagctttagctgctcataagtacttgctagtggagttttacgcaccctggtgcggccactgtaaagctctcgccccggaatacgcaaaggcagccggcaaactaaaagcagaagggtctgaaatccgcttagcaaaagtggatgcgacagaagaatcggacctggctcagcagtacggcgtgcgtggttaccctacaatcaaattctttagaaacggcgacaccgcaagccccaaggaatatactgcggggagagaagcagacgacatcccttttgggatcaccagcaattccgatgttttttcgaaataccaactggacaaagacggggtggttctcttcaagaagttcgacgagggcaggaataactttgaaggtgaagtgacaaaggaaaacctgctggactttatcaaacataaccaactcccactggttattgagtttacagagcagactgcacccaaaatcttcggtggcgaaatcaagacgcacatcctcttatttctgcctaagagcgtttccgactatgacgggaagctgtctaatttcaagactgcagccgaatcctttaagggcaaaattctgttcatctttatagactcagatcacactgacaatcagaggatattagagttttttggattgaaaaaagaagagtgccctgcagtacgcctgatcacccttgaggaagagatgactaagtacaaacccgagagcgaggaactgaccgcagaaaggatcaccgagttctgccaccggtttctggagggaaagattaaacctcacttgatgagccaggagctcccggaggactgggataagcagcccgtgaaagttttggttggcaaaaactttgaggacgtagcttttgatgaaaagaagaatgtgttcgttgagttttacgccccctggtgcggccattgtaagcagttggctcccatttgggataagctcggggaaacctataaggaccatgaaaatatcgtgatagccaaaatggattccactgcgaacgaagttgaagcagttaaagttcattctttccccacattgaaatttttccccgcaagtgcggaccgcactgtgattgactataacggcgaacggacactggatggctttaagaagttcctcgaaagcggcgggcaggacggggctggtgacgacgatgacttggaggaccttgaggaagcagaggagccggacatggaggaagatgacgaccaaaaggcagtcaaggatgagctgtag

SEQ ID NO: 130113 - DNA, 2133 bp, synthetic construct
  misc_feature 1..2133: note = Description of Artificial Sequence: Synthetic coding sequence
  source 1..2133: mol_type = other DNA
atgctctctttgcaatatccagacgtttacagagatgagactgcagtgcaggactatcacggccacaaaatatgtgacccatatgcttggctcgaagaccctgacagtgagcaaactaaggcttttgtcgaagctcagaataagatcactgtgccatttctggaacagtgtcctatccggggtctttataaagagcggatgaccgaactgtatgactatccgaagtactcatgtcacttcaagaagggcaaaaggtacttctatttttataacaccggtctgcagaatcaacgcgtactgtacgtacaggactcactcgagggggaggcaagggtgttcctagatccaaatattctgagcgacgatggcacagtcgccctcaggggctacgctttctcggaagatggagagtatttcgcttatggcttgtctgcctcaggcagcgactgggtgactatcaagtttatgaaagtggacggggcaaaggaactgcccgacgtgctggagagggtaaaattttcctgtatggcttggacacatgatgggaaaggcatgttttacaactcatatccccagcaggacgggaagtcagatggtacagagacctccacaaacttgcaccagaagctgtattaccatgtcctgggcactgatcagtcagaagacatactgtgcgctgaatttccagacgagccgaaatggatgggaggcgccgaattatcagatgatggaagatatgtgctgctgtcgattcgggaggggtgtgatccagtaaaccgcctatggtactgtgatttgcagcaggagagttcaggcatcgctggcatcctcaagtgggttaagctcatcgataacttcgaaggtgagtacgactatgtcacaaacgagggtaccgtcttcacctttaaaaccaaccggcaaagtccaaactacagagtcatcaatattgactttcgcgaccccgaggagtctaaatggaaggtgctggtccccgaacacgaaaaggacgtgctcgaatggattgcctgcgtgaggagcaactttctggtcctgtgctacctgcatgacgtcaagaacattctacagctgcacgatctgacaacgggagccctcctaaagaccttccctctggatgtgggctccatcgtggggtattcaggccagaaaaaagacacagagatcttttaccagttcacatcctttctgtcccccggtattatctaccactgcgatctgactaaggaggagctggaacccagagttttccgcgaagtcaccgtcaaaggcatcgacgcatccgactaccagacggtgcagattttttacccctctaaggacgggacaaagatccctatgttcattgtgcacaaaaagggcatcaaactggacggaagccaccctgcattcttatacgggtatggcgggttcaacattagcattaccccaaattattcagttagccgattgatctttgtcagacacatgggaggtatcctggccgtcgcaaacattcggggaggaggcgaatatggagagacatggcacaagggaggaattctagctaataaacagaactgcttcgatgacttccagtgcgccgccgagtacctgatcaaggagggatacaccagccccaaacgactgactatcaacggtgggtcgaatggtgggttgcttgtcgctgcctgcgccaaccagcgacccgatctgtttgggtgcgtgattgcacaggtcggcgttatggacatgctcaaattccacaagtatacaattggacatgcttggacaaccgattacggatgctccgatagcaagcagcactttgaatggcttgtgaagtacagccctttgcacaacgtgaagctgccagaagctgacgacatacagtatcctagcatgctactcctgacagcagatcacgacgaccgggtcgtacctcttcattccctaaagtttattgcaactttgcaatacatcgttgggcgctctagaaagcagagtaacccactccttatccatgtggacaccaaggccggacacggagccggaaagcccaccgctaaggtcatcgaggaggtgagtgatatgttcgcgtttatcgctagatgtttaaacgtagactggatcccttag

SEQ ID NO: 130114 - DNA, 138 bp, synthetic construct
  misc_feature 1..138: note = Description of Artificial Sequence: Synthetic coding sequence
  source 1..138: mol_type = other DNA
taaatcatctaccactgcgatcttactaaagaggagttagaacctcgagtctttagagaggtgaccgtcaagggtattgacgccagcgactaccagacagtccaactgcccaaagggacggagtcttcacgtaactag

SEQ ID NO: 130115 - DNA, 135 bp, synthetic construct
  misc_feature 1..135: note = Description of Artificial Sequence: Synthetic coding sequence
  source 1..135: mol_type = other DNA
atcatctaccattgtgacttgaccaaagaggagcttgaacccagagtgtttagggaggtgacagtaaaagggattgacgcctcagactaccaaactgtccagctccccaagggcacagaatcatccagaaactag

SEQ ID NO: 130116 - DNA, 2184 bp, synthetic construct
  misc_feature 1..2184: note = Description of Artificial Sequence: Synthetic coding sequence
  source 1..2184: mol_type = other DNA
atgcagcagaaaactaaactattcctgcaggctttgaagtactccataccccacctggggaaatgtatgcagaaacagcaccttaaccattacaattttgccgatcactgctacaaccgaatcaagctgaagaaatatcacctcactaaatgcctccagaataagcccaaaatatctgagctcgccaggaacataccgagccgcagcttctcatgcaaagatctgcagccagtgaaacaagagaacgaaaaaccccttccagagaacatggacgcctttgagaaggtgcgtacaaagctggaaacccaacctcaggaggagtacgaaatcatcaacgtggaagtaaaacacgggggattcgtctattatcaggagggctgctgtctagttagatctaaggacgaggaggccgacaatgacaattacgaggttttgttcaacctggaggagctaaaattagaccagccattcatcgactgcattagagtagcgcccgatgagaagtacgtggccgccaagatccgaaccgaagatagcgaagcatccacctgtgtgatcatcaagctcagcgatcagccagtgatggaggctagcttccctaatgtatcctcctttgagtgggtcaaggatgaagaggatgaagatgtgctcttttatacttttcaacgcaatctccggtgtcatgacgtgtatagagccacgttcggagacaacaagaggaatgaacgattctacactgagaaggatcctagctattttgtgttcctgtacttgactaaggattccagattcctgaccatcaacattatgaataaaactacctctgaggtgtggctgatcgacggactaagtccatgggatcctccagttctgattcagaagagaatccacggggtgctgtactacgtggagcatagagatgacgagctgtacatcctgacgaacgtgggagagcccacagaatttaagttgatgagaacagctgctgatactcccgctatcatgaactgggatctgtttttcacaatgaaaaggaataccaaggtgatcgaccttgacatgtttaaggatcattgtgtgctgtttctgaagcactctaatctgctgtatgttaatgtgattggcttggcagacgactcagtccggagcctgaagcttccaccctgggcttgtggcttcatcatggacaccaatagcgatcccaaaaactgtccattccagctgtgttctccaattaggcctcccaagtactacacatataaattcgccgaaggaaagctattcgaggaaaccggccatgaggaccccatcactaaaacaagtcgcgtgctgcggcttgaagcaaagtccaaggacgggaagctagtgccaatgaccgtgttccacaaaaccgactccgaggatctgcagaaaaaacccctgctcgtccatgtatacggcgcatatggcatggacttgaaaatgaactttcggcctgagaggagggttctggttgacgatggatggatcctggcatattgtcatgttaggggcgggggcgagcttgggttacagtggcacgcagacgggaggctgacaaagaagctcaatgggctggctgacctcgaggcttgcattaagacactgcatggccaaggattctctcagccctctcttaccacactgaccgccttctctgccgggggggttttagctggcgccctttgtaattcaaatccagagttagtcagagcagtaacattagaggcgccatttttggatgtcctgaacaccatgatggacacaacattgcctctgacgctggaggagttggaggaatgggggaacccaagcagcgacgaaaagcataaaaattatatcaagagatattgcccataccagaatattaaacctcagcactatcccagcatacacatcacagcttacgagaatgacgagcgcgtgcccttaaaggggatcgtatcctacaccgagaagctgaaggaggcgatcgctgagcatgcaaaagatacaggcgagggctatcagacacccaacataatcctcgatatacagccaggcgggaaccacgtgatcgaagacagtcataagaagatcactgctcaaatcaagttcctatatgaggagctggggctggactctacctctgtctttgaggatctaaagaagtatcttaagttctag

SEQ ID NO: 130117 - DNA, 1998 bp, synthetic construct
  misc_feature 1..1998: note = Description of Artificial Sequence: Synthetic coding sequence
  source 1..1998: mol_type = other DNA
atgcaacagaaaacaaaacttttcctgcaggccttaaagtattctattcctcacctgggaaagtgcatgcagaagcagcatctgaatcattacaatttcgccgatcattgttacaatcgcatcaaactcaaaaagtatcatctgactaagtgtctgcagaataaacccaagatctctgaactggcccgaaatattcccagcaggagctttagctgcaaggatctgcagcccgtgaaacaagaaaatgagaaacccttacccgagaacatggatgccttcgagaaggtcagaacaaagctggagacccaaccacaggaagaatatgagattataaacgtggaagtgaagcatggcgggtttgtgtattatcaggaggggtgctgcttagtgcgatcaaaggacgaggaggccgacaatgataactatgaagtcctcttcaacttggaggaactcaagttagaccagcccttcattgactgtatcagagtggctcctgatgagaaatatgtggctgcaaaaattcggactgaagatagcgaggcctctacttgcgtgattatcaagttgagtgaccagcccgtgatggaggcttccttcccaaatgtctcatcattcgaatgggttaaggatgaagaagacgaagacgtactcttctataccttccagagaaatctgcgttgccatgacgtgtacagagccacattcggagacaacaaacggaacgaaaggttttataccgagaaagacccttcatacttcgtatttctctatttaacaaaggatagtagatttctgaccatcaacattatgaataagactaccagtgaggtgtggttaatagacggcctgagcccctgggaccctccagtgctgattcagaagcgcatacacggcgtgctttactatgtggagcatcgggacgatgagctttacattctcaccaacgtgggtgagcccactgaatttaagctccctccatgggcttgtggatttataatggacaccaacagcgatcctaagaactgtccatttcagctgtgctctcccattcgcccccccaaatattatacgtataaatttgccgaaggcaagctttttgaagaaactggccacgaggaccccatcaccaagacaagtcgggtgcttaggctagaggccaaatctaaagatggcaagcttgtgcctatgactgtttttcacaagacggattcggaggatctacaaaaaaaaccgttgctggtgcatgtgtacggagcctatggaatggatctgaaaatgaacttcaggccagagcgcagggtccttgttgatgatggctggatattggcatactgccacgtgaggggcggtggcgagctgggcctgcaatggcacgctgatggacggctgactaaaaagctgaacggcttagcagacttagaggcatgtataaaaacattgcacggccaggggtttagccagccaagcctgacgactcttacagctttcagtgccggcggagtcctggcaggagctctatgcaattccaatcccgaactcgttcgagctgtgaccctggaggcacccttccttgacgttctgaacaccatgatggacaccaccctgccattgaccctggaggagttagaggagtggggaaatcctagcagcgatgaaaaacacaaaaattacattaagcggtactgcccctaccagaatattaagccccaacattacccaagtatccacattactgcatacgagaatgatgaaagggtcccgcttaaaggcatagtatcctacaccgagaagctgaaagaagcgatcgctgaacacgctaaggatactggcgaaggataccagacaccaaacatcatcctcgacatccagcctggggggaatcatgtgatcgaagacagccacaaaaagatcacagcacaaatcaagttcttgtacgaggaactggggctagattcaacctccgtgttcgaagacttgaagaagtacctgaaattctag

SEQ ID NO: 130118 - DNA, 1986 bp, synthetic construct
  misc_feature 1..1986: note = Description of Artificial Sequence: Synthetic coding sequence
  source 1..1986: mol_type = other DNA
atgcaacaaaagactaaactcttcctgcaggctctgaaatatagcatcccccatctgggtaaatgtatgcagaagcagcacctgaatcactataactttgctgatcattgctacaatcgcatcaagttgaaaaagtatcaccttactaaatgcctgcagaataagcctaaaatttcggaattagcaaggaacatcccaagtcgctcgttcagctgcaaagacctacaaccagttaaacaggagaatgagaaaccgctgcctgaaaatatggatgcattcgaaaaagttcgcacgaagctggaaacacagccccaggaggagtatgagattataaatgtggaagtgaagcacggtggttttgtgtattaccaggagggatgctgcctcgtgaggagcaaggacgaggaagcggacaacgacaattacgaagtgctgttcaatctggaagaactgaagcttgatcagccattcatcgactgcatccgcgtagctccagacgagaagtacgtggcagccaaaatcagaacagaggactctgaggcaagcacatgtgtaataatcaagctgtcggaccaaccagtgatggaggcctcatttcccaatgtcagctccttcgagtgggtgaaagatgaggaggatgaagatgtcctgttctacacattccagcgcaatctgagatgccatgatgtatatagagctacgtttggtgataacaagcgcaacgaaaggttctacactgagaaagacccaagttactttgtgttcctatacctcactaaggactctaggtttcttaccatcaatatcatgaataagactacaagtgaagtgtggctgattgacgggcttagcccttgggatccaccagtgcttattcagaagcgcatacacggcgtgctttactacgtggagcaccgagatgacgagctgtacatacttacaaacgtgggggaacccaccgagtttaaactcatgagaacagcggcagacacccccgctatcatgaattgggatctcttttttaccatgaagcggaacacaaaagtcatagatctagacatgttcaaggaccactgcgtgctcttcctgaaacacagcaatctcctgtacgtcaatgttatcggcctagcagacgattctgtgaggagcctcaaggacgggaagctggtgcctatgactgttttccacaaaactgattcagaagatcttcagaagaagcctttgcttgtgcatgtgtatggtgcttacgggatggaccttaaaatgaactttcgacctgagcgaagggtgctggttgatgatgggtggatcctggcatactgccatgttcggggcggaggggagcttgggctacagtggcacgcagacggccgccttactaaaaagctcaacggtctggccgacctcgaagcctgtatcaagacattacatggccaagggttcagccaacccagcctcacgacactgaccgccttctcagccggcggcgtgctcgccggggcgctatgtaactctaaccccgagttggtccgcgcagtgacccttgaggcacccttccttgatgtcttgaatacaatgatggatactacactgccactgaccctcgaagagctggaggaatggggaaaccccagtagcgacgaaaaacacaaaaactacatcaagcggtattgcccatatcagaacataaagccccagcattatcccagtatccatatcactgcctacgaaaacgatgagagggttccgctgaagggcatcgtttcttacacagagaaactgaaagaggcgatcgctgagcatgctaaagacacaggtgagggctatcagaccccaaatattattctagatatacaaccaggaggtaaccacgtgattgaagattcccataaaaagattaccgcccagattaagtttctctacgaagagctcggactggattccacttccgtatttgaggatctgaagaaatacctgaaattttag

SEQ ID NO: 130119 - DNA, 2184 bp, synthetic construct
  misc_feature 1..2184: note = Description of Artificial Sequence: Synthetic coding sequence
  source 1..2184: mol_type = other DNA
atgcagcagaaaaccaagctatttctccaagctctcaaatactccatcccccacctggggaagtgtatgcaaaagcagcacttgaatcattacaacttcgccgaccactgctacaaccggataaaactcaagaaataccatcttacgaaatgccttcaaaacaagccaaaaatctccgagctggctcgcaacatcccgagccggagcttctcgtgcaaagacctgcagccggtcaaacaggagaacgagaagccactgcctgaaaacatggatgctttcgaaaaggttaggacaaaactggaaacccaaccacaggaggagtacgaaatcatcaacgtcgaggtcaaacacgggggcttcgtgtattaccaggaaggttgctgtctggtgcgatccaaggatgaagaggcggataacgataactatgaggtactgtttaaccttgaagagttgaagctcgaccaaccttttattgactgcatccgcgtagcgccagatgagaagtacgtcgccgccaagataagaactgaggattctgaagcttcgacttgtgtcataatcaagctcagtgaccagcccgtgatggaggcctccttccccaacgtctctagtttcgaatgggtgaaagatgaagaggatgaagacgtactcttttatactttccaaagaaacctgcgttgccacgacgtctaccgggccactttcggggataacaaacgtaatgagcggttttacacagagaaggacccctcttacttcgtatttttatacttaaccaaggacagcaggttcttgacaattaatataatgaataagaccacgagtgaggtgtggctcatagatggactatccccttgggatcctcccgtattgatccagaagcgaattcatggtgtgttgtactacgtggaacatcgtgacgacgagttgtacatcctgactaatgtaggagagcccaccgaattcaagctgatgaggactgctgccgatacccccgccataatgaactgggatctcttctttaccatgaagcgtaacaccaaagtcatagacttagatatgttcaaggaccattgcgttctgtttttaaaacactcaaatttactctacgtgaacgttatagggcttgccgacgactctgtccggtcactgaaattacctccctgggcttgtggcttcatcatggatacaaacagtgatccaaaaaattgcccattccagttatgcagcccaattcggcctccgaaatattatacctataagtttgctgagggcaagctgtttgaagagactggacacgaggatccgattaccaagacctctcgggtgcttcggctcgaggcaaagagtaaggacggaaaattggttccaatgacagttttccacaaaacagattcagaggatttacaaaagaaaccgcttctggttcatgtctacggggcatacgggatggatctgaagatgaattttcggcccgagcgcagagtgcttgtggatgacggatggatcctcgcgtactgccacgttcggggaggaggtgaattgggcctgcaatggcatgctgatggtaggttgacaaaaaaattaaacggactggcggatcttgaggcatgcattaaaactctgcacggccaggggtttagccagccaagcttgacgaccttgacagccttttcagcagggggagtcttggccggcgctctgtgtaactctaaccctgagctggtgcgagcagtgacactggaggcaccctttctagatgttctgaacaccatgatggataccactctgcctttgacactcgaggagttagaggagtgggggaatccctcctctgatgaaaaacacaagaactacatcaaaaggtattgcccataccagaatatcaagccacagcactacccatccatccacatcacagcttatgagaatgatgaacgtgtgcccctcaagggcatagtctcttacaccgaaaaactgaaagaagccatagcagagcatgcaaaggacacgggggaaggttatcagacgcccaacatcattctggacattcagcccggcgggaatcacgtgatcgaagacagccacaagaaaatcactgcacagatcaaattcctctacgaggaactgggcctagactctactagcgtgtttgaagatctcaaaaaatatcttaagttttag

SEQ ID NO: 130120 - DNA, 2184 bp, synthetic construct
  misc_feature 1..2184: note = Description of Artificial Sequence: Synthetic coding sequence
  source 1..2184: mol_type = other DNA
atgcagcagaaaaccaagctcttcctgcaggccttgaaatacagtatccctcacttgggtaagtgtatgcagaaacagcacttaaatcattacaactttgccgatcactgctacaacagaatcaagctgaaaaagtaccatctgacaaagtgcctgcagaataagccgaagatttccgaactcgctcgaaatatcccgtcaagaagctttagctgtaaggacctccaaccagtaaagcaagagaatgagaagcccctacctgagaacatggacgcttttgaaaaggtccggaccaaacttgagacacaaccccaggaggaatatgaaatcatcaatgtagaggtaaaacacggaggtttcgtgtattatcaggaaggctgctgcctagtaaggtccaaagacgaggaggccgacaacgacaactacgaggtactgttcaacctcgaggagctgaaactggaccagccatttatagactgcattagggttgccccagacgagaagtacgtggcagccaagatacgcacagaggatagcgaggcgagtacttgtgttattataaaactatcggaccaacctgtaatggaggcgagtttccccaacgtgtcctcgttcgaatgggttaaagacgaggaggatgaggatgtcttgttctacacttttcaaagaaatctgcggtgccacgatgtctatcgcgccaccttcggagataacaagaggaacgaacgcttctacacagagaaagatccctcatactttgtgttcctttacttgacgaaggactcccggttcttaacaatcaacataatgaataaaacaacaagcgaagtgtggttgatcgacggtctaagcccttgggacccacccgttctgatacagaaaaggatccatggcgtcttatattacgtggagcatagagacgatgagctgtatattctcaccaacgttggcgagcccacagagttcaagctcatgaggactgccgccgatacacccgccataatgaattgggatctgttctttacaatgaagaggaatactaaagtcattgacctcgacatgttcaaggatcattgtgtcttatttctgaagcatagtaacctactgtacgtcaatgttattgggctggccgatgatagcgtgcgcagcctgaagctgcccccctgggcatgcgggtttatcatggatacaaattctgaccccaaaaattgtccttttcagctatgctcccccataaggccccccaaatactatacctacaagttcgccgaagggaaactgtttgaagaaacaggccacgaggatcccataactaagacctcccgcgtcctgcgcctggaagccaagagcaaggacgggaagcttgtgccaatgactgtttttcacaaaaccgacagcgaggacctgcagaaaaagcctttactagtgcacgtgtatggagcttatgggatggacttgaaaatgaattttagaccagaacgaagggtgctggtagacgatggctggatcctggcctattgtcacgtgcggggcgggggagaattagggctgcaatggcatgcggacggccgtctgacaaaaaagttgaacggactggcagatctcgaggcctgtataaaaaccctgcacggccaaggatttagtcagccctcccttaccactttgacagccttttcagccggcggagttttggcgggtgccctctgtaactccaaccccgagctcgtgcgcgccgttacactagaggccccattcctagacgttttaaacactatgatggacacaaccctgcctttgacattggaggagctcgaggagtggggcaatccttccagtgatgagaaacataagaactacatcaaacgctactgtccctatcagaacattaaacctcagcattacccctccattcacatcacagcctatgagaacgatgaacgggttccactgaaggggatcgttagttacacagagaaactaaaggaggctattgcagaacacgcaaaggataccggggaggggtaccagacaccgaatattatcctggacatccagccagggggcaatcacgtgattgaggattcccacaagaagattaccgcgcagataaaatttttatatgaggaactcggtctggacagcaccagtgtctttgaggatttgaagaagtatctgaagttctag

SEQ ID NO: 130121 - DNA, 2184 bp, synthetic construct
  misc_feature 1..2184: note = Description of Artificial Sequence: Synthetic coding sequence
  source 1..2184: mol_type = other DNA
atgcaacagaagaccaagttattcctgcaggccctaaagtactcaattcctcacctgggaaaatgtatgcagaaacagcacctcaaccattacaatttcgccgatcattgttataatcgtattaagctaaaaaaataccatctgacaaaatgtttacaaaacaagcctaaaattagtgaattggcccggaacatcccttcccgttcatttagctgtaaggatctgcagccagttaagcaggaaaacgagaagccactccctgagaacatggacgctttcgagaaagtgcgtaccaaactggagacacagcctcaggaagaatatgagattattaatgtagaggtgaagcatggcgggttcgtttattaccaagagggctgttgtctcgtgagatccaaagacgaggaggccgacaatgataactatgaggttctctttaacctggaggagctgaagctggaccagccttttatcgattgtatcagagttgcacctgatgagaagtatgtggcggccaagatccggactgaggactccgaagctagtacgtgcgtaatcatcaagttgagtgaccagcctgtgatggaagcgagcttcccaaatgtcagctcatttgaatgggtcaaggacgaggaggatgaagacgtgctattctatacgttccaacgcaatctgcggtgtcacgacgtttacagggccacctttggggacaacaagcgcaatgaacgattttacacagagaaagacccttcttacttcgtctttctgtacttgaccaaagacagcagattcctgaccattaatatcatgaataagactacttcagaggtctggcttatcgacggccttagcccttgggatccaccagtccttattcaaaagagaattcatggagtgctctactacgtggaacatagggacgacgagctatatatccttactaatgttggtgaaccaacagaatttaagttaatgcgaacggcagccgatacccctgccatcatgaattgggatctcttttttacaatgaagcgaaacacaaaggtcatcgacttggatatgttcaaagaccactgtgttctgttcctgaagcacagtaacctgctctatgtcaacgtgattggcctggccgatgacagtgtgaggagcctcaagctcccaccttgggcatgcggcttcattatggacactaactctgacccaaagaactgtccattccagctgtgtagccctattaggcctcctaaatattatacttataaattcgctgagggtaagctctttgaggagaccggacacgaggaccccataactaaaacatccagggtcctacggctggaagctaagtcgaaggacggcaaattggttccaatgactgtgtttcataagactgattccgaggatttacagaaaaagcccctgctcgtgcatgtgtatggcgcatatggaatggacctgaaaatgaatttccgaccggagagaagggtgctggtggatgacggatggatattggcttactgtcacgtgaggggcggcggtgagctgggcctgcaatggcacgctgatggcagactgactaagaagttgaatgggctagcagacctggaagcctgcataaagacacttcatgggcaaggcttcagccagcccagtcttaccaccttaactgctttttcagctggaggcgtgctggccggggctctttgcaattccaatccagaattagtgcgcgctgtcacactagaagcccccttcctcgatgtactaaataccatgatggacactaccctgcctcttaccttagaggaattagaagaatggggcaacccttcatccgatgaaaagcacaagaactatatcaaaaggtactgcccctatcagaatataaaaccacaacactacccctcaatccatattactgcgtacgaaaacgatgaacgcgttccattgaaaggcatcgtctcctatacagagaagctcaaagaggccatcgcggagcatgcaaaggacacgggagaaggatatcagaccccgaatataatattggacatccaaccaggcggtaatcacgtgattgaagactcgcataagaagatcacagctcaaattaaatttctgtacgaagaactcggcctggactccacttccgtattcgaggatctcaagaaatatcttaagttttag

SEQ ID NO: 130122 - DNA, 2184 bp, synthetic construct
  misc_feature 1..2184: note = Description of Artificial Sequence: Synthetic coding sequence
  source 1..2184: mol_type = other DNA
atgcaacagaaaacgaagttgttcttgcaggcactgaagtattccatccctcatttgggcaagtgtatgcagaaacaacatttgaatcactataactttgcggatcattgctataataggatcaagctcaaaaagtatcatttaactaaatgtctccaaaataagcctaaaatttcagagttggcgcggaacattccttcacgaagcttctcatgtaaggatcttcagccagtgaagcaggaaaacgagaagcccctgccagagaatatggatgccttcgaaaaagtcaggactaagctggagacacaacctcaagaagagtacgagattatcaacgttgaagtaaaacatggtggctttgtctactatcaggagggctgttgtcttgtgagatctaaagatgaagaggccgacaacgataactacgaggtgctcttcaaccttgaagagctcaagcttgatcagccgtttattgactgcatacgggtcgcgcctgacgagaaatatgtcgccgctaagattcggacggaggactccgaagcctccacttgcgttatcattaaactgagcgaccaacccgtcatggaagcctcttttccaaacgtgtcgtctttcgagtgggtgaaggatgaagaggacgaagacgtgcttttctataccttccagcgcaatctgcgctgccacgacgtgtatagagcaacattcggagacaacaaaagaaacgagaggttctacactgaaaaggacccctcctactttgtcttcctctatctgaccaaggactccagatttctgacaattaatataatgaacaagaccacaagcgaagtgtggctcatagacgggctgagtccatgggacccaccagtgctgatccagaagcgaatccacggagtattatattacgtggagcaccgcgatgacgaactctatatactcaccaatgtgggtgagcctaccgaattcaagctgatgcgcactgctgccgacacccctgccatcatgaactgggatctcttttttactatgaagcggaacacaaaggtgattgacctggacatgttcaaagaccattgtgtgttgtttctgaagcattcgaatctgctatatgttaatgtaataggtctcgctgatgatagcgttcgatcattaaaacttcctccctgggcctgtggcttcattatggataccaactctgaccctaagaactgccccttccagctttgctcacccattagaccgcccaaatactacacctacaagtttgcagagggcaagctttttgaagaaacgggccacgaggatcccataacgaagacatccagggtgttgcgtctggaggccaagtctaaagacggtaagcttgtgcccatgactgtttttcataagacagacagcgaggacttgcagaagaaaccactcctagtgcacgtctacggagcttatggcatggatctgaaaatgaacttccggccggaacggagggtcctcgttgacgatggctggattttagcatactgccacgttagggggggcggcgagttggggctacagtggcatgccgacggaaggttgactaagaaactcaatggtctggccgatttggaggcttgcataaaaacattgcatggccaggggttctcacagccatctctgaccaccctcactgctttctcggctggcggtgtgctagcaggagcactgtgtaacagcaacccagaactggtgcgtgccgtgacactcgaggcccctttcttggatgtgctgaatacgatgatggacactactctccctctgactcttgaggagctggaggaatgggggaatccatcttctgacgaaaagcataagaactatataaaacgctattgtccctatcaaaatataaaaccgcagcattacccatcaattcacatcaccgcatatgagaacgatgaaagagtaccacttaagggcatcgtctcgtacacagaaaagcttaaggaggctattgccgagcacgccaaagacaccggggagggttaccagactcctaatattattctcgacattcaacccggcggaaaccacgtgatcgaggatagtcacaaaaaaatcactgcccagatcaagttcctgtatgaagagctcggattagattctaccagtgtctttgaggacctcaaaaagtacctcaaattctag

SEQ ID NO: 130123 - DNA, 2184 bp, synthetic construct
  misc_feature 1..2184: note = Description of Artificial Sequence: Synthetic coding sequence
  source 1..2184: mol_type = other DNA
atgcagcagaagaccaagctgttcctccaggcccttaaatattctattccacatctcgggaaatgtatgcagaagcagcacttaaaccattataacttcgcagaccactgttacaataggatcaagctaaagaagtaccatctgacaaaatgtctgcagaacaaacccaaaatttcagagctggcccggaacatcccttctcgatctttcagttgtaaagacctgcaacctgtgaagcaagaaaacgaaaaacctcttcccgagaacatggacgcatttgagaaggtccggactaagctggaaacacaaccacaagaagagtatgaaattatcaatgtggaagtcaaacacggtggcttcgtctactaccaggagggctgctgcttggtacgatcaaaagacgaggaggcagataatgataactacgaggtgctgttcaaccttgaggaactgaaactggatcagccttttatagattgtatccgagtagcaccagatgagaaatatgtcgccgccaagataagaaccgaggattcggaggcctctacctgcgttataataaagctgtccgaccagcccgtaatggaggcttcttttcccaacgtttcaagctttgagtgggttaaggacgaggaagatgaggatgtcctgttttatacctttcaaaggaatctgcgctgccacgacgtttatagagctaccttcggtgacaataaacggaatgagaggttttacacagagaaagatccctcttacttcgttttcctatacctcacaaaagactccagattcctcactatcaacataatgaacaagactacatctgaggtatggctgatcgacggtctgtccccatgggacccccctgtactcattcagaagaggattcacggggtgctgtactatgtcgagcaccgagatgatgagctgtacattctgaccaatgtgggcgagcccactgagttcaaactcatgcgcaccgctgccgatacaccggcaatcatgaactgggatctgttcttcacaatgaaacgcaatacaaaagttattgatctcgatatgtttaaggatcactgtgtgttgttcctgaaacacagtaatctcctgtacgtgaatgtaatcgggctcgcagacgatagcgttcgctctctaaagcttcctccttgggcgtgtggattcatcatggacactaacagcgaccctaaaaattgcccgtttcagctatgtagtcctatacggccccccaaatactacacctacaagtttgcagagggtaaactgttcgaagagactggccatgaagaccctattactaagacatcccgagtgctccgacttgaggctaagtccaaggatggcaaattggtccccatgactgtgttccacaaaacagattctgaggacctgcaaaagaaacctttgttggttcacgtttatggcgcctatgggatggatctgaagatgaactttcgcccagaacggcgcgttctcgtggacgatggctggatcctagcatattgtcacgtcagagggggtggcgagctgggactgcagtggcatgcagacggtcgcctgacaaaaaaactgaacggccttgccgatctggaagcctgtataaagaccctgcacggacagggcttctcgcaacccagccttacaaccctgaccgcttttagcgcggggggggtattggcaggcgcactgtgtaacagcaaccccgaattggttcgcgccgtgactctggaagcacccttcctagatgtgcttaatacaatgatggacaccaccctgcctctgaccttggaggagcttgaggagtggggcaacccttcatcagatgaaaaacacaaaaattatatcaaaaggtattgtccataccaaaatattaaaccccagcattatcccagcatacacattactgcttacgagaacgacgaacgcgtgcctttgaaaggaatagtctcttacacagaaaagctcaaggaggctattgccgagcacgctaaggacacaggagaggggtaccagacccccaatataatactcgacattcagcctggagggaatcacgtgatcgaggattcccataagaagataactgctcaaataaaatttctgtacgaagaactaggcctcgacagtacctcggtgtttgaagaccttaagaaatacctaaagttttag

SEQ ID NO: 130124 - DNA, 456 bp, synthetic construct
  misc_feature 1..456: note = Description of Artificial Sequence: Synthetic coding sequence
  source 1..456: mol_type = other DNA
atgcagcaaaagacaaagttattcttgcaagcacttaaatatagtattcctcacttgggaaaatgtatgcagaaacagcacctgaaccactataatttcgcagatcactgttataacagaatcaagctgaagaagtaccatctgactaagtgccttcagaataaacctaaaatttcggaactggcccgtaatattccgagtaggagtttctcctgcaaagacctgcagccagtaaaacaggaaaacgagaaaccgctccctgagaatatggacgcatttgagaaggtgaggaccaagttagagacgcaaccacaagaggagtacgagatcattaacgttgaagttaaacacggagggtttgtgtactaccaggaagggtgctgcctagtccgctcaaaggacgaggaagccgacaatgataactatgaggtactcttcaacctggaagagctgtag

SEQ ID NO: 130125 - DNA, 1917 bp, synthetic construct
  misc_feature 1..1917: note = Description of Artificial Sequence: Synthetic coding sequence
  source 1..1917: mol_type = other DNA
atggatgcctttgagaaagtgcgcactaagttagagactcagccccaggaggagtatgaaattattaacgtggaggtgaaacatgggggcttcgtgtattatcaggagggatgctgcctagtgcgttccaaggatgaggaagccgataacgataactatgaggtcctgtttaatctggaagagctaaaactggaccagcccttcatcgattgcataagagtggcccctgacgagaagtatgtcgccgccaagattcggacagaagatagtgaggccagcacgtgtgtgattatcaagctatcagaccagccagtcatggaagcctcctttcccaatgtgagcagcttcgagtgggtgaaggacgaggaagatgaagacgtgctgttttatacgtttcaacgtaacctgcgctgccacgacgtgtatagagctacttttggggacaacaaaaggaacgagcgcttctacacagaaaaagacccttcctactttgtcttcttgtacctgactaaagatagcagattccttaccataaacattatgaataagacgacctctgaagtctggctgattgacgggctgtccccgtgggatccacccgttctcatccaaaaaaggatccacggcgtcctgtactacgtcgagcatcgggatgatgaactctacatcctgacgaatgtgggcgagccgactgagttcaagctcatgcggaccgccgcagatacgcccgctattatgaattgggatctcttcttcacgatgaagagaaacactaaagtgatcgatctggatatgttcaaagatcattgcgtgttgttcctgaagcacagcaacctgctatacgtcaatgttatcggtctggctgatgatagtgtaaggagcctcaagctgcctccgtgggcttgtggcttcatcatggataccaacagcgaccccaaaaactgtccatttcaactgtgtagccctattagaccgcccaagtattatacatataagttcgcagaaggcaaactgttcgaggagactggccatgaggacccaattacaaaaacctccagagtgctccggttggaggcaaagagtaaagacggaaagctggtgcctatgacagtctttcataaaaccgacagcgaggatctgcagaagaagccgttattagtgcacgtgtacggtgcgtatggcatggatcttaagatgaactttaggccggaaagaagagtgctcgtggacgacgggtggattttggcttattgccatgtgcgcggcgggggtgagctaggcctgcaatggcacgctgacgggcgactgacgaagaagctcaacggtcttgctgatttagaggcttgtattaaaacccttcacgggcaggggttctctcagccctccctgaccaccctgaccgccttcagcgcgggaggggtgctggcaggggccctctgcaactcgaaccctgaattggtgcgggctgtaactctcgaggcacctttccttgatgttctgaacaccatgatggacacgacactacctctcaccctggaggagctggaagagtggggtaatccatcaagtgacgagaaacacaagaactatatcaagaggtactgtccttatcagaatataaaaccacagcattatcctagcatccatatcacggcctatgagaatgatgaaagggttcccctgaaagggatcgtcagttataccgagaagcttaaggaggccattgcagaacatgctaaggacaccggggaggggtaccaaactccgaatatcattctggatatccagcctggagggaaccatgtgattgaagatagtcataaaaagattactgcacagatcaagtttctatacgaggagctgggcctggactctacttcagtattcgaagaccttaagaaatacctgaagttttag

SEQ ID NO: 130126 - DNA, 1491 bp, synthetic construct
  misc_feature 1..1491: note = Description of Artificial Sequence: Synthetic coding sequence
  source 1..1491: mol_type = other DNA
atgggtcgcagagctttgctgcttctgctgctgtccttcctggctccctgggcaaccatcgcactgcgccctgctctacgggctctggggtctttacacctgcctacgaaccccacaagtctgcccgctgtggccaagaactatagcgtcttgtactttcaacagaaagttgatcactttggattcaatactgttaaaaccttcaatcaaagatatttggtcgcagacaaatattggaagaaaaacggcgggtccattcttttttacactggaaacgaaggggacataatatggttctgtaataataccggcttcatgtgggatgtcgccgaggagctgaaggcgatgttggttttcgccgagcatcggtactacggggagtcattacccttcggggataactcttttaaagattcccggcacctgaacttcctgacaagtgagcaggccctggccgacttcgcagaattgattaagcacctgaagcgcaccatacctggcgcagagaaccagccagtgattgcaatcggcggttcctatgggggcatgcttgctgcatggtttagaatgaagtaccctcatatggtggtcggtgcactggcggcctctgctcctatttggcagttcgaggatttagtgccatgtggggtgtttatgaagatcgtcactaccgacttccggaaaagcggaccgcattgttctgaaagcatccatcgtagttgggacgctattaatcggctgagcaataccgggtcagggttacagtggctgaccggggccctccacctgtgttctcccctcactagccaggatatacagcatctaaaagattggatctcggagacatgggtaaatctggccatggtggactacccttacgcatcgaatttcctgcagccgcttccggcatggcccatcaaagtggtgtgccagtatctcaaaaatcccaacgtaagtgatagcctcttacttcagaatatctttcaagccctgaacgtgtactacaactacagcggacaggtgaaatgcctgaacatttccgagacagctaccagctcactcgggacactgggatggtcgtatcaggcttgtactgaggtggtgatgcctttctgtacgaatggggtagatgatatgttcgagccccactcttggaacctgaaagagctgtccgatgactgctttcagcaatggggcgttaggccacgaccctcatggattacaacaatgtatggcggaaagaatatttcatctcatactaacatcgtgttttcaaacggcgaactggatccttggagcggcggcggtgtgacaaaggatattacagataccctggtcgcggtgactataagcgagggagcgcaccacttggacttgagaactaaaaacgcactggacccaatgtctgtcctgctggcccggtcactggaggtcaggcatatgaagaactggatcagggatttctacgatagcgccggtaaacagcattag

SEQ ID NO: 130127 - DNA, 1554 bp, synthetic construct
  misc_feature 1..1554: note = Description of Artificial Sequence: Synthetic coding sequence
  source 1..1554: mol_type = other DNA
atgggaaggcgggccctgctgctgttgctgctgtccttcctcgccccatgggccacaatcgccctcagacctgcacttcgcgccttgggatctctccatctccccactaatcccactagcttgcctgcggtggccaaaaactactcagttttgtattttcagcagaaagctctcgccgccggccagttgcacatttgcatcatccagttgaatcattacaagacacctctggtggatcacttcggatttaatacagtgaagacattcaaccagagatatttagtggcggacaagtactggaagaagaatggaggatcaatcctgttttacaccgggaatgaaggtgatatcatttggttttgcaataataccggctttatgtgggatgtggccgaggaactcaaagcgatgctcgtgttcgccgagcaccgctactatggcgagagtctgccctttggggacaatagctttaaggactccaggcatctcaattttctgacgtccgagcaagctcttgctgacttcgcggaactcataaagcatctcaaaaggaccatccccggcgctgaaaaccaacctgtcatcgccatcggtggttcctacggtggcatgttggctgcttggttcagaatgaagtacccccatatggtggttggcgccctggcggcctccgctcctatctggcaatttgaagacctagtgccatgcggcgtgtttatgaagatagtgacgacggactttcgcaaatcagggccacattgttccgagtctattcaccgaagttgggatgcaataaataggctatctaacactggatccggactgcaatggctgacaggcgccctgcatctgtgcagtcctctgacttcacaggacatccagcacctaaaagattggattagcgagacttgggtcaacctcgccatggtagattacccctacgcctctaattttttgcaacctctacctgcttggcccattaaagtggtttgtcaatacctcaagaaccccaatgtgtctgattcactgctgctccaaaatattttccaggctctcaacgtttattacaactattcaggccaggtgaaatgcctcaatatctccgagacagccacctcatccctgggaacccttggatggtcctatcaggcatgcactgaagtggtcatgccgttctgtaccaatggcgtcgatgacatgtttgagccccactcatggaaccttaaggagctcagtgatgactgttttcagcaatggggggttaggccacgcccctcatggatcaccaccatgtacggcggaaagaacatctcatcacatacgaacatcgtgttttcaaatggggagctcgatccctggtctggaggcggggtcaccaaagacatcactgacactctggtggcagtgacaatttctgaaggcgcccaccatttagatctgcgcacaaagaatgccttggatcccatgtctgtcctcctggcacggagcctggaggtgcgccacatgaaaaactggatccgtgatttttatgactcggcaggtaaacagcattag

SEQ ID NO: 130128 - DNA, 1176 bp, synthetic construct
  misc_feature 1..1176: note = Description of Artificial Sequence: Synthetic coding sequence
  source 1..1176: mol_type = other DNA
atgtgggatgtggctgaggagctgaaggcaatgttggtgttcgccgaacataggtactatggcgaaagtctacctttcggggacaactcttttaaagacagccgccatcttaatttcctgaccagcgagcaggcactcgcagattttgcggagttgattaaacatctgaagagaacaattcctggggccgagaaccagccggtcatcgcaatcggcgggtcatacggtgggatgttggcagcctggttccggatgaagtacccccacatggtggtgggcgcactggctgcaagtgcgccgatttggcaatttgaggatttagtgccatgcggtgtgttcatgaagatcgtgactacagatttcaggaaaagtgggccgcattgctcagagagtattcaccggtcctgggacgcaatcaatcgcttgtcaaacaccggcagtgggttacagtggcttactggcgccctgcatctttgttcccccctgacgtcacaagacatccagcacttgaaagactggatctctgaaacatgggtgaacctggctatggtggattatccgtatgcaagcaattttctgcagccactccccgcatggcccatcaaagtggtctgccagtacctaaagaaccccaacgtgagtgattctctgttgcttcaaaatattttccaggctcttaatgtgtattataattatagcggccaggttaaatgcttaaacatctctgagactgcaacctctagcctggggaccctgggttggtcatatcaggcttgtacagaagttgtgatgcccttctgcactaacggggtggacgatatgttcgagcctcatagctggaacctaaaggagctatcagatgactgctttcagcagtggggggtacggccacgaccgtcgtggatcactactatgtatggcgggaaaaacatcagcagccacaccaacatcgtgttctccaatggagaacttgacccctggtcggggggaggggtgacgaaagacatcactgataccttggtcgcagtcacaatttctgagggggcccaccaccttgatctgcgcactaagaacgcccttgaccccatgtctgttttgcttgcgcgttctctggaagtgcgccatatgaagaactggatacgtgacttctacgacagcgcaggaaagcagcactag

SEQ ID NO: 130129 - DNA, 1428 bp, synthetic construct
  misc_feature 1..1428: note = Description of Artificial Sequence: Synthetic coding sequence
  source 1..1428: mol_type = other DNA
atggagggtctcttaacccgttgtcgcgcactccctgctttggcaacctgttcacgccaactctccggatatgtgccctgccgttttcaccactgtgcccccaggcgcggcagacgcttgctcttatctagagtgttccagccacagaaccttcgggaggatcgagtgttatctctgcaggacaaaagcgatgatcttacatgcaagagccaacgcctgatgctgcaggtgggtctcatttacccagcttcccccggctgctaccacctgttgccatacacagtacgtgctatggagaagctcgtccgcgtaatagatcaagaaatgcaggcaatcggcgggcagaaggttaatatgccctcactgtctcccgctgaactgtggcaggctacgaataggtgggatttaatgggaaaggaattacttagactgagagatcggcatggcaaagaatactgcttagggccaacccacgaggaagcaattacagcccttatcgcatcacaaaagaagctcagctacaagcagctgcccttcctgctgtatcaggtgacacgtaaatttagggacgaacctcggcccagattcgggcttctcaggggtcgggagttttacatgaaggatatgtacaccttcgattcgtcccctgaagctgcgcagcaaacctactcactagtttgcgatgcttattgctccctttttaacaaacttggactcccctttgtcaaggtccaagctgatgtgggcactatcgggggaacagtgtcccatgagtttcaactgccagtcgacattggggaggatcgacttgccatttgccctcgctgcagctttagcgcgaacatggagacactcgatttgtcacagatgaactgccctgcctgccaagggccattgaccaagactaagggaatagaggttggacacactttctatttgggcacaaagtacagcagtatatttaatgcccagttcactaatgtttgtgggaagcctaccctggcagaaatgggttgctacgggctgggtgtgacgcgtatccttgccgctgcgatcgaggttctgtccaccgaagattgtgtgcgctggccttcccttttggccccataccaggcatgtctaatacctccaaagaaagggtccaaggagcaagcggcttccgaattaattggtcagctgtatgatcatattacggaagcagtaccgcaattgcacggggaagtgctactggatgaccggacgcatcttacaatcggcaacaggctaaaggacgctaacaaatttgggtacccctttgtgatcatcgccggcaaacgggcgctggaggaccctgctcacttcgaggtgtggtgccagaatactggcgaggtcgcatttctaaccaaggacggcgtgatggacctccttacaccggtgcagacagtttag

SEQ ID NO: 130130 - DNA, 498 bp, synthetic construct
  misc_feature 1..498: note = Description of Artificial Sequence: Synthetic coding sequence
  source 1..498: mol_type = other DNA
atggcgaagatgaatcttagctcctacatcttgatcctgacctttagtctgttctcacaaggaattctcctgtccgcttccaagagcatcaggaacctcgacgatgatatggttttcaacaccttccgtctcgggaaaggcttccagaaggaggatacagcggagaaatcagttattgcacctagcctggaacaatacaaaaatgacgagtcgagcttcatgaacgaggaagaaaacaaggtgtccaaaaataccggctccaagcacaatttcctgaatcatggcctgcccctgaacctggcaattaagccttacctggccttgaagggatcggtagcatttcctgctgagaacggcgtccagaacacagaatccacccaagagaagcgcgaaataggcgatgaagaaaacagcgccaagtttccaatcgggcgcagggattttgacatgttgcggtgtatgctgggacgcgtatacaggccttgctggcaggtgtag

SEQ ID NO: 130131 - DNA, 2598 bp, synthetic construct
  misc_feature 1..2598: note = Description of Artificial Sequence: Synthetic coding sequence
  source 1..2598: mol_type = other DNA
atggccttggtgctgggctctctactgctcttaggattgtgcgggaattccttcagcggagggcaacccagcagtaccgacgcgccaaaagcttggaattatgagctgcctgcaacgaattacgagactcaggattcccataaggcgggaccaatcggaatcttgttcgagctggtgcacatcttcctctatgttgtacagccccgggatttcccggaggatacactccggaagttcttgcagaaggcttacgagagcaagatcgactatgacaagccagagaccgtgattctcgggctgaaaatcgtctattacgaagctgggatcattctctgctgcgtgctaggtctgcttttcataatactcatgcccctcgttggctatttcttctgcatgtgtcgctgctgtaacaagtgtggtggcgagatgcaccagagacagaaggagaacggtccctttttgcgcaagtgctttgcgattagcttactcgtcatttgcattattattagcataggcattttctacggctttgttgctaatcaccaggtaaggacacggatcaaaagaagcagaaagctcgccgattctaactttaaagatctgcgcacacttttgaatgagacgccagagcaaattaagtacatcctggctcagtacaataccacaaaggacaaggcattcactgacctcaactctataaattccgtattgggaggcggcatcctagacaggttgcgccccaacatcatccccgttctggacgaaattaagagcatggctaccgccatcaaggaaaccaaggaggccttggagaatatgaattctaccctaaagtcacttcatcagcagtcgacccagctgtcctcctcgttgacgagcgtcaagactagtttacgttccagccttaacgacccactttgtttggtccaccccagctcagaaacttgcaacagcattcggcttagtctctctcaactgaactcaaaccctgagctccgccagctacctcctgtagacgccgaactggacaatgttaacaatgttcttcggactgatctcgacggcctagtacagcaagggtaccagtcactgaacgatatcccagacagagtgcagaggcagacaacgaccgtggttgccgggattaaaagggtgctcaattctattggctccgatatcgacaatgtaactcagaggctgcctatccaagatattctgtcagccttcagcgtgtatgttaacaatactgagagttacattcaccgcaatttacctactttagaggaatatgactcatattggtggttagggggactggtgatttgctccctactaacactgattgtcatattctactatctggggctgctatgtggcgtgtgcggatatgacagacatgccacacccacaactcggggatgcgtttcaaataccggcggagttttccttatggttggtgtgggcctctcatttctcttctgctggattctgatgattattgttgtactcacctttgtgttcggagccaatgtggagaagcttatctgcgaaccctacacttctaaggaattgttcagggtgttggataccccgtatctgctgaatgaggactgggaatattatttatcaggcaaactgtttaataaatcaaaaatgaaattaacctttgaacaggtctactcagattgcaagaaaaaccgcggtacttacggaaccttacatctgcagaatagcttcaatattagcgagcatctgaacattaacgaacatacaggcagcatcagttctgaattagagtctttgaaggtcaatctcaatatcttcctgctgggggcagcaggtaggaaaaacctacaggatttcgcagcttgcgggatcgaccgcatgaactacgacagctacctggcgcagaccgggaaaagcccagctggtgtgaatctgctgagcttcgcctatgacctggaggccaaagccaatagcctgccccctggcaatctcagaaatagcttaaagagggatgctcagaccatcaagacaatccatcagcagcgtgtcctacctatagaacaatctctgagcactctctatcagagcgtgaaaatcttacagaggaccggcaatggtctcttggaacgcgtcactagaattctggcatccctggacttcgcgcagaatttcatcacaaataatacgtcctccgtgatcattgaagagactaaaaagtacgggaggactatcattggatactttgaacactatctacagtggatcgaattcagtatttccgagaaggtagcctcctgcaaacccgtggcaacagcccttgacactgccgtcgacgtttttttgtgtagctacataatagacccactaaatctgttctggtttggcatcgggaaagccaccgtcttcctgttacctgcactgatcttcgcagtgaaactggcaaagtattaccgaagaatggactcagaggacgtatatgatgatgtggaaacaattccaatgaaaaacatggaaaacggaaacaatggctaccacaaagaccacgtgtacggcatacataatcctgtgatgacttcacctagccaacactag

SEQ ID NO: 130132 - DNA, 2571 bp, synthetic construct
  misc_feature 1..2571: note = Description of Artificial Sequence: Synthetic coding sequence
  source 1..2571: mol_type = other DNA
atggctctggttctgggctctctcctgctgctcggcctctgtgggaattcctttagcgggggacagccttcaagcacagatgccccgaaggcctggaattatgaactcccagcgaccaactacgagactcaagatagccataaggctggccccattgggattttgtttgagctggtccacatttttctgtacgttgtgcagccgcgggacttccccgaagacactcttagaaagttcctgcagaaagcatatgaatcaaaaatcgactatgataagattgtctactacgaagccggaattattctatgctgcgtgttaggcctcctatttatcattcttatgcctctggtgggctattttttctgcatgtgtagatgctgtaacaagtgtggtggcgagatgcatcagcgccagaaagagaatggaccatttctcagaaagtgcttcgccatcagtcttctggtgatttgcattattatctccatcgggattttttacggcttcgtggcaaaccaccaggtccgcactcgaatcaagagatccaggaagcttgccgacagcaatttcaaagacctgaggacccttctcaatgagactccagaacagattaagtatatcctggcacagtataacacaactaaggacaaggcattcaccgacctcaactccatcaatagcgtgctgggcggcgggattctggataggctaaggccaaacataattcccgtccttgacgagattaaaagcatggctacagccatcaaagaaaccaaagaggccttggaaaatatgaactccactctgaaatcgctccaccagcagtctacccaactatcgtcttcattaacatcagtgaaaaccagtcttagatctagcttaaacgatcctctttgtctggttcacccttcttctgaaacatgcaacagcattcgcctcagcctctcccagcttaacagcaatcccgaacttcggcagctgccccccgtcgatgctgagctagacaatgtgaataatgtattgcgcacagatctagacgggcttgttcaacagggatatcagtctttgaatgacatccctgatcgcgtgcaaagacaaaccactactgtggtcgctggcatcaaacgggtgctcaacagtatcggaagcgatatcgacaacgtaactcagcggctcccgatacaggacatcctttcagcttttagtgtgtacgtgaacaacaccgagtcttatatccatcggaacctacccaccttagaagagtacgactcttattggtggcttggcggattggttatttgcagtttacttactttgatcgtcatcttctattatttaggcctgctgtgtggagtatgtggttacgaccgccatgcaactccaaccactcgggggtgtgttagtaacacgggaggagtgtttctgatggtcggtgtgggcctttctttcctgttttgctggattcttatgataatcgtggtcctaacttttgtgtttggtgctaatgtggaaaagctcatttgtgaaccctacacttccaaggaactgtttcgtgtcttggacacaccatatctcttgaacgaggactgggagtactacctgtcagggaaactgtttaataagagtaaaatgaaactcacctttgagcaggtatactccgattgcaaaaagaaccgtggaacctatggaactctgcatctgcagaattccttcaacatctccgagcacttaaacataaatgagcacaccggtagtatctcctccgagctggaatccctgaaggtgaacctgaatatcttcctgttgggcgccgctggacgtaaaaacctgcaagattttgccgcttgcggtatcgacagaatgaattacgatagttacctcgctcagacaggcaagagccctgccggtgtgaatctgctcagttttgcctatgatctggaggccaaggccaattcattaccccctggaaatctgcgcaacagcctaaagagggatgcccagaccatcaagacaattcatcagcaacgggtgttacctattgagcagtcactgagtacactgtatcaatcagtaaagatcctgcagcgtaccgggaacgggctgctggaaagggtgacacggattctagcaagtctcgactttgcgcaaaacttcataacaaataacacttccagcgtaatcattgaggaaactaagaaatacggtcgcaccattattggttattttgaacattatctgcaatggatcgaattctccatcagtgaaaaagtggccagctgtaagcctgttgccacagctctcgataccgcggtcgacgttttcttgtgtagctacatcatcgatcctctgaatcttttctggtttggaatagggaaggccactgtcttcctcttacccgccctaatctttgccgttaaactggccaagtattaccgaaggatggactccgaagatgtctacgacgatgtcgaaaccattcctatgaagaacatggagaacggaaacaacggctatcataaggaccatgtatacggaatccataaccccgtgatgacaagcccatcacaacattag

SEQ ID NO: 130133 - DNA, 2571 bp, synthetic construct
  misc_feature 1..2571: note = Description of Artificial Sequence: Synthetic coding sequence
  source 1..2571: mol_type = other DNA
atggccctggtgttaggaagcctgctcttgctggggctgtgtggaaactctttttctggtgggcagccaagtagcacggacgctccgaaggcctggaattatgaacttcctgccactaattatgagacacaagactcacataaggccgggccaatagggatcctctttgagctggtacatatattcctttacgtggtgcagcctagggatttccctgaagacactctgaggaagtttctacaaaaggcttatgaaagcaagatcgattatgacaagatcgtctattacgaagctggcatcatcctctgttgtgtactcggcctccttttcattatcttgatgcccctggttgggtatttcttttgcatgtgccgttgctgcaataagtgcggcggagagatgcatcagcggcagaaagagaacggcccatttctgcgtaaatgcttcgccatcagcctcctggtgatttgcatcattatttcaatcggcattttctacgggttcgtcgctaaccaccaagttcggacaaggatcaaaagatcccggaagctcgctgatagtaatttcaaggacctgcgcaccctgctgaacgaaactcccgagcagattaagtacatcctcgcgcaatataacactaccaaagataaggctttcactgacctgaactcaattaacagtgttctagggggaggtattttagatcgtttgcgtcccaacatcattccagtcctggacgagattaaaagcatggccacagcgatcaaagagaccaaagaggccctggagaatatgaactccaccctgaagtctctacatcagcagagcacccagttgagtagctctcttacctccgtaaaaacttctctgaggtccagcctcaacgatccactttgcttggttcatcctagcagcgaaacctgtaattctatcaggttgtccctctctcagctcaacagcaaccctgagctgaggcagttgcctcccgtggacgcagagttggataatgtgaataatgtgttacgaaccgacctagatggcctggttcagcagggttatcagtctttgaatgatatcccggaccgcgtgcagagacagacaacaacagtggttgctggaattaagagagtgctgaactcaattggaagcgacattgataatgtcacacagagacttccgatacaggatatactcagtgccttcagtgtgtacgtgaacaacactgagagctacatccaccggaatctccccactctggaggaatacgactcttattggtggttaggcggactggtgatctgtagtctgctgacgctgattgttatcttttactacctgggccttctgtgtggagtttgcggttacgataggcatgcaacccccaccacaagaggctgtgtaagtaacactgggggcgtgttcctgatggtcggcgtgggccttagtttcttgttttgctggatactgatgatcattgtggttctgacctttgtctttggtgccaacgtggaaaagctgatttgtgaaccttataccagtaaggagttgttcagggtcctggataccccttatctgttgaacgaagattgggagtactaccttagcgggaaattgtttaataaaagcaaaatgaaattgaccttcgaacaggtttatagcgattgcaagaagaatcgcgggacttacggtactctgcacctgcagaacagctttaatattagtgagcacctgaacattaacgaacatacaggctccatttcatcggaactggaaagtttaaaagtaaacttgaacatttttcttcttggcgctgccggcaggaagaatcttcaggattttgcggcctgtgggattgaccgtatgaattacgattcatacctggcgcagactggtaagtcccccgcgggggtcaatctgctgtctttcgcctacgacctagaagctaaggcaaattcactcccacccggtaatctgagaaattccttgaagcgagacgctcagacaataaaaaccatccaccagcagcgggttcttcccatcgaacagagtcttagtactctgtatcagtccgtgaaaatcttacaacggactggaaatggattactcgagcgtgtcacgcggattcttgcgagtctcgattttgctcaaaactttataaccaataacacttcatccgtgatcattgaggagaccaaaaaatatggtcggacgatcattgggtatttcgaacattatttgcaatggatcgaattctctatctctgaaaaggttgcttcctgcaaacccgtggctactgctttggatactgctgtggacgttttcctctgctcttacattatcgaccctttaaatcttttctggtttgggattggcaaggcgactgttttccttctgccagctctgatcttcgccgtgaagctggccaagtattaccggcgcatggacagtgaggacgtgtatgacgatgtggaaaccatcccaatgaagaatatggagaatggcaataacggctatcataaagaccacgtgtacggaatccacaaccctgttatgacaagccctagccagcactag

SEQ ID NO: 130134 - DNA, 177 bp, synthetic construct
  misc_feature 1..177: note = Description of Artificial Sequence: Synthetic coding sequence
  source 1..177: mol_type = other DNA
atggccctggtcctgggaagcttgctgttgctgggcctgtgcggcaattccttttccggaggccaacctagttccaccgatgctcctaaagcatggaactacgagctccccgccacaaattacgaaacgcaagacagccacaaagctggccctattgggatcttgttcgagctttag

SEQ ID NO: 130135 - DNA, 123 bp, synthetic construct
  misc_feature 1..123: note = Description of Artificial Sequence: Synthetic coding sequence
  source 1..123: mol_type = other DNA
atggccctcgttctgggcagcctactcctgctgggactgtgcggcaattctttcagcgggggtcagccatcttccacagacgctccaaaagcttggaactatgagctgccagctacgaattag

SEQ ID NO: 130136 - DNA, 2598 bp, synthetic construct
  misc_feature 1..2598: note = Description of Artificial Sequence: Synthetic coding sequence
  source 1..2598: mol_type = other DNA
atggccctcgtcctcgggtccctcctgctgcttgggctgtgtgggaactcattttctggtgggcaacctagttccactgacgcacctaaggcctggaattatgagctgccggccactaactacgagacacaggactcgcataaggccggacccatcggaatcctgttcgaactcgtccacatcttcctatacgttgtgcagccccgagatttccccgaggacactcttcgcaaatttctgcagaaggcttatgagtcaaaaattgactatgataagcccgaaactgtgatcctcggtcttaagatcgtttattacgaagctggaattatactatgttgcgttctgggccttctcttcatcatcctcatgccgctggttggctattttttctgcatgtgtcgctgctgtaataagtgtggcggggaaatgcaccagcggcaaaaggagaatggtcccttccttcgtaagtgctttgccatctccctgcttgtgatctgtattattattagcattggcattttctacggcttcgtagcaaaccatcaggtgcgaacacgaattaaaaggtcacggaaactggcagacagtaatttcaaagatctgagaacactgctcaacgagactcctgagcaaatcaagtacatacttgctcagtacaatactaccaaggacaaagcatttacagacctaaactccattaacagcgttttgggagggggcatcctggatcggttgagacctaatattattccagtgctcgatgagattaaatcaatggctacggctattaaagaaaccaaagaggcacttgagaacatgaattcaacgctgaaatccctgcatcagcaaagcacccagctctcaagttcactgactagcgtcaaaacaagcctgagatcatctcttaacgaccccctctgtttggtgcatccatcttccgaaacctgtaattctatacgcttaagcttatcccagttaaactcgaaccccgaactgcgccagctacccccggtcgacgccgagctggataatgttaacaatgtgttgagaactgaccttgacggactagtgcagcaggggtaccagtctctcaatgatattcccgatcgcgtgcagcgccagactacaactgttgtagccggcatcaagagagtgctcaattccatcggcagcgacatcgacaacgtcacgcagcgtctacccattcaggatatcttaagcgccttttcagtctatgtcaacaacactgaatcctacattcacagaaatttgccgacactcgaggagtacgattcctactggtggctgggtggactggtcatttgctccctgttaaccctaattgtaatcttttactatctaggactgttatgcggcgtatgcgggtatgaccgccacgccacccccaccacccgcgggtgtgtcagcaataccggtggcgtttttctgatggtgggagtgggcttaagcttcctgttttgctggattctgatgattattgtcgttctgacctttgtattcggggcaaatgtggaaaaactgatttgcgagccatatacctcaaaagagctgttccgtgtgctcgataccccctatctcctcaacgaagactgggagtattatttgagtggaaagctattcaacaaatctaaaatgaaactgactttcgaacaggtttactcagactgtaagaaaaacagagggacatatggaaccctccacctgcaaaactccttcaatataagtgagcacttaaacataaatgagcatactggctctatctcttctgagttggagagcttgaaagtaaatctgaatatttttctattgggcgctgccggtcgtaaaaacctccaggatttcgccgcttgcggcatcgacagaatgaactacgatagctatcttgcgcaaacggggaaatctccagccggtgtcaacctgttaagtttcgcctatgacctagaggcaaaggcgaacagtctaccccccggaaatctgagaaattccttgaagagagacgcgcagacgataaagactatccaccagcaacgcgtgttacctattgagcagtcactgtcaaccttataccagtcagtgaagattttgcagcggacggggaatggactcctcgaaagagtcaccagaattctcgctagcctggactttgcccagaactttataacaaacaacacctcatctgtgatcatcgaggaaacaaagaagtatggccggactataatcgggtatttcgagcactacctacagtggatcgaatttagcatcagtgaaaaagtcgcctcatgcaaaccggtcgccacggccctggatacggccgtggatgtctttctgtgttcctacattatagacccactaaacctgttttggttcggcatcggaaaggcgacagtgttcttattacctgcactcatatttgcggtaaaactggcaaagtattatcggaggatggattcagaagatgtgtacgacgacgtcgaaaccataccaatgaaaaatatggaaaatggcaataatggctaccacaaggatcatgtgtatggcatccacaatcccgtcatgacctctcctagccagcattag

SEQ ID NO: 130137 - DNA, 45 bp, synthetic construct
  misc_feature 1..45: note = Description of Artificial Sequence: Synthetic coding sequence
  source 1..45: mol_type = other DNA
atggccttggtattagggagtttgcttttgctgggcctctgctag

SEQ ID NO: 130138 - DNA, 2505 bp, synthetic construct
  misc_feature 1..2505: note = Description of Artificial Sequence: Synthetic coding sequence
  source 1..2505: mol_type = other DNA
atggccttggtcctgggtagcctgttactgctcggtctctgtggtaattcttttagcggagggcagcccagctcaaccgatgccccaaaggcctggaactacgagctccccgccacgaactatgagactcaggactcacataaggcaggcccaatcggaattctgttcgaactggtgcacatcttcctgtacgtcgtgcaaccacgagacttcccagaggatacccttcgcaagttcctgcagaaggcctacgaatccaagattgattacgataaacccgaaaccgtgatcctcggcctgaaaattgtctactatgaagctggaattattctgtgctgcgttctgggtctgctgttcatcattctgatgcctcttgtggggtatttcttttgcatgtgccgatgctgtaataagtgcggcggagagatgcaccagaggcagaaggagaacggcccgttcctgagaaagtgttttgccatatctttgctggtcatttgtattatcatttccatcgggatcttctatggtttcgtggccaaccaccaagtcaggactaggataaaacgctcccggaaactggccgattcaaatttcaaggacctgcggactttattaaatgagacacccgaacagattaagtacatattggcccagtacaacactaccaaagataaggcgtttactgacctaaattcaattaacagcgtgctaggtggagggatcttggaccgtcttaggcccaacattatcccagtgctggacgaaattaagtctatggccacagcaatcaaggagacaaaagaggcccttgagaacatgaacagcacactcaagagcctccaccagcagagtacacaactgtctagtagcctcacttccgtgaaaacaagcctcaggtcttcactgaatgaccccttgtgcctcgtgcatccttcttcggagacttgtaattccatacgcctaagtctatcgcagctgaactctaaccccgaactccggcagttaccccctgtcgacgccgaactagacaatgtcaacaacgtgctgcggacggatcttgatggcttagtgcagcagggctatcaatctttgaacgacatccctgatcgggtgcagagacagacaactacagtcgtggccgggattaaaagagttctgaacagcattggtagtgatattgacaatgtcacccagagactccccattcaggatatcttatcggcgttctccgtgtacgtgaacaatactgaaagttacattcataggaacctgccaacgctggaggagtatgatagctactggtggctaggagggctcgtcatttgcagtcttctaactctgattgtgatcttctactacctaggcctcctgtgcggagtatgcggttacgaccgacatgctacgccaactactagaggctgtgtttctaatacgggtggcgtatttttgatggttggcgtcggtctaagcttcctgttctgctggatccttatgattattgttgtgctgacatttgtgttcggagcaaacgtcgagaaacttatctgcgaaccttatacaagcaaggaacttttccgagtgctagatacaccctatctactaaatgaggactgggaatattacctgagtgggaagctgttcaacaaaagtaaaatgaaactaacctttgagcaggtctatagtgactgcaaaaagaatcggggtacgtacgggaccctgcatttacagaactccttcaacatcagtgagcacctgaatattaatgagcacacgggttcaatttcctccgagctggaatcgcttaaggtgaacctcaacatcttcttactcggtgctgccgggcgcaaaaacctgcaagacttcgcagcctgcggcattgacagaatgaattatgactcttacctagctcagactggaaagtcgcccgccggagtaaacctcctgtccttcgcctatgatttagaggccaaagcgaattctttgccacctggaaatcttcggaacagcttgaaaagggatgcccagaccataaaaacgatccaccagcaacgggtgctcccgatcgagcagagcctgtccacactttaccaatctgtcaagatactacagcggacagggaatggtctgttggagcgagtaacccgcatactagcttcccttgactttgcacagaacttcataacaaacaataccagctctgtaatcattgaggagactaagaaatacgggagaaccattattggatatttcgagcactatctccagtggattgagtttagtatctctgagaaggtggccagttgcaaaccagtcgcaacagcactggacacagcagttgatgtcttcctgtgctcttatatcatcgaccccttgaacctgttctggttcgggatagggaaagcaactgtgttcctcttgccggccctgatcttcgctgtgaagctggcgaaatactatcgacggatggacagtgaggacgtctacgacgatccctcacagcactag

SEQ ID NO: 130139 - DNA, 2529 bp, synthetic construct
  misc_feature 1..2529: note = Description of Artificial Sequence: Synthetic coding sequence
  source 1..2529: mol_type = other DNA
atggcgctagtgctgggcagcctcctgctcttggggctctgcggcaatagtttctcgggaggacagccgagtagtactgatgcaccaaaagcctggaactacgagctcccagcgaccaactacgaaacacaggactcgcataaggcaggtcctatcggaatactcttcgagctggtccacatattcctctatgtggtacagccaagggattttcctgaagacaccctgcggaagttcctacagaaagcatatgagtctaaaatcgattatgataagccagaaacggtgattctcggcctgaagatcgtgtactatgaagcgggaattatcctatgctgcgtgctgggcctcctcttcatcatcttgatgcctcttgtgggatacttcttctgcatgtgtagatgctgcaacaaatgcggcggggaaatgcaccagcggcaaaaggaaaatggaccatttttaagaaagtgttttgctatctccttgttggttatctgcatcataatttcaattggaatcttctatggattcgtggcgaaccaccaggtacgcacccgtataaaaagaagcagaaagctcgcagatagtaacttcaaagacttgcgaactctactcaacgagacacctgagcagatcaaatatattttagcacagtacaacacaacgaaggataaagcctttacagacctgaatagcatcaattcagttctggggggcggtattcttgaccgcctgcggcctaacatcattccagtgctggacgagatcaagtccatggccacagccatcaaagagactaaggaggccctcgagaacatgaacagtactttgaagtccctgcaccagcagagtacccaactctcttcttcactgacatcagtgaaaacttcactaaggtcctcactaaatgatcctttgtgcctcgtccatccttcctctgagacctgtaattctattagactgtctcttagccagctgaattccaaccccgagttacgacaattgccccccgtcgacgccgaactcgataacgtcaataatgtgctgcgcactgaccttgacgggcttgtccaacagggctatcagtccctcaacgacattccggacagggtccagaggcagaccaccactgtcgtggcaggcatcaaaagagtgctcaactctattggttcagacatcgataacgtgacccagagactgccaatacaagacatactaagtgccttctcagtatatgtgaacaacacagaaagctacattcaccggaacctcccaactctggaggagtacgactcctattggtggctgggaggccttgtaatttgtagtttgctgaccttaatagttatcttttattacctcggtctcctttgcggagtatgtggctacgatcgccatgccaccccgacaactcggggatgcgtaagtaacaccggaggggtgttcctgatggtgggagtgggactcagttttttgttctgctggatcttgatgattatcgttgtgttaacctttgtgttcggagccaatgtagaaaagttaatatgtgaaccctacacttccaaagaactgttccgggtcctggataccccatatctgctcaatgaggattgggaatattatctgagcggcaagctattcaacaagtctaagatgaaactaacattcgagcaagtctactccgactgcaagaagaacaggggcacatatggtacactccaccttcagaatagtttcaatatttctgaacatctcaacatcaacgagcacactgggagcatctcctctgagctcgagtccctgaaagtcaacctcaatatcttccttttgggagcagcagggcggaaaaatctgcaagatttcgccgcctgcggtattgaccggatgaactacgactcctatctcgcccagacaggaaagagccctgcaggggttaatctccttagtttcgcttatgacctggaggcgaaggctaatagcctgccgccgggtaacctgcggaattctctaaaaagagatgcgcaaaccataaagaccattcatcagcagagagtgttaccaatcgagcagagcctgtctacgctgtatcagagcgtgaagatcctgcagcgcacaggtaacgggcttttggaacgcgtcacaagaattctggccagcctggattttgcacaaaattttatcacgaacaatacttcctccgtaattattgaagagaccaagaagtatggcagaaccataatagggtattttgagcactacctgcaatggatcgagttcagtatctctgagaaggtcgcctcttgcaaaccagttgctaccgccctggatacggccgttgacgttttcctgtgctcatatattatcgatcctctgaacttgttttggtttggaattggaaaagctaccgtcttccttctgcctgcactcatatttgcggtgaagctagcaaaatattatagacggatggatagtgaagatgtgtatgacgacgtcgagactattcctatgaagaacccatctcagcactag

SEQ ID NO: 130140 - DNA, 2493 bp, synthetic construct
  misc_feature 1..2493: note = Description of Artificial Sequence: Synthetic coding sequence
  source 1..2493: mol_type = other DNA
atggctctcgtcctcggatccctcctgctgttggggctgtgtggtaacagcttcagcggaggtcagccctcctcaactgatgcgcctaaagcatggaattacgaacttccagcaacaaactacgagacccaggactcccataaggccggccccatcggcattctctttgagctcgtccacatctttctgtacgtggtgcagccacgcgattttcctgaagacacactgcgaaagttcttgcagaaagcatatgagtccaagatagactatgacaagatcgtttattacgaggccggtatcatactgtgttgtgtcctcgggctgttattcattatcctgatgcccctggttgggtacttcttttgcatgtgccgttgttgcaataaatgcggtggtgaaatgcaccagcgtcagaaggagaatggcccctttctgcgaaaatgctttgctatatcccttctggtgatttgcatcatcatttcaattgggatcttttacgggttcgtcgctaatcatcaagtccggacacgcatcaaacgcagcagaaagttggctgactctaactttaaagatcttcgtacccttctgaatgagacccccgagcagatcaagtacattctggcccagtataacacaactaaagacaaagctttcaccgacttgaactccattaattctgtgcttgggggcggcatactggaccggctccgccccaatatcatccccgtgcttgatgaaatcaagagtatggctacagccatcaaggagactaaggaggcactggaaaatatgaacagcacactcaaaagcttacaccagcagagcacccagcttagtagttctctgacgtccgtgaagacatctctgagatcaagcctgaatgaccccttgtgccttgtgcatcccagctcagagacttgtaactctatccgactgagcttgtctcagctgaacagtaatccagaactgcggcagctgccgccagtagacgctgaactggataacgtaaataatgtcttgcgtaccgatctagacgggctcgttcagcagggataccagtccctaaacgacattcccgaccgggtgcagcggcagactacgactgttgtggctggaattaagagggtgctaaacagcatcggcagcgacatcgataatgttacccagaggttgccgatccaggatattttatctgctttctctgtgtatgtcaacaataccgagagttacatccacagaaatctccctacattggaggaatatgactcctactggtggctgggaggccttgtaatttgtagtttgctgaccctgattgtgattttttactatttgggattgctctgcggggtctgtggctacgatcgccacgccacgcccacgaccaggggctgcgtctctaatacaggcggagtgtttctcatggttggggtgggcttatcatttctgttttgttggatactcatgatcatcgttgttttgacttttgtgttcggtgccaatgtagagaagcttatatgtgagccatacacaagcaaagagttatttcgggtactggacacaccctatttactaaatgaggattgggagtattatctgtccggcaaactgtttaataaaagcaagatgaagctcacgttcgagcaggtgtattccgattgtaaaaagaaccgtggtacatacggtaccttacacctgcaaaacagttttaacatctcggagcacttgaatatcaatgagcataccggtagtattagctctgagctggaatcactgaaggttaatctgaacatcttcctgctcggggcggcagggaggaaaaacctgcaggattttgcagcttgcggtatcgatcgcatgaactacgattcttatctggcccagaccggtaagtccccagcaggagtgaacctgttatcgttcgcctacgatctcgaggccaaggccaattcactgcctcctggcaaccttagaaacagtctgaagcgcgatgcacagactattaagacaatccatcagcaacgtgtgctgcctatcgagcagtccttgtctactctctatcaatctgtgaagattcttcagcgcacaggcaatggtctcctggaacgggttacgaggattcttgcatcactggacttcgcacaaaacttcattaccaataacacttctagtgtgataattgaggaaacgaagaagtacggccggacaatcatcggatatttcgagcactatttgcagtggatcgagttcagcataagcgagaaggtcgcttcttgcaagcccgtagcaacagcactcgatacagcggtagatgttttcctgtgtagctacattatcgatccgctaaatctgttctggttcggcatcggtaaggcaaccgtgttcctgctgcccgcactgatctttgctgtgaaactggcaaaatactaccgtagaatggacagcgaggacgtgtacgatgatagttcctgggtaacatccgtacagtgctag

SEQ ID NO: 130141 - DNA, 681 bp, synthetic construct
  misc_feature 1..681: note = Description of Artificial Sequence: Synthetic coding sequence
  source 1..681: mol_type = other DNA
atggaggctgaacgcagaaggcaggctgagaagcccaagaagggtagggtgggcagcaacctccttccggaacgccatcctgctaccgggactcctactactacagttgactcctcagcgccaccttgccgtaggctgcctggagctggaggcgggcgaagccgtttctccccccagggcgggcagagagggagaccccactcccggaggagacatagaactacgttttctcccgtccagctggaacaactcgaaagcgccttcggcagaaatcagtatccggatatttgggcccgagagagcctggcccgggacactggcctctctgaggcccgtatccaggtgtggttccagaacaggcgagctaagcaacgaaaacaggaaagatctttgttacagcctctagcccacctctcacccgccgccttttctagctttctgccagagagcaccgcctgtccttactcctacgccgccccccctccccccgtcacctgctttccacatccctactcacatgcactgcccagccagccctcaactggcggcgcgttcgccctatctcaccagtctgaggactggtaccccacattacacccggccccggccgggcacctcccatgcccaccccccccccctatgctgccactcagtctcgagcccagcaagagctggaactag

SEQ ID NO: 130142 - DNA, 417 bp, synthetic construct
  misc_feature 1..417: note = Description of Artificial Sequence: Synthetic coding sequence
  source 1..417: mol_type = other DNA
aatatctcactgtgcccagaaatctgctttcagaagattgaatctcaggtgtactttgtccgggtcgattccggaatccagccaggatcagatatcagtatctattacgatcctatgatttcgaaactcatcacatacggatcagaccgcactgaagctctcaaacggatggccgacgcactcgataattacgtaattcggggggtgactcacaacattgccctgttgagagaggttatcattaattccaggttcgtcaaaggcgatatttctaccaagttcttgagtgatgtttacccggacggttttaaaggccacatgctcacgaaatctgaaaagaaccagctgctcgcgattgcctcctcactgttcgtcgcattccaattgcgcgcgcagcattttcaggagaatagttag

SEQ ID NO: 130143 - DNA, 363 bp, synthetic construct
  misc_feature 1..363: note = Description of Artificial Sequence: Synthetic coding sequence
  source 1..363: mol_type = other DNA
atgagcatccagtttctcggaactgtgtacaaagtgaacattctgacaagactcgcagcagaactgaataagtttatgcttgagaaggtaactgaagataccagttccgtgctgcggtcccctatgcctggggttgtagtcgccgtttccgtgaaaccaggcgacgccgcgacgtctagtctgtccgttgagatttgtctgttctggacgtttcaagtcgcagagggacaggagatatgcgtcatcgaggcgatgaagatgcaaaactcaatgactgccggcaagaccgggactgtaaaaagtgtgcactgtcaggcaggcgataccgtaggcgaaggcgatctgctcgtcgaactggagtag

SEQ ID NO: 130144 - DNA, 2046 bp, synthetic construct
  misc_feature 1..2046: note = Description of Artificial Sequence: Synthetic coding sequence
  source 1..2046: mol_type = other DNA
atggccgggttctgggttgggacagcgcctctggtagcagccggtagacgaggtagatggccgcctcaacaattaatgctgtccgctgccttacgaacgcttaaacacgtcctgtactatagcagacagtgtctgatggtgtcccggaacctcggttctgtgggttatgacccgaatgagaaaactttcgacaagattctggtagctaatcgcggcgaaatcgcatgcagagttatccggacctgtaagaaaatgggcattaagacggttgcaatccactccgacgtggatgcaagtagcgtgcacgtgaagatggccgacgaggccgtttgtgtgggccccgcgcctacgtctaagtcatacctgaatatggacgcgatcatggaggccataaagaaaaccagagcacaggccgtgcatcctggctatggctttctgtctgaaaataaggagtttgccaggtgccttgccgccgaagacgtcgtgttcatagggcctgacacacatgctatccaggccatgggcgacaaaatcgaaagcaaattgctcgccaagaaggcggaagtgaatactatcccaggcttcgatggcgttgtgaaggacgcagaggaagctgttcgcattgcgagagagatcggatatcccgtcatgatcaaggcaagtgctggcggcggggggaaaggtatgcgtatagcctgggatgatgaagaaacccgggatggtttccgactttcctcacaggaggctgcttcgagctttggagatgaccgccttttgatcgaaaagttcatcgacaaccccagacacatcgaaatccaggtacttggagacaaacatggtaacgcgttgtggcttaacgaacgggagtgttcgattcagcggagaaatcagaaggtggtggaagaagctccttccatattcctcgacgccgagacccgtagagccatgggcgaacaagcagtcgcactggcgagagcggtcaaatatagttcagctgggaccgttgagttcctggtggatagtaagaagaacttctacttcctcgagatgaatactcggcttcaggtcgagcatcccgtgaccgagtgcatcaccggactggatctcgtccaagaaatgatccgtgttgccaagggctatccactgcgccacaaacaagcagatatccgcatcaatgggtgggccgtagagtgtcgagtctacgccgaggatccctataagtccttcgggctgccaagtatcggacgcctgagccagtaccaggagcccctgcacctccctggcgtgcgcgttgactctgggatccagcccggatcggacatctccatctactatgaccccatgatttcgaagctcatcacatacggctcagatcggaccgaagcgctcaaaagaatggccgacgcactggacaactacgtgattcgcggcgtgacccacaacattgcactactccgagaggtgataattaactcccgctttgtgaagggtgacattagtacgaaattcttgagtgacgtttacccggatggattcaaggggcatatgctgacaaaatcagagaaaaaccagttgcttgccattgcctcttccttattcgtcgcttttcagctgagggctcagcattttcaggagaactccaggatgccagtgataaagcccgacattgccaactgggagctgtcagtcaagctccacgacaaggtccatacagtggtcgcaagcaacaatggcagtgtattctcagtagaggtggatgggtcgaagctcaatgtgacgtcaacctggaacctggccagcccgcttctgagcgtctcggttgacggtacccagcgaactgttcagtgtttgagccgtgaggctggcggtaatatgtccatccaatttcttggaactgtggttgctgaaggacaggagatctgcgtaatcgaggcaatgaagatgcagaatagcatgactgcggggaaaaccggcaccgttaaaagcgtacactgccaggcaggggatactgtaggcgagggtgacctgcttgtcgagttagaatag

SEQ ID NO: 130145 - DNA, 2187 bp, synthetic construct
  misc_feature 1..2187: note = Description of Artificial Sequence: Synthetic coding sequence
  source 1..2187: mol_type = other DNA
atggccggtttttgggtgggaacagctcctcttgtggccgccggtaggcgaggccgttggccaccccagcagctcatgttatctgctgccctcagaactcttaagcacgtcctctattatagcaggcaatgcctgatggtgtccaggaacttggggtctgtgggctacgaccctaatgaaaagactttcgataagattctggtggcaaacaggggcgaaatcgcctgtcgggtcatcagaacctgcaagaagatggggatcaaaaccgtagccattcactctgacgtggacgcatcctcggtacacgttaagatggccgacgaggctgtctgcgtgggcccagcaccaacctctaaaagctacctgaacatggatgccatcatggaggccatcaaaaagacccgcgcacaggccgttcatccagggtatggttttctctccgagaataaggaatttgccaggtgtttagctgcagaagacgtcgtatttatcgggccagacactcacgctattcaagccatgggagataagatcgagtccaaactgctggcaaagaaggctgaagtgaacacaattccggggttcgacggagtggtaaaggacgcagaggaggcggttcgcatagctagggagatcgggtatcccgtgatgattaaggcctcagcaggaggaggaggcaaaggaatgcggattgcctgggacgatgaggaaactcgggatggattccggttgtcctcacaggaggccgctagtagtttcggtgatgaccgtctgctgatcgagaaattcattgataatccacgccatattgagatccaagttcttggtgacaagcacggaaacgcactgtggctcaacgagagagagtgctccatccagcgaaggaaccaaaaggtcgtggaagaggctcctagtatattcctagatgccgaaacacgtcgggcaatgggtgagcaggctgtcgctttagcccgagctgttaagtactccagcgcagggacggtggaattcctggtagactcgaaaaagaatttttactttttggagatgaacacacgcttgcaggttgagcaccccgtgaccgaatgcataaccggcttggatctggtgcaggaaatgataagggtagccaagggctatcctctgcgacacaaacaggctgacatcaggattaacggttgggccgtagagtgtcgtgtctacgccgaagatccatataagagctttgggttgccatctattggacgcctatcccagtatcaggagccccttcacctaccaggggttcgcgtcgactccggaatacagcccgggagtgatatatcaatttattacgaccctatgatctcaaagcttatcacgtacggctccgatcgcacagaagctctcaagcgaatggcagacgccctggacaactatgtgatcagaggagtcacacataatatcgcactacttagggaggtgatcataaatagtagattcgtgaaaggtgacattagcaccaaattcctcagcgatgtctaccctgatggatttaagggccacatgttgaccaagtctgagaaaaatcagctgctcgcaatagcaagctctctctttgtcgcattccagctgagagcacagcactttcaggagaattcacgcatgcctgttatcaagcccgatattgccaactgggaattgagcgtcaaacttcatgataaggttcataccgtcgtggccagcaataatggctccgtgttctctgtggaagtggatggatctaaactcaatgtcaccagtacatggaacctcgccagccccctcctctcagtgtccgtggatgggacgcagaggaccgttcagtgcctgtcacgggaggccggaggtaatatgtctatccaatttttaggtaccgtttataaagtgaatatcctcacccgcctggcagcggagctgaataagttcatgcttgagaaggtcactgaggatactagttccgttttgaggtcccccatgccgggggtggttgtggccgtctctgtgaaaccgggggatgctgtcgcagagggccaagagatctgtgttatcgaggccatgaagatgcaaaattcaatgacagccgggaaaaccgggacagtgaagagtgtgcactgccaggcaggcgacacagtcggcgagggagacttactggtggagctggagtag

SEQ ID NO: 130146 - DNA, 2109 bp, synthetic construct
  misc_feature 1..2109: note = Description of Artificial Sequence: Synthetic coding sequence
  source 1..2109: mol_type = other DNA
atggcgggtttttgggtaggcaccgccccattggtggcagcaggccgtcgggggcggtggccgccccagcagttaatgctgagtgcggctctcaggactctcaagaccttcgataagatcctggtcgccaataggggagagatagcgtgcagggtgattaggacatgcaagaagatgggcattaagactgtggccatccactccgatgtcgatgctagctccgtgcacgtcaagatggcagatgaggctgtttgcgttggtcccgcccctacttccaaatcctatctcaatatggacgctattatggaagctatcaagaaaacccgcgctcaagccgtgcatccagggtatggtttcctttccgaaaacaaagagttcgctcgctgcctggccgcagaggacgttgtgttcattggtccagacacccacgctatacaggctatgggcgacaagatcgaatccaagctcctggccaagaaggccgaggttaataccatcccaggctttgacggggtggttaaagatgcggaagaggccgtacggattgcacgcgaaatcggatatcctgtcatgatcaaagctagcgccggaggaggagggaagggcatgcgtatcgcctgggacgacgaggagacaagagacgggtttaggcttagtagccaagaggccgcctcctcctttggggatgacaggctgctcatcgaaaagttcattgacaaccctcgccacatcgagatacaagtgctgggtgacaagcacggcaacgccctgtggctgaatgagagagagtgttccatacaaagaagaaaccagaaggtggttgaggaggcgcccagcattttccttgacgccgagactaggcgcgcaatgggtgagcaagccgtagctttagctagagctgtgaaatactcatccgctgggaccgtggagtttctcgtggattcgaaaaaaaacttttactttctcgaaatgaataccagactgcaagtcgaacacccggtgacagagtgcatcaccggcctggatctggtgcaggagatgattagagtggcaaaaggataccccctgaggcacaagcaggcagatatccgaatcaacggatgggcggttgagtgtcgggtgtacgccgaggacccatataagtctttcgggcttccctccatcggaaggctgagccagtaccaagaacctctgcatctccctggcgtgcgcgtggactcgggaatacaacctggttcggatatctctatttactacgatcctatgatcagcaagctgatcacatacgggagtgaccgtacagaagccctaaagagaatggccgatgcgctggacaattacgtgattagaggcgtgacccataacattgcccttcttagggaggtaatcattaacagcaggttcgtgaaaggggacatctcaaccaaatttctcagcgacgtgtatcctgacggtttcaaaggccacatgttgactaagagcgagaagaatcaattactggccatcgctagctctcttttcgtcgcatttcagttgcgtgcccagcacttccaggagaactcacggatgcccgtaattaaaccagatattgccaactgggagttgagcgtgaagctccacgacaaggtccacaccgtggtggcttctaacaacgggagtgtgttttccgtggaggtcgatggctcaaagctgaacgtgactagcacgtggaatttggcctctccattgctgtccgtgtcagttgatggcacacaaaggacggttcagtgcctctccagagaagctggggggaatatgtccattcagtttctcggcacagtttacaaagtgaatatcctgacccgcttggccgccgagctgaacaagtttatgctggagaaagtaacggaagatacttcctccgtgctacgtagtcccatgcccggggtggtggttgctgtctctgtgaagcctggagacgcagtggctgagggacaggagatctgcgtcatcgaagccatgaaaatgcagaactctatgacagctggaaaaacgggaactgtaaaaagcgtccactgtcaggccggagacacagtgggcgagggagatctgctggtcgagctggagtag

SEQ ID NO: 130147 - DNA, 255 bp, synthetic construct
  misc_feature 1..255: note = Description of Artificial Sequence: Synthetic coding sequence
  source 1..255: mol_type = other DNA
taaaactgggagctgagcgtgaagcttcatgacaaggtgcatacggtggttgccagtaacaatgggagcgtgttctcagttgaggtggatgggtctaaactaaacgtaacctcaacgtggaacttagcatctcctcttctgtctgtcagtgtggacgggacacagagaactgtgcagtgtctatctagagaagcggggggcaacatgagtatccaattcttagggacagtcccatggagaaagctgctcgactag

SEQ ID NO: 130148 - DNA, 336 bp, synthetic construct
  misc_feature 1..336: note = Description of Artificial Sequence: Synthetic coding sequence
  source 1..336: mol_type = other DNA
tataaagtaaatattctgacgagactcgccgccgaactaaacaaatttatgctagagaaagtgactgaagatacatcttccgtgttacgtagtccgatgcctggtgtcgtagtggcagtgtccgttaagcctggggacgctgccacttcctctctctcagttgaaatctgtctgttctggacattccaggttgctgagggccaggaaatttgcgtgattgaggccatgaagatgcaaaattcgatgacagcaggtaagaccggcactgtaaaaagtgttcactgccaggccggcgacaccgtcggggaaggggatttgctggtggaattggagtag

SEQ ID NO: 130149 - DNA, 405 bp, synthetic construct
  misc_feature 1..405: note = Description of Artificial Sequence: Synthetic coding sequence
  source 1..405: mol_type = other DNA
tagatgcctgtaatcaaaccggacatagcgaactgggagctctccgtgaaattgcacgataaagttcacaccgtggtcgcttccaacaacggcagtgtcttctcggttgaggtggacggatctaagctgaatgtgacctctacgtggaacctagcgagccctctactctctgtgtctgtagacggcacccagcgcactgtgcagtgcctgagtcgcgaagctggcggtaatatgtccatccaattcttggggaccgtcgtggcggaaggtcaggaaatctgtgtcatcgaggccatgaagatgcagaactcgatgactgccggaaaaacgggaacggtaaaatcagtccattgtcaggcaggggataccgtcggcgaaggagatttgctggttgaactggagtag

SEQ ID NO: 130150 - DNA, 309 bp, synthetic construct
  misc_feature 1..309: note = Description of Artificial Sequence: Synthetic coding sequence
  source 1..309: mol_type = other DNA
agcgatgtataccctgacgggttcaaagggcacatgctcaccaaatcagaaaaaaatcagttgttggctatcgctagttccctgtttgtcgctttccagctccgagcgcaacactttcaagaaaacagccgaatgcccgttatcaaaccagatattgcaaactgggaactctcggtcaagctgcacgacaaagtgcatacagttgtggcatcaaacaacgggagcgtttttagcgtggaggtggatggatcaaagttgaatgtcacctccacctggaatttgttcgccctgattgtctgtcagaggtag

SEQ ID NO: 130151 - DNA, 1620 bp, synthetic construct
  misc_feature 1..1620: note = Description of Artificial Sequence: Synthetic coding sequence
  source 1..1620: mol_type = other DNA
atggctgccgccctccgagtcgccgccgttggagcaagactcagcgtcctcgccagcggcctccgcgcggctgtgcgaagtctgtgtagccaagcgacttccgtgaatgaacggattgagaacaagaggaggacggccttgttggggggcggacagcggagaattgatgcacagcacaaaaggggaaagctgacagctcgggagcgcattagtctattgttagaccctggaagtttcgtggaatctgacatgttcgtagagcaccgctgcgctgatttcggaatggctgctgacaagaataagtttccgggcgatagtgtcgtgaccggaaggggaagaataaatggaaggttggtttacgttttctctcaggactttaccgtgttcgggggatcgctatccggcgcccatgctcagaagatctgcaagataatggatcaagctatcactgtgggagctcccgttattggcctgaatgacagtggaggggctcgaatacaggaaggggttgaatctctcgcaggatatgccgatattttcctgaggaacgtcaccgctagcggggtgataccccagatctccctcatcatgggaccttgtgctgggggggctgtgtatagcccggcactgaccgattttactttcatggtgaaagatacttcatacctttttatcaccggaccagacgtcgtgaagtcagtgacaaacgaggacgtgacacaggaggagctgggaggcgctaagacccacaccacaatgagtggggttgctcatcgggctttcgagaatgatgtggacgctctctgtaatctccgtgattttttcaattacctcccgttaagtagccaggaccctgcccccgtccgagaatgtcacgaccccagcgaccggttggttccagagctcgacacaattgtgccgctggagtccactaaggcatataacatggtcgatatcattcattcggtcgtcgatgaaagagagttcttcgaaattatgccaaactacgctaaaaatattatcgtcggattcgctcggatgaacggcaggactgtgggtattgttggaaaccagcctaaagtggctagcggctgccttgatatcaacagcagtgttaagggagcacgtttcgtccgcttttgtgacgcctttaatattcccctgatcacctttgtggatgtgcctggcttcctgcccggaacagcccaagaatatggcggcattatccgccacggcgccaaattgctttatgcgttcgctgaagccaccgtcccaaaggtgaccgtgataacacgaaaggcatacggcggcgcttacgatgtgatgtcctccaaacacctgtgcggggacacgaactacgcttggcctaccgccgagattgccgtcatgggggccaaaggcgctgtagagatcatcttcaagggccacgagaatgtggaggccgctcaggctgagtatattgaaaaattcgccaatccctttcctgctgctgttagaggattcgtcgacgatatcatccagccgagttccacacgcgcaagaatttgctgcgacctggatgttctcgcctccaagaaagtccagcgtccctggaggaagcatgccaacatcccattatag

SEQ ID NO: 130152 - DNA, 1680 bp, synthetic construct
  misc_feature 1..1680: note = Description of Artificial Sequence: Synthetic coding sequence
  source 1..1680: mol_type = other DNA
atggcagccgccttaagagtcgcagccgttggagccaggctgagtgtgctcgctagtgggcttagggcggcggttaggtccctgtgttcccaagctacatccgttaatgagcgcatagagaataagagaaggactgccttgttgggtggaggtcaacgcagaatcgacgcacaacataagagaggtaagctcacggcgagagaaaggatctctctgctgcttgatcctggatcttttgttgaaagcgacatgttcgtcgaacatagatgcgcggatttcggcatggcagctgataagaacaaattccccggcgattctgtggttaccggccggggacgtatcaatggcagactggtctacgtgttcagccagcagatcattggatgggcacaatggctgcctctggtcatctcagccttatgggaagctgaagactttacggtattcgggggcagtctctctggcgcccacgcccagaagatatgtaagatcatggaccaggcgatcacggtgggcgcccccgtgataggtctcaatgactctggaggagccagaattcaggagggcgtggagagcctcgctggctacgctgatatcttcctccgaaatgtgacagccagcggggtgatcccacagatttcactgatcatgggcccctgcgctggcggtgcagtctactcaccagctctgaccgatttcacattcatggtgaaggacactagttacctgtttataaccggccctgacgtggtgaagtcggtcaccaacgaagatgtgacgcaagaagaactcggcggggccaaaacccacacaaccatgtctggcgtggcgcaccgggctttcgaaaatgacgttgacgccctgtgtaatctgcgcgacttttttaattacctgccactatccagccaagacccggcgcccgtgagagagtgccatgatccatccgaccgactggtgccagaacttgataccatcgtccccttggagtccacaaaagcctataatatggtcgacatcatccactcggttgtcgatgagagggaattttttgaaatcatgccaaactacgccaaaaatattatcgtggggtttgctcggatgaacggccgcacagtcggcattgttgggaatcagcccaaagtggcgagcggatgcctggatattaatagtagtgtgaaaggcgcccgctttgttagattctgcgacgcctttaacattcctttgatcaccttcgtggatgtccctggatttttgcccggaacagcccaggagtacggcggaattatccggcacggtgcaaagctcttatatgcctttgcagaagccacagtgccaaaagtgaccgtgataactcgtaaagcttacggcggcgcttacgacgtgatgagttccaaacacctgtgtggagacacaaattacgcttggccaacggcagaaatcgccgttatgggcgccaagggagccgtggagataatctttaagggacatgagaatgttgaggccgctcaggccgaatacattgaaaagttcgctaacccatttcctgctgccgtgagaggattcgtggacgatataatccagcctagctcaacaagagcacgcatctgttgcgacctggacgttctcgcttccaagaaggttcaacggccctggcggaagcacgcgaatattcctctgtag

SEQ ID NO: 130153 - DNA, 1653 bp, synthetic construct
  misc_feature 1..1653: note = Description of Artificial Sequence: Synthetic coding sequence
  source 1..1653: mol_type = other DNA
atggccgctgccctgcgcgtggcagcggttggcgcacggctgtcagttctggcgtctggcctgagggctgccgttcggagcctgtgttctcaggcaacatccgtgaacgaacgcatagagaacaaacgtagaaccgccctattaggtggcggccaacgccgcatcgacgcgcagcataagaggggcaagctgacggcgcgagagaggatttccctcctgctcgatcccggatctttcgtggaaagcgacatgttcgtggagcacaggtgcgctgactttggtatggccgcagacaaaaataagttcccaggcgactctgttgtgaccgggcgcggccgaatcaacggtcgcctagtttatgtatttagccaggacttcaccgtgtttggcggaagtctgagtggagcacacgcccagaaaatctgcaaaattatggaccaagccatcactgtcggagcaccggtgatagggctgaatgatagcggcggagcgaggatccaggaaggggtggagtctctggcaggctacgctgacattttccttcgcaatgttactgcatcaggagtcatccctcagataagccttattatgggtccatgcgcagggggggccgtgtactcgcctgccttgaccgattttacctttatggtgaaagatacaagctacctgttcataaccggacccgacgtcgtcaaaagcgtgaccaacgaggacgttacccaggaagaattgggcggggccaaaacacataccacaatgagcggtgtggcccacagggcattcgagaacgatgtggatgccctgtgcaacctgcgtgacttttttaattatctccccctgtcctcgcaggatcctgcccccgtgagagaatgtcatgatccctccgaccgtctggttccagaactggatactatcgtgcccctcgaaagtaccaaagcctataacatggtggatatcattcactccgttgtagacgagcgcgaattttttgagatcatgcctaactatgccaagaatatcattgtcggctttgccagaatgaatggcaggaccgtcggaatcgtgggaaaccagcccaaggtagcttcagggtgcctggacattaacagctctgttaaaggtgcccggttcgtgcgattttgcgacgctttcaatatacccctcatcaccttcgtggacgtgcctgggttcctgcccggcactgcgcaggagtatggtggcattattaggcatggcgccaaactcttgtacgccttcgccgaagccaccgttcccaaagtgactgttatcacaagaaaagcatatggcggcgcgtatgatgtgatgtcctcaaaacatctgtgcggcgatactaattatgcgtggcccacagctgagatcgcagtcatgggtgccaagggcgccgtcgagattattttcaaaggccatgagaacgtagaggccgcccaggccgaatacattgaaaagttcgcgaatccctttccggcagcagttaggggcttcgtggacgacattatacagccctcatccacaagggctcggatctgctgtgacttggacgtgctggctagcaagaaggtaagggtgcaggaggtgtttcaccaagtggtgcagtccgggcatagagatggaagaggtgcagtcaggtggtag

SEQ ID NO: 130154 - DNA, 387 bp, synthetic construct
  misc_feature 1..387: note = Description of Artificial Sequence: Synthetic coding sequence
  source 1..387: mol_type = other DNA
atgagtctccgattggacactaccccttcttgtaactccgcacgaccgctgcacgcccttcaggtcctcctcctgctatctcttctgctcaccgcactagccagcagcacaaaaggccagaccaagaggaatttggccaaaggaaaggaggagtcactcgattccgacctgtacgcagaacttcgctgtatgtgtatcaagaccacaagcggaattcacccaaagaatatacagagcctggaagtgatcggcaagggaacccactgtaaccaggtggaagtcatcgctactcttaaggacgggagaaaaatttgcctggatcctgacgcccctcggattaaaaagatcgtgcagaagaagctggccggagatgaatcagccgactag

SEQ ID NO: 130155 - DNA, 2262 bp, synthetic construct
  misc_feature 1..2262: note = Description of Artificial Sequence: Synthetic coding sequence
  source 1..2262: mol_type = other DNA
atggagcgcagagcgtggtccttgcagtgtacggcattcgtactcttctgtgcttggtgtgccctgaactccgccaaggcaaaacgccaatttgtgaacgagtgggctgcagagatccccggaggtcctgaggccgccagcgctatcgccgaggagctcggctacgacttgctagggcaaatcggttcactggaaaatcactacctgttcaagcacaagaatcaccctcggaggtcacgtcgtagcgccttccacataactaagcgcctgtcagacgatgacagagtaatttgggcagagcagcagtatgaaaaggagaggtcaaagcgatctgccctgagagactccgccctgaatttgtttaacgaccctatgtggaaccaacagtggtacctgcaggatacccgtatgaccgcggcgcttccaaaactggatctccacgttatacccgtgtggcagaaaggaattacaggcaaaggagtggtgatcaccgtgctggacgacgggcttgagtggaaccatacggacatctacgcaaattacgacccagaggcatcttatgactttaatgataacgaccatgatccgttcccacggtatgacccaaccaacgaaaataaacatgggacccgttgcgccggtgagatcgcgatgcaggccaacaaccacaaatgtggggtgggtgtcgcctataattctaaggtgggcggaatccgcatgctcgatgggattgtgactgatgccatcgaggcttcaagtattggattcaaccctgggcacgtggatatctacagcgccagctggggaccaaatgacgacggtaagacagtggaggggcccgggcgactggctcagaaggcctttgagtacggggtgaagcagggaaggcagggcaaaggatccatcttcgtttgggccagtgggaacggagggcggcagggagataattgtgactgcgatgggtacacagactccatctacaccatttcaatctcatccgcatcccagcaggggctctccccctggtatgccgagaagtgctcttcaacgttggccactagttattcttctggggattatacagatcagagaatcacttcggctgacctgcacaatgactgcaccgagacacacaccgggacctccgctagcgccccgctagccgcagggatttttgcgctggctctggaagccaatccgaatctgacctggcgggatatgcaacatctggttgtctggactagcgaatacgaccccctggctaacaaccccggttggaagaagaatggggccggtctgatggtgaattcccgattcggattcggtctactgaatgctaaagcattagtcgacctggccgatcctcgcacgtggcgcagcgtcccagagaaaaaagaatgtgtcgtgaaggacaacgacttcgaaccgagagccctgaaagccaacggtgaggtgataattgaaatacccacacgcgcctgtgagggtcaggagaatgcgattaagtctctggagcatgtccagttcgaagcaacaatcgagtactcaagaagaggagatttgcacgtaacccttacctcggcagccggaacttctaccgtgctgcttgctgagagagagagggacacttctccaaacggtttcaagaactgggattttatgagtgtgcacacatggggagagaatccgattggtacgtggactttgagaattacagacatgagcggtaggattcagaacgaaggaaggattgtcaactggaagttaattcttcacggcacctcctcccaacctgagcacatgaaacagcccagggtctatacctcatacaacacagtgcaaaacgatcggcggggcgtggagaaaatggtcgaccctggagaggaacaacccacgcaggaaaatccaaaagagaacaccctggtaagcaagagcccaagtagcagtagtgtgggcggacgccgggatgagctcgaggagggcgctccatcacaggctatgctgagactcctgcagtctgctttttccaaaaacagtccacccaagcagtcacccaaaaagtcaccaagcgctaaactgaatattccatacgagaacttttatgaagcgctcgagaagctgaacaaaccctcacagctgaaggactccgaagacagtctttacaatgattatgtcgatgtgttctataacacaaagccttataaacaccgcgatgacaggctgttgcaggcgctggtagacatcctcaatgaggagaattag

SEQ ID NO: 130156 - DNA, 477 bp, synthetic construct
  misc_feature 1..477: note = Description of Artificial Sequence: Synthetic coding sequence
  source 1..477: mol_type = other DNA
atggagaggagagcatggagtctgcagtgtaccgcatttgtgttgttttgcgcttggtgcgccctgaactccgcgaaggcaaagaggcagttcgtgaacgagtgggccgcagagatacccgggggtcctgaggccgcaagcgcgatcgccgaggaactgggatacgacctccttggtcaaatcggctcactggagaaccactatctgttcaaacataagaaccatcctagaaggagcagaagatccgcttttcatattacgaaacggttgtctgatgacgaccgggtgatctgggccgagcagcaatacgaaaaggaaaggagcaagcgcagtgcactgcgagacagcgccctgaacctgttcaatgaccccatgtggaatcagcagtggtatcttcaggatacccggatgaccgctgcacttccaaagctggatttgcatgtgattcctgtctggcaaaaggggatcacaggatag

SEQ ID NO: 130157 - DNA, 2121 bp, synthetic construct
  misc_feature 1..2121: note = Description of Artificial Sequence: Synthetic coding sequence
  source 1..2121: mol_type = other DNA
atgggcaaaggttctatcagctttctctttttcagtcaaataggatccctcgagaaccactatctttttaaacataaaaaccatccccggagaagtcgacgtagtgcttttcacataactaaaagactgagtgatgacgatcgcgtcatctgggctgagcaacaatatgagaaagagcgtagtaaaaggtctgccctgcgtgatagcgcacttaacctttttaatgacccaatgtggaaccagcagtggtacctgcaagacacacgtatgactgctgctcttccaaagctcgacttacatgtgattcccgtgtggcagaagggaattactggcaaaggagtggtgatcaccgtcttggacgacgggctcgagtggaaccacaccgacatctacgcaaactacgaccccgaggcttcttatgattttaatgataacgatcatgaccctttccctaggtatgaccctactaacgaaaacaaacacggcacccggtgtgccggcgagatcgccatgcaggccaacaaccataagtgcggagtgggcgtcgcatataattctaaagttggaggcattcggatgctggacggcatagtcactgatgccatagaggcatcttccatcggattcaaccctggtcacgtcgacatttattccgccagttgggggcccaacgacgacggcaagacagttgaaggtcccggacggctggctcagaaggcatttgagtacggggtgaagcaggggagacaggggaaggggagcatttttgtctgggctagtggtaacggcggacgccagggcgacaattgcgattgcgacggctacacagattctatttataccatctccattagttccgcaagccaacagggtctgagcccatggtatgctgagaaatgctcttcaacgttagccacatcctactcttctggcgactatacggaccaacgcatcaccagcgcagatttacacaatgattgcacagaaacccatactggtacatccgcttccgcgccgttggcagcaggaatttttgcacttgcactggaggcaaaccctaacctgacgtggcgagacatgcagcatctggtcgtttggacctcggaatacgatcccttggccaacaaccctggctggaagaaaaacggggctggcctgatggtgaactccagattcggtttcgggctcctcaacgccaaggctcttgtcgatctcgcggacccccgaacgtggcgctcagtgcctgaaaaaaaggaatgcgtagttaaggataacgactttgagccccgcgctctgaaagctaacggagaagtcatcatcgagatcccaacgcgcgcctgtgaaggacaagaaaatgccattaagtctctcgaacatgtccagttcgaggcaaccatcgagtacagtagacgcggggatctccacgtcacactcacttctgcggctggcacttcaactgtcctgttggcggagcgggagcgtgataccagtccgaacggattcaaaaattgggactttatgagcgtacatacatggggcgagaacccgatcggcacatggacgttaagaattaccgacatgtcggggagaatccagaatgaaggcaggatagtaaactggaagctcatcctccatgggacttcgagccagcctgagcatatgaaacagcctcgagtgtacacttcttataatacagtccaaaatgatagaagaggagttgaaaaaatggtcgaccctggagaagagcagcctacccaggagaatccgaaggaaaacactctcgtgagcaagagtccatctagcagtagtgttggaggccgacgagacgaactggaagaaggggccccatcccaggctatgctccgactcctgcagtccgctttctcgaagaacagtccacctaagcagtctcccaagaaatcccccagcgccaagttgaacattccctatgagaatttttatgaggcactggagaaactgaacaagccatcgcagctgaaggacagcgaagactctctctataatgactatgtggatgttttctacaatacgaagccctataagcatagagacgacaggctgctgcaggcgctggtggacattttgaatgaggagaactag

SEQ ID NO: 130158 - DNA, 798 bp, synthetic construct
  misc_feature 1..798: note = Description of Artificial Sequence: Synthetic coding sequence
  source 1..798: mol_type = other DNA
atgcctctgcctgtggctttacagacgaggctggcgaagagaggcatcttaaagcatttggaacctgagcctgaggaggagattattgcggaggattacgacgatgatcctgtggattacgaggctactcgcctggaaggcctccccccatcttggtataaagtgtttgacccgagctgtggtttgccgtattactggaatgccgacacggatctggtaagctggctatcaccacacgacccaaattctgtagtgacgaagagcgctaagaaacttcggtccagcaacgcggatgcagaggagaaactggaccggagccatgacaaatctgatagagggcatgacaagagcgacaggtctcatgagaagttggaccgcggacacgacaagagcgacaggggccatgacaaaagcgatcgtgatagagaacggggctacgacaaggtcgaccgtgagagagagcgcgaccgcgagagagatcgagacaggggttatgacaaggccgatcgtgaggaaggaaaagagcgccggcatcaccgcagggaggagcttgccccctatccgaagagcaagaaggcagtctctcgtaaggacgaagagctggaccccatggatccaagttcctattccgacgctcctagagggacttggagtacaggcctgccaaaaagaaacgaagccaagacaggtgctgacaccacagcagccggccctcttttccagcaacgaccctatccgtcacctggcgctgtcctccgcgccaacgctgaagcctctcgtaccaaacaacaggactag

SEQ ID NO: 130159 - DNA, 1917 bp, synthetic construct
  misc_feature 1..1917: note = Description of Artificial Sequence: Synthetic coding sequence
  source 1..1917: mol_type = other DNA
atgaaggggggttgcgtgtctcagtggaaagcagccgcaggctttctgttctgcgtgatggttttcgcttctgctgagcggcctgtcttcaccaatcacttcctcgttgagctccataaagggggagaagataaagcccgccaggtcgcggctgagcacggcttcggggtacgaaagctgcccttcgccgagggtctgtatcacttctaccacaacggtctcgctaaggctaaacgcagacgctctctccaccacaagcagcaacttgagcgggacccacgggtgaagatggccctgcagcaggaaggcttcgaccgcaagaagcgtggttatcgtgatatcaacgaaattgatatcaatatgaacgacccgctgttcacaaaacagtggtacctcattaatacgggacaggcagatggtactcccggtctagacctgaacgtggctgaggcatgggagctaggctatactgggaagggcgttactattgggattatggacgacgggatcgactacttacaccctgacctcgcgagtaactataacgccgaggccagttacgatttttcatccaacgacccatatccctatcctcggtatactgatgactggtttaattcccacggaacacggtgtgctggcgaagtgtccgccgcggccaataacaatatatgtggtgtgggcgttgcttataactctaaagtggccggtatacgtatgttagaccagccgtttatgactgatataatcgaggccagctccattagtcatatgccccaacttatagacatttacagcgcatcatggggccccacagataacggaaagaccgtcgatgggccaagagaactcaccctgcaggcgatggccgacggcgttaacaagggtcgcggcgggaaaggctctatctacgtgtgggcttccggggacggcggcagctacgatgattgcaactgcgatggatacgcttcaagcatgtggaccatctccataaactcggcaattaatgatgggcggaccgccctttatgacgagtcttgcagtagtactctagcttccacatttagcaacggacggaaacgaaatcctgaagccggtgtcgccacaacagacttgtatggtaactgcacccttaggcattcaggtacctctgccgcagcaccagaagccgccggcgtgttcgccctggcgctcgaggcaaacctcggacttacttggagggatatgcagcatcttacagtattaacttccaagcgcaaccagctgcacgatgaggtccaccagtggagaaggaacggggtcgggctggaatttaatcacttgtttggatatggtgtgctggatgctggggccatggtgaagatggctaaagattggaaaaccgtacccgaacgcttccattgcgtgggtggctccgtgcaggacccagaaaagatcccctccaccggcaagctcgttctgactctgactactgacgcttgtgaagggaaggagaacttcgtcagatatctagagcacgtccaggccgttataacagtaaacgcaacaagacgaggggatttgaacatcaacatgacttcacctatgggaacaaagtccattttactctcgagaagaccacgagatgacgactccaaagtcggattcgacaaatggcctttcatgacaacacacacctggggtgaggatgccagagggacgtggacactggaactgggattcgtgggatctgcgccccagaaaggcgttctcaaagaatggacactcatgctgcacggtacccagagcgcaccgtatattgaccaggtggtgagagattatcagtccaagttggccatgtctaagaaagaggagttagaggaagaattggatgaggccgtggaacgaagtttaaagtctattctgaacaaaaactag

SEQ ID NO: 130160 - DNA, 1860 bp, synthetic construct
  misc_feature 1..1860: note = Description of Artificial Sequence: Synthetic coding sequence
  source 1..1860: mol_type = other DNA
atggtttttgcctccgccgagcggccagtgtttacaaaccattttctcgtcgagctacacaaaggcggggaggacaaggcacgacaggttgctgcagagcatggattcggagtgcgcaagctgccctttgcagaaggcctgtatcacttttatcacaatggcctggccaaggcaaagaggagacggtcactgcatcataagcagcagttggagcgcgaccctcgggttaagatggcactgcagcaagagggctttgaccgaaaaaagcgaggatacagagatattaacgaaattgacatcaacatgaatgaccctctgtttacaaagcaatggtatttgatcaacacgggacaggccgatggcacgcctggcctagacctgaacgtggcggaggcttgggagttaggctacacagggaaaggagtcacaatcgggataatggatgatggaattgactacctccatcctgatctggcttccaactacaatgcagaagctagttacgatttctcctcaaatgatccatacccctaccctaggtacaccgatgattggttcaattctcatggtacaagatgtgcaggcgaagtctcagctgcggccaacaacaacatctgtggcgttggcgtagcatataatagcaaagtagcagggatccgcatgttagaccagccctttatgactgatattatagaagcaagttccatttctcacatgccccagctgattgatatatattccgccagttggggcccaaccgacaatggcaagaccgtggacgggcctagagaactgacactccaggctatggccgatggtgtgaataaaggacgcggcgggaagggcagcatctacgtgtgggccagcggggatggaggaagttacgacgattgtaactgcgatggctacgcttcatcaatgtggactatctcgattaactccgccatcaacgatggcagaactgccctgtatgacgaaagctgctcaagtacactggcaagcactttttcgaacggccgcaaaaggaatcccgaggcaggagtagccacaactgacctctacggtaactgtacccttcgacattccggtacctcagcagctgctccggaagctgctggggtcttcgctctggccttagaggccaatctcggcctcacttggagagatatgcagcaccttaccgtgctgacaagcaaaaggaatcagctgcacgacgaggtgcatcagtggagaagaaatggcgtcggcctagagtttaatcatctgttcggttacggtgtcctggatgcaggagccatggttaagatggctaaggactggaaaaccgtccctgagcgatttcactgtgtgggcgggtctgttcaggatcctgagaaaattccatccaccggtaaactggtcttgactctgaccacggacgcttgcgaggggaaggagaatttcgtccggtatctcgagcatgtgcaagctgttattactgtcaatgcgactagaaggggagacctcaatatcaacatgacctctccaatggggacaaagtctattctgctctctaggcgcccccgtgatgacgactccaaggtcggctttgacaagtggccctttatgaccacccatacctggggtgaggatgctaggggaacatggactctggagctcggattcgttggatcggcgccccagaaaggcgtgctaaaagaatggactctgatgctgcatggcacccagagtgccccatatattgaccaggtcgtcagggattatcagtcaaaactggcgatgagtaaaaaggaggaactggaggaggagctggacgaagccgtcgaacgctcattgaaatccatccttaacaagaactag

SEQ ID NO: 130161 - DNA, 1812 bp, synthetic construct
  misc_feature 1..1812: note = Description of Artificial Sequence: Synthetic coding sequence
  source 1..1812: mol_type = other DNA
atgaaaggcgggtgtgtctcgcagtggaaggctgcggctgggtttctcttctgtgtcatggtgttcgcttccgctgagcgaccggtgtttactaaccatttcttagtcgagctccacaaggggggtgaggacaaagctcgccaggttgctgctgagcatgggttcggtgtgcggaaagttaagatggcactgcaacaagagggattcgatcgcaaaaagaggggttatcgagacataaacgaaatcgatatcaacatgaacgaccctctttttacgaaacagtggtatctgattaataccggccaggccgacgggacacccggattggacctcaacgtggccgaggcatgggagctgggctacaccggcaaaggtgtaactattggaatcatggatgatggcatcgactaccttcacccagatttagctagcaactataatgctgaggcatcatacgatttctcgtctaacgatccctatccgtatccaaggtacactgacgattggtttaatagtcatggaacgcgctgcgccggggaggtaagcgcagctgccaataacaatatctgtggcgtgggagttgcttacaattccaaagtggcaggtattcgaatgttggaccagccattcatgactgatataatcgaagcctcctccatctctcacatgccacaactgatagacatctattctgcctcatggggccccaccgataatgggaaaactgtggacggcccacgagagttgaccttacaagccatggcagacggagttaacaaaggacgcggggggaagggatctatttacgtctgggcttctggcgatgggggctcatatgatgattgcaactgtgacggctatgcaagctctatgtggacaatatcaatcaattctgcaatcaatgacgggcggaccgctctctacgacgagagttgctccagtacactcgcttccacttttagcaatgggagaaaacgcaatccagaggccggggtcgcaactaccgatctgtatgggaactgcactctccgacatagtggcacctccgccgctgctccagaggccgccggcgtgtttgcattggcactggaggcaaacctcggactgacttggagagacatgcaacacctgacagtgctcacatccaagagaaaccagctgcacgacgaagttcatcagtggcgacgcaacggggttggcctcgaatttaaccacctcttcggttatggagttcttgacgctggcgccatggtcaagatggcaaaagattggaaaacagtcccagaacgcttccactgcgtgggtggaagcgtgcaggacccggaaaagatcccctctactgggaagctggttttaacccttacaacagacgcatgcgaggggaaagaaaatttcgttcgatacctcgagcacgtgcaggccgtgattactgtcaatgcaacacggcgcggcgatctgaatataaatatgaccagtcccatgggaaccaaatccatccttctttccagacgacctcgcgacgacgactccaaggtcggcttcgacaaatggccctttatgactacccacacctggggcgaagatgcacggggcacatggaccctcgagcttgggtttgtcggaagcgcacctcagaagggcgtgctcaaagagtggaccctgatgctacacggcacccagagcgcgccctacatcgatcaagttgtgagagactaccagagcaagttggcaatgagcaagaaagaggagcttgaagaagaactcgatgaagcagtcgagcggtcacttaagagtattttgaataaaaactag

SEQ ID NO: 130162 - DNA, 2268 bp, synthetic construct
  misc_feature 1..2268: note = Description of Artificial Sequence: Synthetic coding sequence
  source 1..2268: mol_type = other DNA
atgcgcccagcaccaattgccctgtggctgcgactcgtcctggctctggccctggttcgccctagggccgtgggttgggcacccgtacgcgctcccatctacgtctcctcgtgggccgtccaggtctctcagggcaatcgggaggtcgaacgacttgcccgcaagtttggctttgtcaatctaggccctatttttccagacgggcaatatttccatctgcgacatagaggcgtggtacagcagtcactaaccccccactggggacatcgcctgcatttaaaaaaaaaccctaaggttcagtggttccagcagcaaaccctgcagaggcgtgtgaagaggtccgtggttgttcctaccgacccgtggttttctaaacagtggtatatgaactcagaggcccagcccgatttatccatcctccaggcctggtctcaaggccttagtgggcagggcatagttgtgtcagtgctcgatgacggcatcgaaaaagaccatcccgatctctgggctaactacgacccactggcaagctatgactttaatgattatgaccctgacccccagcccagatacaccccctcgaaggaaaatcgtcatgggaccaggtgtgccggagaagtagcagccatggccaacaatggattctgtggtgtaggagtcgcctttaatgcaaggatcggcggagtgcgaatgttagatggcacaattaccgacgtgattgaggcccagtccctgagcctgcagccgcagcacatacatatctattcagcttcttggggccccgaggacgatggtaggacagttgacgggccagggatcctgacacgggaggcatttcgccgcggggtgacaaaggggagagggggcctcggaactttattcatctgggcaagcgggaatggtggtctccattacgacaattgtaattgtgatggttacaccaattccatacacactctttccgtgggctccactacacaacagggacgcgtaccttggtacagtgaggcttgcgctagtactctgaccacaacatattccagcggagtggccactgaccctcaaattgttactactgacttgcaccacgggtgcacggaccagcatacgggcaccagcgcgagcgcgcctttggccgccgggatgatcgcactcgcgctagaggccaatccatttttgacatggagagatatgcagcatcttgtggtccgggcgtcaaaaccagcccaccttcaggcagaggactggcgcacaaatggggtgggacgccaggtgtcccaccactatggctatggcctgctggacgccgggctgctcgtggatactgccagaacctggctgccaactcagcctcagcgtaaatgcgccgtccgcgtgcaatcccgtcccacaccaatccttccgttgatctacatccgagagaacgtcagcgcctgcgcaggacttcacaacagcattcgatcgctcgaacacgtacaggctcagctgacactatcttacagcaggcggggcgaccttgaaatctctctgacctcaccgatgggtaccaggagcacactggttgcaattcggcctttggacgtttcaactgaggggtacaacaattgggtctttatgtcgacccacttctgggacgagaacccgcagggcgtttggacactgggtctggagaacaaaggttattatttcaacacgggcaccctctaccgctatactctattgctgtacgggaccgctgaagacatgaccgcgcgtcccacgggcccccaagtgacttcatccgcctgcgtgcagagggataccgaaggcctatgtcaggcatgtgatggtccggcttatatcctaggacaattatgtctggcctactgccctccacgattttttaaccacacaagactcgtgacggccgggcctggacatactgctgcgcccgcgctgcgcgtttgcagttcatgccacgcctcatgttacacatgtagaggcggtagcccccgggactgcacgtcttgtccaccatcttcaacgctcgatcagcagcagggctcatgtatgggacccacgacacctgactcacggccacgcctgagggcagccgcttgccctcaccatcgatgccctgcgagcgctatggtgctctccctccttgctgtgacactggggggaccggtgctctgcggaatgtctatggacttaccgctgtacgcttggttgagtagagccagggcaacccctacgaaacctcaggtgtggctgcctgctgggacttag

SEQ ID NO: 130163 - DNA, 1137 bp, synthetic construct
  misc_feature 1..1137: note = Description of Artificial Sequence: Synthetic coding sequence
  source 1..1137: mol_type = other DNA
atggcctctcggaggactacacggacgagcggaccaaccaccactccgtggcccgcgatgacctccatgaccaccactcgcacaccttccccggccacccctcccgctaagagaacgggggtcaggatgcttgatggcaccatcaccgatgtcatcgaagctcagagcctgtctctgcaacctcagcatatccatatctactctgcttcttggggacccgaggacgatggacgcactgtggatggccctggaatcctgactcgggaagcattcagacgaggagtgactaagggtagaggcggattgggcaccctgttcatatgggcctcaggtaacgggggcttacactatgacaactgtaactgtgatggttacacaaactccattcatacgctcagtgtagggtctactacccagcaggggcgggtgccatggtactcagaagcctgcgcaagtacgctgaccactacatattcctctggtgtggctacggacccacagatcgtcaccaccgaccttcatcacggttgtacagatcagcatacgggcacatccgccagcgcccctctggccgcaggtatgattgctttagcattagaagctaatccgtttctcacttggcgtgacatgcaacaccttgtggtgagagcatccaaaccagcccacttgcaagcggaggattggcgaactaacggagttggtaggcaggtttcccaccactacgggtatgggttgctcgatgcaggccttttggttgacactgcccgtacctggctccctactcaaccacagaggaagtgtgccgtcagggtgcagtcccgtcctacaccgattctgccgttaatttacatcagggagaatgtgtcggcatgcgccggccttcacaacagcatccgttccctcgagcacgtgcaagcccagcttacattatcttatagtagaaggggagatttggagattagcttgaccagtcctatgggcacgcgaagcactttagtggcaatcagagacgtggtcccccttcacgccgcagctctgtgggacgggcgggggcatgactctgctgcctatcgaccgcctggcgatcagcagcgcgtttgcgccgctgggcacagaggcgctgtccccggcgtttag

SEQ ID NO: 130164 - DNA, 2742 bp, synthetic construct
  misc_feature 1..2742: note = Description of Artificial Sequence: Synthetic coding sequence
  source 1..2742: mol_type = other DNA
atggggtggggttcgcggtgctgttgccctgggcgtctggacttgctttgtgtcttagccctacttggaggctgtctgcttccagtttgtaggacaagggtttacaccaaccactgggccgtgaaaatagccggcggcttcccagaagccaaccgcattgcctccaagtatggtttcatcaatatcggacagatcggagccctaaaggattactatcacttctatcacagtcgaacaataaagcgcagcgtaattagctcccgcggtacccatagcttcatttccatggagccgaaagtggagtggatccagcagcaggttgttaaaaaaagaactaagcgggactacgacttctccagagctcagtccacctatttcaacgatcccaaatggcctagtatgtggtatatgcattgttcagataacactcatccctgccaatctgacatgaacattgagggcgcttggaagcggggctataccggtaagaatatcgtggtcaccatcctggatgacggaattgagcggacccatcccgatctcatgcagaattacgatgctttagcaagctgcgatgtgaatggcaacgatctggatccaatgccacggtacgacgcttctaacgagaacaagcacggaaccagatgtgccggcgaggtcgcagccgccgcaaataactcccattgcacagtgggcatagccttcaacgctaaaattggaggagttcgaatgttggacggggatgtcactgatatggtggaagccaagtcagtctctttcaatccccaacacgtccacatttacagcgctagctgggggcctgacgatgatggaaagaccgtcgacggaccagccccattgaccagacaggctttcgaaaacggcgtgcggatggggcgaagaggccttggcagcgtcttcgtgtgggctagcgggaatggcggtcgttctaaggaccactgcagctgtgatggttacacaaattcaatttacaccatctccatttccagtacagccgagtcaggtaagaaaccttggtatcttgaggagtgctcatccacccttgccacgacgtacagttcgggcgagtcgtatgacaagaagatcatcacgactgacttgaggcaacgctgtaccgataaccacaccggaaccagcgccagcgcccctatggcggccgggattattgctctggcccttgaggccaatccttttttaacatggagagatgtacagcatgtcattgtcagaacatccagggctggccacttaaacgctaatgattggaagactaatgctgctggcttcaaagtgtctcacttgtatggtttcggattaatggatgcagaggccatggtgatggaagccgaaaagtggactaccgtacccaggcaacacgtgtgcgtagaaagcacggatcggcagatcaaaacaatcaggcccaattccgctgtgcgaagtatttacaaggcctccggctgctcagacaatccaaatcgtcatgtcaactatttggaacacgtggtggtaaggatcactattacccacccccggcgcggtgacctggcaatctacctcacatccccaagcgggaccagaagtcagttattggccaacagactctttgatcatagcatggagggtttcaaaaactgggagttcatgacgatccactgttggggcgagagagcagccggcgattgggtgctggaagtttacgatacaccgagtcaactgcggaatttcaaaactcccggaaagttgaaagagtggtcactggtgctctatggtactagcgttcaaccttattccccgaccaacgagtttcccaaggttgagcgattcaggtatagtcgtgtcgaggaccccaccgacgattatggaacagaggactatgcgggtccgtgcgatcctgagtgctcagaggtgggatgtgacggcccaggcccggaccactgcaacgattgtttgcactactactacaaactgaaaaacaacactcggatttgtgtttcttcctgtccaccaggacactaccacgctgacaagaagaggtgtaggaagtgcgcgcctaattgtgagtcttgcttcggcagccacggtgatcagtgcatgtcttgtaagtacggatattttctcaatgaagagacgaactcttgtgtaacccactgccctgatgggtcttaccaggacaccaagaagaacctgtgccggaaatgctctgaaaattgcaagacgtgcacggagttccataactgcaccgagtgtcgagacggcctctccctgcagggatcccggtgttccgtctcctgcgaggatggaaggtatttcaatgggcaggactgccagccctgccacagattttgtgccacctgcgcgggtgctggagccgatggttgtatcaattgcaccgagggttactttatggaagacggccggtgcgtgcagtcctgctccatctcctactactttgatcactccagcgagaacggatataagagctgtaagaaatgtgatatctcctgcctcacttgcaatggtcccggttttaagaactgcacatcatgccccagcggatacctgctcgatctcggcatgtgtcagatgggagccatctgcaaggatgctaccgaagagtcttgggcagagggaggattctgcatgctggtgaaaaaaaacaacctgtgtcagcggaaggtgcttcaacagctttgctgcaagacctgcacattccagggctag

SEQ ID NO: 130165 - DNA, 4773 bp, synthetic construct
  misc_feature 1..4773: note = Description of Artificial Sequence: Synthetic coding sequence
  source 1..4773: mol_type = other DNA
atgggaaggcggggcctgggcagcgtttttgtttgggcctccgggaatggaggacggtccaaagaccactgttcttgtgacgggtacacaaacagtatatatacaatatcaatatccagcacagccgaaagcggcaagaagccgtggtaccttgaggagtgctcaagcaccctcgctacaacttactcatccggagaaagctacgacaagaaaatcattactaccgatctgcggcaacgttgtactgataatcacacgggcactagtgcttccgccccaatggccgcaggaatcatcgcactcgccctcgaagcaaatccctttttgacctggcgtgatgtgcagcacgtaatcgtacggacatcccgagccggtcacctgaacgccaacgattggaagacaaacgccgcaggattcaaagtttctcatctttacggatttggcttaatggacgcggaagccatggtgatggaggccgagaagtggaccaccgtgcccaggcagcacgtttgtgtcgagagcaccgatcggcagattaaaacaattaggccaaattctgcggtgcggtccatctacaaggcatcaggttgcagtgataaccccaacagacatgtcaattacttggaacatgttgttgtgcggattacgataacccacccaagaaggggtgacctcgccatctatctgacctctccgtccggcacaaggagtcagctcctggctaacagattgtttgaccactcaatggagggctttaagaactgggagttcatgaccattcactgctggggtgagagagcagccggggactgggtgctggaagtatatgacaccccgtcccaactgaggaacttcaaaacgcctggtaagttaaaagagtggagtctggtgctttacgggacgagcgtccagccctacagcccaactaacgagtttcctaaagtcgaacggttccgttattcaagggttgaggatcctacagacgattatggcactgaggactatgccgggccatgtgaccctgagtgttctgaggtcggctgtgatgggccaggcccagaccattgcaatgattgtcttcattattattataagcttaagaacaacaccaggatttgcgtgtcaagttgcccccctggccactatcacgctgacaagaaacggtgccgcaaatgcgccccaaactgcgaatcttgcttcggcagccatggggaccagtgcatgagttgcaaatatggctacttcctcaatgaggaaaccaatagttgcgttacccactgtccggatgggagctaccaggacactaagaaaaacctgtgcagaaagtgctccgagaattgtaaaacatgtactgagttccataactgcacggagtgtcgggatggactgagtctgcaggggagtcgatgctctgtctcctgcgaagatggcaggtactttaacgggcaggactgtcaaccctgccacaggttctgtgccacctgcgccggggcaggggctgacgggtgtattaactgtactgagggctatttcatggaagacggcagatgcgtgcaaagctgcagcatttcctactatttcgatcactctagcgaaaacggctacaaatcctgcaaaaaatgcgatatcagctgcttaacatgcaatggcccagggtttaagaactgtactagctgtccaagcggttacctacttgaccttggaatgtgccagatgggagctatttgtaaagacggcgagtacgtggatgaacacggacattgccagacctgtgaggcatcttgcgccaaatgtcagggtccaacccaggaagactgcacaacctgccccatgacaaggatattcgatgacgggagatgtgtgtccaattgtccctcgtggaaatttgagttcgagaatcagtgtcacccatgtcaccacacgtgccagagatgccagggctctggccccacccattgcacttcctgtggcgccgataactatggaagggagcacttcctctaccagggggagtgcggagactcctgccctgaaggccactatgctaccgaaggcaacacttgcttgccatgtcccgacaactgcgaactgtgccactccgtacatgtctgcactcgatgtatgaagggatatttcatcgctcccacgaaccatacctgtcaaaaactggagtgcggtcagggcgaagttcaggatccagactatgaagagtgcgtgccatgtgaagagggatgtctgggctgcagtcttgatgatccaggcacctgcacctcgtgtgctatgggctattaccgatttgaccatcattgctacaagacttgtcctgagaaaacttattctgaggaggttgaatgcaaggcttgtgactctaattgcgggagctgcgaccagaacggttgttactggtgcgaagaggggttcttcttgctggggggatcatgtgttcggaagtgcggtcctgggttttacggcgaccaagagatgggcgagtgtgagagctgccaccgtgcgtgcgagacctgtaccggcccaggccacgatgagtgcagttcctgtcaagaaggactgcagcttctgcggggcatgtgcgtgcacgcgacaaaaacccaggaggaggggaagttctggaatgaggctgttagcacagccaacctgtctgtggtgaagtccctgcttcaggagcgccggcgctggaaggttcaaattaaaagagacatcctgcggaaactccagccgtgccactcttcttgtaagacatgcaatggttcggccaccctctgcacttcttgcccaaagggcgcttatctcctagcacaggcatgcgtgagttcctgtccccaaggtacttggccaagtgtgagatctggctcttgtgagaactgcacggaggcatgtgccatatgttccggcgccgacctgtgtaaaaagtgccagatgcagcctggacatccactgtttctccacgagggccgctgctattctaaatgccctgaagggtcttatgccgaagatggtatatgtgaacgttgcagttctccttgtcgtacatgcgagggcaatgctacaaactgtcattcctgcgaaggtggtcatgttctccaccatggtgtgtgtcaggaaaattgtcccgaaaggcacgtggcagtgaaaggggtctgtaagcattgccccgagatgtgccaggactgcattcacgagaaaacttgtaaagaatgcacaccggagtttttcctccacgacgatatgtgccatcaatcatgcccccggggtttttatgccgactcacgccattgcgtaccctgtcacaaagactgtcttgaatgctccggccccaaggccgacgattgcgagctctgtctggagtcttcctgggtgctgtacgatggtctatgcctggaagaatgccccgcgggcacttattacgagaaggaaaccaaagagtgtcgcgactgtcataagagttgtcttacgtgctcgagcagcggtacctgtacgacctgccagaagggtctgattatgaacccgcggggctcttgtatggctaatgaaaaatgctcgccatcagaatactgggatgaggatgcgcccggctgtaaaccctgtcacgttaaatgttttcactgtatgggccccgccgaagatcagtgccaaacttgtccaatgaatagcctattattaaatacaacatgcgtgaaagactgccccgaagggtattacgccgatgaggactccaatcgttgtgcgcattgccactctagctgcaggacatgtgaaggcaggcactccagacagtgccactcctgtaggcctggctggttccagctgggcaaggagtgcctgttgcagtgtagagaggggtattatgccgacaactccactggccggtgcgagcggtgcaatcgctcgtgcaaaggttgtcagggacctcggcccacggactgcctcagctgcgaccggttcttcttccttttaagatccaaaggggagtgccatcgctcctgcccagaccactattatgtagagcagtcaacgcagacctgtgagagatgtcaccctacttgcgaccagtgcaaagggaaaggcgcactcaactgtctgtcatgtgtttggtcataccatctcatgggcgggatctgtacctctgattgcttagttggcgaatatagagtaggggaaggcgaaaaatttaattgcgaaaagtgtcatgagtcatgcatggagtgtaaaggaccgggggccaaaaactgcaccctgtgccccgcaaatctcgttctccatatggatgactctcactgtctacattgctgcaacactagcgaccctccatcagcacaagagtgctgcgactgtcaggacacaactgacgaatgtattcttaggaccagcaaagtgagacccgcaacagagcattttaaaaccgctctgtttattactagttccatgatgctggtactccttttgggtgctgcagtagtggtttggaagaaatctagggggagggtgcaaccagcggcaaaggccggatacgaaaaactcgccgatcctaataagtcatactcttcatacaaatcctcctatagagagtccacctcctttgaagaagaccaggtgatagagtatagggaccgggattatgatgaagacgacgacgacgatattgtgtacatggggcaggatggaactgtttaccgcaaattcaaatatggcttgctcgacgacgatgatatcgacgagctggaatacgacgatgagagctactcttattatcagtag

SEQ ID NO: 130166 - DNA, 2073 bp, synthetic construct
  misc_feature 1..2073: note = Description of Artificial Sequence: Synthetic coding sequence
  source 1..2073: mol_type = other DNA
atgggctgggggtccagatgttgctgccctggcaggttagatttgctctgtgttctcgctcttctcggcggctgtctcttacctgtgtgcagaactcgggtatacactaaccactgggcagtgaagattgccggaggcttccccgaggctaatcgtatcgcctctaaatacggctttatcaatataggacagattggtgctttaaaagactactaccacttttatcattcccggacaattaaaagatccgtgattagttcacgtgggacgcactctttcatctctatggagccaaaggtggagtggattcaacaacaggtggtcaagaaaagaacaaagcgagactatgacttctcccgggcgcagtcaacttattttaatgatcccaagtggccatctatgtggtatatgcactgtagcgataatacacacccttgccaatccgatatgaatatagaaggagcctggaagagaggatatacgggcaaaaacatcgtggtgaccattctggatgatggcatagagcggacccatccagacttaatgcagaactatgatgccctggcttcctgcgatgtcaacggaaacgatctcgaccctatgcctcggtacgacgccagcaatgagaacaagcatggcactagatgcgccggagaagtggctgccgccgccaacaactcccactgtacagtgggtatcgccttcaacgcaaaaatcggtggagtgcggatgctggacggggatgtgaccgacatggtcgaggctaaatcagtttccttcaatccgcagcacgtgcatatatatagcgccagctggggaccagatgacgacgggaagacggtagatggaccagcgcctctgaccaggcaagctttcgagaatggcgtgcggatggggagacgcggcctgggaagcgtatttgtgtgggccagcggaaatggagggcgctcaaaggatcattgttcatgcgacggatacacaaattctatatacacgatttcaatctccagtaccgctgaatccggaaaaaagccgtggtatctggaggagtgcagctccacactcgccaccacttacagcagtggtgaatcttacgacaagaaaatcatcaccacggatctgcgacagaggtgcacggacaatcatactggcacatccgcttccgctcctatggctgccggcatcatcgccttggccctggaagcaaatccttttctgacttggagagatgtccagcacgtcatcgtgagaacatcccgggccggccatctgaatgccaatgattggaagactaacgccgccggtttcaaggtgtcacacctgtacggtttcggcttgatggatgccgaggccatggtgatggaggccgagaaatggacgacggtcccccgtcagcacgtgtgcgttgaatccactgaccggcagatcaagacaattaggccgaacagtgctgtccgatcaatatacaaagcttcaggctgctcagacaaccctaacaggcacgtaaactatctcgaacacgtggtggtgcgcatcacaatcactcacccccggcggggtgacctggccatttatttgactagcccaagcggcactcgaagccagcttttggctaacaggttgttcgatcattctatggaagggtttaaaaattgggaattcatgacaattcactgctggggtgagcgggccgccggagactgggttctggaagtgtacgacacaccaagtcaactgagaaactttaagacgccaggaaaactgaaagaatggagcttagtgctctacggtacatcagtgcagccgtactctccgaccaacgaattcccaaaagtcgaaagatttcggtactcaagggtcgaagatccaacagacgactatggtacagaagattacgcaggagaacttgcctcatccggtacccaggcgaaaaaacgacagctaatgcaccaccctactacttgggagaatcgaatggagtggaacggcatgaagtggaatggaatgaaatggaacggcatggagtggaacggaatggaatggaataggattgaatcgaaccgcatcgaatag

SEQ ID NO: 130167 - DNA, 2073 bp, synthetic construct
  misc_feature 1..2073: note = Description of Artificial Sequence: Synthetic coding sequence
  source 1..2073: mol_type = other DNA
atgggctggggttctcgttgctgttgcccgggacggctcgatcttctgtgcgtgttggcattactcggtggctgtttgctccccgtctgcagaacaagggtgtacactaaccactgggcagtgaaaatcgccggcggatttcctgaggccaatcgcattgcttctaagtatggattcatcaatattgggcaaatcggtgcccttaaagactattaccatttttaccattctaggaccatcaagaggtcggtcatctctagcaggggtacacattctttcatcagtatggaacccaaggtggaatggattcaacagcaggtagtcaagaagcgcacaaaaagggactacgatttcagtagagctcaaagcacttacttcaatgatccaaaatggccatctatgtggtacatgcactgctccgacaacacccacccttgccagtccgacatgaacatagaaggggcgtggaagcgcggatatacaggaaaaaacattgtggtgacgatcctcgatgatggtattgaacgcacccaccccgacctcatgcagaattatgatgcactggcctcctgcgatgtgaatggcaatgacttggacccgatgcctcggtacgacgcctcaaatgagaacaaacacggaacgaggtgcgcaggcgaggtggccgctgccgccaataactctcactgcactgttggaatcgccttcaatgctaagatcggcggcgtcagaatgctggatggcgatgtaactgatatggtagaggccaaatcagtgagcttcaatccccagcatgtgcatatctattccgcctcttgggggccggacgacgatggtaagacagtcgacggcccagccccgcttacaaggcaagctttcgagaacggggtgcggatgggtcgaagaggattaggctccgtcttcgtgtgggcttcggggaacggcggaaggtctaaggaccattgcagttgcgatggctacactaatagtatctatactatcagtataagtagcacggccgagtccggaaagaagccgtggtaccttgaagaatgtagctctaccctggctacaacttactccagtggcgagagctatgacaagaaaatcattaccactgatctgagacaacgatgcactgacaaccacaccgggacttctgccagtgcccctatggctgctggcattatcgccttggcacttgaggcaaatccattcttgacctggagagatgtgcagcacgtgattgtgcggacctctagagccgggcatctgaatgccaatgactggaagacaaacgcagccggatttaaggtgtctcatctgtacggcttcggacttatggatgccgaggccatggtgatggaggcagaaaagtggaccactgtcccgaggcaacatgtctgtgtggaatctacagaccgccaaataaaaacaataaggccgaactctgcggtgaggtcgatctacaaagcctctgggtgtagtgataatccaaaccggcatgtcaactacctcgagcacgtggttgttcggatcacaatcacgcaccctagacggggagatctcgccatctaccttactagcccgagtgggacacgctcccagcttttggctaaccggctcttcgaccacagcatggagggcttcaagaattgggagtttatgactattcactgctggggggaacgagctgcaggtgattgggtgctcgaggtgtatgacacgcctagccaactccgcaatttcaagactcccggcaagttaaaggagtggtcactcgtcctgtatggaacatctgtccaaccttactcgccaaccaatgaattccccaaagttgagcgattcaggtattcaagggttgaggacccaacagacgattatgggaccgaggactacgccggcgagttggccagttccggcacgcaggctaagaagcggcaactgatgcatcaccctaccacctgggagaaccggatggagtggaacggcatgaagtggaatggcatggagtggaatgggatggagtggaatgggatggagagtaatcggatagaaagtaatcgcatagaatag

SEQ ID NO: 130168 - DNA, 4683 bp, synthetic construct
  misc_feature 1..4683: note = Description of Artificial Sequence: Synthetic coding sequence
  source 1..4683: mol_type = other DNA
aactctatttacaccataagtatttctagcactgctgagagtggcaagaagccttggtatctggaggaatgctcttcaacgcttgcgactacatattccagcggagagtcgtatgacaaaaaaatcatcacaactgaccttaggcaacgatgtaccgacaaccatacagggacctcggccagcgctcctatggccgcgggcattattgccctggccttggaggctaacccatttttgacttggcgggacgtccagcacgttattgttagaacatcaagggccgggcacctgaatgctaacgattggaaaaccaatgcggccgggttcaaggtgtcccatttatacggcttcggactgatggacgcggaggctatggtgatggaggctgagaaatggaccaccgtccccagacagcatgtctgcgtggaatccacagaccggcagatcaagaccatccgccctaactctgctgtccgcagtatttacaaggcatcgggttgttccgataatcccaatagacatgtaaattatctcgaacacgttgtagtgcgcatcacaatcacccatccaaggcgtggcgatctggccatttacctgaccagtccaagcggcacgaggtctcagctcctggccaacaggctgttcgatcacagcatggaggggttcaaaaactgggaattcatgactattcactgctggggcgaacgcgcggccggggattgggtcttggaggtatacgacacaccctcacagctgcgcaatttcaaaacccctgggaagctgaaagaatggtcactggtgctgtacgggaccagtgtgcaaccgtattcgccaacaaacgaatttcccaaagtggaacgatttcgctatagtagagtcgaggatccaacggatgattatgggaccgaagattacgctggtccatgtgatccagagtgttccgaagtggggtgcgatgggccggggccagaccattgcaacgactgcctgcactattactacaagttaaagaacaacactagaatttgtgtgtcttcttgtcctcccggccactaccacgccgataagaaaaggtgccgaaagtgtgctcccaactgcgagtcttgtttcgggagccatggggaccaatgcatgtcctgcaaatatggatacttcttaaacgaagaaaccaacagctgcgttacgcactgtcctgatgggtcttatcaggacacaaaaaaaaacttgtgtaggaaatgcagcgaaaactgcaagacctgcactgagttccacaactgtactgagtgtcgggacggtctctccctgcagggttcccggtgcagcgtctcttgtgaggacggcagatactttaatggtcaagactgtcagccctgccatcggttctgcgctacctgtgctggcgcgggggccgatggctgcataaactgtactgagggctactttatggaagacggacgctgcgtgcagtcttgcagtatcagctattactttgatcatagctctgaaaatggatataagtcttgcaagaaatgcgacatcagctgcctaacatgcaacggtcctggattcaaaaattgcacaagttgcccttccggatacctgctggatctgggaatgtgccaaatgggcgccatctgtaaggatggggaatatgtagatgagcatggacattgtcagacttgcgaagccagctgtgccaagtgccaggggcctacccaggaggattgcactacatgccccatgacccgaatcttcgacgatggcagatgcgttagtaattgcccctcgtggaaattcgagtttgagaatcagtgccacccttgtcatcacacatgccagcgatgccaggggagcggcccaactcattgtactagttgcggagccgacaattatggcagggagcactttctgtaccagggagagtgcggggactcctgtcctgaaggacactacgccacggagggaaacacgtgtttgccgtgccctgacaactgcgaactctgccactcagtgcacgtgtgcacaagatgtatgaagggctatttcatagccccgacaaatcacacatgccagaaactggaatgcggccaaggcgaagtgcaggatccagattatgaagagtgcgtgccatgcgaggaagggtgcctgggatgctccctggacgaccctgggacgtgtacctcatgcgccatgggttactaccggttcgatcatcactgctacaagacttgtcctgagaaaacatactccgaggaagtggaatgcaaagcttgcgacagcaactgcggttcatgcgatcagaatggatgttactggtgcgaagagggctttttcctgttgggaggaagctgcgtaaggaaatgcggacccggcttctatggagaccaggagatgggggaatgtgagagctgtcaccgagcttgcgagacttgcacaggcccaggacacgacgaatgttccagttgccaggagggccttcagctcctgcgaggcatgtgtgttcatgcgaccaagacccaggaagagggaaagttctggaacgaggctgtctcaactgctaatttgagtgttgtgaaaagtttgcttcaagagcggcggaggtggaaagtccaaattaagagagacatcttgagaaagcttcaaccctgccacagctcatgtaagacttgcaacggcagcgccacactgtgcacttcatgccctaagggggcttatctactcgcgcaagcttgtgttagctcctgcccccagggtacttggccaagcgtgcgatccgggtcttgtgaaaactgtaccgaagcatgtgccatctgctccggagcagatctctgtaaaaagtgccagatgcagccaggacatcccctgttcctgcacgagggaagatgctactcaaagtgccccgagggcagctatgccgaggacggcatttgtgaacgctgctcaagcccctgtcggacatgtgagggcaatgccaccaactgtcatagctgtgaaggcggccacgtgctgcatcatggagtgtgtcaggaaaattgtcccgagagacatgtcgccgttaaaggtgtgtgcaagcactgccccgaaatgtgccaggattgtattcacgaaaaaacatgtaaagagtgtacccctgaattctttctgcacgacgacatgtgccatcagtcctgccccagagggttctacgccgactctaggcattgtgtcccgtgccataaagactgtcttgagtgttctggacctaaggctgatgactgtgagctttgtctggagtcttcatgggtgctgtatgatggcctgtgcctggaggagtgccccgctgggacatactacgagaaagagacaaaggagtgccgcgattgccataaatcttgtctgacatgctccagttcagggacctgcaccacttgccagaaaggcctgatcatgaacccgcgcggcagctgcatggctaatgagaagtgcagcccgtctgagtactgggacgaagacgccccaggctgcaagccatgtcacgtaaaatgcttccattgcatggggcccgctgaagatcagtgccaaacctgcccgatgaattcactactcttgaatacgacttgcgtcaaggattgcccggagggttattatgctgatgaggattccaacaggtgcgcacattgccactccagttgtcggacatgcgaaggacgccacagccggcagtgtcactcgtgcagacccgggtggtttcagctgggtaaggagtgcctcctacagtgccgggagggttactacgctgataattccaccggacgctgcgaacggtgcaaccgctcttgtaagggctgtcagggccccaggcctacagattgcctgtcatgcgatagatttttctttctactgaggagcaaaggggaatgtcataggtcctgccccgatcactactatgtagagcagtcgacacagacgtgcgaaaggtgtcatccaacttgcgaccagtgtaaaggcaagggcgccttgaattgtctgagttgtgtctggagctaccatttgatgggtggtatttgtaccagtgattgcttggtcggtgaataccgtgtaggtgagggtgagaaattcaattgcgaaaaatgccatgagtcgtgcatggaatgtaagggccccggagccaagaattgcacactgtgcccagccaatctggtgctacatatggacgactcacactgcctacactgctgcaatacttcagaccctccctcagcccaggaatgctgtgactgtcaggacaccacagacgagtgcattctgagaacctccaaggtccgacctgccactgagcattttaaaaccgctcttttcatcactagtagcatgatgttggtgctcctcctgggtgcagccgtagtagtatggaaaaagagtcggggacgggtccaaccagccgctaaagcgggctatgagaaattagcggacccaaataagtcatattctagctataagtcttcttatcgggaatccacgtcatttgaggaggaccaggttattgaatatcgagaccgcgattatgacgaagatgacgatgacgatatcgtgtatatggggcaggacggcacagtgtataggaaatttaagtacggccttttggatgacgatgatattgacgagctggagtacgacgatgaaagttattcttattaccagtag

SEQ ID NO: 130169 - DNA, 306 bp, synthetic construct
  misc_feature 1..306: note = Description of Artificial Sequence: Synthetic coding sequence
  source 1..306: mol_type = other DNA
tgccagccatgtcacaggttctgcgctacctgtgccggtgccggtgcagatggctgtatcaactgtaccgagggctatttcatggaagatggccggtgtgtgcagagctgttcaatatcctattacttcgatcacagcagtgagaacgggtacaagtcctgcaagaagtgtgatatttcatgcttaacatgcaatggtcccggattcaagaattgcacatcgtgcccaagtggctacctgctggatctcggcatgtgccagatgggcgctatttgtaaggacgtgtcattgtttaggggagcctag

SEQ ID NO: 130170 - DNA, 5583 bp, synthetic construct
  misc_feature 1..5583: note = Description of Artificial Sequence: Synthetic coding sequence
  source 1..5583: mol_type = other DNA
atgggatgggggtctcggtgttgctgtcccggaaggttagaccttctgtgcgtactggccttactcggcggctgcctcctcccagtctgtcgtacacgggtatacacaaatcactgggccgtgaagattgctggcggctttcccgaggccaatcggatcgcaagtaagtacggctttattaatatagggcagataggagctctaaaagactattatcatttctatcattctcggacaataaagcggtccgtgatctcctcaagaggcacacacagcttcatctcaatggagccaaaggtggaatggattcaacagcaggtcgtgaagaagcgcactaagagagactacgatttcagtagggctcagagtacttattttaacgaccctaagtggccctccatgtggtacatgcactgcagtgataacacccatccttgccagagcgacatgaatatcgaaggggcttggaaacggggctacacaggcaaaaatatcgtcgtgacaattctcgatgacgggattgaaaggacccaccctgacctgatgcaaaactacgacgcactggccagctgcgacgtcaacggcaatgatctagatccgatgcctcgctacgatgctagtaacgaaaacaaacatggaacccgctgtgctggagaagtggccgcagccgcaaacaatagtcactgcacagtgggcatcgcgttcaacgccaaaatcggtggcgtgcggatgctcgatggggacgttacagatatggtggaagcaaagtctgtgtcttttaatccccaacacgttcatatttatagtgcatcatggggccccgatgatgacgggaagacagtcgatgggcctgctcctctcactcggcaggcattcgagaacggtgtgcggatgggcaggcggggattaggatccgtctttgtgtgggcatcaggcaacggtggccgttccaaggatcactgttcgtgcgatggatacaccaactcaatttatactatttcaattagtagcacagcggagtccgggaagaagccatggtatttggaggagtgtagtagcacgcttgcaacgacttactcctccggcgaatcatacgataagaaaatcatcactacggatttaagacaaaggtgcacggacaaccacacaggcacatccgcgagtgccccgatggccgctggaattatcgcccttgccctggaggctaatccgtttttgacttggagagatgtccagcatgttattgtgagaacctcgagggcgggccatctgaatgctaacgattggaagacaaatgcagcaggcttcaaggttagccatctgtacggcttcggactcatggatgcagaagctatggtgatggaggcggagaagtggacgacagtgccccggcagcacgtctgcgtggaatcaactgatcgccagattaaaaccataaggcctaatagcgcagtaaggtctatctacaaagcatctggttgctctgataaccccaatcgacacgtgaactacctcgaacacgtggtggtgcgcatcactataacccaccctcgtcgcggcgatctagctatctatctgaccagtccgtctggtactcggtcccagctgctggccaatcgattgtttgatcattccatggagggctttaaaaactgggaattcatgactattcattgttggggagaacgagcagcaggcgactgggtgctcgaggtgtacgacaccccctcccagctgcgcaactttaagacaccagggaaacttaaggaatggtctctggtgctctatggcacctccgttcagccttactctccgaccaatgaatttccaaaggtcgagcgtttccggtacagccgagtagaagaccctactgatgactacgggactgaggattacgccggaccatgtgatccagagtgttctgaggtgggttgcgatgggcccggcccagaccattgtaatgactgcctacattactactataagcttaagaataatactcgaatctgtgtgtccagttgtccacccggccactaccacgccgataaaaaacggtgtcgcaagtgtgcccccaactgtgagtcatgtttcggatcgcatggagaccagtgtatgagttgcaaatacggttacttcctaaatgaagaaactaatagctgcgttacacactgcccagacggctcgtaccaggacaccaagaaaaatttgtgcagaaagtgcagcgagaattgcaaaacctgtacggagttccacaattgtactgaatgcagggatgggctcagtctgcagggctcacggtgctcagtaagctgtgaggatgggcgctactttaacggccaggactgtcagccctgtcaccggttctgcgcgacatgcgcgggagctggagccgatggctgtatcaattgcacagaaggttattttatggaggacgggagatgtgtgcagtcctgttctatctcctattattttgaccattctagcgagaatgggtataaatcttgcaaaaagtgcgatattagttgtctcacttgcaacggtcctggcttcaaaaactgtacctcctgtccttctggatacttgctggacctgggcatgtgtcagatgggcgctatctgtaaagacggagagtacgtagacgagcacggacattgtcagacatgtgaggcctcatgtgccaagtgccagggccctacccaggaggattgcaccacatgccctatgactagaatcttcgacgacggccggtgcgttagtaactgccctagctggaagttcgaattcgagaaccaatgccacccatgccatcacacctgtcagcgatgtcaggggtcagggccgactcactgtaccagctgtggggcggataactacggtcgggaacacttcctgtaccaaggcgaatgcggcgatagttgccctgagggccactatgccactgagggcaacacatgcctcccatgccccgacaactgtgaattgtgccattccgtgcacgtgtgtactcgatgtatgaaaggctacttcatcgcacccactaatcacacctgccagaaattggagtgtggccagggtgaagtccaggaccccgactacgaggagtgcgtcccttgcgaggaaggctgtctggggtgctccttggatgacccagggacatgcactagctgtgcaatggggtactacaggtttgaccatcactgctacaagacttgccccgagaaaacatacagtgaggaggtggagtgcaaggcttgtgactcaaattgtggctcatgcgatcaaaacggttgttactggtgcgaagagggtttctttctcctgggtggatcgtgtgtgaggaagtgcgggcccggattctatggcgatcaggagatgggagagtgcgagagttgccaccgggcctgcgaaacatgcaccgggcctggacatgacgaatgcagtagttgtcaggaagggctgcagctgctgcggggtatgtgcgtgcacgccactaagacccaggaagaaggcaagttctggaacgatatactcagaaagcttcaaccttgtcactccagttgcaagacctgtaatgggtccgccacactatgtacatcgtgccccaagggtgcataccttctcgcccaagcttgcgtgagcagctgtcctcagggaacatggccctctgtacggagtgggagttgcgaaaactgtaccgaggcgtgtgccatctgttcaggggctgacctttgcaagaagtgccagatgcaaccaggtcaccccctcttcctccacgagggcagatgttattcgaaatgtccagaggggtcctatgctgaggacggaatctgcgagagatgctcctcaccatgtagaacctgtgagggtaatgcaaccaactgccacagctgtgaaggggggcatgtattgcatcatggcgtgtgtcaggaaaattgtcccgagcggcacgtagcggttaaaggcgtgtgtaagcactgtcccgagatgtgtcaagactgcatacatgagaaaacctgtaaagaatgcacacccgagttctttctgcacgacgatatgtgtcatcagtcatgccctagaggcttttacgccgattccagacactgtgtgccatgccacaaagactgtctagagtgcagtggccccaaagctgatgattgcgagctctgtctggagtcatcttgggtcctctatgacggtctgtgtttggaggagtgtccagccggaacctactacgagaaagagacaaaggaatgccgggattgtcacaagtcatgtttaacttgctcaagcagcggcacctgtactacatgccagaagggacttatcatgaaccccagggggtcctgtatggcaaatgagaagtgttcgccaagcgaatattgggacgaggacgcccccggttgtaaaccctgccacgttaagtgctttcactgcatgggtcctgccgaggaccaatgtcagacctgtcctatgaattccctcctgttgaacaccacctgcgtgaaggactgccctgaggggtactacgctgacgaagattccaaccgatgtgcccactgccatagctcctgtaggacctgcgagggtagacattccaggcagtgtcacagctgcaggcccgggtggttccagttgggtaaggaatgcctcttacaatgtagggaggggtactatgccgacaactccacgggcaggtgtgaaagatgcaaccggtcctgcaagggatgtcaagggccccggcctacagattgtttgtcttgcgacagattttttttcctcttgagatcaaaaggtgaatgtcatcgctcatgtccagaccactattacgtggagcagtccactcagacttgcgagcgctgtcatcccacatgcgatcagtgcaaaggcaagggcgcgttgaattgcctttcttgcgtgtggtcgtaccatctcatgggaggcatctgcacgtccgattgccttgtcggagaatatagagtgggcgagggagaaaagttcaactgcgaaaaatgtcacgagagctgcatggagtgcaagggaccaggagctaagaattgcaccctgtgtccggcaaatctggtgctgcacatggacgattctcattgtctgcattgttgcaatacaagcgatcccccgagcgcccaggagtgctgcgactgccaagacactacagacgaatgcatactgcgtaccagcaaagtgcgcccagcaaccgagcacttcaagactgctctttttatcacctcttcaatgatgctggtgctcctcctgggcgctgccgtggtggtttggaaaaagtctcgcgggagggtgcagcctgccgccaaagcaggttacgagaaacttgccgatccaaataagtcctactcctcttacaaaagctcctatagggaaagcactagtttcgaagaagatcaggtaattgagtaccgggacagggactatgacgaagacgacgacgatgacatcgtttacatgggacaggatggcacggtctatagaaaattcaaatatggcctccttgacgatgacgatatcgacgaactggagtatgatgatgagtcgtactcctactaccagtag

SEQ ID NO: 130171 - DNA, 1497 bp, synthetic construct
  misc_feature 1..1497: note = Description of Artificial Sequence: Synthetic coding sequence
  source 1..1497: mol_type = other DNA
atttggaatgtccaccattgcggtgacaaaaattcgagatgtcgtagcgagatgaacgtccaggctgcatggaagcgcggatataccggtaagaacgtcgtcgtgacgatcctcgacgacggaatcgagagaaaccatcctgacctggctccaaattatgacagctatgcctcctacgatgtcaacgggaatgattacgaccccagtccccggtatgacgcatcgaacgagaataaacatgggacccgttgcgccggcgaggtggccgcctccgccaataacagctattgcattgtgggaatagcctacaacgcaaaaatcggcggcatccgcatgttggatggggacgtcacggacgtggtcgaagccaagtctcttgggatccggcccaattatattgatatctactctgctagttggggccctgatgatgatggcaagactgtagacggcccaggcaggttggctaaacaggcattcgagtacggcataaaaaagggaagacagggcttaggctctatcttcgtctgggcctcaggaaacggcggacgagaaggtgactattgttcttgtgacggttatacaaactctatatatacaataagcgtctccagcgccaccgagaatggttacaagccatggtacctcgaagaatgcgcctccacattagcgaccacctactcttctggggccttttatgaacggaaaatagtgaccaccgacttgcgtcagcgctgcaccgatggtcatacaggcaccagcgtgtcagcgcctatggttgccggcatcattgctctggccctcgaagccaacagccagcttacatggcgggacgttcaacacttgctagtgaaaacgagtcgacctgcacacctgaaagcgtcggattggaaggtgaacggggccggacacaaggtgtcacatttttatgggtttgggctggttgacgcggaggctctcgtcgttgaagcgaagaaatggacggcggtcccttcccagcacatgtgtgttgcagcatccgacaagcggccacggagtataccacttgtacaagtactgaggaccaccgccctgaccagtgcctgcgccgagcactccgaccaaagagtagtgtacctcgagcatgtggtggttagaacaagcatcagtcatccacgtagaggagatttgcaaatctatcttgtgtctccgtccggcactaaatcacagctgcttgcaaaaagattactggacctgagcaatgaagggtttacaaattgggagttcatgaccgttcactgttggggagaaaaagccgagggacagtggacgctggagatccaggaccttccgagccaggtgagaaaccccgagaaacagggagacctggagacgccagtagccaaccaattaaccactgaggagcgattcgtctcaaccctgtccattctttttcactggagtgtgtacttgagctggtcacaataccacatagttctgattactgtagccctatag

SEQ ID NO: 130172 - DNA, 1956 bp, synthetic construct
  misc_feature 1..1956: note = Description of Artificial Sequence: Synthetic coding sequence
  source 1..1956: mol_type = other DNA
atgcctcccagagccccacctgcaccaggacctcgaccgcccccccgtgccgcagcagctaccgacactgcggccggtgctggcggtgcgggcggtgcgggtggcgctggaggccctgggttcagacccctggccccgcgcccctggcggtggttgctcctgctggctctgccggccgcctgcagcccacccccacgacccgtgtacacaaaccattgggccgtgcaagtgctgggaggccccgccgaggccgacagagttgccgctgctcatggttacctgaacctaggccaaattggcaacctggaggactactaccacttttatcactcgaaaactttcaagcggtccacactctcctccaggggccctcacacatttctaagaatggatcctcaagtcaagtggctgcagcagcaggaggtgaaacgtcgcgtcaagagacaggttcggtcggatccccaggccttgtactttaatgacccgatctggagcaacatgtggtatcttcactgcggagacaaaaattcgcggtgcagatcagagatgaacgttcaggctgcatggaaacgaggctatacagggaaaaacgtcgtggtgacaatactggacgacggaattgagagaaaccatcctgacttggcccctaattacgacagctatgcctcctacgacgtgaacggaaacgactacgacccatctccccgatacgacgcctcaaacgagaataaacatggaacacgatgcgccggcgaagttgcagcttcagcaaacaattcgtactgtatcgtgggcattgcctacaacgcgaagattgggggaattaggatgttggatggcgacgtgacggacgtggtggaggccaaatccctgggaatacggcctaattatattgacatttactccgctagctgggggccagatgatgatggcaagacagtagatggtcccggccgcctggctaaacaggctttcgagtacggtatcaagaagggcaggcagggcttaggttctatttttgtgtgggcctctggcaatggaggaagggagggcgactactgctcctgtgatggatataccaactctatctatacaatttccgtgagcagcgcaacagagaacggatacaagccatggtaccttgaggagtgcgcctccacgttggcaactacttatagctctggtgctttctacgaaaggaagatcgtgaccaccgacctgagacaaagatgtaccgacggccacaccgggactagcgtgtccgctcctatggtcgctggaatcattgcattggccctggaagcaaactctcagctcacctggcgcgacgtacagcacctgttagtgaagacttccagacctgctcatctgaaagctagtgattggaaggtcaacggtgccggacataaagttagccacttttacggcttcggactggttgatgcggaagcccttgttgtggaggccaagaaatggaccgcagtgccttcccagcacatgtgcgtggctgcgtctgataagagacctaggtccatccctctcgtacaggtgctccgcacaacagctctgacaagcgcttgtgcagaacacagcgaccagcgggtcgtctacctcgagcacgtggtagtaagaaccagcatatcccatcccagacgcggtgatctacagatatacctcgtgtctccgtccggaacgaagtctcagctgcttgcgaaaaggcttttggatttaagtaacgaaggatttactaattgggagtttatgacagtgcattgttggggcgaaaaagctgaaggacaatggacccttgaaatccaagatctgccatcccaagtgcgtaatcctgagaaacagggggatctagaaactcctgttgctaaccaactcaccactgaggaaagggagccaggtctaaagcacgttttccggtggcaaatcgagcaggaattgtggtag

SEQ ID NO: 130173 - DNA, 2907 bp, synthetic construct
  misc_feature 1..2907: note = Description of Artificial Sequence: Synthetic coding sequence
  source 1..2907: mol_type = other DNA
atgccacctcgagccccaccagcccccgggccccgtcccccaccaagggccgccgccgcgaccgacaccgcagcgggcgccggcggtgccggcggggccggaggggccggaggaccagggtttcggcctcttgcaccacgtccatggcgttggttacttctgctggcactcccagccgcctgttcacctcctcccagacctgtgtatacaaatcattgggctgtccaagtactgggcggacctgccgaggctgaccgggtggcagctgctcatgggtacctcaaccttgggcaaataggcaatctcgaagactactaccacttttaccattctaagacctttaaacggagcacccttagcagcaggggccctcatacgtttctgagaatggacccacaggtgaaatggctgcagcagcaggaagtgaagaggcgggtaaaacgacaagtccgttctgatccacaggcgctctacttcaacgaccctatttggtctaatatgtggtacctgcattgtggcgataaaaacagcagatgcagaagcgagatgaacgtccaggccgcctggaaaaggggctacacaggaaagaatgtggtggtcacaatcttagatgatggcattgagagaaaccatcccgatctggcaccaaattacgacagttatgcctcttacgacgtgaacgggaacgattacgacccaagcccccggtacgacgcctctaacgaaaacaagcatgggacccgctgcgctggggaagtcgcagcaagcgctaataacagctactgcatcgttggcattgcatataacgccaaaatcggcggaatcagaatgttggatggtgatgtgaccgatgtcgtggaagccaagtccttgggaatcagaccaaactacattgacatctactccgcgtcttggggccctgatgatgacgggaagaccgttgacgggcctggacgattggctaagcaagcatttgagtatggcatcaagaagggccgccaggggctgggtagtatcttcgtgtgggccagcggcaacggagggagagagggggactattgtagctgcgacggatacaccaattcgatctacactataagtgttagtagcgcgacagagaatgggtataagccctggtacctagaggaatgcgcttccaccttggccactacctactcttcgggcgctttttacgagcgcaaaattgtcactacagacctgcgccagagatgcacagacggtcacacggggacctcggtgagcgcccctatggtcgcgggaatcatcgcccttgctctcgaagcgaatagccagctgacttggcgggacgttcagcacctgttggtaaagactagtcggccagcacacctcaaggcctccgactggaaagtcaatggtgcagggcacaaggttagtcatttctacgggttcggcttggttgacgctgaggccctggtggtggaagcaaaaaaatggaccgctgttccatcccaacacatgtgcgtggccgctagcgacaagcgccctcggtccattcccctggtgcaggtgctccggaccaccgcattaacctcggcatgcgccgagcattcagatcagagagtcgtgtatttggaacatgtggttgtgagaacatctattagtcaccctaggaggggggaccttcagatatatcttgtcagtccctcagggacaaaaagccaactgcttgccaagagattactggacctgagcaatgaaggctttacaaattgggagttcatgaccgtgcattgctggggagagaaggctgagggacaatggaccctcgagattcaggatcttccttctcaggttagaaaccctgaaaagcagggtaagttgaaggaatggagtctgattctgtatggaactgccgaacacccttatcacaccttctccgcacatcagtctcggtctaggatgctcgagttgtccgctcccgagctcgagccccccaaggccgccctgtctccttctcaggtggaggtgcccgaggacgaagaagattatacggcccagtctaccccgggctccgccaatattctccagacctctgtgtgccacccagaatgcggtgacaaggggtgcgacgggcccaatgcagaccagtgcttgaattgtgtgcacttcagcctcggatccgtgaaaacgtcacgaaaatgcgtctccgtgtgccctctcggttactttggagacacagcggctcgccgatgtagacggtgccacaaaggatgcgagacctgctcctccagagcagccacccagtgcctttcgtgtcggcgtggtttttaccaccatcaggagatgaacacatgtgttacactgtgcccggcaggcttctatgctgacgagagtcagaaaaactgtctgaagtgtcatccatcctgtaaaaagtgtgtggatgagcctgagaaatgcacggtatgcaaggaaggattttccctcgccaggggaagctgcataccagactgcgagcccggaacatactttgactctgaattaatcaggtgtggcgagtgccatcacacttgtggcacttgcgtcggtcctggtcgagaggaatgcatccactgcgctaaaaattttcacttccatgactggaagtgtgtccctgcatgcggggagggattttaccccgaagagatgcctgggctgccgcataaggtatgcagacgttgtgatgagaattgcttatcctgcgcaggttcctccaggaattgtagccgctgcaagacgggatttactcagttgggaaccagttgcatcacaaatcatacttgtagtaatgctgatgagaccttctgcgagatggtaaaatcaaatcgcttgtgcgaaaggaaactctttatccagttctgctgtagaacttgtctgctcgccggctag

SEQ ID NO: 130174 - DNA, 2868 bp, synthetic construct
  misc_feature 1..2868: note = Description of Artificial Sequence: Synthetic coding sequence
  source 1..2868: mol_type = other DNA
atgccgcccagagccccaccagctcctggcccgagaccccccccgagagctgctgccgccacagacaccgccgcaggcgcgggtggcgcaggtggggccgggggagctgggggcccggggttccgacctctcgcgcccaggccctggcgatggctgctgctccttgccctgcctgctgcttgcagtcccccgccgcgccctgtatatactaaccactgggcggttcaggtgctgggtggcccggcagaagccgatagagtcgctgcagcgcatgggtacctcaatctgggtcagattggaaatctggaggactactatcacttctaccacagcaaaaccttcaagagatccaccctctcttcccgcggaccccacaccttcctgaggatggacccacaggtgaaatggctgcagcaacaagaggtcaagcggagggtcaagaggcaggtgcggtctgaccctcaggccctttattttaacgatcccatctggagtaacatgtggtatctccactgtggagacaagaactcgagatgccggagtgagatgaacgttcaggccgcctggaagcggggatacacgggcaagaacgtcgtggttacgatcctggatgacggtattgaaagaaaccatcccgatttggcgccaaattacgatagttatgcaagctatgatgtgaatggaaatgactacgatccttcgcctcgctatgatgcatctaacgagaataaacacggcacccgctgtgccggcgaggttgctgcatcagctaacaatagctattgcatagtgggaatcgcctataacgccaaaattggcgggatccgcatgctggatggcgacgtgacagatgtcgtcgaggccaagagtcttggcatcagacccaattatattgatatctactcagccagttgggggcccgacgacgacggaaagaccgtggatggtcctgggcgattggccaaacaagccttcgagtatgggatcaaaaaaggcaggcaggggctgggctctatcttcgtgtgggctagtgggaacgggggaagggaaggcgactattgtagttgcgatggctatacaaacagcatttatacaataagtgtgagttctgccactgagaacggctataagccgtggtacctggaagaatgtgcctctactctggccactacatacagctcaggggccttctacgaacggaaaatcgtcactaccgacctgagacagcgttgcacagatggtcatacaggcacttccgtctcggccccaatggtagccgggattatcgccttagcactagaagccaattctcagctgacgtggagggatgtgcaacatctcctggtgaagacctccagacccgcgcatctcaaagccagcgattggaaggtgaacggggcagggcacaaggtctcacatttttacggatttgggctagttgacgcagaagccctggtggtcgaagctaagaagtggactgcagtcccgtcccagcacatgtgtgtggccgcaagtgacaagcgcccgagaagtatccctctagtacaggtcctccgcacgaccgcattgacctccgcatgcgcagaacactctgaccagagggttgtgtatctagagcatgtggttgtgcgcacctcaatctcgcaccctcggaggggtgacctccagatctacttggtttctccatcagggacaaagtcccagctcctcgccaaacggctcctcgacttaagtaatgaaggatttacaaactgggagttcatgacagtccactgttggggtgagaaagccgagggccagtggacgctcgaaatccaggatctcccaagccaggttcggaaccctgaaaaacagggaaagctgaaagagtggtcacttatattgtacggaaccgctgagcacccttatcacacattctccgcacaccaaagcaggtctaggatgttggaactgtctgcacctgagttggagccccccaaagctgcgctcagtccttctcaagtcgaagtaccggaagatgaagaagattacacaggggtttgccaccccgagtgcggggacaagggttgcgatggacctaatgcagatcagtgcctgaactgcgtacatttttctctgggatccgtaaaaacatcccgtaaatgtgtgtccgtttgccctctggggtacttcggcgacactgccgccagaagatgcagaaggtgccataagggctgcgagacctgttcttctcgggctgctacacagtgcctgtcctgccggcggggattctaccatcaccaggagatgaatacctgtgttaccctttgccccgcaggcttctatgcagatgaatctcagaagaactgtctcaaatgtcacccatcttgtaaaaaatgcgttgatgaacccgaaaaatgcaccgtctgcaaagaaggcttctctctcgccagagggtcctgtatcccagattgcgagcccgggacatatttcgacagcgagttaatccggtgcggggaatgccaccatacatgcggcacctgcgtgggcccaggccgcgaggagtgcatccattgtgccaaaaatttccattttcacgactggaagtgtgtgcctgcgtgtggcgaagggttttatcccgaggagatgcctgggctgccccataaagtttgtcgaaggtgcgacgagaactgccttagttgtgctggttcctcccggaattgttcccggtgtaagacaggattcacgcagcttggcacctcttgcatcactaaccacacctgttctaacgccgatgagacattttgcgaaatggtgaagagtaacagattatgcgagcgcaaactatttatacagttctgttgcaggacatgtctcctcgccgggtag

SEQ ID NO: 130175 - DNA, 1869 bp, synthetic construct
  misc_feature 1..1869: note = Description of Artificial Sequence: Synthetic coding sequence
  source 1..1869: mol_type = other DNA
atgccacccagagctcctcctgcccccggccctcgtcctcctccgagagcagctgccgccacagacacggctgcaggggcggggggggctgggggggcaggtggtgctggcgggcccgggttccgaccactggcacccaggccttggaggtggctcttgttacttgctctgccagccgcttgttccgcccccccgagacctgtctatacaaaccactgggctgtgcaggtgctgggtgggccggccgaagcagacagagtggctgcagcccacggctacctaaatctgggccaaattgggaatcttgaagactattaccacttttaccacagtaaaacctttaagcggtccactctgtctagccgggggcctcatacctttctgcggatggacccgcaagtgaagtggttacaacagcaagaagtcaaaaggagagtgaaaagacaggtacggagcgatccacaagccctctatttcaacgaccctatttggtcaaacatgtggtacctgcactgtggggataagaattcaagatgtagatccgaaatgaatgtgcaggctgcctggaagagaggttataccggaaagaatgtggtagtgacgattttagatgacggcatagaacgcaatcaccccgatctggcaccaaactatgactcatatgctagctatgacgtcaacgggaacgactatgacccttcacctcgctacgacgcatccaacgagaataaacacggcactcggtgtgcgggagaggtcgcagcatcggctaacaactcatactgtatcgtgggtatcgcatacaatgccaagatcgggggaattagaatgctggacggtgacgtaacagatgttgtagaggctaagagtctgggcatccgccctaactacattgatatttactcggctagttgggggccggacgacgatgggaaaaccgtggacgggcctggaagactcgcaaagcaggcgttcgagtacggtataaaaaagggaagacaagggctcgggtcaattttcgtgtgggcctccgggaacggggggcgggagggggactattgttcctgcgatggctataccaactccatatacactatcagtgtgagtagcgctacagaaaatggctacaagccctggtacttggaagagtgcgcctccactttggctactacctactcctcgggcgcgttctacgagcggaagatcgtgactactgacctgagacagaggtgtactgatggtcacaccggcacttccgtgtcggcgcccatggtggctggaatcatcgcgcttgccctggaggccaattcccagctgacatggagggacgtgcagcaccttctggtaaaaactagccggcccgcacatttaaaggcctcagactggaaggtcaacggcgccgggcataaggtgtcccacttttacgggtttggcctcgtcgacgcggaggccctcgtagttgaggccaaaaagtggactgctgtcccatcacagcatatgtgtgtggcggcctccgataagaggccacgatccatacccctcgtccaagtgttgaggaccacagcgctgacatcggcctgtgcagagcacagcgaccagcgagtggtgtacttggagcatgttgtcgtgaggactagtatttcacacccacggagaggcgatctccagatttacttagtatctccaagtggcaccaaaagccagctgctggcaaagcggcttctcgatctgtcaaatgaaggttttacgaactgggagtttatgactgttcactgttggggcgagaaggccgaggggcaatggaccctggagatacaggacctgccatcccaggtaaggaatccagaaaaacagggaaacctggactag

SEQ ID NO: 130176 - DNA, 1584 bp, synthetic construct
  misc_feature 1..1584: note = Description of Artificial Sequence: Synthetic coding sequence
  source 1..1584: mol_type = other DNA
atgtatgcactcttcttattggcatctctgctgggggccgcgcttgcaggaccagttttgggactgaaggagtgtacccgcgggtctgcagtgtggtgccagaacgtgaaaaccgcgagtgactgcggggccgtgaagcactgcctgcagacggtctggaacaagccaacggtgaagtcattgccctgcgacatctgtaaagacgtggtgactgccgcaggagatatgctaaaggataacgcaacggaagaggagatacttgtgtatctggaaaaaacctgcgattggctgcccaaacccaacatgagtgccagttgtaaggagatcgtggactcatacctgccggtaatcctggacatcataaagggcgaaatgtcacgtcctggcgaggtgtgtagcgctctgaacctgtgtgagtcgctgcagaagcatttggccgagcttaatcatcagaagcagctggaatctaacaagattcccgagctcgacatgacggaagtagtagcccccttcatggccaatataccactgctgctctacccacaggatggacctcgtagcaaaccacaaccgaaggataatggtgatgtttgtcaggactgcatccagatggtcaccgacattcagaccgccgtgcgcaccaattctacctttgtccaggctttggtggagcacgttaaagaggagtgcgatagactaggtcccgggatggccgacatttgcaagaactacatcagtcagtacagcgagatcgccatccagatgatgatgcacatgtcagctgaacagccaaaagagatctgcgctctcgtggggttctgcgatgaagttaaagagatgcccatgcaaaccctcgtgcccgccaaggttgcaagtaaaaacgtgatcccagctctcgaattagtggagccaatcaagaagcatgaggtgccagcgaagtccgatgtttactgtgaggtctgcgaattcttggttaaggaagttacaaagctcattgataacaataaaacggagaaggaaatacttgacgcatttgataaaatgtgtagcaagttacccaagtctctgagcgaggagtgtcaggaagtggtagatacctatggttcatctatcttgagtatcctcctcgaagaggtgtcccccgagcttgtttgcagtatgctgcacctctgctccggaacacgcttgccagccctgaccgtccacgttacacagcccaaagacggcgggttctgtgaagtctgtaagaaactagtcggatatctcgaccgtaacctcgaaaaaaacagtactaaacaggaaattctggcagcactagaaaaaggttgctcctttctccctgacccctatcaaaaacagtgtgaccaattcgtcgccgaatatgagcccgtgctcatagagatcctggtcgaggtgatggacccctcattcgtatgcctgaagataggggcctgtccatctgcccacaagcccctgctggggactgagaaatgcatttggggaccctcttactggtgccaaaacactgaaaccgctgctcagtgcaacgccgtcgaacattgcaaacgacatgtctggaactag

SEQ ID NO: 130177 - DNA, 1680 bp, synthetic construct
  misc_feature 1..1680: note = Description of Artificial Sequence: Synthetic coding sequence
  source 1..1680: mol_type = other DNA
atgtacgctctgttcctgctggccagtctgctgggggccgccctggcgggacccgttcttggcctaaaagaatgcacaaggggcagcgctgtttggtgtcagaacgtaaagaccgccagcgactgtggagcggttaagcattgcctgcaaaccgtctggaataaacccaccgtgaagagtcttccatgcgatatttgcaaagacgtcgttaccgcagccggcgatatgttgaaagataatgccactgaagaggagattctggtgtatttggagaagacctgtgattggctcccaaaaccaaatatgagcgcctcctgtaaagaaatcgtcgattcgtatttaccggtgattcttgacataatcaagggggaaatgtcgcgccctggcgaggtgtgttcagccctcaatctttgtgaatctctgcagaagcacctcgctgaattgaaccaccagaagcagcttgagtcaaacaagattcctgaactggatatgacagaggtcgtggcaccattcatggcaaacatcccactgctcctgtacccacaggatggcccccggtctaagccccagccaaaagataatggggacgtctgtcaggactgcatacagatggtcaccgacattcagaccgctgtgcgcactaactcaactttcgtacaagctctggttgagcacgttaaggaggaatgcgaccgcctgggccctggcatggccgacatatgtaagaactatataagccagtattcagagatagcaatccagatgatgatgcacatgcagcctaaagagatctgcgccttggttggcttttgcgatgaggtaaaagaaatgccaatgcagaccctcgttcctgccaaagtggccagtaagaacgtgattcctgccctggagctcgtagagcccatcaaaaagcacgaggtccccgcgaagtctgatgtctactgcgaggtctgcgagttcttagttaaggaggtgacaaagctaatcgataataataagacagaaaaggagatcctcgatgcctttgacaaaatgtgctctaagttgcccaagtccctctccgaggaatgccaagaggtggtggacacatacgggagtagcatcctgagcattcttctcgaggaagttagtcccgagcttgtgtgcagcatgctccatctttgctccggcactaggctgccagcactgacagtgcatgtgacccagcccaaagacggaggcttctgtgaggtgtgcaaaaagctcgtcgggtacctggaccggaacctagaaaagaattccacaaaacaagagattctggcagccctagaaaaaggatgtagcttcctgcccgacccctatcaaaagcagtgtgatcagtttgtggcagagtatgagcctgtgctgattgagattctcgttgaagtgatggacccgagtttcgtctgcctgaagatcggcgcctgcccatccgcacacaagcctcttctgggtacagaaaaatgtatatggggtccctcatactggtgtcagaatactgaaacagccgcacagtgtaatgccgtggagcactgtaagaggcatgtgtggatcgggtgttggggagtaggcgtgggatcctgcctgtggcctacctgggctccaacattactgtcgacctcaggttgccaggagaccgcaagcaaggcctccaggacctag

SEQ ID NO: 130178 - DNA, 723 bp, synthetic construct
  misc_feature 1..723: note = Description of Artificial Sequence: Synthetic coding sequence
  source 1..723: mol_type = other DNA
atgtacgccctgttcctgttggcatcccttcttggcgcagcgctagcgggacccgtcctgggcctcaaggagtgcacacggggatcagcagtgtggtgccaaaatgttaagacagcgtctgactgtggggccgtcaagcactgtcttcaaacggtctggaataagcctacagttaagtcactgccgtgtgacatctgcaaagatgtggtgaccgcggccggtgatatgttgaaagataacgccaccgaggaggagatccttgtgtatctcgaggtgtcacctgagttagtctgcagcatgttgcatctttgctctggcactcggcttcctgctttgaccgtgcacgttacacaacccaaagacggaggcttctgcgaggtgtgcaagaagctggtgggataccttgacagaaacctcgagaagaattctaccaagcaggagatcctggccgctttggagaaagggtgcagtttcctacctgacccatatcagaagcagtgcgaccagtttgtggcagagtatgagcctgtgttgattgagatccttgtagaggttatggatccaagctttgtgtgcttaaaaatcggagcttgcccatctgcgcataaacccttattgggaactgagaaatgcatttggggaccctcttattggtgtcagaatactgagacggccgcccagtgcaatgccgtggaacactgtaagcggcacgtgtggaattag

SEQ ID NO: 130179 - DNA, 1581 bp, synthetic construct
  misc_feature 1..1581: note = Description of Artificial Sequence: Synthetic coding sequence
  source 1..1581: mol_type = other DNA
atgtacgctctatttttgcttgcctctctgctaggtgctgcacttgcgggtcccgtgctggggctgaaggaatgtacccggggcagcgctgtttggtgccagaacgttaagaccgcctcagactgtggcgcagtcaagcattgccttcaaactgtatggaacaagccaaccgtcaaaagccttccttgtgatatatgtaaagacgttgtgactgccgctggggatatgttgaaggataatgctacagaggaggagatcctagtttacttagaaaaaacatgcgattggctgccaaagccaaacatgtccgcgtcttgcaaggagattgtggatagttacttaccagtgattctcgatattatcaagggtgaaatgagcagacctggtgaggtctgcagcgcacttaatctgtgcgagtcactccagaaacacttggctgaactgaaccatcagaagcagcttgagtcaaataaaattcctgagctggacatgactgaagtggtagcaccctttatggccaacatccctcttctgctgtatccccaggatggtcctaggagtaaaccccaaccgaaggacaatggggacgtgtgtcaagactgcatccaaatggtgacagacattcaaactgcagtgagaactaactctacattcgtccaagccctggttgagcatgtgaaggaggagtgcgacagacttgggcccgggatggcggacatctgtaagaactacatcagccagtacagtgagattgccatacagatgatgatgcacatgttacagcaacccaaggagatctgtgccctggtcggattctgcgatgaagttaaggagatgcccatgcaaacactggtgccggcaaaggtggcttccaagaacgtaatcccagcgctggagttggtggaacccatcaagaagcatgaagtgccagccaaatccgacgtgtactgtgaagtgtgcgagttccttgtcaaagaggttaccaagctcatagacaataataaaacagagaaagagattcttgacgccttcgacaagatgtgctcaaagctccctaaaagcctgagcgaggagtgccaggaagtcgttgacacgtacgggtccagcatcctgtccatcctgctggaagaagtgtctcctgagctcgtttgttctatgctgcacctctgttccggtacccggctcccagctttaaccgtgcatgttacccaacctaaagacggggggttttgtgaagtatgtaagaagctggtagggtatctggaccgcaatttagaaaaaaactcaaccaagcaggagatcctggccgccttagaaaaggggtgctcttttttgcctgatccttaccagaaacagtgtgatcagtttgtggccgaatatgagcctgtgttgattgagattttggtggaagtaatggatccatcgttcgtctgtctcaagatcggagcatgcccaagtgcccataaaccgctccttggaaccgaaaagtgtatctgggggccgagctattggtgtcagaacaccgaaactgccgctcagtgtaatgccgtggaacactgcaagagacacgtgtggaactag

SEQ ID NO: 130180 - DNA, 1575 bp, synthetic construct
  misc_feature 1..1575: note = Description of Artificial Sequence: Synthetic coding sequence
  source 1..1575: mol_type = other DNA
atgtatgccctgtttctcctggcttcactgctgggggccgctctcgcaggacctgtgcttggtctgaaagagtgcacaagggggagcgctgtatggtgtcagaacgttaagacagccagcgattgtggagccgtgaagcattgcctccagactgtgtggaataagccaacagtgaagtcattgccctgtgacatttgcaaagacgttgtcacggcagccggcgatatgctcaaagacaatgcaacagaggaggagattctggtctacttagaaaaaacgtgcgattggctgccaaagcccaacatgagtgcctcctgtaaagagattgtggactcctacctgcccgtcattctagacattatcaagggagagatgagccggcccggtgaagtgtgttccgcattaaacttatgtgaaagtcttcaaaagcatttggccgagctcaaccatcagaaacagctggagtcaaacaaaatacccgaactagacatgactgaagtagtggcgcctttcatggcaaatatcccacttctgttataccctcaggatggccctcgcagcaaaccccagcctaaggataacggtgacgtttgccaggattgcattcagatggtgactgacatccagacggcagttagaactaacagcacctttgtgcaggcactggtagaacacgtgaaggaagagtgcgatagactaggccccggcatggccgacatctgcaagaactatatctcgcagtactctgaaatcgctatccagatgatgatgcacatgcaacccaaggagatatgcgctctggtgggcttctgtgatgaggtgaaagagatgccaatgcagacgttggtgccggcgaaggtcgcctcaaagaatgtgattcctgccctggaacttgtggagcctataaagaaacacgaggtgccagccaagtctgatgtctactgtgaagtgtgtgagtttctggtgaaagaggtgaccaagctgatcgacaacaacaagacggagaaagaaattctcgatgctttcgataaaatgtgctctaagctccccaagtcactcagtgaagagtgtcaggaggtggtggacacctacggctctagtatcctatccattctcctggaggaagttagcccggaactggtgtgtagtatgctgcatctgtgctctggcactaggctcccagctctgaccgtgcacgtgactcagcccaaggatggggggttttgcgaggtgtgtaagaaactcgttggctatctggatcggaacctggagaagaacagcaccaagcaggagatcttggctgcactcgaaaagggctgttcgtttctgccagacccttatcagaagcagtgcgaccaattcgtcgcagagtacgaaccagtcctgatagagatattggtcgaggttatggacccctcttttgtgtgtctcaaaattggtgcttgtccttccgctcataagcccctgctggggactgagaaatgcatatggggccctagctattggtgtcaaaatacggagaccgcagcgcagtgcaatgcagtggagcattgtaaaagacatgtctggaattag

SEQ ID NO: 130181 - DNA, 1353 bp, synthetic construct
  misc_feature 1..1353: note = Description of Artificial Sequence: Synthetic coding sequence
  source 1..1353: mol_type = other DNA
atgctgaaagataatgccaccgaagaggaaatactggtgtatttggaaaagacctgtgattggcttcctaaacctaacatgagcgcaagctgtaaggagatcgtggactcctatttaccagtgatccttgatatcatcaaaggcgaaatgtctaggcccggcgaggtgtgttcggctctaaatttgtgcgagtccctgcagaaacacttggcagaactgaatcatcagaaacagctagagtccaataagataccagagttggatatgaccgaggtggtggcaccgtttatggccaacatccccctcttgctgtacccccaggacggcccacggagcaaacctcagccaaaagataatggcgacgtatgtcaggactgtattcagatggtgacggacatccaaacggcagtgcggaccaatagtactttcgttcaagccttagtcgagcacgtgaaggaggagtgcgatagactgggtcctgggatggcagacatttgtaagaactacatctcccaatattcagagattgccatacagatgatgatgcatatgcagcagcccaaggaaatttgtgccctggtggggttttgcgatgaggtcaaggagatgcctatgcaaacactggtgcccgccaaagttgcgagtaagaatgtgatacctgctcttgagttagtcgaaccaatcaaaaagcacgaggttcctgccaaatccgacgtctattgtgaggtctgcgagttcctcgtaaaagaggtaactaagctgattgataacaataaaacagaaaaagagattttagatgcattcgacaagatgtgctctaagctccctaagtctctctcagaagaatgccaagaagtagtcgacacatacggcagcagcatactcagcattcttttagaggaggtgagccccgagcttgtttgttctatgttacacctatgttccgggacacgactgcccgcactgacagtgcatgtaacacagcctaaggatggtgggttctgcgaggtgtgtaaaaagctcgtcgggtacctagacagaaatctggagaagaattccaccaaacaggagatcctcgctgctctcgagaaaggatgttcatttctgcctgacccttaccagaagcagtgtgatcagtttgttgccgaatatgagccggtcttaatcgagatcctggtggaagtgatggacccttcatttgtgtgcctcaagattggagcatgccctagtgcccataagcctttgctgggcacagagaagtgcatttggggccccagctactggtgtcagaacaccgagaccgccgcgcaatgcaacgctgtcgagcactgtaagcggcatgtctggaactag

SEQ ID NO: 130182 - DNA, 1593 bp, synthetic construct
  misc_feature 1..1593: note = Description of Artificial Sequence: Synthetic coding sequence
  source 1..1593: mol_type = other DNA
gacggagctatgtatgcattatttttgcttgcctctttgctgggtgctgcattagctggccccgttctaggtctcaaagagtgcacccgcgggtcggccgtatggtgccagaacgtaaaaacagcctcagactgcggggcagtcaagcattgcttacaaactgtgtggaacaaacccacagtcaagtcccttccttgcgatatttgtaaggatgtcgtcacagccgccggcgatatgctgaaggacaacgctaccgaggaggaaatcctcgtatatttggaaaaaacgtgcgattggctgccaaagcctaatatgagtgcaagttgtaaagagattgtggacagttatctgcctgttatactagatatcattaagggagagatgtctcgccccggtgaggtatgctcagcgctcaacctttgtgagtcgttacagaaacatctggccgagctaaatcaccaaaagcagctcgagtccaataagatcccagaactggacatgacggaggtagtggcaccttttatggctaatatcccactcctgctgtacccccaagacggtccccgtagcaagccccagcccaaggataacggagacgtgtgccaagattgcatacagatggtgacagacatccagaccgccgtaaggactaactccacattcgtgcaggccctggtcgaacacgtgaaggaggagtgcgaccgattaggccccggtatggctgacatctgcaaaaactatatcagccagtactccgagatcgcaattcagatgatgatgcacatgtcagctgagcagcctaaagagatctgcgccttggtcgggttctgcgacgaagtgaaggagatgcctatgcagaccctggtcccggccaaggtggccagtaaaaacgtgattcccgctttggaactggttgagcccatcaaaaagcacgaggtacctgctaagagcgatgtgtattgtgaagtttgcgagtttcttgtcaaggaagtcactaaactcattgacaataataaaaccgaaaaggaaatattagatgcctttgataagatgtgtagtaagcttccaaaatccctaagtgaggaatgccaagaagtggtggacacctatggatctagcatactgagcatcctgctggaggaggtgagccctgaactggtgtgttcgatgctgcatttatgctccggaacacggctacctgccctgactgttcacgtcacccagcccaaagatgggggcttttgtgaggtatgcaaaaaactggtgggttacctggatcggaatctcgagaagaatagtactaaacaggaaattctggcagcattagaaaaaggctgcagcttcttgcctgatccctatcagaagcagtgcgatcagtttgtggcagagtacgaacccgtgctcattgaaatcctggtcgaggtcatggacccatccttcgtgtgtctgaaaatcggcgcttgtccatcagctcataaaccactcttaggcactgaaaagtgtatctggggtccgagctattggtgtcaaaacactgagacggcagcccagtgtaacgccgtggagcactgtaaacgccatgtatggaattag

SEQ ID NO: 130183 - DNA, 2214 bp, synthetic construct
  misc_feature 1..2214: note = Description of Artificial Sequence: Synthetic coding sequence
  source 1..2214: mol_type = other DNA
atgccggatcacgatagtacagcgctgctgtccaggcaaacaaagcgccgaagagtcgatatcggggtgaagcgcaccgtgggaaccgccagcgcattcttcgctaaagctcgcgctacattcttctcagccatgaatccacaaggatccgagcaggacgtggagtactctgttgttcagcatgcagacggcgaaaagagcaacgtactgaggaaattacttaaacgcgcaaactcctatgaggacgctatgatgcctttcccaggcgccactattatttcacagctgctgaagaacaacatgaacaaaaacggcggcaccgagccgagcttccaagcttccggcctgagctccactgggtctgaagtgcaccaggaagacatttgcagcaactcatctagagacagcccccccgagtgtctgtccccctttggacgacccacaatgtcacagttcgacatggatcgattatgtgacgaacatctgcgggctaagcgcgctcgagtggagaacatcatcagagggatgagtcattccccctctgtagccctaagagggaatgaaaatgagagggagatggctccgcagtcagttagcccgcgcgaaagctatcgcgagaataaaagaaagcagaaactacctcagcagcagcagcagtcttttcagcaattggtgtccgctcggaaagaacagaaacgggaggagcgcaggcagctgaaacagcagctcgaggatatgcagaaacaactgcgccaactgcaagaaaagttctaccagatttatgattcaaccgactcagagaatgatgaggatggtaatctaagtgaagatagcatgcggagcgagattttggatgcgcgagcccaggattctgtggggcgatcggacaacgaaatgtgcgaactagatccgggccagtttatcgatagagcccgcgccttaatccgtgagcaggaaatggccgagaacaagccaaaacgggaaggaaataataaggaacgcgaccacggtccaaactcccttcagcccgaaggcaagcacctggctgaaacacttaagcaggaactgaataccgctatgagccaagtggtggacacagtagttaaggttttttccgctaagccgagtaggcaggtccctcaggtgtttccacccctccagataccacaggccagatttgctgtcaatggagaaaaccacaactttcacaccgcaaatcagcgcttacagtgctttggcgatgtgatcattcccaaccctctggatacgtttggcaacgtccagatggcctctagcacagaccagaccgaagccttgcctttggtcgtgcgaaaaaacagcagcgatcagagtgcatcaggcccagccgcaggtggacaccatcagcccttgcatcagtcccccctgtccgctaccaccggtttcaccactagtaccttcagacatccatttccgctcccccttatggcctatccttttcaatctcccctgggagccccaagtggatcgttttccggtaaagatagggccagtcctgagtccctggatcttacccgggacacaaccagtctgcggaccaagatgagctcccatcacttgagccaccatccttgtagcccggcccaccccccatccaccgccgagggattaagtttaagtctaataaaaagcgaatgtggcgacctccaggacatgtctgagatcagcccttacagtgggtcagccatgcaggaaggactctcacctaatcacctgaaaaaggccaagctgatgtttttttacactagatatccatccagcaacatgctcaagacctatttctctgatgtgaaattcaaccgatgtattacctctcagctcatcaagtggttttctaactttagagaattctactacatccaaatggagaaatacgcacggcaggccataaatgacggcgtgacaagcactgaagagctttccatcaccagagactgtgaactgtaccgcgcccttaatatgcactataataaagctaacgatttcgaggtgcctgagcgctttctggaggtcgcacagatcactctgagagagttttttaacgccattattgcaggtaaagatgtggacccctcttggaagaaagccatctataaggtgatttgtaagctcgattccgaggttcctgagatcttcaaatcgccgaattgcttgcaagaattgttgcacgaatag

SEQ ID NO: 130184 - DNA, 2031 bp, synthetic construct
  misc_feature 1..2031: note = Description of Artificial Sequence: Synthetic coding sequence
  source 1..2031: mol_type = other DNA
atgccagaccacgatagtactgccctgctttcaaggcagaccaaacgtaggcgggttgatatcggagttaaacggaccgtgggcacggccagcgcatttttcgcgaaggcccgggcaacctttttttccgccatgaatcctcaaggcagcgagcaggatgtcgagtacagcgtagtacagcacgctgatggagagaaaagtaacgtgcttaggaagctgctgaagagggcaaacagctacgaggatgcaatgatgccttttccaggggcaactatcattagtcagctgctgaagaacaatatgaataaaaacgggggcaccgagcccagctttcaagcaagcgggctctcgtctaccggctccgaggtccatcaggaagatatttgtagtaattcatcacgcgacagtccacccgaatgcctttctccttttgggaggcccacaatgtcacagtttgacatggaccgtctctgtgacgagcacctgagggcaaagcgcgcaagggtcgaaaacataatcagaggcatgtcccattcacccagtgtggcgcttcggggcaacgagaacgagagagaaatggccccacagagtgtgtctccacgcgagagttaccgggagaataagcgcaaacagaagctgccgcagcagcagcagcagagcttccagcagcttgtgtccgccaggaaggagcagaagcgggaagagaggcgccaattaaagcagcagcttgaagatatgcagaaacagctaagacaactccaggagaagttctatcaaatctacgactcgaccgacagcgagaatgatgaagatggaaatttatccgaagattccatgcggagcgaaattttggacgcaagggcacaggactcggtcgggcggtccgacaatgagatgtgtgagctggacccaggtcaattcatagaccgagcccgcgcgctgatccgggagcaggagatggccgagaacaagccaaaacgagagggaaacaacaaagagcgcgaccacggtcctaacagtttgcagccagagggaaaacacttggccgaaacactgaagcaggagctgaataccgccatgtcacaggtcgtggacactgttgtcaaggtgttcagcgccaagcccagccgccaggtccctcaggtctttccccctttgcagatccctcaggctcgatttgcagtcaatggagagaatcataacttccataccgccaatcagagactgcagtgctttggcgatgttatcatcccaaatccactagataccttcggaaacgttcaaatggcatcttccacggaccagacagaggcactgcccctggtggtacggaaaaacagtagcgatcagagcgctagcggtcccgcagcaggggggcatcatcaaccgttgcatcagtcaccacttagtgccacgactggttttactacctccacatttagacacccctttccgctgccactgatggcctaccctttccagtctccccttggcgctccctctggctcctttagtgggaaggaccgggccagcccggaaagcctggacctgacacgtgatacgacaagcctaagaacaaagatgagttcccaccatctttcacaccatccatgttctccagcgcacccgccttccacggccgagggcctttctctctctttaattaaatcagaatgtggagatttacaggacatgagcgagatctcaccatattcaggctctgctatgcaggaggggctgtcccccaatcatctgaaaaaggccaaacttatgtttttctatactaggtatccaagcagcaatatgctgaagacttacttctcggatgtaaaatttaaccggtgcatcacatctcagctgatcaagtggttcagtaatttcagagagttttattatatccagatggagaaatatgcccgccaggctattaatgacggagtgaccagcactgaggagttgtctattacgcgcgactgtgaattgtaccgtgctttaaacatgcattataacaaggctaacgacttcgagtag

SEQ ID NO: 130185 - DNA, 2214 bp, synthetic construct
  misc_feature 1..2214: note = Description of Artificial Sequence: Synthetic coding sequence
  source 1..2214: mol_type = other DNA
atgcccgatcacgactccacagcactgctgtcccgacaaacaaaaagacggcgagtggacattggagtgaagaggactgtcggaacagcttcagctttctttgcgaaggcgcgagctacgttcttctcagccatgaacccccagggcagcgaacaggacgtcgagtactctgtggtgcagcacgccgatggcgaaaagagcaatgttctgagaaagctgttgaaaagagcaaactcatacgaggacgcaatgatgccatttccaggggccaccataatatcacagctgctgaaaaataatatgaacaaaaatggcggcactgaaccgagcttccaggcaagtggtttaagctccaccggaagcgaggtccatcaggaggacatctgctctaattctagtagagattccccacctgagtgtctgagtccattcggtagacccaccatgtcgcagtttgacatggacagattgtgtgatgagcatcttagggctaaacgagctcgcgttgagaatatcatcagagggatgtctcactcaccctccgtggcgctcagggggaacgagaacgagcgcgaaatggcacctcagagtgtctccccccgtgagagctatcgcgaaaataagagaaaacagaagctccctcaacagcagcagcaatcttttcagcagctggtgtccgctcggaaagaacagaagagggaagagagacgtcagctcaagcagcagctggaagacatgcagaagcagctgaggcaattgcaagaaaaattctaccagatatacgatagtaccgattctgaaaatgatgaggacggaaatctttcagaagatagtatgagaagcgaaatcctcgacgctagagctcaggacagtgttggcaggagcgacaacgaaatgtgcgaattagatcctggccaattcatagatagagccagggcgctgatcagagagcaagagatggctgagaacaaacccaagagagagggcaataataaggagcgagaccacggacccaacagcttgcagccagagggcaagcacttagctgagaccctgaagcaggaactgaacacagccatgagccaagtcgtagatacggtggtcaaagtcttctcggcaaagcccagccggcaggtgccgcaggtgttccctccactccagataccacaagcccgcttcgccgtgaatggcgagaaccacaatttccataccgctaaccagaggctccaatgcttcggggatgtgatcattcctaatcctcttgatacattcggtaacgtgcagatggcatcttctaccgaccagaccgaggctctgcccctggtcgtccgcaagaatagttctgaccagagtgcctcggggcccgctgcgggaggtcaccaccagcccctccaccagagtcctctgtcagcgacgaccgggtttaccacatcaacgttccgacatccctttccactgccattaatggcctaccccttccagtcaccgcttggcgccccatctggttctttttctggtaaggatagggcctcacctgaaagtctggatttgacacgcgatacaacctccctgagaactaaaatgagctctcaccaccttagtcatcacccttgcagtccagcacatcctccgtctacagcagagggactgtcactttctctgatcaagtctgaatgtggggacctccaggatatgagtgaaatcagcccctatagcgggtccgcaatgcaggaaggactgtcacctaatcatttgaagaaggccaagctgatgttcttctatactcggtacccttcctccaacatgttaaagacttatttctccgatgtaaagttcaaccgctgtattacctcgcagctcattaagtggttttcaaacttccgcgaattctactatatacagatggaaaaatatgcccggcaggcgatcaatgacggggttacctctacagaggagttaagtattacccgcgattgtgagctgtatcgcgctctcaatatgcattataataaagcaaacgattttgaagtccctgaaaggttcctggaggtagcacagataactctgcgagagttttttaatgccattatcgcagggaaggatgtcgatccgagctggaaaaaggccatttataaagtgatctgtaaactggacagcgaagtgcccgaaatttttaaatcaccaaattgcctgcaggaacttctgcacgagtag

SEQ ID NO: 130186 - DNA, 693 bp, synthetic construct
  misc_feature 1..693: note = Description of Artificial Sequence: Synthetic coding sequence
  source 1..693: mol_type = other DNA
atgcccgaccacgattcaaccgcattactgagccgccagactaagcgcagacgggtagacatcggtgtgaaacgcaccgtcggcaccgctagcgctttttttgccaaggcccgtgccacattcttctcagcgatgaacccacaaggctcagagcaagacgttgaatatagtgtggttcagcacgctgatggagaaaagtccaacgtgctccgcaagctgttgaaacgcgcaaattcatatgaggatgcaatgatgccctttcccggagcaaccatcatctcccagctgctgaaaaacaatatgaacaaaaacggaggaactgagccttccttccaggcaagcgggctctcttcgacagggtccgaagtgcatcaggaggatatctgtagtaatagctcgagagattctccaccagagtgcctgtctccattcggacggcccaccatgtcgcagttcgacatggacaggctctgtgatgagcatctaagggcgaagagagcccgggtcgagaacatcattcggggcatgtctcattcaccttcggtcgccctcaggggcaacgagaacgagcgagaaatggcaccacagtcagtgtccccaagggaatcttaccgggagaataagaggaaacagaaacttcctcagcagcagcagcagtccttccagcagttggtgtcagccaggaaggaatag

SEQ ID NO: 130187 - DNA, 2214 bp, synthetic construct
  misc_feature 1..2214: note = Description of Artificial Sequence: Synthetic coding sequence
  source 1..2214: mol_type = other DNA
atgcccgatcacgacagcactgcattgctgtctcggcagactaaacggcgcagggttgatatcggagtgaaacgaactgtcggaactgcctctgcattttttgccaaagctagggccacattcttcagcgccatgaacccccagggatctgagcaagacgtggagtattcagtggttcagcatgcggacggtgagaagtcaaatgtgcttagaaagttactcaaaagggcgaattcgtacgaagatgctatgatgccattccccggcgctactatcatcagccagctgctcaagaacaatatgaataaaaatggcggtaccgagccttcctttcaggcttcaggactgtctagcacaggaagcgaggtccatcaggaagatatctgctctaattcctctcgggacagcccaccagaatgtctttctccctttgggcgccctaccatgagccagttcgacatggacagactttgcgatgaacacctgcgggccaaacgagctcgggtggagaacattatcagggggatgtcacactcacctagcgtcgccctgcgcggaaatgaaaacgagagagagatggcaccacagtccgtgtccccacgagagagttatcgcgaaaacaaacggaaacagaagttaccccaacagcagcagcagtccttccaacaattagtttccgctagaaaagagcaaaagagagaagagcgccgtcagctcaagcagcagttggaggacatgcagaagcagcttcgacagttgcaggaaaagttttaccaaatctatgactctaccgactccgaaaatgatgaggacggcaatctgtcggaggattcaatgagaagtgaaatcctagacgctagagcccaggattccgttggaaggtcagataacgagatgtgtgaactggaccctgggcagttcatcgaccgtgcgagagcgctcattagggaacaggagatggccgagaacaagccaaaacgtgagggaaataataaggaacgcgaccatgggcccaattctttgcagccagaggggaagcatcttgccgagacactgaaacaggaactgaacacagcgatgtcccaggttgtggatactgtggttaaagtgttttcagcaaagccgagccgacaggtgcctcaggtgttccccccgctgcaaattccccaggctcgattcgccgtgaacggagaaaatcacaattttcacacagctaatcaaaggctgcaatgctttggcgacgtgatcattcccaatccactggatacctttggaaacgtgcagatggcgtccagcaccgatcagacagaagcccttcctttagtggtgagaaagaatagttcagatcagagcgcatcgggacctgccgcaggtgggcaccaccagccacttcaccagagcccactaagcgccaccaccggtttcacaacttccacgtttaggcacccctttcccctccccctgatggcctacccattccaatcccctctcggcgcaccatccgggtccttctccggcaaggatagggcttcccctgaatcactggatttgacacgggacacgacctctttaaggaccaagatgagctcacatcacctcagccatcacccttgtagcccagcccatccaccgagcaccgcagaagggctgagtctcagcctcattaaatcagagtgtggcgatttgcaagacatgagtgagatctctccgtactctggttctgccatgcaggagggcctatcaccaaatcacctgaaaaaagccaaactcatgtttttttacacaaggtacccctcatctaatatgctgaaaacatacttctccgacgtcaaattcaatcgttgtatcaccagtcagctcatcaaatggtttagcaatttcagggagttctactacatacagatggagaagtacgcccgccaggccattaacgatggcgtgacctcaactgaagaactctccatcaccagggattgcgagctgtacagggctctgaacatgcattacaataaagcaaatgacttcgaagtgccggaaagatttctcgaagtcgcccagatcaccctgagagagttctttaacgccattattgcaggcaaggacgtcgacccctcctggaaaaaagctatttacaaggtgatctgcaaactcgattcagaggttcccgaaatattcaagagccctaactgcctccaggagctgttacacgagtag

SEQ ID NO: 130188 - DNA, 930 bp, synthetic construct
  misc_feature 1..930: note = Description of Artificial Sequence: Synthetic coding sequence
  source 1..930: mol_type = other DNA
atggccagctctacagaccaaacagaggctcttccacttgttgtgcgaaaaaacagtagtgaccagtctgcctccggtccagccgccgggggacatcatcagcccctccaccagagccctctatccgcaacgaccggttttactacaagtacctttagacaccccttccctctaccgctaatggcatacccatttcagagtccgctgggtgccccatctggatctttctctggaaaggatagagcctcacccgaatccctagaccttacccgagacaccacttctctccgcacaaaaatgagttcacaccatttatcccatcacccttgttcacccgctcacccccctagtacagccgaaggactttccctaagtctgattaaatcggagtgcggcgacctccaggacatgtctgaaatctccccttattcaggctctgctatgcaagagggcttatcccccaatcacctcaaaaaggccaagctgatgttcttctacactcgatatccctcctctaatatgctgaaaacctatttctcggacgtgaagttcaatcgctgtattacaagccaactgattaagtggttttccaactttagggagttctattatatccaaatggaaaagtatgcaagacaggccatcaacgatggcgttactagtactgaagaactaagcattaccagggactgcgaactttatagagccttaaatatgcattataataaggccaacgacttcgaggtaccagaacggttcctcgaagtggcacagatcacattacgggagttttttaacgcgataattgctggtaaagatgtcgatccttcatggaagaaagcaatttacaaggtgatctgtaagcttgacagcgaagtgcctgaaattttcaagtcacccaattgtttgcaggaactgttgcacgaatag

SEQ ID NO: 130189 - DNA, 1080 bp, synthetic construct
  misc_feature 1..1080: note = Description of Artificial Sequence: Synthetic coding sequence
  source 1..1080: mol_type = other DNA
atgaagtcacccttctatcgatgccaaaataccacatctgtggaaaaaggtaactcagcggtgatgggaggagtgcttttcagtaccgggctgttgggcaatctcctggcccttggactgctagcaagatccgggctgggttggtgcagtagaaggccactaaggccactgccttctgtgttttacatgcttgtctgtgggctaacggtaacagatcttttagggaagtgtctcctgtcgcctgtggtgctcgcagcctacgcacaaaaccgctctctccgcgtcctagcgcccgcactggacaatagcctatgtcaggctttcgcctttttcatgagtttcttcggcctgagttcaaccctgcagcttctggctatggctctagaatgctggttgtctctgggccaccctttcttctatcgacgacacattacacttcggctgggcgccctggtagcacctgtggtgagtgcattctctctggctttttgcgcgctccctttcatgggcttcggcaagttcgtgcagtactgccctgggacttggtgtttcattcagatggtgcacgaggaaggctccctgtccgttctgggatatagtgtactctacagtagtctcatggcccttttagtgctggccacagtactctgcaacctaggggcaatgaggaacctctatgcaatgcatcgcaggttgcagcgccacccacggtcttgtacacgcgactgtgccgaacctcgagccgatggtagggaagcgtccccacaaccactcgaggaacttgaccacctccttctgctagccctgatgaccgttttattcactatgtgcagcctacctgtcatatacagagcctattatggcgcattcaaggatgtgaaggaaaaaaatagaacttcagaagaggccgaggatttacgtgccctgagattcctgtccgtcattagtattgtcgatccgtggatctttattatttttagatcacctgtgtttcgcatattctttcacaagattttcatcagacccctgagatatcgttctaggtgttccaactctacaaacatggagagctcattatag

SEQ ID NO: 130190 - DNA, 8034 bp, synthetic construct
  misc_feature 1..8034: note = Description of Artificial Sequence: Synthetic coding sequence
  source 1..8034: mol_type = other DNA
atgagcacatgctgttggtgtactccaggaggggcgagcaccattgacttcctcaaacgctacgccagcaacacgcctagtggtgaatttcagaccgccgacgaagacttgtgctattgccttgagtgtgttgcagaataccacaaggctcgagatgagctccccttcttacacgaggtcttgtgggagcttgagactctgcgtctgatcaatcatttcgaaaagagcatgaaagcagaaattggcgacgacgacgagctctacattgtggataataacggggaaatgccactgtttgacatcaccgggcaggacttcgagaataaactgcgcgtgcccctgctagagatcctaaagtatccttacttactgcttcatgagcgggtgaacgagctgtgtgtagaagcgctgtgccgtatggagcaggcgaattgcagcttccaggtatttgataagcacccaggtatttacctgtttctggttcatcccaacgagatggttagaaggtgggctattcttaccgctcgaaatctcggaaaggtggacagggacgattactatgacttacaggaagtcctcctgtgcctgttcaaagtgattgagctggggttgcttgagtccccggacatttacacttcttccgtgctcgaaaaaggcaagctgatccttcttccctcccacatgtatgacacaaccaattataaatcctactggttgggtatttgcatgctcctgaccattctcgaagagcaggctatggactccctgctactcggttctgacaaacagaatgactttatgcagtctatcctgcataccatggaacgcgaggccgatgacgactcagtggatcccttttggccagcgctccactgttttatggtgatccttgatcgcctgggcagtaaggtgtggggccagctcatggaccctatcgtggcctttcagactatcattaacaatgcctcatataacagggaaataaggcatattagaaactcctctgtcagaactaagctggagccagagagttaccttgatgatatggtaacatgctcccagatcgtctataactacaatcccgaaaagactaagaaagattctggttggagaacagccatctgtccggattactgtcctaacatgtacgaggaaatggaaactctcgctagtgtcctgcaaagtgacatcgggcaggacatgagagtccacaatagtacttttctgtggtttattcccttcgtacagtcactgatggatctcaaagatctgggcgtcgcttacattgcacaagtcgtgaatcacctgtacagtgaggttaaagaggtgttaaatcagacagatgcagtctgtgataaagtaacagaattttttctgctgatactcgtgagtgtcatagaactccaccggaataagaagtgtctccatctactgtgggttagcagtcagcagtgggtggaagccgtggtgaagtgtgctaagttgcccacaacagcatttacccgaagttctgaaaagagcagtgggaactgttccaagggcaccgcaatgatttccagccttagtctgcatagcatgccaagcaactctgtgcagctggcctatgtgcaactgatcagaagcctgctcaaggaaggctatcagctcggtcaacagtccctgtgtaagaggttttgggacaaacttaacctgtttctgcgcggtaaccttagcctcggttggcaattgacttcgcaggagactcatgaactccagtcctgtctgaagcagattatcagaaacataaagttcaaggcaccgccctgcaacaccttcgtggatctgacttctgcctgcaaaatctcaccagcatcttacaacaaagaggaaagcgaacaaatgggaaagacgtctcgtaaggacatgcactgcctagaggcatcatccccaactttcagcaaggagccaatgaaagtgcaagatagtgtgttaatcaaggctgataacactattgagggcgataataatgaacaaaactatatcaaggatgtgaaactggaggaccatctgctggccggatcttgcctcaagcagtcatcaaagaacatcttcacagagcgcgcagaagaccagatcaagatatcaactagaaaacagaagagcgtaaaggaaatctcatcctatacacctaaagactgcactagcaggaatggtccggagcgtgggtgtgataggggtataatcgtgtccacccggttgctcacagattccagcacagatgcactggaaaaagtcagtacatccaacgaggactttagcctgaaagacgacgctttagccaagacatcaaagaggaaaactaaggtgcaaaaagacgaaatatgtgctaaattgtctcacgtcattaagaaacaacacaggaagtctactttggtagataatactatcaacttggacgagaacctgaccgtttctaatattgaatctttttattcgcggaaggacaccggcgttcagaagggggatggttttattcacaacctgagcttggatccttccggggtactcgatgataaaaacggggaacagaagtcccagaataacgtgctaccaaaagaaaaacagcttaagaacgaagaacttgtgatcttcagttttcacgaaaataattgcaaaatacaggagttccacgtggatggaaaggagctgatcccgtttacagagatgacaaacgcctctgagaagaagtccagccctttcaaagatctgatgaccgtacctgagtctcgggacgaggagatgtctaacagcacctcagtcatctactctaatctgacacgcgaacaggctcctgacatttcccccaagagcgacaccttgacggattcacaaatcgatcgcgaccttcacaaactcagcctgcttgctcaagcttccgttattacctttccaagcgattcaccacaaaactccagtcagctgcagagaaaggtgaaggaggacaagcggtgttttacagcaaatcagaataatgttggtgatacttcgcgcggacaggtgatcatcatctccgactctgacgacgatgatgatgagaggatcttgagtcttgagaaactcacgaagcaggataagatctgcctggagcgggaacaccctgaacaacacgtgagcacagtgaatagtaaagaggagaaaaaccccgtgaaagaagaaaaaaccgaaaccttgtttcagttcgaggagtccgattcacagtgtttcgaattcgagtcgtccagtgaagtcttctctgtatggcaggaccaccccgacgataataattctgtccaggacggggaaaaaaagtgtttggcccccatagccaacactacgaatggccaggggtgcaccgactacgtctcggaggtggtgaaaaagggtgcagagggcattgaggaacacaccaggcctcggagtatatcagtggaggaattctgcgagatcgaggttaaaaaacccaagcggaaaaggtcggaaaaacctatggccgaagaccctgttaggccctcatcaagcgtaaggaacgagggccagtccgacacaaacaaacgcgacctcgtgggaaacgactttaagtcaatagaccgtaggacaagtacaccaaatagccggatacagcgggcgactactgtatcgcagaagaaaagcagcaagctttgtacatgcacagagcccattcggaaggtgcccgtaagcaagacaccaaagaaaacccactccgatgctaagaaaggccagaatcgatctagcaactatctgagctgccggacgacacctgctatcgtacctcctaagaagtttaggcaatgcccagagcctactagtacggcagagaagctcggactgaagaagggcccccgcaaagcctacgaactctctcagcggagccttgattacgttgcacagctacgggatcatgggaagacagttggagttgtcgatactagaaaaaagaccaagctcatttccccccagaacctttccgtccgcaataataaaaaactactcacctcccaggagctgcagatgcagagacagatccgacctaaaagccagaaaaatcgtagaagacttagtgactgtgagagcacagacgtgaaacgcgctggcagccataccgctcagaattctgacatatttgtgccggaaagcgaccggtccgattacaattgtacagggggcaccgaggtccttgccaactccaacagaaagcaactaatcaagtgcatgccgagtgagcctgagaccattaaagcaaagcacggatctcccgctacagatgacgcctgccccttgaatcagtgcgactctgtcgtgctgaatggcacagtacctacgaatgaggtcatcgttagtaccagcgaagacccactcggagggggggaccccacagcacggcatatcgaaatggctgccctgaaagaaggggaacccgactctagcagcgacgcagaagaagacaatctgttcctgactcagaacgatccagaagacatggatctgtgctcccaaatggagaacgacaactacaagctaattgagcttatccatggaaaagataccgtcgaggtagaggaagattctgtgtcaaggcctcagctagaatccctaagcgggaccaagtgtaaatacaaggattgtttagagactacgaagaaccaaggcgagtactgtccaaaacattccgaggtgaaggccgcagatgaggacgtcttccggaagcctgggcttcccccgcctgcgtccaaaccactgcgacccactactaaaatattttctagtaagtctactagtcgtatcgccggattgagtaagtctctggagacctccagcgccctgtccccctctttgaagaacaaaagtaaggggattcagagcattctcaaagtgccccagccagttcccctcatcgctcagaaaccagtgggagagatgaagaattcctgcaatgtgctgcacccacagtcccctaacaattctaaccggcagggttgcaaggttcctttcggggagagcaagtatttcccctccagtagccctgtgaacattctgctgtcttcgcagagcgtatccgatacattcgtgaaagaagtgctgaaatggaaatatgagatgtttttaaatttcgggcagtgcggccctccggcatctctttgccaatccatttctcgccccgttccagtcaggtttcacaattacggagattattttaatgtcttcttccctttgatggtgctcaatactttcgagaccgtagcacaagaatggctaaattctccgaaccgcgaaaatttctatcagctgcaggttaggaaatttccggcggattacattaagtactgggagtttgccgtatacctcgaggagtgcgagcttgccaagcaactttatcccaaggagaacgacttagtctttctggcgccggagcgcataaacgaggaaaaaaaggacaccgagaggaacgatattcaggatctgcatgagtaccatagcgggtacgtgcacaagttcagacgcacgtctgttatgcgaaatggcaaaaccgagtgctatctgtccattcaaacgcaagagaacttccctgctaatctgaacgagttggtaaattgtatagtgatttcaagcttagttaccacacagcggaaattgaaggcgatgtcgctgctgggcagtcggaaccaactggcgcgagcggtcctcaatccaaatccgatggacttctgcaccaaggacctgctgacgaccaccagcgagcgaattatcgcatacctgcgagattttaacgaggatcagaaaaaagcaatagaaacagcctacgcaatggtgaagcattcccctagcgtagctaaaatctgcttgatccacggaccgccgggcacagggaagtctaagacaatagtcggtctcctgtatagattactcacagaaaatcagcgcaaaggacactccgacgaaaattccaatgcaaagatcaagcagaaccgcgtcttagtgtgtgcccccagtaacgcagcagtggatgagttgatgaagaaaattatcctagagtttaaggagaaatgtaaagacaagaagaacccacttggtaactgtggcgatatcaaccttgtacgtctgggtcccgagaagtctatcaactctgaagtgttaaagttctctttggacagtcaggtgaaccacaggatgaaaaaagaactcccctcccacgtacaggccatgcataagcggaaagagttcctggactatcagctcgacgagttgagccgtcaaagggctctgtgtcggggcggaagagagatccagaggcaagagttagatgagaacatttcaaaggtaagtaaggagcgccaggagttggcgtccaaaatcaaggaggtgcaaggtagacctcaaaagacgcagagcatcattatactcgagtctcatataatctgttgtacgttgtccacttctggtggcctactgctagaatctgcattccgcggccagggcggggtgccatttagctgtgtgattgtggacgaagctggccagagctgtgagattgaaacacttaccccactcattcaccggtgcaataaactgattcttgtgggggaccctaagcaacttccacctacggtcatctctatgaaagctcaggagtacggctacgatcagtccatgatggcaagattctgtagattactggaggagaatgtagagcacaacatgataagtcgccttcccatcttacagctgactgtgcagtacaggatgcaccctgacatctgtctctttcctagtaattatgtctacaacagaaacttaaagaccaatcgacaaaccgaggctatcagatgtagttccgactggccattccaaccatatctggtgttcgacgttggtgacggatcagaaagaagggacaacgacagctacatcaacgtccaggagataaagcttgtgatggagattatcaagctcataaaagacaagaggaaggatgtatcattccgaaatattggcatcatcactcactacaaggcacagaagaccatgatccagaaggatctggacaaggaattcgatcgtaaaggtccagcagaggttgacactgtcgacgcgttccagggaaggcaaaaggactgcgttatcgtgacatgcgtgagagccaacagcattcagggctctatcggctttttggcatccctgcaaagattgaacgtaacaatcacgagggctaagtacagcctctttatcttgggtcatctgagaaccctgatggagaaccagcactggaatcagcttatccaggatgctcagaaaaggggtgccatcattaagacctgtgacaagaactatcggcacgatgcagtgaaaatcctgaagttgaagcctgtcttacagcgatccctcactcatccaccaaccatcgccccagagggctctcgccctcaggggggtctccctagctcgaaactggatagcgggttcgcaaaaaccagcgtggctgccagcttgtatcatacaccctcagatagcaaggagattacactgacagtgacatcaaaagatcctgaacgacccccggtgcacgatcagctgcaggatcccaggctccttaagcgaatgggtatcgaagtcaaaggggggatttttctgtgggacccccagcccagctccccccagcacccaggagccacccctcctaccggagagcctggttttcccgtcgtgcatcaggatctctctcatattcaacagcccgcagccgtagtagcagcactttcaagccacaaacctccagttcgcggggagcctcccgcagcctcgcctgaggcaagtacctgccagagcaagtgtgatgaccccgaagaagagctgtgccaccggcgtgaggccagggcctttagtgagggggaacaagaaaagtgtggctccgaaacccatcacaccagacgcaatagtaggtgggacaaaaggacattggaacaggaagactcttcctccaaaaagcgcaaattactctag

SEQ ID NO: 130191 - DNA, 483 bp, synthetic construct
  misc_feature 1..483: note = Description of Artificial Sequence: Synthetic coding sequence
  source 1..483: mol_type = other DNA
atggccacccaccacaccctatggatgggcctagcactgctgggcgtccttggtgacctccaggccgcacctgaagcacaggtgtcagtgcaaccaaatttccaacaagacaagttcctcggcagatggttttctgccggcctggcatccaactctagttggttgagggaaaagaaggcagccctttctatgtgtaagagcgtagttgcacccgcgaccgacgggggtctgaacctgacctcaacttttctcaggaaaaatcagtgtgagaccaggaccatgctccttcaaccagccgggagtcttgggagctattcctaccggagcccccgggaatggggccttcatcgccctccgggaccatcactgggtgccaccctagctggcaccactttggggcagcccccagccgccgagattcacggcgtaggcggagacggttgtcccacgtctgtgaggggtaagggtcaagcttgggcgtag

SEQ ID NO: 130192 - DNA, 573 bp, synthetic construct
  misc_feature 1..573: note = Description of Artificial Sequence: Synthetic coding sequence
  source 1..573: mol_type = other DNA
atggctacacaccatacactgtggatgggactggccctgctcggggtgttaggagaccttcaagcggcaccggaggcgcaggtcagcgtccagcctaacttccagcaggataaatttctgggacggtggtttagcgcgggactcgcttcaaactcttcttggctgcgcgagaagaaggccgcactgtccatgtgcaagtctgttgttgcaccagcaacggatggtggtctgaatctcacgagtaccttcctccggaagaaccagtgtgagaccagaaccatgcttctacagcctgcaggttctttaggctcttatagctacagatcaccccattggggctccacctactccgtctccgtcgtggaaactgattacgatcagtatgctctgctgtatagccaggggagcaagggccccggcgaggactttcgtatggcgactctttactcgaggacacagacgccccgagcggaactaaaagaaaagtttacggctttctgcaaggcccagggcttcaccgaggacaccatcgtgtttctgcctcaaactgataaatgcatgactgaacaatag

SEQ ID NO: 130193 - DNA, 189 bp, synthetic construct
  misc_feature 1..189: note = Description of Artificial Sequence: Synthetic coding sequence
  source 1..189: mol_type = other DNA
tagggttatcattgtctgccggcgcccaaccgggcccagggagaagttggcggtgatggtgggtccgttcaattcggtggcagtgtcaaaacctcttcagcactgagggaggagcaggaagcgcagtgggagaattggccaaaatccggggttctgactactgcaccaggcttcttcttgggacgatag

SEQ ID NO: 130194 - DNA, 642 bp, synthetic construct
  misc_feature 1..642: note = Description of Artificial Sequence: Synthetic coding sequence
  source 1..642: mol_type = other DNA
taactgcgcggcggcggacagttcttgggacgcggcgtccgtggcgtcgccgctagggggatcggacggggcgggggcgccggtttggagacgggaggcgtagacggcagaggggcacctgctggcagacggcgatgggttcgccgcgtactggcagacgctggcggcggaaggtcacctcagttcctgggcaggtggttttctgctggcttagccagcaatagcagctggttgcgtgagaagaaggcagcactgagcatgtgtaagtccgtggtcgctccagccacagatggggggctgaatctcacttccacctttctacggaagaatcaatgtgaaacacggacgatgctgttgcaacctgcaggttccctgggctcatatagttatcgctctcctcactggggttctacatattcagtaagcgtagttgagacagactatgatcagtatgcactgttgtactcccagggaagcaaaggccccggggaagatttccgaatggccaccttgtacagccgcacccagacccctcgggcggagctgaaggaaaagttcacggccttttgcaaagcccagggtttcacagaagacaccatcgtttttttaccccaaactgataagtgcatgactgagcagtag

SEQ ID NO: 130195 - DNA, 588 bp, synthetic construct
  misc_feature 1..588: note = Description of Artificial Sequence: Synthetic coding sequence
  source 1..588: mol_type = other DNA
atggccactcaccacacgctctggatgggcctcgccctgttgggagtccttggcgacctacaagctgcccccgaagcacaggtgtctgtgcagcctaactttcagcaggacaagttcttgggaaggtggttttccgcaggcctggcctccaactcgagttggcttcgggaaaagaaggccgctctgtctatgtgcaaaagtgtcgtggcccctgccaccgacggtggactgaaccttacctctacatttcttcggaagaaccaatgcgagacccgaacaatgttgttacagcccgccggctctcttggtagctacagttatcgcagccctcgggaatggggcttgcatcggcccccggggccttccctgggagccaccttggccgggactacactcggtcagcctcctgccgcagagattcatggcgtcggagattgggggtctacatactcagtttccgttgtggaaacggattacgaccagtacgctctcttatattcccagggaagcaagggccccggcgaggacttccgaatggcaactctctatagcagaactcaaacaccgcgcgcagagttaaaggagtag

SEQ ID NO: 130196 - DNA, 573 bp, synthetic construct
  misc_feature 1..573: note = Description of Artificial Sequence: Synthetic coding sequence
  source 1..573: mol_type = other DNA
atggccacccatcatactctgtggatgggactggccctgctgggagtgctcggagacttgcaggccgccccagaggcacaagtgtcagttcaaccgaattttcagcaagataaatttctgggccggtggttttctgccggactagcatcaaactccagttggctgagggagaagaaggcagctctctccatgtgtaaaagcgtggtggccccagctaccgatggtgggttaaacttaactagcacctttctaagaaaaaatcaatgtgaaacgaggactatgctcctccagcctgctggcagcctgggttcttattcttacaggtccccccactggggctctacctactcggtctcagtggtggaaacagactacgaccagtacgcgctactgtatagccaaggcagtaagggccccggcgaggacttcagaatggctaccttgtactccagaacccagacgccccgtgcagaattaaaagaaaagttcactgctttttgtaaggcacaggggtttactgaggacaccatcgtgtttttaccgcagacagataagtgcatgacagagcagtag

SEQ ID NO: 130197 - DNA, 1209 bp, synthetic construct
  misc_feature 1..1209: note = Description of Artificial Sequence: Synthetic coding sequence
  source 1..1209: mol_type = other DNA
atgtccccatgcggacctctcaatttaagtctcgcaggtgaagccaccacttgcgcagctccgtgggtccccaacacctccgcagtccctccgtccggagcttctcccgctctcccaatcttctccatgacactgggtgctgtaagtaatctcttggctttagcgctgttagcccaggccgctggccgtctcaggaggaggagatcagccgccacctttctattgttcgtggcgtccttactggctaccgatctggcagggcacgtcatcccaggagctttggtgctgcgactgtatactgcaggacgggcccccgccgggggcgcttgccattttttgggaggatgtatggtgttcttcggactgtgccctctactgctggggtgcgggatggccgtagagcggtgtgtgggggtgacaaggcccctactccacgcggcccgtgtatcggtggcccgagcccgcctcgcactggcagccgtggccgcggtcgccttggccgtcgcactgcttccattggcccgtgtgggaagatatgaactacagtaccccggtacttggtgctttatcgggctagggcctccaggtgggtggcggcaggccctcctcgctggtctatttgctagcctgggcctggtggcgcttttggctgccctggtgtgcaataccctgagcggtctcgcgttgctgagagcgcggtggagaaggcgcagcagaagaccgccccccgcaagcgggcccgattcgaggcgaagatggggcgcgcatgggcccaggtcagccagtgcatcttctgccagctcaatcgcttcagcaagcacattttttgggggttctaggagttcgggcagcgctcgtcgcgcacgagctcatgacgtggagatggtgggtcaactggtgggtatcatggttgtcagttgcatatgttggtcccccatgttggtgctggttgcattagcagtagggggctggagttccaccagcctacaaaggcctctcttccttgccgtaagacttgcatcctggaatcagatcctagatccctgggtttacatcctgctccggcaagcagttctgcggcaacttctcaggttactccctcctcgagctggggcgaaaggagggcccgctgggttggggctgacaccatcagcctgggaggcatccagtctgcgcagctcccgacatagcggccttagccacttttag

SEQ ID NO: 130198 - DNA, 1077 bp, synthetic construct
  misc_feature 1..1077: note = Description of Artificial Sequence: Synthetic coding sequence
  source 1..1077: mol_type = other DNA
atgggtaacgccagtaacgattcgcaaagtgaagactgcgagacacggcagtggctcccacctggagagtccccagcaattagctcagtgatgttctccgctggggtactggggaatctgatcgctttggctctcctggctcgtaggtggcgcggagatgttggttgttctgctggccggagatcgagtttgagtctgttccacgttctcgtgacggaactggtgttcacagacctgctcgggacatgccttattagccccgtggtgctggcctcatatgcaagaaatcagactctcgtagctttggcgcccgaaagccgtgcatgcacgtattttgcgttcgcaatgacatttttctccctagccaccatgctgatgctgtttgcaatggccctggagcgctacttgtctatcggacacccctacttctaccagcgtagggtttccaggagtggaggactggctgtgctccccgtaatttatgcagtttctctgcttttttgctcgcttccactgcttgattacggacaatacgtgcagtattgccctgggacctggtgtttcattcgtcacggtcggaccgcatatctgcagctgtatgcaaccttgctcctgctgttgatcgtttccgtgctcgcttgtaacttctccgtcatactgaatctgatcagaatgcatcgtcgctctcgccgatccagatgcggcccaagcctcggaagcgggcgcggaggacccggagctcggcgtcgtggggaacgtgtatccatggcggaggaaaccgaccacctaatactgcttgccatcatgactattacattcgccgtgtgttccctcccctttacaatttttgcctatatgaatgagacctcttcgcggaaggagaagtgggaccttcaagcccttcgcttcctctccatcaattctatcatcgatccttgggtttttgccattctgaggccgccagttctgaggctaatgcgatcagtactgtgttgtcgtatttctctccggacacaggacgcaacccaaacctcctgttccactcaaagcgatgcgtccaagcaagcggatttatag

SEQ ID NO: 130199 - DNA, 1173 bp, synthetic construct
  misc_feature 1..1173: note = Description of Artificial Sequence: Synthetic coding sequence
  source 1..1173: mol_type = other DNA
atgaaggaaaccagaggttatggtggcgatgccccattctgtactcgcctgaaccatagctatacaggaatgtgggcaccagagagaagcgcagaagcgcggggtaatctaaccaggccgcctgggagtggtgaagattgcgggagcgtaagtgtcgcttttcctattaccatgcttctgaccggctttgtcggcaacgcgctggcaatgttactggttagccggagctacagaaggcgggagtccaagcggaagaaaagctttctcctctgtattggatggttagccctcacagatcttgtcggtcagcttctcaccacgcccgtggtaatcgtggtttacctgtctaaacagaggtgggagcacatcgacccatccggccgactttgtaccttcttcggactgaccatgacagtcttcggactgtcaagcctgttcatcgctagtgctatggccgtagagcgcgcacttgctattcgcgctccacactggtatgccagtcacatgaaaacccgcgctacgagagccgttctcctcggagtgtggctggcagtcttggcgtttgctcttctcccagtgttgggagtgggacagtatactgtgcagtggcccggcacttggtgttttatctcaaccggtagaggtggcaatgggaccagcagctcccataactggggcaatctattcttcgccagtgcttttgcatttctcggtctgctggcattgactgtgacgttctcgtgcaacctagcgaccatcaaggcactcgtgtcaagatgtagggctaaggccacagctagccaatctagcgcacagtggggcaggattacaacagaaacagccatccaactaatgggcatcatgtgtgtcctgtccgtgtgctggtcccccctccttatcatgatgctcaaaatgatttttaaccaaaccagtgtggaacactgtaagacccacacggaaaagcagaaagaatgcaattttttcctgatcgcagttagactggcaagcttaaaccagatcctcgatccctgggtgtatctgctgcttaggaagattttgttgcgcaaattctgccagatccgttaccacactaacaattatgcttctagctcaacttccctaccttgtcagtgctctagcacattgatgtggagcgaccacctcgagcgctag

SEQ ID NO: 130200 - DNA, 1260 bp, synthetic construct
  misc_feature 1..1260: note = Description of Artificial Sequence: Synthetic coding sequence
  source 1..1260: mol_type = other DNA
atgaaggagacgcggggctacggaggggatgcccctttctgcacccgcctaaaccacagctataccggcatgtgggcccccgaacggtccgcggaagcaagaggcaatctgaccaggcctccgggatccggcgaagactgcggcagtgtcagcgttgcgtttcctatcactatgctactcaccggtttcgtcggaaatgcattggccatgctcctggtgagcagatcttaccggcgccgggaatcaaagaggaaaaagagctttctactctgcatcgggtggctggccctgactgacctggtcggtcaacttctgaccactccggtagttattgtagtctatctgagtaagcaacggtgggaacacatcgacccctctggcaggctttgtaccttctttggcctgaccatgacggtcttcgggctgtcgtctctgtttatcgcttcggctatggcagtcgagcgggctctggccatcagggccccccattggtacgcatcccatatgaaaactcgagcgacaagagctgtgctcttaggcgtgtggctggcagttctggcctttgccctccttcccgtccttggcgtcggacaatatacggtgcaatggccagggacatggtgctttattagcactggtcgggggggaaatggcacaagcagttcgcataactggggcaacttattctttgcttccgcttttgcatttctcgggctgctcgctctgaccgtgacttttagttgcaacttggcgactatcaaagcccttgtgagtcggtgccgggcaaaagctaccgcatcgcaatctagcgcacagtggggcagaataacgactgagacggctatccaattgatggggattatgtgtgttttgtctgtgtgttggtctcctttactgatcatgatgttgaaaatgatctttaaccagaccagtgtggaacattgtaaaacccacacggaaaagcaaaaagagtgcaacttcttcctgatagctgttcgtttggcgtcgctgaaccagatactcgacccttgggtatatctgttactccgtaagattttgctgagaaaattctgccaggttgccaatgccgtgagcagctgcagtaacgacggccagaagggccagcccataagcctttccaatgaaattatccagaccgaagcaatcagataccatacaaataactacgcttccagcagcacatcgcttccatgtcagtgtagtagtactcttatgtggagcgatcacctagaacgttag

SEQ ID NO: 130201 - DNA, 1290 bp, synthetic construct
  misc_feature 1..1290: note = Description of Artificial Sequence: Synthetic coding sequence
  source 1..1290: mol_type = other DNA
atgaaagagacaagaggttacgggggcgatgcaccattctgtaccagactgaaccactcctacacggggatgtgggctccagaacgctccgcggaggcccgcggtaatcttactcggccacctggctctggtgaagattgcggatccgtttccgtggccttccccatcacaatgctgctgacggggttcgttggcaacgccttagctatgctgctggtctcgagatcctacaggagacgcgagtcaaaacgcaaaaaatctttcctgctgtgcatcggctggctcgccctgaccgatttggtcgggcagctactcactacccccgtagtgatcgtggtttacctgtccaagcagagatgggaacacatcgatccttcagggagactgtgtaccttttttggcctaactatgacagtattcgggctgtcttccctgttcatcgcttctgccatggccgtggaacgggcgctggcaatcagggctcctcactggtacgcttctcacatgaaaaccagggctacaagagcagttctgctgggggtgtggttggctgttctagctttcgccctactgcccgtgttaggcgttggccagtacacggtccagtggcctgggacctggtgtttcatttccacgggccggggcggtaatgggacctcctccagccacaactgggggaatttgttctttgcttctgcctttgcattcttgggactccttgcccttactgtaactttcagttgcaatcttgcgacgatcaaagccctcgtatcaaggtgtagagccaaagccacagcaagccagtccagcgctcagtggggacgcatcacgaccgagactgccattcagctaatgggcatcatgtgtgttctcagcgtgtgttggtctccactgctgataatgatgctgaagatgatttttaatcagacctccgttgaacactgtaagacacatacagagaagcaaaaggagtgcaatttctttctcatcgccgtgcgcctcgcaagcttgaatcagatattggatccctgggtctatcttctgttgcgcaagatccttctgcgtaagttctgtcagatgaggaagcgtcggttgcgggagcagttctggaggcccgcgtctagcggttcgggatgccaacagataaggtgtctcatggagagttgctcactcacccagactggagtccagtggagtgacttccggagtctccagccgtccccaccgccattaaccgcaatattcgcttcctgggttcaggtcattctcctcccccagcccccaaagtag

SEQ ID NO: 130202 - DNA, 1257 bp, synthetic construct
  misc_feature 1..1257: note = Description of Artificial Sequence: Synthetic coding sequence
  source 1..1257: mol_type = other DNA
atgaaagagacgagaggatacggcggagatgcaccattttgtactaggctgaatcatagctacacagggatgtgggcgcctgaaagaagcgcagaagcccgcggaaacttgacccgaccgccaggatcaggggaggactgcggctctgtatccgtcgctttccctataaccatgctcttaacagggtttgtcggtaatgcactggccatgttgctggtttctcgatcttataggagaagggagtctaaacggaaaaagtccttcttattgtgcatcgggtggctggcactgactgaccttgtgggacagctgttgaccacaccagtggtgatcgtcgtgtacttgagtaagcaacggtgggaacacatagacccctcaggaaggctgtgcactttttttggcctaacaatgaccgttttcggtctgtctagcctatttatagcctctgctatggcagtggaaagggcgctcgccatccgtgcaccgcattggtatgctagccatatgaaaacacgagcgactcgagcagtgctgctgggggtgtggctagccgtactggcgttcgctctcctacccgtcctgggtgtggggcaatataccgtccaatggcccggaacatggtgcttcatctccacaggcagagggggaaatgggacctcctcctcccacaactggggaaaccttttcttcgcgagcgcctttgctttccttggactgcttgcccttaccgtgactttcagctgtaatctggcgacaattaaggcgttggtctcgcggtgtcgggccaaggctaccgcttctcaatcttccgcgcagtgggggcggatcaccactgaaacggctatacaactgatgggtatcatgtgtgtactttctgtttgctggtctcccttgcttatcatgatgctgaagatgattttcaatcagacaagcgtcgagcattgcaaaacacacacggaaaagcagaaagagtgtaatttctttctcattgccgtgagattggcttcactgaaccagatcctcgacccctgggtctatctgctcctgagaaagatcctgttgcgcaaattttgccagatgcgcaaacgccgtctgagggaacaactgatctgttctctgcagaatagccagattcaacgagctaccgcacattgtggccaagtgcagacataccgtgtgctcaatcgagaggaaatggaggttctggttagtagcattaacgtgtatacccgcatttctaccgtcaagacagaatag

SEQ ID NO: 130203 - DNA, 1209 bp, synthetic construct
  misc_feature 1..1209: note = Description of Artificial Sequence: Synthetic coding sequence
  source 1..1209: mol_type = other DNA
atgaaggaaactcgcggctacggaggggatgcaccattctgcacacgactaaatcattcatacaccggaatgtgggcaccggagaggtcagccgaggcccgcgggaatctgacccggcccccaggaagcggggaggactgcggaagcgtctccgtcgctttccccatcactatgcttctgacagggttcgttgggaatgctctcgctatgctgctagtgtcaagaagttatagaagacgcgagtcgaagcgaaagaaatcatttttactttgtatcggatggttggccctgacggacctggttgggcagctgttgacaactcccgttgttattgtggtctaccttagcaagcaacggtgggaacacatagacccgagcggcaggctttgcactttcttcggactaacaatgacagtatttggactgagcagtctctttattgcatccgctatggcagttgagagagctttggccatccgcgccccacattggtacgccagccacatgaagacacgcgcaactcgtgccgttctcctgggggtatggttagcggtgctggcatttgcactgctacccgtgttgggcgtgggccaatatacggtccaatggcccggcacttggtgttttatctccacaggccgggggggtaatggcacatcaagtagccataattggggcaacctgttttttgcaagcgcattcgcttttttaggactcctggcacttaccgttacatttagctgtaacctggccactatcaaggccttagttagcagatgtcgtgccaaggccaccgcctcgcaaagctctgcccaatggggcagaattacaaccgaaacggccattcagcttatggggatcatgtgcgtgctttcagtttgttggtccccgttgctgattatgatgttgaagatgatattcaatcagaccagtgtcgaacactgcaaaacacacactgagaaacagaaggagtgtaacttctttcttattgccgtcaggctggcctctctaaatcagatcctagatccatgggtgtatctcttgctgagaaaaattctgctacgaaagttttgccagatgaggaaaaggagacttcgtgagcaagagatgggccccgatggacgatgtttttgccatgcctggaggcaagtgccacgcacttggtgtagctctcacgatcgggagccatgctcagtgcagcttagttag

SEQ ID NO: 130204 - DNA, 1167 bp, synthetic construct
  misc_feature 1..1167: note = Description of Artificial Sequence: Synthetic coding sequence
  source 1..1167: mol_type = other DNA
atgaaggagactagaggatacggtggcgacgctccattctgtacgcggttgaaccatagttatactggcatgtgggctccagagcgatccgcggaggcgcggggcaatctgaccagacctcctggcagcggggaggattgtggctctgtctccgtggccttcccaattacaatgctattgaccggatttgtgggtaatgcactggctatgcttctggtatccaggtcatacagacgccgtgagagtaagagaaagaagtcgttcctcctttgtatagggtggcttgcgttaactgatctcgtcggccagctgttgaccacccctgtcgtcattgttgtctacctgagtaaacaaaggtgggaacatatcgacccttccggccggttgtgtacgttttttgggctgaccatgaccgtgtttgggttatcctctctttttattgctagcgctatggccgttgaacgagcactcgctattcgtgccccacactggtacgcttcccacatgaaaacccgggccacgagggccgttttgttgggtgtctggctggccgtgctggcatttgcattactacctgtgctcggcgtgggtcagtatacagtgcaatggcctggaacttggtgctttatatcgaccggccgtggagggaacggaacctcctcatcccacaactggggcaatctatttttcgcaagcgcctttgcatttttgggattgctggcgcttaccgtcacattttcttgcaacttggcgaccatcaaggcccttgtgagccgctgtagagccaaggccactgcctcacagtcttccgcacagtggggcagaattacaacagagacagccatccagctgatgggcataatgtgtgtgctctctgtatgctggagcccccttttaatcatgatgctcaagatgatattcaatcagacctcagtggagcattgtaaaacacatacagagaaacaaaaagagtgcaattttttcctgattgccgtgcgcctagcgtctctcaatcagatccttgatccttgggtgtacctgttgcttaggaagatactcttgcgcaagttctgccaggttgccaatgccgttagctcttgcagcaatgatgggcagaaggggcaacccatctctctttcaaacgaaatcatccaaactgaggcgtag

SEQ ID NO: 130205 - DNA, 1173 bp, synthetic construct
  misc_feature 1..1173: note = Description of Artificial Sequence: Synthetic coding sequence
  source 1..1173: mol_type = other DNA
atgaaggaaacacgtggatatggtggcgatgctcccttctgcactcggctgaaccactcttacacagggatgtgggccccagagaggtcagcagaagctagaggtaatctgacccggccccccggttcaggagaggactgcggatctgtctccgtggccttcccgatcaccatgcttctaactggtttcgttggcaacgcgctagccatgctcttggtgagccgttcttatcggcgcagggaatccaagcgcaagaaatcctttctactgtgtatcggttggctggccctgaccgatctggtgggacagcttctaacaacaccagtggttatcgtggtgtacctcagcaagcagagatgggagcatatagatccctccggacgtctgtgcaccttttttggattgactatgactgtgttcggcttgtctagcctttttattgccagcgcaatggccgtggaaagagccctggccatccgagctccacattggtatgcctctcacatgaagactagggctacccgggcagtgctgcttggagtgtggctggccgtgttggctttcgctctgttgcctgttcttggtgtgggccagtacactgtccagtggcccggaacctggtgctttatctccacagggcggggcggaaacgggacttccagctcgcacaattgggggaatctgttctttgcttctgcatttgcattcctaggactgctcgctctaacagtcactttctcctgcaacctggcaactattaaagctctggtcagtaggtgccgcgcaaaagccactgcaagccaaagttccgcacaatggggcaggattaccaccgaaacggccatccaactgatgggaatcatgtgtgtgctgtcagtgtgttggtcccctctgttgataatgatgctgaaaatgatattcaatcagacaagcgtggagcattgcaagacgcataccgagaaacagaaagaatgcaatttctttttaatagctgtgagattagcatccctgaatcagatcctggatccttgggtgtacctgctgttgagaaagatcctcctgagaaagttttgtcagattcggtatcatacaaacaattatgcttcctcctctacatctcttccttgccagtgtagctcaaccctgatgtggagcgaccacctggagcggtag

SEQ ID NO: 130206 - DNA, 1098 bp, synthetic construct
  misc_feature 1..1098: note = Description of Artificial Sequence: Synthetic coding sequence
  source 1..1098: mol_type = other DNA
atgaaggagactcgcgggtatgggggggacgcccccttctgtacccgtcttaatcacagttacactggcatgtgggcaccagaacgctctgccgaggctaggggcaaccttactagacccccggggtctggagaagactgcggatccgtgtctgttgccttccctataactatgctgttgacagggttcgtgggaaatgctctcgcaatgctgctggtgagtcgttcttatagaaggagggagagcaaacggaagaagagctttctgttgtgcatcggctggctagccctgactgacctggtcgggcagctgctcaccaccccggtagttatcgtggtgtatctcagtaagcaacgttgggaacacattgacccatccgggcggctgtgtactttcttcggcctgacaatgaccgtgtttggattgagcagcctctttatcgcaagtgccatggccgtcgagagagccctggctatcagggccccccactggtatgcgagccatatgaaaacccgggcaacaagagccgttctcctgggggtatggctcgccgtacttgcctttgctctcctgcctgtgttgggggttggccagtatacagtgcagtggcctggaacctggtgttttatcagtaccggtaggggaggcaacgggactagctcttctcacaactggggtaatctcttttttgcctccgcatttgcctttctaggcctgctggctctgaccgtgaccttctcctgcaacctggccactattaaggcattggtgagccggtgccgtgctaaagcaaccgccagccagagtagcgcccaatggggacgcattacaacagagacagcgattcagctcatgggcataatgtgcgtgctgtcagtatgttggtcacccttgctgattatgatgctgaagatgatctttaaccagacatcagtggaacattgcaaaacacacactgagaagcagaaggagtgtaatttcttcttgatcgctgtgaggctggcctctctgaatcaaatcttggacccttgggtctacctgttgctacgcaagatcctcctaagaaaattttgccaggaggaattttggggtaattag

SEQ ID NO: 130207 - DNA, 1365 bp, synthetic construct
  misc_feature 1..1365: note = Description of Artificial Sequence: Synthetic coding sequence
  source 1..1365: mol_type = other DNA
atgaaagagactcgcggatacggaggtgatgcacctttttgcactcggcttaatcactcttacactggcatgtgggcccctgaacgttctgccgaggctagaggaaacctgacgaggcccccaggctctggagaagactgcggcagtgtgtcagttgctttccctataaccatgcttctgacaggattcgtggggaatgcactcgctatgctcctggttagccgcagttacagacggcgcgaatcgaaaaggaagaaatctttcctgttgtgcatcggatggctggcgctgaccgatctcgtcggccagctcctaacaactcctgtggtgatcgtggtgtacttgagcaagcagcggtgggagcacattgacccaagtgggagactgtgcacgttctttggactgaccatgacggtgttcggcctgtccagcctctttattgctagcgcaatggccgttgaacgggctctagctatacgggcgccacattggtacgcaagccatatgaaaactagggctacaagagcggtcctgctgggtgtttggttagccgtgctggcattcgccctactgccagtgttaggggtgggtcagtataccgtgcagtggcccggaacctggtgttttatttccaccggccggggcgggaacggtacgtcatctagtcacaactggggcaacttgttcttcgcatctgcctttgcatttctggggctcctcgcgctgacagtaaccttctcttgtaacttagccactatcaaggcactagtatcgagatgcagagccaaagccaccgccagccagtcttctgcccagtggggaaggatcacaactgagacggcaatacaactgatgggaatcatgtgcgtgctgtccgtgtgctggtcccctctgctcatcatgatgcttaaaatgatctttaatcagacaagcgtggagcactgtaagactcacacagagaagcagaaagagtgcaactttttcttgattgccgttaggttagcttcactcaatcagattctcgacccctgggtctacctactgttgcgtaagattcttttgagaaaattttgtcaagtggctaacgccgtgtcaagctgtagcaatgatggacaaaaaggacagccaatcagcctgtctaatgaaatcattcagacagaagctatgcgcaagcgacgccttcgcgaacaggctcccctgctccctactagtaccgtgattgacccatcccgcttctgtgcccaaccattccggtggtttcttgatctctcctttcccgccatgagtagtagtcacccacagctgcctctgaccctagcttcatttaaactgctgcgggaaccttgcagcgttcaattgtcttag

SEQ ID NO: 130208 - DNA, 1173 bp, synthetic construct
  misc_feature 1..1173: note = Description of Artificial Sequence: Synthetic coding sequence
  source 1..1173: mol_type = other DNA
atgaaggagacacgtgggtacggaggcgacgcgccattttgtacgcgtcttaaccattcgtacacaggcatgtgggctccggaaagatccgctgaagcaaggggcaatctgacccgcccacccggatctggtgaagattgcggatcagtgagcgttgcctttcctatcactatgttacttaccggatttgtaggcaatgctctggccatgctgctagtctctcgttcctatagacggcgggagagtaagcggaagaaaagtttcctgctgtgcatagggtggctggcattaactgacctagtgggccagctgttgaccacgccagtggttatcgtcgtgtacctgagtaagcaaagatgggagcacattgatccgtccggccgcctgtgtaccttcttcggcttgactatgaccgtttttggactctcatctttgttcatagcgtcagccatggccgttgagcgcgctcttgctatacgggctccacactggtacgcatcacacatgaaaaccagagccaccagggccgtccttctgggagtgtggttggcagtgctcgcattcgccttactccctgtccttggcgtcggacagtatacggtccagtggcccggtacctggtgttttatctctaccgggaggggtgggaacggaacttctagctcacacaactggggaaatttgttcttcgcttcagctttcgccttcctgggcctcctggccctgaccgtgacttttagttgtaacctggctaccattaaggctctggtttcccggtgtcgagccaaggcaacggcctctcaatcttccgcccagtggggacggatcaccacagagacggccatacagctgatgggcataatgtgcgtgctctcagtctgctggtccccattgctcattatgatgcttaagatgatatttaaccaaacaagcgtagaacattgcaagacacacacggagaagcaaaaagaatgtaacttcttcctgattgccgtcagacttgcttccctgaaccagatcttggatccatgggtttatcttttgttgcggaagatcctcctgaggaagttctgtcagatcaggtaccacacgaacaattacgcttctagcagtacatctctaccttgccagtgttcctccacacttatgtggagcgaccatctggaacgctag

SEQ ID NO: 130209 - DNA, 1125 bp, synthetic construct
  misc_feature 1..1125: note = Description of Artificial Sequence: Synthetic coding sequence
  source 1..1125: mol_type = other DNA
atgaaggagacccggggctacgggggcgacgctccattttgcacacgtctcaaccacagctatacagggatgtgggctcccgagcgaagcgccgaagccagaggcaatttgacccgccctccaggaagcggcgaagactgcggaagtgtgtcggtggctttcccaataactatgctcctgactggcttcgtcggcaacgccctggccatgctgctggtatctcgcagctatcgtcgcagggagtccaaaagaaagaaaagcttcctgttatgcatcggatggttggctctcaccgacctggtcggacagctgttaacgacccccgtagtcatagtggtttacctttccaaacagcgatgggagcatattgatccgagcggccgcctttgtaccttttttggactaacaatgaccgtatttggtctcagttctctgttcatagcttccgcaatggctgtggagagagctctggctatcagagctcctcattggtacgcctcacacatgaagaccagagccacacgagcagtgttgctcggcgtctggttggctgtcctggcgttcgcactattgccggtgttgggcgtcggtcaatacaccgtacaatggcctggcacctggtgttttattagcacgggcaggggggggaacggaacttcttcaagtcacaattggggcaacctgttttttgcctcagccttcgccttccttgggctgctggctcttaccgtgactttctcttgtaatctggcgacaatcaaggccctagtgagtcgttgtagggctaaggccacggctagtcaaagttccgctcagtggggccgcatcaccacagaaaccgccattcagctcatgggaattatgtgcgtcctcagtgtgtgctggagtcccctcttgattatgatgctcaaaatgattttcaaccagaccagcgtcgaacattgtaagactcatacagagaaacagaaggagtgcaatttttttcttatcgccgtacgcctggcatctttgaatcagatcctcgatccctgggtctatctgttgcttcgtaagatattgttaagaaagttctgccaaatgaggaaaaggcgtctgagagaacaggaggagttttggggaaattag

SEQ ID NO: 130210 - DNA, 1467 bp, synthetic construct
  misc_feature 1..1467: note = Description of Artificial Sequence: Synthetic coding sequence
  source 1..1467: mol_type = other DNA
atgtctacacctggagtgaacagttccgctagtctgtcccccgaccgcttaaactcgccggtcactatacctgcagtgatgttcattttcggcgttgttggcaatctagtcgcaattgtggttctgtgcaaatcccggaaggaacagaaggagacaacgttctacacgctggtgtgcgggctggcagtgaccgatctgctcggcaccctgctggtatcacccgtaacaatcgcaacctatatgaaggggcagtggccaggcggacagccactctgtgagtatagcacctttattctgctgtttttctcgttgagcgggctctccatcatttgtgcgatgagtgtcgagcggtacttggccatcaaccacgcttatttttactcccactacgtggataaacgcctggctggattgactctctttgctgtgtacgcctccaatgtgctcttctgtgctttgcctaacatgggactgggcagcagcaggttgcaataccccgatacctggtgcttcatcgactggactacaaacgtaaccgcacatgctgcttattcatacatgtacgcaggcttttccagctttctgatcttggctaccgtcttgtgtaatgtcttggtgtgcggcgccctgctcaggatgcaccgacaattcatgaggcgcactagtttgggcaccgagcagcatcacgccgccgctgctgcttcagttgctagtagggggcacccggcagcctctcctgcgctcccaagattgtccgacttcagacgccgccgttctttccgacggatagctggtgccgaaattcaaatggtgatcttactgatagccacttcactcgtggtgctgatctgtagtatacctctggttgttcgcgtatttgtgaatcagttataccagcctagcctcgagcgagaggtctcaaaaaatccagatctgcaggctatccgtatcgcttcagtcaatccaattttggatccgtggatatacattctgttgcgtaagacagtgttgagcaaggctatcgagaagataaagtgccttttctgcaggattggcggctcacggagagaacgttcaggacagcattgctcagattcacagaggactagttcagccatgagtggacattctaggagcttcatttctcgcgagttgaaggagatttcaagtacctcccagacactcctccctgacctgagtctgcccgacctgtcagaaaatgggctgggtgggagaaaccttctacctggcgtgcctggcatggggctggctcaagaagacaccacgtcattacgcacgctgaggatcagcgaaacatcggatagctctcagggtcaagactctgaaagcgtgctattggtggatgaggctggcggaagcggtagggccgggccggctcccaagggttccagtttgcaagttacattcccttcagaaacgctgaatttatcagagaagtgtatttag

SEQ ID NO: 130211 - DNA, 459 bp, synthetic construct
  misc_feature 1..459: note = Description of Artificial Sequence: Synthetic coding sequence
  source 1..459: mol_type = other DNA
atgcccgctcattcattggtcatgagtagcccggcactgccggcctttttgttatgctctacactgcttgtcatcaagatgtacgttgttgcgattataacaggacaggtccggctgaggaagaaagccttcgccaatccagaggacgctctgcgacatggcggaccacagtattgccgttcagaccccgacgttgaaagatgtctgagagcccaccgtaacgacatggaaacaatctatccatttctctttctgggattcgtgtattcgtttctagggccgaacccatttgtcgcatggatgcacttcctggttttcctggtaggaagagttgcacacacagtagcctacctaggcaaactcagagcgccgatacggtctgtgacatatacacttgcacaactcccctgcgcctccatggccctgcagatcctttgggaggcagctcggcacctctag

SEQ ID NO: 130212 - DNA, 561 bp, synthetic construct
  misc_feature 1..561: note = Description of Artificial Sequence: Synthetic coding sequence
  source 1..561: mol_type = other DNA
atgaaggctgtaaacgagcagggaaaggaagtgactgaatttggcaataagtactggttgatgttaaacgaaaaagaagctcagcaggtctatggcggcaaggaagcccggaccgaggagatgaagtggcggcaatgggctgatgactggctggtgcacctaatctctcctaatgtttatcgcactcctacggaagcgctggcttcctttgactacatcgttagggaggggaagtttggtgccgtggaaggagccgtggcaaagtatatgggagctgctgccatgtatctcatctctaagcgtctcaaatcccgccatcgcttgcaggataacgtgcgcgaggatctttacgaggccgcggacaaatgggtcgcggctgtggggaaagaccgcccatttatgggtggacagaaacctaatttggccgatctggccgtctacggcgtcttacgcgttatggagggtctggacgccttcgatgacctcatgcagcacacacatatccaaccatggtacttaagggtagagagagccatcaccgaagcgtctcctgcacattag

SEQ ID NO: 130213 - DNA, 1134 bp, synthetic construct
  misc_feature 1..1134: note = Description of Artificial Sequence: Synthetic coding sequence
  source 1..1134: mol_type = other DNA
atggatcctgccgcacgcgttgtcagagcattgtggcctggcggctgtgctctggcctggcggctaggcgggaggccgcagccactactcccaactcagagccgcgccggctttgccggggccgccggaggcccctctcctgttgccgccgcgcggaaaggatctccccgtctgctgggtgctgcagccctcgccttgggcggcgccctggggctctaccacactgctcggtggcacctccgggcccaggacctacacgccgaaaggagcgctgcccagctgagcctcagcagcagactgcaattgaccctgtatcagtacaaaacgtgccctttttgctccaaggtgagggcattcctggattttcacgccttgccctatcaggtcgtcgaggtgaacccagtgcgaagggcagaaattaaatttagctcctaccgaaaagtgcctatattagtggcacaggagggcgaatcaagccagcaactgaatgatagcagtgtaattatatcagccctgaagacctaccttgtcagtggtcagcctcttgaagaaattatcacctactatcccgccatgaaggctgtgaatgaacaagggaaggaggttaccgagtttggtaataagtactggctcatgcttaatgagaaggaggcacagcaggtctatggggggaaagaggcccgtaccgaagaaatgaaatggcgccaatgggcagatgactggctggttcacttgatcagccccaacgtttacagaacccccaccgaggccctggcatcgttcgactatattgtgagagaaggcaaattcggcgcggtggagggagccgttgccaaatatatgggtgcggctgcaatgtacctgatttcaaagaggctgaaaagccggcatagactgcaagacaacgtgagggaggacttatacgaagcagccgacaaatgggtggcagccgtggggaaagacaggccctttatgggtgggcagaagcccaatctggctgatctagcagtctacggcgtcctcagggttatggagggacttgatgcattcgacgacttaatgcagcatactcacatccagccctggtacctccgggtcgagcgggccataaccgaggcgtctccagcgcactag

SEQ ID NO: 130214 - DNA, 894 bp, synthetic construct
  misc_feature 1..894: note = Description of Artificial Sequence: Synthetic coding sequence
  source 1..894: mol_type = other DNA
atgtcgatgaacaactcgaagcagctggtttcccctgccgccgcattactctctaacacaacttgtcagaccgagaatcgcctcagtgtcttcttctccgttatctttatgactgttggtatcctttccaacagtctggctattgccatcctcatgaaagcatatcagaggtttcggcaaaagagtaaagcctccttcctgcttcttgcctccggcctagtaattacagacttcttcggccatttgataaacggcgctatcgcagtgtttgtctatgccagtgataaggaatggattcggttcgatcagtctaacgtgctctgtagtatctttggcatttgtatggttttctcaggattatgcccattgctgctggggtcggtgatggccatcgagcggtgcataggagttaccaagccaatcttccactcaacaaaaatcacttctaagcacgtgaaaatgatgctaagcggcgtgtgcctgttcgcagttttcatcgctctcctaccaatcctgggccatagggattacaaaatccaggcatcgagaacatggtgcttctataatacagaagatattaaggactgggaggaccgtttctacttattattgttttcgtttctgggcttactagcactcggcgtgtccttattatgcaatgcaatcacaggaatcacactgctgcgtgtgaagttcaaatctcaacagcacagacaaggcaggtctcaccacctggaaatggtaatccagctcctcgcaatcatgtgcgtctcttgtatttgctggtccccatttctcggctaccgcattatcttgaacggcaaggagaagtataaggtgtatgaggaacaatccgattttttgcacaggttgcaatggcctaccctggaatag

SEQ ID NO: 130215 - DNA, 1080 bp, synthetic construct
  misc_feature 1..1080: note = Description of Artificial Sequence: Synthetic coding sequence
  source 1..1080: mol_type = other DNA
atgtccatgaacaattctaaacagctggtatcgccggccgccgctctgctttccaacacaacatgtcagaccgagaatcgtctgtccgtgtttttttctgtcatcttcatgaccgtcggcattttatccaactctttagctattgccatactcatgaaggcatatcagcgttttcgccaaaagtcaaaggcatcttttctcctgctggctagtggcctggtgattacagatttctttgggcatctgatcaacggcgctattgctgtttttgtgtatgccagcgataaagagtggatccggtttgaccaaagtaatgtgctgtgcagcattttcggcatctgtatggtgtttagtgggctatgccctttgttgctggggagcgttatggctattgagcgctgcatcggtgttaccaagcccatctttcattctaccaagataacttccaaacatgtaaagatgatgctgagcggagtatgtttgttcgcagtgttcattgcactcctgccaattctcggccaccgggattacaagattcaggcatctcgaacttggtgtttctataacacggaggacatcaaggactgggaggaccgcttctatcttttgcttttttccttcctcggtctccttgccctgggagtgtcactcctttgcaacgccataactggcatcacattgctgcgggtcaagttcaaatcccaacagcacaggcagggacgctctcaccacttggaaatggttatccagctgctagcaatcatgtgtgtgtcctgcatctgttggagcccatttttggtcacaatggctaatattggaattaatggaaatcactcgcttgagacatgtgaaacgaccctgttcgcccttcggatggccacttggaaccagattctggacccttgggtctacattcttctgcgtaaagccgtcctcaagaatctctataaactggcgtcgcagtgctgtggcgtacatgtgatatcactgcacatatgggaactctcaagcattaagaactctttgaaggttgcagcaatctctgagtctccggtcgctgaaaagtcagctagcacatag

SEQ ID NO: 130216 - DNA, 1080 bp, synthetic construct
  misc_feature 1..1080: note = Description of Artificial Sequence: Synthetic coding sequence
  source 1..1080: mol_type = other DNA
atgtccatgaataatagcaaacagctagtgagcccggccgcagccctgctgtcaaatactacgtgccagactgaaaatcgattgtctgtgtttttctcagttattttcatgactgtggggatcttaagtaacagcctggcaatcgccatcctgatgaaggcttatcagcgatttcgacaaaagtctaaagcctcgtttttactccttgcctccggattagtcatcaccgacttcttcggtcacctcatcaacggcgctatcgccgtgttcgtgtacgcctctgacaaggaatggatccggtttgaccagtcaaatgtgctctgttctattttcggtatttgcatggtcttctcgggcctgtgtccgctgctgctaggatccgtgatggccatagagcgatgcattggggtgaccaaacccatcttccattcaacaaaaattacgagcaaacacgttaaaatgatgttgtctggagtttgcctgttcgcagtttttattgcccttctgcccatcctgggacatagagattataaaattcaggcgtccagaacttggtgcttctacaataccgaggatatcaaggactgggaggaccgtttttacctactgctattttcttttttgggccttttggctttgggcgtgagccttctttgtaacgcaatcaccgggattacactgctgcgggtgaaattcaagagccagcagcacagacaggggcggtcccatcacctggaaatggtgattcagttgctggccattatgtgcgtttcctgtatctgttggtcccctttcttagtgacgatggccaacatcgggattaacggcaatcatagcctcgaaacatgcgagactacactgtttgctctcaggatggctacctggaatcagattcttgacccttgggtgtacatacttctgcgcaaagccgttctgaagaatctctacaaactggccagccagtgctgcggagtgcacgtgattagtctgcacatttgggaactttcttccatcaaaaattcgttgaaggtggcagcaatttccgaatcgccggtggccgaaaaaagcgcaagcacgtag

SEQ ID NO: 130217 - DNA, 2640 bp, synthetic construct
  misc_feature 1..2640: note = Description of Artificial Sequence: Synthetic coding sequence
  source 1..2640: mol_type = other DNA
atgggccggctcgcatcaaggcccctcctgctggcacttctctctctggcactgtgcagaggaagagtggtgcgggtgcctactgcaactctggtgcgcgtcgttgggactgagctggtgatcccctgtaacgttagcgattatgatgggccttctgagcagaacttcgactggtctttcagctcacttggctcctccttcgtcgagctggccagcacttgggaagttggattccctgctcagctgtatcaagagagactacagcggggggaaatcctgctcaggagaacagccaatgacgccgtggaactgcatattaagaatgtgcagccaagcgaccagggtcactacaagtgctctaccccctccacagatgctaccgtgcaggggaactacgaagataccgtgcaggtaaaggtgttagctgatagcctgcacgtaggacctagcgctagacccccccctagtctatccctcagagaaggagaaccctttgaattgcgctgtacagctgctagcgcttcccccctccacacccatttagccctcctttgggaggtccatagaggtccggctcgcagatcggtgctggcattaacccacgaaggcaggtttcatcccggcctaggctatgaacagcggtatcactctggagacgtgaggctcgacactgtcggctcagatgcttacaggctgtctgtatcacgagctctgagcgcagaccaaggaagctacaggtgcatcgtctccgagtggatcgcagagcaaggaaattggcaggagatacaagagaaagcagtcgaagttgcaacagtggtcattcagccaagcgtcctgcgagctgccgtgcccaagaacgtatctgtggccgaaggaaaagagctggatcttacatgtaacatcactacagacagggcagatgacgtgcgtcctgaggttacctggtcattctccagaatgccagattctactctcccagggtctagggttttggctcgcctggatagagactccctcgtccattcaagtcctcacgttgcactctcacacgtcgatgccagatcctatcacctgcttgtgcgggacgtgtcaaaggagaacagcggttactactattgccacgtttccctgtgggcacctggccataaccgatcttggcataaggtggctgaagcggtgagtagtcccgccggggttggagtcacctggctcgagccagattatcaggtgtaccttaatgccagtaaagtccccggattcgctgacgatcccacggagctagcttgccgggtagttgacaccaaatctggcgaggcgaacgtgcgtttcaccgtgtcctggtattaccgaatgaacaggcgctccgataatgtggtcacgtccgaactcctggcagtgatggacggggactggacgctcaagtacggggaacgctcgaagcaacgagctcaggatggcgactttatatttagcaaggagcataccgatacctttaattttcgaattcagagaacgactgaagaagatcgggggaactattattgcgttgtcagcgcttggaccaaacagcgcaataactcgtgggtgaagtccaaggacgtgttttcaaagcccgtgaatatcttttgggccttagaagattccgtccttgtcgtgaaagctcgccaacctaagccattctttgctgccgggaacactttcgagatgacatgcaaggtcagcagtaaaaatatcaagagccctcggtattccgtcttaatcatggctgagaagccagtaggagatctctctagccccaatgaaaccaaatacatcatctctctggaccaggatagtgtggttaagcttgaaaattggaccgatgctagccgcgtggatggtgtagttctggaaaaagtgcaggaggatgaattcaggtatcgcatgtatcagacacaggtgagcgatgcaggcctgtacagatgcatggttactgcttggtcgcctgttcgaggtagcttatggcgcgaagccgccacaagcctctcaaatcccatcgagattgatttccagacgagcggacccatcttcaatgcaagtgtgcacagcgatacacctagcgtaatccgcggcgacttaatcaaactgttctgcattattaccgtggaaggagctgccctggatcctgacgatatggcatttgatgtttcttggtttgctgtgcattcgtttggtctggacaaggcgcccgtgcttctgtcctctctggatcggaagggcatagttactacctcaagacgtgactggaaaagcgatttaagcctcgagcgagtgtctgtactcgagtttcttctgcaggtgcacgggtctgaagaccaggactttggcaactattactgctcggtgactccttgggtcaagtcgccaacaggtagctggcagaaagaagccgagatccactccaagcccgtgttcattaccgtaaaaatggacgtgttgaatgcctttaaatacccccttctcatcggggtgggcctgtcgacagtcatagggctcctttcctgtctaattggatactgctctagccattggtgctgtaaaaaagaggtgcaagagacccggcgagaacgaagaagattaatgagcatggagatggactag

SEQ ID NO: 130218 - DNA, 2217 bp, synthetic construct
  misc_feature 1..2217: note = Description of Artificial Sequence: Synthetic coding sequence
  source 1..2217: mol_type = other DNA
tccggagctgccggcgccggtcgaggaggaggaggcgaggccgccgggaaagaggaagaaggggagccctttgaattgagatgcaccgcagcatcagcctctccgttgcatacacacctggcactgctgtgggaggttcatcgcgggccggctaggcggtctgtgttagctctgacccacgaaggacggtttcatccgggcctcggctatgaacagcgataccacagtggagacgtccgccttgatacagtggggagcgacgcctatcggttgtctgtttccagggcactgtcagctgatcagggctcctacagatgtatcgtcagtgaatggatcgctgaacagggcaactggcaggaaatccaggagaaggctgtcgaggtggccacagttgtaatccagccgtcagtactaagggccgcagtgccaaagaacgtcagtgtcgccgagggtaaggagttagatctaacctgtaatataaccactgatagggctgatgacgttaggcccgaggttacttggagttttagccgaatgcccgattccaccctgccgggaagcagggtgctggcgcgcctggacagagactccctggtccacagcagtcctcacgttgcactcagccacgtggatgctagaagttaccacttacttgtgcgggacgtgtcgaaagagaacagtggatattactactgccacgtgtcactctgggccccggggcacaatcgttcctggcataaggtcgcggaggccgtgtcctcgcccgccggcgttggcgtcacttggctggagccggattaccaagtgtacttaaatgccagtaaagtgccgggattcgctgatgatcccaccgaattagcctgtagagtggtggatactaaatccggggaggctaatgtacggtttacggtgtcctggtattacagaatgaaccgccgatccgataacgtcgtgactagtgagctgctggcggtgatggacggagactggacattaaaatatggggaacggtccaaacagagggcccaagacggcgacttcattttctcaaaagagcataccgatacatttaatttccgtatacagagaacaaccgaagaggacaggggaaactattattgcgttgtgagcgcatggacaaagcagagaaacaacagctgggtgaaatccaaagatgtgttttctaagccagttaacatcttctgggccctggaagacagtgtcctggtggtgaaagccagacagcccaagccattctttgccgctggaaatacatttgaaatgacctgcaaagtgagttccaaaaacatcaagtcaccacgctactcagtcttgatcatggccgagaagccagttggtgacctatctagtcccaacgaaacaaagtatatcatttccctcgatcaggactccgtagtgaagctggagaactggaccgatgctagtagggttgacggggtggtgttggagaaggtacaggaggacgagtttcggtatagaatgtatcagacccaggtcagcgacgcaggtttataccggtgtatggtgaccgcttggagccctgtccgcggctcactgtggagagaggccgcgaccagcctctcaaaccccattgaaatcgatttccagacctccggacccattttcaatgcaagcgtgcattctgacacacccagcgtcatacgaggggacctgattaagttgttttgcattattacagtcgaaggggcggcactggatcctgatgatatggccttcgacgtgagctggttcgcggtgcatagcttcggactggacaaggcccctgtactgctttcatccctcgatcgcaaggggatcgtgaccacatctaggagggattggaagagcgacctcagcttggaaagagtgagcgtgttagagtttctcctccaggtccatggaagcgaggaccaggatttcggcaactactattgctcagttaccccctgggttaaatcacccacaggctcatggcagaaagaggccgaaattcatagtaagccggtcttcattacggtaaaaatggacgtgctgaacgcttttaaatacccattattaattggggtgggcctgtccacagtgattgggttactgagctgcttgatcggatactgcagctcacattggtgctgcaagaaggaggttcaggagacccgaagagaacgacggcgcttgatgagtatggagatggattag

SEQ ID NO: 130219 - DNA, 1161 bp, synthetic construct
  misc_feature 1..1161: note = Description of Artificial Sequence: Synthetic coding sequence
  source 1..1161: mol_type = other DNA
atggccgactcctgcaggaatctcacctacgtgagaggcagtgtgggacccgccacaagcacgctcatgttcgtggctggcgtggtcggcaacggcctggcattggggattctgtccgcaagacgtcccgccaggccatcagcattcgcagttttggtcaccggtctggctgccaccgacctcctgggtaccagcttcctgagtccagctgtctttgtagcctatgcccggaactcgtccctgctcgggctagctcgcgggggaccagctctgtgtgacgcttttgcattcgcaatgactttttttggactcgccagtatgctcattctgtttgctatggccgtggaaagatgtctggccctctcacacccctatttatacgcccagttggatgggccccgctgtgctaggttggccttgcccgccatttatgcattttgcgtgctcttttgcgcactccccctgctgggactaggtcagcaccagcagtattgccctgggagctggtgtttccttagaatgcgctgggcgcagcctgggggtgcagccttctcattagcctatgccggactagtggcactgctggtcgccgctatctttctgtgtaatggatctgtgactttatctctctgtaggatgtacagacagcagaaaagacatcaaggatctctcggtccccgccctaggaccggtgaagatgaggtggatcatctgatcctgctggctctgatgactgtggtgatggccgtctgctctctcccactaacgatcagatgtttcacacaggccgtcgcccctgactcgagcagcgagatgggagacctgctagctttccgcttctacgccttcaaccccatccttgacccctgggtgtttattttattcagaaaggctgtgtttcagcgcctgaagctgtgggtttgttgtttgtgtttagggcccgcacacggggactctcagacgccactgagccaactcgccagtgggagaagagatcctcgagctccatcagctcccgtcggaaaggagggaagttgcgtgcctctgagcgcttggggcgaagggcaggtagaaccactccctcctacacagcagtcctcaggctccgccgtgggaacttcttctaaagcagaagcgagcgttgcttgctccctctgttag

SEQ ID NO: 130220 - DNA, 1503 bp, synthetic construct
  misc_feature 1..1503: note = Description of Artificial Sequence: Synthetic coding sequence
  source 1..1503: mol_type = other DNA
atggcatgggccgcactcctgggcctcctcgcagcactgctgcttctgctcctgctgtctcggaggcgaacccgcaggccaggagagccccccctggatctgggaagcattccctggctgggttatgcattggattttgggaaggatgcggcgtcatttctgactagaatgaaagaaaagcatggtgacatcttcacaatcctggtggggggtagatatgttacagtgctgctggatccccactcatatgatgccgtggtgtgggagccccggacaaggctggattttcacgcctacgcaattttcctaatggagcgaatctttgatgtgcagcttccacattacagccccagcgacgagaaggcaaggatgaaactgacactgttgcaccgagaactgcaggctctcacagaagctatgtatactaacctgcatgccgtgttgcttggcgatgctaccgaggcaggaagcggctggcatgaaatggggttacttgacttttcgtactcttttctgttaagagccggctatctcacactctacggaattgaggctctcccgagaacacatgaatctcaggcgcaggatagggtccactccgccgatgtctttcacacctttcgacagttggatagactgctccctaaacttgcccgaggaagcttgtcagtgggggataaagatcacatgtgtagcgttaagagtaggctttggaagctgctttcaccagcacgtctggcccgacgcgcacatcgcagcaaatggctggagtcctaccttttgcatctcgaagagatgggggtgtccgaagaaatgcaggcgcgtgccctcgtgcttcaattatgggcaactcaaggaaatatgggcccagctgcattttggctgctgctgtttctcttgaagaatcccgaggccttagccgccgtgcggggagagctggaaagtatactctggcaggccgagcaacctgtgagccagacaactaccctgccacagaaagttctggattcaaccccggtgcttgattccgtgctaagcgaatctttgagactgaccgccgctccttttattacaagggaagtggtcgtagatttagctatgcctatggctgacggtcgggagttcaacctaagacgcggagacagattgctcctgtttccgttcctgtccccccagagggaccctgagatctatacggatcctgaggtcttcaagtacaatcgctttcttaatcctgacggtagcgaaaagaaggacttctataaagacgggaagcgattaaaaaactacaatatgccttggggtgccgggcacaaccactgtctcggacgcagctacgccgtgaacagcattaagcaattcgtgtttttggtcctcgtccatctagatctcgagctgattaacgccgatgtggagatacccgagttcgacctgtctcgttatggctttggcttgatgcagcccgagcatgacgtacctgtcaggtacagaattagaccctag

SEQ ID NO: 130221 - DNA, 408 bp, synthetic construct
  misc_feature 1..408: note = Description of Artificial Sequence: Synthetic coding sequence
  source 1..408: mol_type = other DNA
atgcgcgcgttcctccggaaccagaagtacgaagacatgcacaatattatccacatattacagatcagaaagcttcgccacagactgagtaactttcccaggttgccgggcatcctggcccctgagacagtcctgctgccattctgttataaagtcttcaggaaaaaggaaaaggtgaaaagatctcagaaagccacagagtttatagactacagtattgaacagtcccatcatgcaatactcacacctcttcaaactcatttgacaatgaaaggctcctcaatgaagtgcagcagcttgagttcagaggccatcctgttcacactgaccctacaactgacgcagaccctgggcctagagtgttgcctgttgtacctgagtaagacgatacatccgcaaattatctag

SEQ ID NO: 130222 - DNA, 345 bp, synthetic construct
  misc_feature 1..345: note = Description of Artificial Sequence: Synthetic coding sequence
  source 1..345: mol_type = other DNA
atggccggcctggcactccaacctgggaccgccctgttatgctatagctgcaaagcccaggtctcaaacgaagattgcctacaggtggaaaactgcactcagttgggtgaacagtgctggaccgctcggatacgggcagtgggcttactcactgtgatctcaaagggctgttccctgaactgcgtggatgatagccaggattattacgtaggcaaaaagaacatcacgtgttgcgacaccgacctgtgtaacgcctcaggtgcacatgctttgcagcccgcagccgcaatactcgccctactgcctgccttaggcttgctgctctgggggcctggccagttatag

SEQ ID NO: 130223 - DNA, 714 bp, synthetic construct
  misc_feature 1..714: note = Description of Artificial Sequence: Synthetic coding sequence
  source 1..714: mol_type = other DNA
atgatggtgatggtcgtggtaattacatgcctgttatcccactacaaattatctgctagatcattcatatccagacactcccagggccggcgtcgcgaggatgccctgtccagcgagggatgcctgtggccgtccgagtccactgtgtccgggaatggaataccagaaccgcaggtctatgcacccccccgccctacagacagactggcagttcctcctttcgcacagagagagaggtttcaccgcttccagcccacctatccctacctgcagcatgaaatagacctcccaccaactatctcactgtctgacggcgaagagcctcctccttaccagggcccctgtactctgcagctccgagacccagaacaacagctggagctgaatagggagtcagttcgggctcccccaaaccgaaccattttcgacagtgaccttatggattctgccagactgggaggaccttgtccaccaagttccaactccggaatcagcgctacatgctacggaagcggagggcgtatggaaggtcctcctcccacatatagcgaagtcatcggacactatcctgggtcatctttccagcaccaacagagctcaggacctccatccttgttagaagggactcgccttcaccatacccatatagcgccactcgagtctgccgctatctggtctaaagaaaaggataagcagaaaggacacccactgtag

SEQ ID NO: 130224 - DNA, 864 bp, synthetic construct
  misc_feature 1..864: note = Description of Artificial Sequence: Synthetic coding sequence
  source 1..864: mol_type = other DNA
atgcaccgcctgatgggggtcaacagcacagcagctgcagccgctgggcaaccaaatgtctcctgtacctgcaattgtaaaaggtcgctttttcagagtatggagatcactgagttagaatttgtgcaaatcatcatcattgtggtggtaatgatggtcatggttgtcgttatcacctgccttctcagtcattacaagttgagcgctcggtcctttattagccggcactcccagggacgcaggcgcgaggacgctctcagttcagaaggctgcctgtggccttcagagtctaccgtaagcgggaacggcatacccgagccccaagtgtatgctcctcctaggccgaccgatcggctggcggtcccaccattcgctcagcgcgagcgcttccacagatttcagcctacctacccttacctgcaacacgaaattgatttgccaccaacgatctccctaagcgacggcgaggagccccctccttatcagggcccgtgcaccttgcaacttagggacccggagcagcagctggagctaaatcgagagtctgtaagagctcccccaaacaggaccatctttgacagtgatctcatggattccgccaggttgggcgggccctgcccaccatcatccaacagcgggatatcagccacctgctatggctcaggcgggcgaatggaaggccccccacctacgtactcagaggtcattggccactaccccggctccagttttcagcaccagcagtcttccggacctcccagcctgttggaggggactagactccatcacacccacattgcccctctagaatcagctgccatctggagtaaggaaaaggataagcagaaggggcaccccctatag

SEQ ID NO: 130225 - DNA, 759 bp, synthetic construct
  misc_feature 1..759: note = Description of Artificial Sequence: Synthetic coding sequence
  source 1..759: mol_type = other DNA
atggcagagttggaattcgtccagattataatcatagttgtggtgatgatggttatggtggttgtgatcacttgcctactgtcccactataagctgtctgcgcgaagtttcatttctaggcatagccaaggtcgccgccgtgaagacgctttatcaagtgagggttgcttgtggccctccgaatcgactgtctccggtaacggtatcccggagccccaggtgtatgcacctccacgacccacggaccgcttggccgtgcctcctttcgcgcagcgggaacggtttcatagatttcagcctacttatccctaccttcagcacgaaattgacttgccccccacaataagcttatccgatggcgaagaacctcccccataccagggaccttgcacgctacaattgcgcgacccggagcagcagctggagctcaatagagagtccgtgcgtgcgccgccaaaccgcaccatcttcgattccgatcttatggactccgctaggctcggaggcccgtgccccccgagtagcaacagtgggatttccgctacctgctatggctcaggcggcaggatggagggccctccgcccacgtacagcgaagtgattgggcattacccgggtagttccttccagcaccaacaatcatcgggtcccccgtctttgctagagggcacccggttacatcatacccatatcgcccccctcgaaagcgcggctatttggtccaaggaaaaagataagcagaagggacatcccctgtag

SEQ ID NO: 130226 - DNA, 714 bp, synthetic construct
  misc_feature 1..714: note = Description of Artificial Sequence: Synthetic coding sequence
  source 1..714: mol_type = other DNA
atgatggttatggtggtagtgatcacgtgtctgctctctcattataaactatcagcgagaagttttatttccaggcatagccagggccgccgaagggaggacgccctgtctagtgaagggtgcctgtggccgagcgagtcaaccgtttctgggaatggcattcctgaaccacaggtctatgcccctccaaggccaaccgatagacttgcagtaccaccttttgcacaaagagagcggtttcatcgatttcagcccacgtatccttacctccaacacgaaatagatctgccacctactatttctctgtccgacggggaggagcccccaccatatcaaggcccatgtactctgcagctgagggatccagagcagcagctggaattgaatcgcgagtctgtgcgagcccctcctaatcgtaccatatttgactcagatctcatggattccgctcgcctaggtggcccatgccctccaagctccaatagcggcattagcgcaacatgctacgggagcggtggcaggatggagggaccaccaccgacctactccgaggtcataggacattatccaggcagcagctttcagcaccaacaaagctctgggccaccatctctgttggaagggactcggctgcaccacacgcacatcgcaccactcgagtcagccgctatctggagtaaagagaaagacaagcaaaaaggacaccctctgtag

SEQ ID NO: 130227 - DNA, 714 bp, synthetic construct
  misc_feature 1..714: note = Description of Artificial Sequence: Synthetic coding sequence
  source 1..714: mol_type = other DNA
atgatggtgatggttgtcgttattacctgtcttctttctcattacaaactgtccgcgcgctctttcatctctcgccattcccagggcaggcggagggaggacgctttatcttcagagggctgtctgtggcctagcgagtctaccgtgtctggcaatgggatcccagagcctcaggtgtatgcaccccctcgccccacagacagactggcagtgccgcccttcgctcaaagggagcggttccataggttccaacccacctatccttaccttcagcacgaaattgatctgcctcccacgatttccctttcagatggggaagagccacccccctaccagggcccttgcactctgcagcttagagatccagagcagcagctggagctaaacagggaaagcgtaagagctccgcccaacagaacaatcttcgacagtgatctgatggattctgcgcggcttggcggcccatgcccaccaagcagcaattctgggatatctgccacttgctacggttccggcggtaggatggaaggtcctccaccaacctattccgaggtgatcggccattacccgggctcgtctttccagcaccagcaatctagcggacctccaagcctgctcgaaggtacaaggcttcatcacacgcatatagcccctctggagagcgccgctatatggagtaaggagaaagacaagcagaaaggacaccccttgtag

SEQ ID NO: 130228 - DNA, 684 bp, synthetic construct
  misc_feature 1..684: note = Description of Artificial Sequence: Synthetic coding sequence
  source 1..684: mol_type = other DNA
atgcacaggctcatgggggtgaactctactgccgctgccgctgcgggccaacccaacgtgtcatgtacctgcaattgcaagcgcagccttttccagagcatggagatctcctgccacggtttcccagtgtgcaaaagccatcagcaccaggagtggaagagtttatgttggagcttgaggtcccctggcggggcctcttccatcaccgggttcgggagtatgaaagtgacgaatcccgctatgaacctcccagagtgccagtggctgcgtatccagaaggctgagctcgaattcgttcaaattatcatcattgtcgtcgtaatgatggttatggtcgtggttatcacgtgtctgctctctcactacaaactttcggccaggagttttatttcgaggcactctcaagggcgcagacgggaggacgccctgagtagcgaggggtgcctctggccttctgagagcacagtctcaggcaacggcattcctgaacctcaggtgtatgcaccacccaggcccacagataggcttgcagtgcccccatttgcacagcgggagaggtttcacaggttccagcctacatatccctatctgcaacacgaaatagacctgccccctactattagcctcagtgatggcgaggagcctcctccgtaccagggtccatgtactctgcagctgaggtag

SEQ ID NO: 130229 - DNA, 627 bp, synthetic construct
  misc_feature 1..627: note = Description of Artificial Sequence: Synthetic coding sequence
  source 1..627: mol_type = other DNA
atgccagcaatcccagctcacggagctgaactcgagtttgtccagatcattattatcgtggtggtgatgatggtaatggtcgtcgtcattacatgtctgctgtcccactataaattgagtgctcggtctttcatttccaggcactctcagggacggaggagggaggacgccctgtcttccgagggatgcctgtggcccagtgaatcgactgtttcagggaacggtatcccagagcctcaggtatatgcaccaccccgaccaaccgaccgtctggccgtgccaccttttgcccagcgagaaagattccacaggtttcagccaacatatccttatctgcagcatgaaattgaccttccccctaccatatctttgtctgacggagaagaaccaccgccataccaaggcccatgcaccttgcagttgagagacccagaacagcagcttgagctcaacagggaatcagtgcgtgcccccccaaatcgcactatttttgactctgatcttatggatagcgctcgcttgggcggaccctgccccccctcaagcaattccggaatctcggccacgtgctatgggagtggaggccgaatggaaggtccgccccccacatattcagaagtgatctag

SEQ ID NO: 130230 - DNA, 156 bp, synthetic construct
  misc_feature 1..156: note = Description of Artificial Sequence: Synthetic coding sequence
  source 1..156: mol_type = other DNA
atggctaggtaccggtgctgcagaagtcagtcccgcagtcggtactaccgtcagaggcagcgaagtcgtagaaggagaaggcgctcatgccagacaagaaggcgggcgatgcgttgctgtaggcctcgctaccgccccaggtgtcggagacactag

SEQ ID NO: 130231 - DNA, 309 bp, synthetic construct
  misc_feature 1..309: note = Description of Artificial Sequence: Synthetic coding sequence
  source 1..309: mol_type = other DNA
atggtacgttaccgagtaagaagtctgtcagagcggagccatgaagtgtatcgccagcaactacacggacaagagcagggtcatcacgggcaagaggaacagggactgtctcctgagcacgtggaagtctacgaaaggacccacggccaaagtcattaccggagacgtcactgttctcggcgcaggttgcatcggatccataggaggcagcacaggagctgccgtaggaggaagcggcggagctgtaggcacagaaggagacaccgcagaggctgcagaaccagaaagagaacatgtagacgccactag

SEQ ID NO: 130232 - DNA, 423 bp, synthetic construct
  misc_feature 1..423: note = Description of Artificial Sequence: Synthetic coding sequence
  source 1..423: mol_type = other DNA
atggttcgatatcgggtgcggagcctttccgaacgctcacacgaggtatacaggcaacagcttcatggacaagagcagggccatcacggacaggaagaacaagggctgtccccagaacacgtcgaagtttacgaaagaacccacgggcagtcacattatcggcgccgccattgtagtagaaggaggttgcacaggattcatagacggcaacaccgcagctgtcgaaggaggaagagaaggagttgtaggcatcgcagaagacaccggcgggagtccctgggggaccctctcaaccagaacttcttgtctcagaaagctgctgaacccggccgcgagcatgccgaaggtactaagctccccgggcctctaacgcccagctggaagctacgaaaaagtaggccaaagcatcaggttcgcccttag

SEQ ID NO: 130233 - DNA, 657 bp, synthetic construct
  misc_feature 1..657: note = Description of Artificial Sequence: Synthetic coding sequence
  source 1..657: mol_type = other DNA
taacttgcactgctactggccagagccggactgaggaagcctgagtcacaggaggccgcccccctgagcggaccatgcgggaggagggtgatcacatctcgaattgtcgggggtgaggacgctgaactgggaagatggccttggcagggttcactgcgtctctgggacagtcacgtctgtggtgtgtctttgttaagtcatcggtgggctctcacagccgcccactgcttcgagaccgacttgagcgacccgtctggatggatggtgcagttcggacaactcaccagcatgccctctttttggagccttcaggcttactacactagatacttcgtgagtaatatctacctgagtcctagataccttggcaattccccttacgacattgcacttgtgaagttgagcgcgcccgtgacctacaccaaacacatccagcctatttgcctgcaggccagcaccttcgaatttgagaatcgaactgattgctgggtgaccggctggggatacatcaaggaagatgaaggaagctccggtaggcatcataagcagctctacgtgcagcccccactgcctcaggtgcagtttcctcagggccacctctggcgtcatggattgtgctggcagtgcccacgcagggagggctgtctgctgcgctag

SEQ ID NO: 130234 - DNA, 744 bp, synthetic construct
  misc_feature 1..744: note = Description of Artificial Sequence: Synthetic coding sequence
  source 1..744: mol_type = other DNA
atgaacccacttctcatactaacatttgtcgcagccgccctagcggctccattcgatgatgatgacaaaatcgtcggaggttataattgcgaagaaaacagcgtgccataccaagtgagccttaattcgggatatcacttctgtgggggatctctcattaatgagcagtgggtggtgtccgccggccactgctacaaaagccgcattcaggtgcgcctgggcgagcataacattgaagtactcgaggggaatgaacagttcatcaacgctgctaaaataataagacatccacagtatgatcgcaagacgctgaataatgacatcatgcttatcaaactgtctagcagagctgttattaacgccagggtgagtactatttccctgcctaccgctccaccggcaacaggaactaagtgcctgattagcggctggggtaacaccgcctcctccggggcagactaccctgatgagctccagtgtttggacgcaccagtgctctcccaggcgaagtgtgaggcctcatatccaggaaagatcactagtaatatgttctgcgtcggcttccttgaggggggtaaagatagctgccaaggggactcagggggacccgtagtgtgcaacgggcaactccagggcgtggtgtcctggggagatggctgtgctcagaaaaacaagcctggggtttacaccaaagtgtacaattatgtgaaatggattaaaaacacgatcgccgccaacagctag

SEQ ID NO: 130235 - DNA, 714 bp, synthetic construct
  misc_feature 1..714: note = Description of Artificial Sequence: Synthetic coding sequence
  source 1..714: mol_type = other DNA
atgaaccccctgttgattctcacctttgtcgcagctgcgttggccgcgccatttgatgatgatgacaagatcgtgggggggtacaattgtgaagaaaattcagtgccttaccaggtatccctgaatagtgggtaccatttctgtggggggagcctgataaatgaacagtgggttgtgtccgccgggcactgctacaaaagcaggatccaggttagattgggcgaacataacatcaacgctgctaaaataatccgtcacccgcagtacgacaggaagacattgaacaacgacataatgctcatcaaactctcgagcagggctgtgatcaatgcgagagtgagtaccattagcttgcctactgcccctcctgcaaccggaacaaaatgcctaatcagcggctggggaaacaccgctagcagtggtgccgactacccggacgagctacagtgtctcgacgcacctgtcctttctcaggcaaagtgcgaagcctcttatccaggcaagatcaccagtaatatgttctgtgtgggatttctggaaggtgggaaggacagctgtcagggcgattctggaggtcccgtggtatgcaacggacagctccagggagtcgtgagctggggcgacgggtgcgctcagaagaacaaaccgggagtctacacaaaagtttacaactatgtcaagtggattaagaacacaatcgctgccaactcctag

SEQ ID NO: 130236 - DNA, 2628 bp, synthetic construct
  misc_feature 1..2628: note = Description of Artificial Sequence: Synthetic coding sequence
  source 1..2628: mol_type = other DNA
atgactctggcacggttcgtgttagccctgatgctcggcgccctgcctgaagttgtgggcttcgacagcgtcctcaatgattctctccatcactcacatcgacacagcccacctgccgggcctcactatccttattacctacctacgcagcaaaggcccccacgcacacggcctcctccacccctgcccaggttcccccggccccctcgggcacttcctgcccagagaccacacgctcttcaggctgggcacaccccgcgaccacatccatgggggtgcccagcgggtgagccctgggtctctgttacagatttcggggctccttgtctgagatgggcggaagttccgccttttttagagcggtccccccctgccagttgggcccaactacggggccagcggcataatttttgtcggtctccagacggggcaggtcgtccttggtgtttctacggcgacgccagaggaaaggttgattggggctactgcgattgcagacacggctccgttcgcctgcgaggtgggaagaatgagtttgagggaacggttgaagtatacgcttcaggagtttggggcaccgtgtgttccagtcactgggacgacagtgacgcgtcagttatctgccaccagttgcagcttggcgggaaggggatcgccaagcagacccccttctctgggttgggcctaattcccatatactggtccaacgtcaggtgtagaggtgatgaggagaacatcctgctgtgtgagaaggatatctggcaggggggtgtatgcccccagaagatggctgccgccgtgacatgctctttctctcatggacctacttttccaattatccggctggctgggggcagtagcgtacacgagggcagggttgagctttatcacgcaggccagtggggtaccgtatgcgacgaccagtgggacgacgctgatgctgaggttatctgtagacagctaggcctctcaggaattgccaaggcttggcaccaagcatattttggcgagggttcgggacccgttatgctggatgaagtgcgctgtacaggtaatgagttgagcatcgaacaatgccctaagtcgtcttggggggagcataattgtggtcacaaagaggacgccggcgtgtcatgcaccccacttacagacggggtgatcagacttgccgggggcaagggctcccacgagggtagactggaggtatattaccgcgggcaatggggaacagtgtgtgacgacggttggacagaactgaacacatatgtcgtgtgcagacagttgggttttaagtatggcaagcaggcaagtgccaatcactttgaggaaagcaccggacctatctggctcgatgatgtaagttgctccggtaaggagacaagattcttgcagtgctctaggcggcagtgggggcggcatgattgcagtcaccgggaagacgtcagcattgcctgttacccaggcggcgaaggtcacaggctgtccctaggcttcccagttagattaatggacggcgagaataagaaggagggtcgagtagaggtcttcatcaacggacagtgggggacaatatgtgacgatggttggaccgataaggatgctgctgtcatttgccggcagctcgggtataaaggaccagcccgggcccggaccatggcgtattttggagaaggcaaagggcccatccatgtggataacgtgaaatgcactgggaacgaaaggagcctggccgattgcataaaacaagacattggccggcacaactgtagacatagtgaggacgcgggggtgatttgcgattactttggcaaaaaggccagcggtaactcaaataaagagtctttgagctctgtatgcggactgaggctgctccacaggcgccagaagagaatcattggagggaagaattccctgcgagggggttggccttggcaagtgtccctccgcctgaaatcctctcacggggacggacgtctcctttgtggagctacgcttctctcaagttgttgggtgttgactgcagctcactgctttaagagatatggaaattccacacggagctacgcagttagggtgggggactaccatactctggtccccgaagagtttgaagaggagatcggagtgcaacagattgtaattcacagggagtacagacctgacagaagcgattatgatatcgccctggtacgacttcagggacctgaggagcagtgcgcccgcttttcgagccatgtgctacctgcatgtctccctttgtggagagaacgtccacagaagacagcatccaattgttacatcactggttggggcgataccggaagggcttacagccgcaccctccagcaggcagccatacctctcctacctaaaaggttctgcgaagaacgctacaagggtcggtttactggaagaatgttgtgtgccggcaacttgcacgaacacaagcgagtggacagttgccagggtgacagcggcggaccactgatgtgtgagcgtccaggcgagtcatgggttgtctacggcgtaacgagctgggggtacggctgtggtgtgaaagacagcccaggtgtctacacaaaggtgagcgccttcgtgccttggataaaatcagtcacaaaactatag

SEQ ID NO: 130237 - DNA, 489 bp, synthetic construct
  misc_feature 1..489: note = Description of Artificial Sequence: Synthetic coding sequence
  source 1..489: mol_type = other DNA
atgaaggggtttactgctaccttgtttctgtggacattaatctttcctagctgttcgggaggaggtggcggcaaggcatggcccacccatgtagtatgctctgacagcggcctggaagtgctttaccagtcctgtgacccactccaggacttcggattttccgtcgagaagtgttccaagcaattgaaatctaacatcaacattcggtttggcatcattttacgagaggacatcaaggagctgtttctcgatctggctctgatgagtcaaggatcctccgtgctgaacttctcttaccccatatgtgaggcagctctgcctaagtttagcttctgtggacggagaaagggtgagcagatttactacgcagggcctgttaataaccccgagttcaccatcccgcagggagaataccaagtactgctggagctctatacagagaagcgttctacagtggcctgtgccaatgccacaattatgtgttcttag

SEQ ID NO: 130238 - DNA, 822 bp, synthetic construct
  misc_feature 1..822: note = Description of Artificial Sequence: Synthetic coding sequence
  source 1..822: mol_type = other DNA
atggccgtgtggttggcacaatggctgggcccactccttctggtgtctctgtggggcctcttggcacctgcctcactgctcaggaggctgggggagcacatccagcaattccaggagtccagtgctcagggcctggggctgagtttaggccctggggcagccgcgttgccaaaggtcgggtggctcgaacagctcctagacccgtttaacgtgtctgacaggaggagcttcctgcagcgctactgggtgaatgatcagcattgggtagggcaggatgggcccattttccttcatttgggcggtgaaggatcgttaggacccggcagcgtcatgagaggacatcctgctgccctggcaccagcatggggggcgctggtgatctcactagaacataggttttatgggctgagtatccccgctgggggccttgaaatggcacagctaaggttcctgagcagccgactggctctggcagacgtagtgtccgcccgtctggccctgtcccggcttttcaatatttcatccagctccccttggatttgctttggcgggtcttatgcgggatccctggcagcctgggcgagactgaaatttccccatctcatcttcgcatccgttgcctcttccgctcccgtccgtgctgtccttgacttctcggagtataacgacatagtcctccacagtctgggacagaaatgtctttccttctctagggcggaaactgttgcccagcttcggtcaaccgaacctcaactaagcggagtgggcgacaggcagtggctataccagacctgcaccgagtttggattttacatcacctag

SEQ ID NO: 130239 - DNA, 501 bp, synthetic construct
  misc_feature 1..501: note = Description of Artificial Sequence: Synthetic coding sequence
  source 1..501: mol_type = other DNA
atggcagtctggctggcccagtggctaggccctctcctgttggtttctctgtgggggctcctggcccccgcttcactgctccgtaggctgggtgaacacatacagcagttccaggaaagcagtgcacaagggttgggtttgtctttgggccctggggccgcggcattaccaaaggtgggttggttggagcaactgctcgacccttttaacgtgtccgaccgacgttccttccttcaacggtattgggtcaatgatcagcactgggttggccaggacggacccatctttctccatctcgggggagagggatccctgggcccagggagcgtgatgaggggccatccagcagcccttgctcctgcctggggagccctcgtgatctctttagagcacagattctacggcctgtccatcccggccggcggcctggagatggcccagctaagatttctgtcaagcaggctggctctttcctgcaccgcctgggcgaggagcgtctag

SEQ ID NO: 130240 - DNA, 498 bp, synthetic construct
  misc_feature 1..498: note = Description of Artificial Sequence: Synthetic coding sequence
  source 1..498: mol_type = other DNA
taggtcatgaggggacacccagccgcgctcgcccccgcttggggcgctctggttatatctctcgagcaccgtttctacggcctcagcattcccgcagggggccttgaaatggcccagttgcgcttcctgtcatcccgcctcgccctggccgatgtggtttctgcaaggctcgcgctaagccgcttattcaatatctctagcagttccccctggatatgttttggaggttcatacgccggtagcttggctgcctgggctcgtttgaagttcccccacctcattttcgcatccgtagcatcgtccgctcctgttagggcagtattggatttcagcgagtacaacgacatcgtcttgcattccctcgggcaaaagtgtttgtctttctctcgggctgaaactgttgcacagcttcggagtactgagcctcaattaagtggggtcggcgataggcagtggctttatcaaacctgtaccgagttcgggttttatgtcacctag

SEQ ID NO: 130241 - DNA, 945 bp, synthetic construct
  misc_feature 1..945: note = Description of Artificial Sequence: Synthetic coding sequence
  source 1..945: mol_type = other DNA
atgggggcaagaggcgccctgttgctcgctctgctcctggctcgagcagggctcagaaaacctgagtcacaggaggcggctccgctatccggcccgtgtggacgtcgggtgatcacctccagaatagtaggaggagaagacgccgagctcggcaggtggccatggcaggggagcttaaggctctgggatagccatgtgtgcggggtatccctgctaagtcatagatgggctctgacagcagcacactgttttgaaacctactccgatctgtcagatccctccggatggatggtccaatttgggcagctgacatccatgccttcattttggtcactccaagcttattatacaaggtatttcgtatcaaacatctacttgagccctcgatatctgggaaattctccctatgatattgccctggtgaagctgagcgccccagtgacctacactaagcacatccagccaatttgtctacaagcctcaacctttgagttcgaaaacaggactgattgttgggtgactggatgggggtatatcaaggaagacgaggccctgccatcgccgcacacactgcaagaggtgcaggtggctatcatcaataatagcatgtgtaaccacctgtttcttaagtacagcttccgaaaagacatctttggggacatggtgtgcgcgggaaacgcccaagggggcaaggacgcgtgttttggagattctggtgggccattggcctgcaacaagaacggactctggtatcagatcggggttgttagctggggagtcggctgcgggagaccaaacagacccggggtgtatactaatatcagccaccattttgaatggatccagaagctgatggcacagtctggcatgagtcagccagaccccagctggccactcctgttcttccctctcttgtgggccctacctttactaggccctgtttag

SEQ ID NO: 130242 - DNA, 903 bp, synthetic construct
  misc_feature 1..903: note = Description of Artificial Sequence: Synthetic coding sequence
  source 1..903: mol_type = other DNA
atgggtgcccggggagccttgttgctggctctgctgctggcccgcgctggtctccgaaagcccgagtcacaggaagctgcacctttgtctggaccatgcggtagacgggtgatcacctctcggatagtggggggcgaggacgcggagttgggaaggtggccttggcagggctctctgagactgtgggacagccacgtatgcggagtgtctctactttctcataggtgggctctgaccgccgcgcactgttttgaaacctattctgatttgagtgatccttccggatggatggtgcagttcggccagctcacgtctatgcctagcttctggtctctgcaggcctactatacacggtatttcgtgagcaatatttacctgtcaccacgatatctgggaaacagcccctacgacattgccctcgtgaaactttcagcaccagtcacttataccaagcatattcagcctatctgtttgcaggccagtaccttcgaatttgagaaccgcacggactgctgggttacaggctgggggtatatcaaagaggacgaggccctgccaagtccccacactcttcaggaggtgcaggtggcaataattaacaacagtatgtgcaatcacttatttttgaagtatagcttccggaaggacatttttggcgatatgggggatagcggcgggccactagcatgcaataagaatggcttgtggtatcagatcggcgtggtgtcgtggggcgtaggctgtgggaggcccaaccgccccggggtatataccaacattagccatcatttcgagtggatccagaagctaatggcccagagtgggatgtcacagcctgacccatcttggcccttgctgtttttccctctgctgtgggccttgcccctgttgggccctgtgtag

SEQ ID NO: 130243 - DNA, 939 bp, synthetic construct
  misc_feature 1..939: note = Description of Artificial Sequence: Synthetic coding sequence
  source 1..939: mol_type = other DNA
atgggagctcgaggtgcccttctactggcactgctcctggcacgcgccggactcaggaaacctgagtctcaggaagccgcccccctgtctggaccttgtggccggcgagtcatcacgtcacgcatcgtgggaggcgaggacgcagagctcgggagatggccctggcaaggatccctccggctgtgggacagtcatgtctgtggtgtaagcctcctcagtcataggtgggccctgacagcggcacattgcttcgaaactgacttaagtgacccttcaggttggatggtgcaatttggtcagctgacaagcatgccttccttctggtctctgcaggcttattatacccggtactttgtcagtaacatctacctgtcacccagatatcttggaaacagcccctacgacatcgccctggtgaagctctccgcaccggtgacctatacgaaacacatccagccaatctgtttgcaggcatccacctttgagtttgaaaatcggaccgactgttgggtgaccggatggggctatatcaaggaagacgaggcactgccatctccacacacactgcaggaagtgcaggtggcaatcatcaataattccatgtgcaaccaccttttcctcaagtattccttcaggaaggatattttcggcgatatggtatgcgccggtaacgctcagggggggaaggatgcatgttttggagatagcggcgggccactcgcctgtaataaaaacgggctatggtaccaaattggtgtcgtgtcttggggggtgggctgcggacggcccaacaggcccggcgtttataccaacatatcacatcatttcgagtggatccagaagcttatggcacagtcgggcatgtcacaaccagatcctagttggcctctcttattctttccccttctatgggctctgcccctcttggggccagtttag

SEQ ID NO: 130244 - DNA, 954 bp, synthetic construct
  misc_feature 1..954: note = Description of Artificial Sequence: Synthetic coding sequence
  source 1..954: mol_type = other DNA
atggtggtgtcaggcgctccgcctgctctcggaggcggctgcctcgggacatttacatcactcctattgcttgccagtactgccattctgaacgctgccagaatcccagtaccccccgcatgtggaaaaccacagcaacttaatcgggtggtgggcggagaagacagtaccgactctgaatggccatggatcgtttcgatccagaaaaatgggacacatcactgtgcaggctcactcctgacgtcccggtgggtgatcacagccgcccactgttttaaggataatctcaacaaaccctacctgtttagcgtgctgctgggagcatggcagctcggaaatcctggctcccgtagtcagaaagtgggagtggcctgggtggaacctcatccagtgtactcttggaaagaaggcgcttgtgccgacatcgcccttgtgcgactcgagcggagcatccagttctcagagcgggtgctccccatttgcttacctgatgcctctattcacttaccacctaacactcactgctggatcagtgggtgggggagtatccaggatggcgtgcctctcccgcatcctcagaccctgcagaagctaaaggtgccaatcatagactctgaggtctgttcgcacctgtattggcgaggggctggtcaagggcctattacagaggacatgctgtgcgccggataccttgaaggagaacgcgacgcttgcctgggggatagtggaggtccgctcatgtgccaggtcgacggggcctggctactggccggaatcatctcctggggcgagggctgtgctgagagaaacagacctggggtatacataagcctatctgcccaccgttcatgggtggagaagattgttcagggggtgcaactaaggggtagagcacaaggcgggggcgccctgagagcgccaagccagggctcgggtgcagccgcaaggtcctag

SEQ ID NO: 130245 - DNA, 786 bp, synthetic construct
  misc_feature 1..786: note = Description of Artificial Sequence: Synthetic coding sequence
  source 1..786: mol_type = other DNA
atgcacatgagagagacctctggctttactttaaagaaaggaaggtccgcgccccttgtttttcaccccccagatgccctcatagccgtccccttcgacgacgacgacaagatagtgggaggctacacatgcgaagaaaactcactgccatatcaagtttcattaaattccggcagccacttctgtggagggagcctcatatctgaacagtgggtggtgagcgcggcccactgctacaaaaccaggatccaggtccgtctcggtgagcataatattaaagtgctggagggtaatgaacagttcattaacgctgccaaaatcatcagacaccctaagtacaaccgggatacgttggataacgatattatgttgataaaactgtcctcacccgctgtgataaatgctcgcgtctcaactatttctcttccgaccaccccacccgccgctggaaccgagtgcctgatctctggatggggaaatacccttagtttcggcgcagattatcccgacgagttgaaatgtctcgacgcccctgtactcacccaggcagagtgcaaggcttcttatcctggcaagatcaccaattccatgttttgtgtgggattcctggaaggcggcaaggattcatgccaaagggattctggcggcccggtggtgtgtaatggccagcttcagggcgtcgtgtcctggggccatgggtgcgcatggaaaaatagacctggagtttacaccaaagtctacaactatgtcgattggattaaggacaccatcgccgcaaacagctag

SEQ ID NO: 130246 - DNA, 915 bp, synthetic construct
  misc_feature 1..915: note = Description of Artificial Sequence: Synthetic coding sequence
  source 1..915: mol_type = other DNA
atgtgtgggccagacgatcggtgccccgcacgttggcctggaccagggcgggctgttaaatgcggcaagggattggcagcagcgcgcccaggccgcgtggagagagggggggcacaacgcggtggagccggtctagaactacaccccctgctgggcgggcggacgtggcgcgccgctagggatgctgacggatgcgaagctctgggcacggtggccgtgccttttgatgacgatgataagatcgtgggaggttacacatgtgaagagaacagcctgccgtatcaagtgtccctgaattccggcagccacttttgtgggggctctctgatctccgagcagtgggtggtttcagccgcacattgctataaaactaggatccaggttaggctcggtgaacacaacattaaggtccttgagggcaacgagcagtttatcaatgccgccaagattatcaggcatccgaaatataatagggatacgctcgacaatgatattatgcttatcaaactgagtagcccggcagtcattaatgcccgcgtcagcaccatttcccttccaacaacacctccggcagctggcacagaatgtctgattagtggctggggcaacactctctctttcggagcggattacccggacgagctaaagtgcctggatgcacctgtacttacgcaggccgagtgcaaggccagctaccctggcaagataactaactcgatgttctgtgttgggtttctggaaggcggcaaagactcttgtcagcgcgactctggtgggccagtggtctgtaacgggcaattacagggtgtggtatcttggggacatggatgcgcctggaagaatagacccggtgtctacaccaaggtttacaattacgtggattggataaaagataccatcgccgccaattcctag

SEQ ID NO: 130247 - DNA, 744 bp, synthetic construct
  misc_feature 1..744: note = Description of Artificial Sequence: Synthetic coding sequence
  source 1..744: mol_type = other DNA
atgaatccttttttaatactcgcatttgttggtgccgcggtcgccgtgccgtttgacgacgatgacaagattgtgggtggttacacctgcgaggagaactctctcccctatcaggtctccctgaattcaggtagtcatttctgcggaggatcattgatatcggaacaatgggtggtgtctgctgcacattgttacaaaacccggattcaagtccggctaggggaacacaatatcaaggtgctcgaaggaaacgagcagttcattaacgccgccaagattatccgacacccaaagtataatcgagatactctcgataacgatatcatgttgatcaaattaagctcccctgctgttatcaacgccagagtgtccactatcagcctgcccaccacccctcccgccgcaggcaccgagtgtctgatctcaggctggggtaataccctcagtttcggagccgactaccccgacgaattgaaatgcctggatgcccccgtcttgacacaggccgaatgcaaggcatcttatccaggcaaaatcaccaattccatgttttgcgttggctttttggagggcggtaaggatagttgtcagagagactcagggggaccagtggtctgcaatggtcaactgcaaggggtggtgtcttggggtcatgggtgcgcctggaaaaatcggcccggggtatacacaaaagtgtataactacgtcgactggattaaggataccatcgcagccaacagctag

SEQ ID NO: 130248 - DNA, 723 bp, synthetic construct
  misc_feature 1..723: note = Description of Artificial Sequence: Synthetic coding sequence
  source 1..723: mol_type = other DNA
atgggcccagctggcgaagtggccgtgccctttgatgatgacgacaaaattgtcggaggctacacttgtgaagaaaattctctcccctaccaagtgagcttaaactcaggctcacacttctgcggtggctccctgattagtgaacagtgggtcgtgagcgctgcgcattgctacaagacgagaatccaggtgcggctcggcgaacacaatatcaaagtactggaaggcaatgaacagttcattaacgcggcgaaaataatacggcaccctaagtacaatagggacacactcgacaatgacataatgctcattaaactcagtagcccagcagtgatcaacgcaagagtgtccaccattagtctgcctacaaccccacccgccgcaggtactgagtgtctaatctccggatggggcaatacactttcattcggggcagattatccagacgagctgaagtgccttgatgctcctgtgttgacccaggctgaatgtaaagcttcctacccaggaaagatcactaactctatgttttgtgtgggattcctggaagggggaaaggacagttgccagcgggattccggcggcccagtagtctgtaatgggcaacttcagggtgtcgtcagctggggacatgggtgcgcgtggaagaaccgacctggggtgtataccaaggtgtacaactacgtagattggatcaaggatacaattgccgcgaactcctag

SEQ ID NO: 130249 - DNA, 537 bp, synthetic construct
  misc_feature 1..537: note = Description of Artificial Sequence: Synthetic coding sequence
  source 1..537: mol_type = other DNA
atgagggagacaagtggctttaccttgaagaagggacgatcagccccactggtcttccacccccctgatgcacttattgccgttcccttcgatgatgatgataagattgtggggggttatacatgtgaagaaaattccctaccttaccaggtgtccctgaacagcggctcacacttttgtggaggaagcctgatctcagagcaatgggttgtgtcagctgcccactgttacaaaactaggattcaggttagactgggggagcacaacatcaaggtgctcgaggggaatgaacagttcattaacgccgccaaaatcatccggcaccccaagtacaatcgggataccctagacaatgatatcatgcttatcaagctgagtagtccagcagtgattaacgcgagggtatccactattagtctacctacaacaccacccgccgctgggaccgagtgtctcatttcaggctggggaaataccttgtcgtttggagccgactacccggatgagcttaaatgtctcgacgcccctgttctgtag

SEQ ID NO: 130250 - DNA, 843 bp, synthetic construct
  misc_feature 1..843: note = Description of Artificial Sequence: Synthetic coding sequence
  source 1..843: mol_type = other DNA
atgcgaggggtgtcgtgcttgcaggtcctcttactgctggttcttggggcggcaggtacgcaggggcggaagagcgccgcatgcggacagccacgcatgtcctctcggatcgtaggcggtagggatggacgtgacggtgagtggccttggcaggctagtatacaacatagaggtgcccatgtgtgtggaggaagcctgattgcccctcagtgggtgctcacggcagctcattgcttcccacgcagagccctgcccgccgagtatagggtaaggttgggggccctgcggcttggtagcacttcacctaggactctctccgtgcctgttcgcagggttctgctcccacctgattactctgaagacggtgctagaggagatttggcactgctgcaactgcgaaggccagttcccctgtccgctcgagtccagcccgtctgtctgcctgtgccgggtgccaggccaccacctggtaccccgtgtcgcgttacaggctggggctcgctgcgccccggtgtgcccttacctgaatggcgcccactccagggcgtgcgcgtacccctcctggattcacggacctgcgatggcctataccatgttggcgccgacgttccgcaagctgagcggatcgttcttcctggctccctctgcgctggttacccacagggacataaagatgcttgccagggcgattcaggtggacctctgacctgtctgcaatcggggagttgggttctagtcggagtggtgagctgggggaaggggtgcgccctccccaaccgcccaggagtatacacctccgtggccacctactcgccatggatccaggcccgcgtcagcttctag

SEQ ID NO: 130251 - DNA, 1032 bp, synthetic construct
  misc_feature 1..1032: note = Description of Artificial Sequence: Synthetic coding sequence
  source 1..1032: mol_type = other DNA
atggcacaaaagggcgtactcggtcccggtcagcttggggccgtagcaatcctgctgtacctgggactgctgcgttcgggcacaggtgcggagggggccgaagctccttgtggcgttgccccccaagcgaggattaccggtggaagcagtgctgtcgccggacagtggccatggcaagtgtccattacctacgagggggtccacgtctgcgggggctccctcgtgtcagagcagtgggtgttgagcgccgctcactgttttcccagcgaacatcacaaggaagcgtacgaggttaagcttggcgctcatcagttggacagctatagtgaggacgccaaagtttccacacttaaggacatcattccacacccctcctatcttcaggaagggtcccagggagatatagcactgctgcagttgagtagacccatcacattttccaggtatatccggcccatctgcttacctgccgcaaacgcatctttccccaatggtctgcactgtaccgtgacagggtggggccacgtggctcccagcgtctcgcttctgactcctaagcccctgcaacagctcgaagtccctttgatctcgcgcgaaacgtgtaattgcctgtacaacatagatgccaagcctgaggagccccacttcgtccaggaagatatggtctgtgctggctatgtcgaaggggggaaggacgcatgccaaggcgattcagggggcccactgtcttgtccagtcgaggggttgtggtatctaacgggcattgtgtcgtggggggatgcttgcggggctaggaacagacccggggtttataccttggcgtcctcgtatgcctcttggattcagtcaaaggtgaccgaactgcagcctagggtcgtccctcagacccaggaaagccagcctgactctaatctctgtggcagccaccttgccttttcttccgcgcccgcacaaggcctgctccgccctatattattcctgcctcttggactcgctcttggccttctgagtccatggctcagcgaacactag

SEQ ID NO: 130252 - DNA, 504 bp, synthetic construct
  misc_feature 1..504: note = Description of Artificial Sequence: Synthetic coding sequence
  source 1..504: mol_type = other DNA
atggcccagaaaggggtgttagggcccggacaacttggggccgtggccatccttctgtacctgggcctcctgagatccggtaccggcaaggaaggagcagccgcgccctgtggcgtcgcaccccaagcccgcattactgggggctcatctgcagttgcaggtcagtggccttggcaagtttccataacttttagtaggtacatacggccaatctgcctccccgccgctaacgcatcattccctaatggcctgcactgtactgtgactgggtgggggcacgtggctccaagcgtttcacttttaacccctaaacctctgcagcaactggaggtgccactgatcagcagggaaacctgcaattgtctgtacaacatcgacgctaagccggaggagccccatttcgtccaggaggacatggtttgtgccgggtacgtcgagggggcccttctgagggttaccctgggcgcccacagccccgctctctggagggtgtctgggacctag

SEQ ID NO: 130253 - DNA, 1197 bp, synthetic construct
  misc_feature 1..1197: note = Description of Artificial Sequence: Synthetic coding sequence
  source 1..1197: mol_type = other DNA
atggagttggaggagggcaaggccgggtcagggctgaggcagtattacctgtccaagattgaagagttacagctaatagttaatgacaaaagtcaaaatcttcgtcgcctgcaagcgcagcgtaatgaactgaatgccaaggttaggttgcttagggaggagctccagctgttgcaagagcagggctcctacgtgggcgaggtggtgcgagcgatggataaaaagaaagttctcgtaaaagtgcaccccgaggggaaattcgtcgtggatgtggacaagaacattgacatcaatgacgtcaccccgaattgccgggtggccctgcgcaacgatagctacaccctacacaaaatactgcctaataaggttgaccctttggtcagtttgatgatggttgaaaaggtgccagacagcacctacgagatgattggcggcttagataaacaaataaaggaaattaaggaggttatagagctccccgttaagcaccccgagctgtttgaggccttaggtattgcacaacccaaaggagttctgctttacggcccaccaggcaccgggaagaccctccttgcaagggccgttgcacatcacaccgattgtaccttcatccgggtgtctggcagcgagctggtccagaagttcattggcgaaggagcgaggatggtccgtgagctgtttgttatggcacgggaacacgccccaagcattattttcatggacgagatagatagcataggctccagtcgtctggagggcggatctggcggggacagcgaggtccagcggacaatgctagagctgctgaaccagctcgacggtttcgaagccacaaagaatatcaaagttattatggccactaacaggatagatatcctcgattcagcgctgctgcgcccaggcagaattgaccgaaaaattgagttccccccccctaatgaagaagcccggctcgatatcttaaaaatccatagcaggaagatgaatctgacccggggaatcaacttaaggaaaatagccgagctgatgccgggcgcctcaggtgccgaggtgaaaggggtctgtactgaagctgggatgtatgccctcagggaaagacgagtgcacgtcactcaagaagactttgaaatggctgtagctaaagtcatgcagaaagacagcgagaagaatatgagcatcaaaaaactttggaaatag

SEQ ID NO: 130254 - DNA, 765 bp, synthetic construct
  misc_feature 1..765: note = Description of Artificial Sequence: Synthetic coding sequence
  source 1..765: mol_type = other DNA
atggcctcgcttttgaaagtcgaccaggaggtgaaacttaaagttgatagcttcagggaacgtatcactagcgaagctgaggatctggtggcaaactttttccctaaaaagcttctagagttagacagcttcctcaaggaacccatcctcaacattcatgatcttacccagattcactctgacatgaatctgcctgtgcctgacccaatccttctgacaaacagccatgatgggttggatggccccacttacaagaagcgacgacttgacgaatgcgaagaagcatttcaggggactaaagtgttcgtcatgccaaacggcatgctgaagtctaaccagcagctggtggatatcatagagaaagttaaacccgagatacggctcctgatagaaaaatgcaacaccgtgaagatgtgggtgcagctcctaattccaagaatcgaggacgggaacaactttggcgtttccatccaagaggagaccgtggcggaactgaggaccgtggagagcgaagctgcctcgtacctggaccagatcagtaggtactacatcacaagagctaaattagttagtaaaatagcaaagtacccccacgtggaagattatcgtaggactgtgaccgagatcgacgagaaggagtatataagtctgaggcttattatcagcgaattacgaaaccagtatgtgactttacacgacatgatcctgaagaatattgagaagataaagaggcccagatcatctaacgccgagacactctattag

SEQ ID NO: 130255 - DNA, 1323 bp, synthetic construct
  misc_feature 1..1323: note = Description of Artificial Sequence: Synthetic coding sequence
  source 1..1323: mol_type = other DNA
atgggtcagtctcaaagcgggggccatggcccaggaggtgggaagaaggacgataaggacaagaagaaaaaatacgagcccccagttccgaccagggttgggaagaagaaaaagaagaccaaggggccagacgccgcctccaagctccctctggtgacacctcatacccagtgcaggctgaagctcctgaagttggaacggataaaggactatttgctcatggaagaagaatttatcagaaaccaggagcagatgaaacctctggaggagaaacaagaggaggagaggtctaaggtggatgatctgaggggcacaccaatgagcgttggtactttggaagaaatcattgacgacaatcatgcgatcgtgtcaaccagcgtgggcagcgagcactacgtttccatcctgtcatttgtggataaagacctgctggagccagggtgtagtgttctgctgaaccacaaagtacatgccgttatcggtgtgctaatggatgatacggatcctctcgtgacagttatgaaggtggagaaggccccccaggaaacttacgcggatattggagggctggacaatcagatccaggagatcaaagagagcgtagaattgccactgactcaccctgagtattacgaagagatggggattaaacctcctaagggcgtaatcctctacgggcctcccggtactggaaaaacgctcctagcaaaagccgttgccaaccagactagcgcaacattccttagggtggtggggtccgagctgatacagaagtacttaggggacggacctaaacttgtccgagaactgtttagagtggcagaggaacatgccccaagtatagtctttattgacgagattgatgctataggcaccaagcgctacgattctaacagtgggggcgaaagggaaattcagaggaccatgcttgaactgttgaatcagctggacggcttcgattcacgtggggatgtgaaggtgatcatggcaaccaatcggatcgaaactctagatccggctctgatcaggccgggcaggatcgatcgaaagattgagttcccgttacccgatgaaaagacaaaaaagaggatattccagatccacacgagtaggatgactttagccgacgacgtgaccctagacgacctgataatggctaaagatgacctctcgggtgctgacattaaggcaatttgtacagaggcaggcctcatggctctgagggaacgcaggatgaaggtgactaatgaggattttaagaagtctaaggaaaatgtgctgtacaaaaaacaagaaggtacacctgaggggctgtatctttag

SEQ ID NO: 130256 - DNA, 1104 bp, synthetic construct
  misc_feature 1..1104: note = Description of Artificial Sequence: Synthetic coding sequence
  source 1..1104: mol_type = other DNA
atggaggaggagttcatcaggaaccaggaacagatgaagcccctcgaggagaagcaagaagaggaaagaagcaaagtagatgacctcagagggaccccaatgtctgtcggaactctcgaggaaattatcgacgacaatcacgccatcgttagcacctccgtgggatcagaacattatgtttcaatactgagttttgtggacaaggacctgcttgagcctggctgcagcgtgctcttaaatcacaaagtacatgcggtgatcggcgtattgatggacgacacagaccccctggtaaccgtgatgaaggtagagaaggcaccccaagagacttacgcagacatagggggattagacaatcagatccaggagataaaagaatctgtggagctgccactgactcaccctgagtactatgaagaaatgggcattaagccccctaaaggcgtcatcctgtatggtccgcccgggaccggtaagactttactggccaaggccgtggccaaccaaactagcgccacctttctgagggttgtcggctctgaattaatacagaaatacctaggagatgggcctaagctcgtgcgcgagcttttcagggtggcagaagagcacgccccaagcatcgtctttatagacgaaatcgatgctattgggaccaaaaggtatgatagtaatagtggcggcgagagagaaatccaacggaccatgttggagctgctgaatcagctcgatggatttgactcccggggagacgtcaaggtcatcatggccaccaacagaattgagactctggaccccgccctgatccgaccggggaggatcgacaggaaaatagaatttccactgcctgatgagaagacaaagaaaaggattttccaaattcatacttctaggatgaccctggctgacgacgtaaccctggacgacctgatcatggctaaggacgacttgagcggggcagacattaaggcaatctgtaccgaagccggactgatggcgctgcgcgagcggaggatgaaagtgaccaacgaggatttcaaaaaatcgaaggaaaatgtgttatataagaagcaggagggaacccccgagggtctttacctgtag

SEQ ID NO: 130257 - DNA, 1302 bp, synthetic construct
  misc_feature 1..1302: note = Description of Artificial Sequence: Synthetic coding sequence
  source 1..1302: mol_type = other DNA
atgcctgattacctaggggctgatcaacgaaaaactaaagaggacgagaaggatgataagcctatcagggccctggacgagggggacatcgcacttctgaagacttacggacagagcacttactctcggcagattaaacaggtggaggatgacattcagcagctacttaaaaagattaacgagttgaccggtattaaggaaagtgacactggactcgccccacccgccttgtgggaccttgctgccgacaaacaaactttgcagtctgaacagccgctgcaggtcgctagatgcacaaaaataatcaacgctgactcggaggaccccaaatatatcattaacgtcaagcagttcgctaagtttgtggttgacctctctgatcaggtagctccaactgatatagaggagggaatgcgggtgggcgtggacagaaataagtatcaaattcacataccactcccccctaagatagatccaacagtcacaatgatgcaggtggaagagaaaccggatgtcacctacagtgacgtgggagggtgcaaagagcagatcgagaaactgcgggaggtggtggagacgcccctcctgcaccccgagcggtttgtgaacttgggcatcgagccacctaaaggagtgctgctatttgggccccccggcacgggaaaaaccctatgcgcccgtgcggttgctaaccgcacagacgcctgcttcatcagggtgattggctcagaactggttcagaagtatgtgggggaaggtgcacgtatggtgcgggagctgtttgaaatggcacggaccaaaaaggcctgcttgatttttttcgatgagatagacgccattggcggcgctcgcttcgacgatggcgcaggtggagacaacgaagtccagcggacaatgctggagctcataaaccagctggatggattcgatccaagagggaacattaaggtgctaatggccactaacaggcccgacacactagatcccgcactgatgaggcccgggcgcctggaccgaaagattgaattctccctgcctgatctagaggggaggacgcacatcttcaagatacacgcacgctctatgagtgtggaacgtgacatcaggtttgaactactggcgcgcctgtgtcctaatagtacgggggcagaaattaggtctgtgtgcactgaggctggcatgttcgccattcgcgccagacgcaagatcgcaaccgaaaaggactttctcgaggccgtcaataaggtcatcaaatcttatgctaagtttagcgcgacacctaggtacatgacctataattag

SEQ ID NO: 130258 - DNA, 393 bp, synthetic construct
  misc_feature 1..393: note = Description of Artificial Sequence: Synthetic coding sequence
  source 1..393: mol_type = other DNA
atgccagactatctgggtgcagaccagagaaaaacgaaagaagatgagaaagatgacaaaccaatccgagctcttgatgagggggacatcgcactgctaaagacttacggtcagtctacatactctagacagatcaagcaagtcgaagacgacattcagcagcttctaaagaaaatcaacgaactcacaggcattaaagagtccgacacagggctggcacccccggcactgtgggacttggccgccgacaaacagactttgcaaagcgagcagcctctccaggttgcaaggtgtacaaaaatcatcaatgcagatagcgaagatcctaagtacattatcaatgtaaagcagttcgcaaaattcgtggtagatttgagcgaccaggtggcttag

SEQ ID NO: 130259 - DNA, 1302 bp, synthetic construct
  misc_feature 1..1302: note = Description of Artificial Sequence: Synthetic coding sequence
  source 1..1302: mol_type = other DNA
atgccggactacctgggtgcagatcagcggaaaacgaaagaggacgaaaaggatgacaaaccgattcgcgcactggacgaaggcgacatcgccctgctgaaaacctatggccagtctacctatagtcgtcagattaagcaggtagaggacgacattcagcagttacttaagaaaatcaacgaactcacggggatcaaagagagtgacactggtttggcccctccagcactgtgggatctagccgcggataagcagacattacaaagcgagcagccccttcaggtcgctaggtgtacaaaaataatcaacgctgattccgaggaccccaagtatatcattaatgttaagcaatttgcaaagtttgtggtcgacctcagcgatcaggtggcacccaccgacattgaggagggcatgcgggttggggtggatcgcaataagtaccaaatacacatcccacttccgcctaaaattgaccctaccgtgaccatgatgcaggtcgaggaaaagccagatgtaacctacagcgacgtgggcggttgtaaggagcaaatcgagaaacttagagaagtcgttgaaacccctctgctccatccagaaagatttgtgaacttgggtatcgagccacccaagggagttctcctctttgggccacccggcaccggcaaaacactctgtgctcgagcagttgcaaaccgcacagacgcctgtttcattcgggtgatcggatctgaacttgtgcagaagtatgtgggtgaaggagcccgaatggtgagagagctgtttgagatggccaggacaaaaaaagcctgcctgatttttttcgacgagattgatgccatcggaggcgccaggttcgacgatggagccggaggagataatgaagtgcaaaggacaatgctggagctcatcaatcaactcgatggcttcgacccaagaggtaatataaaggtcctgatggccactaaccggcctgacaccctggatcctgccttgatgagacccggacggctggaccgaaagatagaattttctctcccagacctcgagggtcgaacccacatcttcaaaattcacgctcgctctatgtcagtcgaacgagatattagatttgagctgctggccaggttgtgtcctaacagcacaggcgccgaaatccgatctgtctgcacagaggctggcatgttcgctattcgggctaggagaaagatagcgaccgaaaaggatttcctagaagcagtgaataaagtgattaagtcttacgccaagttctctgctaccccgcgttacatgacttataattag

SEQ ID NO: 130260 - DNA, 393 bp, synthetic construct
  misc_feature 1..393: note = Description of Artificial Sequence: Synthetic coding sequence
  source 1..393: mol_type = other DNA
atgcctgactacctgggggccgaccaaagaaaaacgaaagaggacgaaaaggacgacaaacccattcgggccctcgacgagggggatatagcccttctgaagacctatggccagtccacatattctagacagattaaacaggttgaggacgacatccagcaacttcttaaaaagattaacgaactgacaggcatcaaagagtcggacactggccttgcaccaccagctctgtgggatctggcggcagacaagcaaacactgcagtctgagcagccactccaagtggcccggtgtactaagattattaacgcagattcagaggacccaaaatacatcatcaacgtcaaacagttcgctaaattcgttgtagacctgagcgaccaggtggcatag

SEQ ID NO: 130261 - DNA, 891 bp, synthetic construct
  misc_feature 1..891: note = Description of Artificial Sequence: Synthetic coding sequence
  source 1..891: mol_type = other DNA
atgcgggttggcgtggatcgcaacaagtatcagatccacataccccttccacccaagatcgatccaaccgttactatgatgcaggtggaggaaaagcctgacgttacgtattcagacgtcggtgggtgtaaggagcagatcgagaagctgagggaggttgtagagacacccttgctacaccccgaacgttttgtaaacctcggaatcgaaccccctaagggggtgctcctcttcggccccccggggaccggcaagacactgtgcgcgagagccgtggcaaacaggactgatgcctgcttcatccgcgtaatcgggtcggagctcgtacagaaatacgttggtgaaggcgcccgcatggtgagagaattgttcgagatggcaagaactaagaaggcttgtctgatcttttttgacgaaatcgatgctatcggtggtgcccgctttgacgatggggccgggggcgacaatgaagtgcaaagaaccatgctggagctcattaaccaactcgatgggtttgatccgagaggaaacatcaaggtgttgatggctacaaacaggccggatacactagaccccgccctaatgcgtccgggtaggctggatcgaaagatcgagttcagccttcctgacctggaggggaggacacatatcttcaagattcatgcgcgatccatgtcagtcgaacgcgacatacgcttcgagctactggcgcggctgtgtccaaactctacaggggctgagattcgctccgtttgtacggaggccggcatgtttgccattagggcccggagaaaaatagccacagagaaggacttcctagaggcagtaaacaaggtaattaagagttacgctaagttttcggcaacaccccgctatatgacctacaactag

SEQ ID NO: 130262 - DNA, 1320 bp, synthetic construct
  misc_feature 1..1320: note = Description of Artificial Sequence: Synthetic coding sequence
  source 1..1320: mol_type = other DNA
atgaatctgcttccaaacatcgagtcgccagtaacccgacaagagaaaatggccaccgtgtgggatgaagccgagcaggatggcataggggaagaggtgctcaaaatgtccacggaggagatcatccaaaggacacgcttgctggactcagagattaagatcatgaagtcagaggtgttgcgggtgactcatgagttgcaagctatgaaggacaaaataaaggagaattctgagaaaattaaggttaataaaaccctgccttacttggtttccaatgttatcgagctcctggacgttgacccgaacgatcaggaagaggatggcgctaatattgatctggattcccagagaaagggcaagtgtgcagttataaagactagtaccaggcaaacctattttttaccggtcatcggcttggtggatgccgagaagctgaaaccaggcgacctcgtcggagtcaataaggactcctatctgatcctggaaactcttcctaccgagtatgatagtcgtgtgaaagctatggaggtggacgagcgccccacagagcagtattcagacatcggcggacttgacaagcaaatccaggaactggtcgaggctatcgtgctgcctatgaaccacaaagagaaattcgagaaccttggtatccagccccctaaaggtgtgcttatgtacggcccgcctggcacaggaaagacccttctggctcgagcctgtgcagctcagaccaaggccacgtttctcaagctcgctggcccccagctcgtgcagatgttcattggggatggtgccaaacttgttagagacgcctttgctctagcaaaagaaaaagcaccttctatcattttcattgatgaacttgacgcaatcggaactaagaggttcgatagtgagaaggcaggcgacagggaagttcagagaaccatgttggagttgctcaaccagttagatggtttccagcccaacactcaagtgaaagtcattgcagccaccaatcgtgtcgacatcctcgatccagcactccttagatctggccgtctcgataggaaaattgaattcccaatgccaaacgaggaggctagagcacgtattatgcagattcactctcggaagatgaacgtgtcaccggatgtcaactacgaggaactcgctcgttgcaccgatgacttcaacggagctcaatgtaaggcagtgtgtgtcgaggccgggatgattgcgcttcgtaggggcgccactgagctcacgcacgaagactatatggagggaatattggaggtgcaagcgaagaaaaaagctaacctgcagtactacgcctag

SEQ ID NO: 130263 - DNA, 1257 bp, synthetic construct
  misc_feature 1..1257: note = Description of Artificial Sequence: Synthetic coding sequence
  source 1..1257: mol_type = other DNA
atggaagaaataggcatcctagtcgagaaggcccaagatgaaatccccgcactctccgtgtctcgacctcagaccggcctgtctttccttgggccagaaccagaggacctggaagacctttactctaggtacaagaagctccagcaggagctcgaattcctagaagtccaggaggaatacatcaaggacgagcagaaaaatctgaaaaaggagttcctgcatgcccaagaggaggtgaagcgtatccaaagcatccctctggtgatagggcagtttctcgaagctgtcgaccaaaacacagccattgttggttcaaccacgggttccaactactacgtcagaattttatccaccatcgacagggaactgctgaagcccaacgcaagtgtagctctacacaagcattctaatgccctggtcgacgtcttgcctcccgaggctgattccagtatcatgatgttgactagcgatcagaaaccggacgtgatgtatgctgacataggcggaatggatatccaaaagcaggaggttagggaggccgtggagctacccctgacacatttcgagctgtacaaacaaatcggcattgacccaccgcgaggggtccttatgtatgggcccccggggtgtggcaagaccatgttagccaaggccgtggcacatcatactacagccgctttcatccgtgtggtaggctccgaatttgtgcagaagtatttgggggagggtcctcggatggtaagagatgtttttcggctggcgaaggaaaacgcaccggccatcatttttatcgacgaaatcgacgccattgccactaagaggtttgatgcgcagaccggcgcagatagggaagtgcagcgaatcttactggagttactgaaccagatggatggtttcgatcagaacgtaaacgtgaaggtaataatggctactaaccgcgctgacaccctggacccggcgctattgcgacccggccgattagaccggaagatagagtttcctctgcctgaccgtcgacaaaagcgactgattttctccacgataacctcaaaaatgaatctgtcagaagaggttgacctggaggattatgtcgcaagacccgacaagatatcgggggccgatatcaatagcatttgtcaggaatccggaatgcttgcagtcagggagaatagatacatagtgcttgccaaggattttgaaaaagcctacaaaacggtaatcaagaaggatgagcaggaacacgagttctataagtag

SEQ ID NO: 130264 - DNA, 1164 bp, synthetic construct
  misc_feature 1..1164: note = Description of Artificial Sequence: Synthetic coding sequence
  source 1..1164: mol_type = other DNA
atggaggagattggaatactagtagagaaggctcaggacgagatcccagctctcagcgtttcgcggcctcagacgggtctgtcttttctgggtcctgaaccggaggatctggaagatctctacagcaggtataaagaggaggtgaagaggatacagtccatcccactggtcattggtcagttccttgaggccgtggatcagaataccgcaatcgtgggctccactaccggctcaaattattatgtgagaatactgtctactatcgaccgagaattacttaaaccaaacgcaagcgtagcactacataaacattctaatgctctcgtcgatgtgctgcctcctgaggctgactcatcaatcatgatgctgacctcagaccagaagcccgatgttatgtacgctgacattggcggaatggatatccagaagcaggaagttagagaagccgtggagctgcccctcacgcattttgaactgtataagcagatcgggattgatccccctaggggagttctgatgtacggtccacctggatgcggaaaaaccatgcttgccaaagcggtcgcccatcataccacagccgcctttatccgagttgtcgggtctgagtttgtgcagaaatacctcggggaaggcccccgaatggttagggatgtgttcaggctagcaaaagagaacgcgcctgcaataatctttatagacgagattgatgccattgccactaagaggtttgatgcacaaacaggagccgacagggaggtccagagaatacttctagaactcttgaaccagatggacggctttgatcagaatgtcaatgttaaggtgatcatggccaccaatcgcgccgacactctggaccctgctctcctcagaccgggccgcctagatcggaagatcgaattccctctgcctgataggcgccagaaacggctgatatttagtacaataactagcaagatgaatctgtccgaagaggtagatctggaggactatgtggcccgacccgataaaatttctggggctgacattaacagtatctgtcaagagtctggtatgctcgcagtcagggagaatcggtatatcgtgctggctaaggatttcgagaaggcctataaaactgtgatcaaaaaggacgaacaagagcacgagttctacaagtag

SEQ ID NO: 130265 - DNA, 1221 bp, synthetic construct
  misc_feature 1..1221: note = Description of Artificial Sequence: Synthetic coding sequence
  source 1..1221: mol_type = other DNA
atggccctcgacgggccagagcaaatggagcttgaagagggcaaggcaggctcaggcctgagacagtactacctctctaagatagaggagctccaactgatcgtgaacgataagtcccagaacctgcgaaggctccaggctcaaaggaatgagctgaacgccaaggtgaggctgctgagggaagaactgcagctgctgcaggaacaaggctcttacgtgggagaagttgtgagagccatggacaaaaaaaaggtgctcgtgaaagtgcaccccgaaggcaagtttgttgtggacgtggacaaaaatattgatattaacgatgtgacccctaattgtagggtcgctctgaggaacgactcctataccctgcacaagatcctgcctaataaagttgatccactggtctcactgatgatggttgagaaggtgcccgattctacttatgaaatgattgggggcttggataaacagatcaaggagatcaaggaggtaatcgagctacctgtgaagcaccccgaactgttcgaggctctgggcattgcgcagccaaagggggtcttactgtacggcccaccaggcactggtaaaactctgctggctcgcgccgtggctcaccacacggactgcacgttcataagggtatccggatccgagcttgtgcagaagttcatcggggagggtgcgcgaatggtgcgagagctattcgtgatggccagggagcatgccccaagcataatcttcatggatgagattgactcaattggaagcagtcgtctggaggggggctctggaggagactccgaagtgcaacgcacgatgttggagttacttaaccagctggacggcttcgaagctaccaaaaatataaaagttattatggccaccaataggatcgacatactcgattcagcacttctaaggcctggaagaattgacaggaagattgagttcccacctcctaatgaggaagcaagactggacatcctgaaaatccattctcggaaaatgaacttgacgcgggggataaacttgcgcaagatagcagagctgatgcccggcgccagtggtgctgaagtcaagggagtttgcactgaggccgggatgtatgccttgcgagagaggagggtccacgttacccaggaggactttgaaatggccgtcgctaaagtgatgcagaaagacagtgagaaaaacatgagcatcaaaaaattgtggaaatag

SEQ ID NO: 130266 - DNA, 1197 bp, synthetic construct
  misc_feature 1..1197: note = Description of Artificial Sequence: Synthetic coding sequence
  source 1..1197: mol_type = other DNA
atggaactggaggaaggaaaggcagggagcggactgagacaatattacctgtccaaaatcgaagaactgcaactgatagtgaacgataaatctcaaaatttgaggcggctgcaggcccagcgcaatgagctcaacgcaaaggtgaggctgctgagggaagaactgcagctgcttcaggaacaggggagttacgtcggcgaggtagtcagggcgatggacaaaaagaaagtcctggtcaaggtgcaccctgagggcaagttcgtggtggacgtcgacaagaatattgacattaacgatgtgactcctaactgtagagtagcgttacgcaacgactcttatactttgcataaaattcttcccaataaggtggaccccctcgtgtccctcatgatggtggagaaagtgcctgattccacatacgagatgattggtggcctagataaacaaatcaaggagatcaaagaggtgatcgaacttcctgtgaagcatccggagctgttcgaagccctcggtatagcacaaccgaagggcgtccttttgtatggtccgccaggcacaggcaagacattgctcgccagggcggtggcacaccatacggactgtacttttattcgggtctctggctccgaacttgtccagaaattcatcggcgaaggggccaggatggtgcgcgaactcttcgtgatggcaagggagcatgcaccgagcattatcttcatggacgagatcgactctatcggttcctcacgcttggaaggtgggtctggcggcgacagcgaagttcagcgcacgatgctcgagctcttaaaccaactcgacgggttcgaggccaccaagaacatcaaagtcatcatggccaccaaccgcattgacatactcgatagcgctttactcaggccgggccggattgaccgaaagatcgaatttccacctcccaatgaggaggccaggctcgacattctcaagattcactccaggaaaatgaatcttacacgcggcattaatctgcgtaaaatcgcagaattgatgcctggcgcatcaggagcagaagtaaaaggagtttgtactgaagccggcatgtacgccctaagagagcggcgtgtgcatgttactcaggaagacttcgagatggccgttgccaaagtgatgcagaaggattcagagaaaaatatgagtattaaaaaactctggaaatag

SEQ ID NO: 130267 - DNA, 1212 bp, synthetic construct
  misc_feature 1..1212: note = Description of Artificial Sequence: Synthetic coding sequence
  source 1..1212: mol_type = other DNA
atggcaattcctggaattccttatgagcgaaggttattgataatggccgacccaagggataaagcattacaggactatagaaaaaaactactggagcacaaggagattgatggcagattaaaggagctaagggaacaattaaaagagctaaccaaacagtacgagaagagtgaaaatgatctgaaagccttacaatcagtgggacaaatagtgggcgaagtactgaaacagctgacagaggagaagtttatcgtgaaagccaccaacggccctcgttatgtggtaggatgtagaagacagctggataagtctaagctgaagcctggaaccagggtcgccctcgacatgaccacactgacaattatgaggtacttgccccgcgaggtggacccccttgtgtacaacatgagtcacgaagaccctggtaacgtctcctactccgagattggagggctgtcagaacagattcgggagctcagagaggtcattgagctgccactgactaaccctgaactgtttcaacgcgtggggattatccctccaaaaggctgtctgctctatggcccgcctgggaccggaaaaacattacttgcaagagcagttgcgtctcagttagactgcaactttctgaaagttgtttcctccagcattgtagataagtatattggggagtctgcaagactgattcgcgagatgttcaactatgctagggatcatcaaccttgcatcatttttatggatgagattgatgccatcggtggacgaaggttctcagaaggtacctcagcagatagggaaatacaaagaacactcatggaactgctgaaccagatggacggctttgatactcttcacagggtgaagatgattatggccacgaaccgtcccgacactctggatcctgccctactaagacccggccgactggacagaaagatccatattgacctgccaaatgagcaggcgcgactcgacattcttaagattcatgctggccctatcaccaagcatggggaaatcgactacgaagctatagtcaaactgtccgatggcttcaacggtgctgatctccggaacgtctgtacggaggctgggatgttcgcaatccgggcggatcacgacttcgtggttcaagaagatttcatgaaagcagtccgaaaggtcgccgactccaagaaactggagtccaagctcgattacaaacctgtgtag

SEQ ID NO: 130268 - DNA, 933 bp, synthetic construct
  misc_feature 1..933: note = Description of Artificial Sequence: Synthetic coding sequence
  source 1..933: mol_type = other DNA
atggaccgactcctcaggctcggcggagggatgcccggtctaggacagggcccaccgacagatgctccagccgtggatacagcagagcaagtgtacattagttccctggccttattgaagatgctgaaacacggtagggccggggttccaatggaggtgatgggcttaatgctgggagagtttgtggacgattatacagtcagggtcatcgacgtcttcgccatgccccagtcgggcacaggggtatcggtggaggcggtcgacccagtgttccaggcaaaaatgctggacatgctgaagcagacaggcagacccgaaatggtggttggctggtaccactcccaccccggatttggatgctggctttccggggtcgatattaatacacagcagtctttcgaagccctttctgaaagggcagtggctgttgttgtggaccctattcaaagtgtcaaaggaaaggtggtcatcgatgcctttagactgatcaatgccaacatgatggtattaggacatgaacctagacagacgacatccaatctgggccacctcaataaaccctccatacaggctcttatacacgggcttaataggcattactactctataactatcaactatcggaaaaacgaactagagcagaaaatgttgctgaatttgcacaagaaaagctggatggagggtttgaccctccaggattacagcgagcactgtaaacacaacgaatccgtggtgaaggagatgctcgagctggccaagaattacaataaagctgttgaagaggaggataaaatgacccccgagcagctggctatcaaaaacgttggaaagcaggacccgaaaaggcatctggaggagcatgtggatgtcctgatgacctcaaacattgtccagtgtctcgccgcgatgctggacaccgttgtgttcaaatag

SEQ ID NO: 130269 - DNA, 255 bp, synthetic construct
  misc_feature 1..255: note = Description of Artificial Sequence: Synthetic coding sequence
  source 1..255: mol_type = other DNA
atggatcgcctgcttagactcggaggaggcatgccaggactcggccaaggccctcctaccgacgcacctgccgtggatactgccgagcaggtgtatatcagctccctggctctgttgaagatgttgaaacacggacgtgcgggcgttcccatggaagttatgggcctcatgttgggagagtttgtggatgattatactgtgcgcgttatcgacgttttcgccatgccacagtccggcacaggcgtgtccgtgtag

SEQ ID NO: 130270 - DNA, 2727 bp, synthetic construct
  misc_feature 1..2727: note = Description of Artificial Sequence: Synthetic coding sequence
  source 1..2727: mol_type = other DNA
atggaggagggtgggcgggataaagcgcccgtccagccccaacagtctccagccgccgcaccaggcggtaccgatgaaaagcctagtggcaaggagcgcagagacgctggcgataaggataaggaacaggaactctcagaggaggataaacagctgcaggatgagctggaaatgctggtggaacggctcggagagaaggatacctcactgtaccgaccagcactggaggagctgcggcgccaaatccgctcttccactacgtctatgacatctgtccccaagcccctgaagttcctgaggcctcattatggcaagttaaaggagatctacgagaatatggctcccggggaaaacaaacggtttgctgccgacattataagcgttttagccatgaccatgtctggcgaaagagaatgtcttaagtaccggctagtcgggagtcaggaggagctggcctcctggggacacgagtatgtccgccacctagcaggagaggttgccaaagagtggcaggagttagacgatgcggagaaggtgcagagagagccactgcttaccttagtgaaggagatcgtgccctacaacatggcccataatgccgagcacgaagcctgcgatctacttatggagatcgagcaagtggatatgcttgagaaagacatcgatgaaaatgcttatgcaaaagtttgcctatacctgacttcttgtgtgaactacgtgcccgaaccagaaaacagtgctctcttgcgctgcgccttgggagtttttcggaagttttctagattcccagaggcactgcggctagcactgatgctgaatgatatggagttagtggaggatattttcacatcgtgcaaggatgtggttgtccagaagcagatggcctttatgctggggcgacacggtgtctttctggagctttcggaagacgtcgaagaatacgaggacctcacagagattatgtctaacgtccagctgaatagtaacttccttgcgctggcccgggaactggatatcatggagcccaaggtaccagacgacatctataagacacatctggagaacaacagattcgggggctcaggaagtcaggttgattctgccagaatgaacctggcatcaagcttcgtgaatggcttcgtcaatgccgcattcggccaagacaagctgcttacagacgacggaaacaagtggctgtacaaaaacaaggaccacgggatgctgtctgcagctgcatccctcggtatgatcctgctgtgggacgtcgacggcgggttgacccaaatcgataaatatctatactctagcgaagactatatcaagtctggcgccttgctcgcatgtgggatcgttaatagcggcgtgcgcaacgaatgcgatcctgcactcgccctgcttagtgactacgtgctccacaactctaacaccatgcggctaggttccatatttggcctggggctggcctacgcaggctctaatcgcgaggatgtcctaactctgctcctgcccgtgatgggggatagcaaatcttctatggaagtggccggcgtcacagccctggcctgtggcatgatcgcggtcgggagctgcaatggagatgttacatccacgattctccaaactatcatggagaaaagtgagacggaactgaaggacacctatgcaaggtggttaccgctcggccttggtctgaatcacctcggcaaaggtgaagccattgaagcgattctggctgcgctggaggtggttagtgagccctttcgcagcttcgccaatacattggtggacgtatgtgcctacgcgggctcaggcaatgtcctgaaggtgcagcagctgttacatatatgcagtgaacactttgacagcaaagagaaggaggaagataaggataaaaaagagaaaaaagacaaggacaagaaggaagcaccggcagacatgggcgctcatcagggagtggccgtgttaggcatcgccctcattgccatgggtgaggagattggcgccgaaatggcactgcgcacctttggtcacctactgcgttacggggaacccaccttgaggcgcgccgtaccccttgcgttggcattaataagcgtatccaacccccggttgaatatcttggacaccctgtcaaagttttctcatgatgctgatccagaggtgtcgtacaattcaatattcgccatggggatggttggctcaggcacaaacaacgcccggcttgccgcaatgctgcgacagcttgcccagtaccatgcaaaagaccccaataatcttttcatggtgcgactcgctcaaggcctgactcacttaggcaaaggcactttgactctctgtccataccacagtgatcgtcaactgatgtcacaggtcgccgtagctggactgctcaccgtccttgtgagcttcctggacgtgcggaacatcattcttggcaaaagccactacgtgctgtatggtttggtggccgccatgcaacccaggatgctcgtgacctttgacgaagagctgcgtccactccccgtgagcgtaagggtggggcaggcagttgacgtggttggccaggcgggtaaaccaaaaaccataaccgggtttcagacgcacaccacaccggtgctcttagcccatggggaaagggctgagctggctaccgaagaattcctgcccgttaccccgattctggaaggcttcgtgatcttacgcaaaaaccctaactacgacctctag

SEQ ID NO: 130271 - DNA, 1743 bp, synthetic construct
  misc_feature 1..1743: note = Description of Artificial Sequence: Synthetic coding sequence
  source 1..1743: mol_type = other DNA
caatgtactgcccagcagcagctgttaggtctatcatcaggagcaggacatcatggagcgcagttaatgctccagaatcccccaagagagcagcaagtgtgggggcagtggctttccggagggctgtgcccccacgaaccgggactgctcttctgcgaatggctgtgcgagtgctccttttgggataagttactcaccgatgatggcaacaaatggttgtataagaacaaagaccacggaatgctgtcagcggcagcctctttgggcatgatcctgctctgggatgtggatggaggacttacacagatcgataagtacctctattctagcgaggattacatcaaaagtggagcactgctggcttgtggcattgttaactcaggggtgcgaaatgagtgtgatccggcattagctctcctgagcgattacgttctacacaactcaaacacaatgcgactcggatccatcttcggactgggacttgcctacgccgggtcaaaccgagaagacgtactgactttactgctgcccgtcatgggagatagcaaaagcagcatggaggtggccggggtcaccgccctggcttgtggtatgatagccgtagggtcttgtaacggtgacgtgacctcaactattctccagactattatggagaaaagtgaaactgagttaaaagacacgtacgcgagatggctgccactcggcctcggccttaaccatcttggaaaaggcgaagcaattgaggccattctggccgccctggaggtggtctccgaaccattccgcagctttgctaacacgttagtagacgtctgcgcatatgctggcagcgggaacgtcctgaaagttcaacagcttctgcatatctgcagcgaacactttgacagcaaggaaaaagaggaggacaaggacaagaaggagaagaaggacaaggataaaaaggaagctcccgccgacatgggagctcaccagggcgtggccgtccttggccccttactactgtgggggcgccgactggtgcagaggtggcactacgagccttaccatcagctgaggtacggcgagccgactctgaggagggccgtgcctttggccttggctttgatcagcgtaagcaatccaaggctcaatatcctggatacacttagcaaattctcacacgacgctgatcctgaagtctcgtacaactccatttttgccatggggatggtgggctcgggaacaaataacgcacgactcgccgccatgctccgtcaactggcgcaataccacgcgaaggatcccaacaacctgttcatggtccggttagcacagggtctcactcatctggggaaggggaccctcaccctgtgcccctatcactctgatcgtcagctgatgagccaagtcgccgtggccggattactcacagtgcttgtatcattcctggacgtcagaaacatcattctggggaagtctcattacgtactctacggcttggtagccgccatgcaaccccgaatgttagtgactttcgacgaggagctaagacctctgccagtgtcagtgcgggtagggcaggctgtggacgttgtagggcaggcaggtaaaccaaagactatcactgggtttcagacacacactactccggtgctcctggctcatggtgaaagggccgagttagcaacggaagaattcctaccagtgacaccaatcctggaagggtttgtttttggaaggacacctatcatgatctcaaagtag

SEQ ID NO: 130272 - DNA, 2703 bp, synthetic construct
  misc_feature 1..2703: note = Description of Artificial Sequence: Synthetic coding sequence
  source 1..2703: mol_type = other DNA
atggaggagggcgggagagacaaggctcccgtacagccacagcagtccccagcggccgccccggggggtacagacgaaaagccatcggggaaggacaaggaacaggagctgtcagaagaggacaaacagcttcaggatgagctggagatgctagtcgagcggctaggagagaaggatacctccctgtatcgtcctgccctcgaggagctgcgtagacagatcagaagttccactacttctatgacctccgtgcctaagcccctgaaattcctccgcccccattacgggaaactaaaagaaatctacgaaaacatggcccccggagagaacaaacggtttgctgccgatatcatttcagtgttggcaatgaccatgagcggtgagcgcgagtgcctaaaatatcgcctggttgggtctcaggaagaattggcatcatggggacacgagtatgtgcgccatctggctggtgaagtcgccaaggagtggcaggaactagacgacgccgagaaagtgcagcgcgaacctttgttaactttggtgaaggagatagttccttacaatatggcacataacgctgaacacgaggcctgtgatctcctgatggagatagagcaagtcgacatgcttgagaaggatatagacgaaaatgcatacgccaaagtgtgtctctatttgacctcttgcgtcaactatgtgcctgagccagaaaactctgccctcctgaggtgtgccttgggcgtttttcgcaaattctcgcgttttccagaggccctccgcctggctctaatgctaaatgacatggagctggttgaagacatctttacaagttgcaaggacgtggttgtccagaagcagatggccttcatgctgggcagacacggagtttttttagaactgtcagaggacgtggaagaatacgaggacttaaccgagattatgtctaacgtacagctaaactcaaatttcctagcccttgctcgggaactcgatataatggaacccaaagtacctgacgacatttacaaaacccacttggagaacaatcggttcggcggctctggttcgcaggtggacagcgcccgtatgaatctggcaagctcgttcgtgaacggcttcgtaaacgcagcatttggccaggacaagctccttacagacgatggaaacaagtggctttataagaataaggaccacggtatgttgtctgccgcagccagcctaggcatgattctgctgtgggatgtcgacgggggcttgacgcagatagataaatatctttactcgtcggaagattatatcaaatccggggctctgctggcgtgtggaatagtgaactccggcgtccggaatgagtgtgaccccgcgctcgcactgctctcggattacgttctacataatagtaatactatgaggttgggctcgatctttgggctcggacttgcctatgccggtagtaatcgcgaggatgtgctgacactccttctgcctgttatgggagactctaaatccagcatggaggtggctggcgtgacagccttagcctgcggaatgatagcagtgggcagctgcaatggagacgtgacttcgaccatcttgcaaacaattatggaaaaaagtgagaccgagctgaaggacacgtacgcacgctggcttccattgggcctgggactgaatcaccttgggaagggagaagcaatcgaggccattttagccgcactcgaggtggtgagcgaacccttccgatcattcgccaataccctcgtagacgtgtgtgcatacgctggaagtgggaatgtacttaaagtccagcagctgctgcacatttgctcggagcacttcgatagtaaagagaaagaggaagataaagacaaaaaggagaagaaggacaaggacaaaaaagaggcacctgccgatatgggagcacaccagggtgtggccgttctcggaattgctctgatcgcgatgggtgaggaaatcggggcggagatggccttacgcacgttcgggcatttgttgagatacggcgagccaaccttgcggcgcgccgtgcctctggcactggcccttatcagcgtgagtaacccacgcctgaatattctcgataccctctccaagttttcacacgatgctgaccccgaggtcagttacaatagcatctttgccatgggcatggtgggctccgggacaaacaatgcgcggttggctgccatgttgcgccagttagcacagtaccacgctaaagaccctaataacttatttatggtgcggttggcacagggactgacacacctggggaagggtaccttaaccttgtgcccctaccattctgatcgccagctgatgtcgcaggtggctgtcgcaggtcttctgacagtgctggtgtcatttctcgacgtccgtaatatcatcttgggtaaaagtcactacgtattgtatggcttagtggctgccatgcagccccggatgctggtgaccttcgatgaagaactgaggcctctacctgttagcgtgcgcgtggggcaggctgtcgacgtcgtgggacaggccggcaaacccaagactatcacaggcttccagactcacaccactcccgttctgttggcacatggagaacgagccgaattggctaccgaagagttcctccccgtgacccccattttagaaggatttgtcattttacggaagaatcctaactacgacctgtag

SEQ ID NO: 130273 - DNA, 552 bp, synthetic construct
  misc_feature 1..552: note = Description of Artificial Sequence: Synthetic coding sequence
  source 1..552: mol_type = other DNA
atggacgcgagccctagtccattctcactccccaaaaaactcaacgagctgtcggccagacgtggctcagatgagcttctgagctccgggattataaacggtcctttcactatgaatagttcaacacctagcacagccaacggcaacgattccaaaaagttcaagagagatagacccccctgctcccctagcagggtgctgcatctgaggaaaatcccctgcgacgtcactgaagctgagattatttctctgggcctaccctttggcaaggtgacaaacctgctgatgcttaagggcaagtcccaagcctttctggagatggcttctgaggaggccgcagtgaccatggttaactattacacacctatcacacctcatctgagaagccagccagtgtatatacaatattccaaccaccgcgagctcaagacggacaacctgcctaaccaggcacgtgctcaggcagcattgcaggccgtttccgcagtgcagtccggaagcttggccctgtctgggggcccaagtaatgaaggaactgttctccccggttag

SEQ ID NO: 130274 - DNA, 474 bp, synthetic construct
  misc_feature 1..474: note = Description of Artificial Sequence: Synthetic coding sequence
  source 1..474: mol_type = other DNA
atggttacaagcctggcctacacacaccacggcaggcagtatctggcacaagaaggcgtgattgaccagatatccaacatcattgtgggtgcggatagtgacccatttagtagtttctatttgcccggcttcgtcaaattcttcggcaacctggcggtgatggactctccacagcagatctgtgagcgatatccgatttttgtggagaaagtgtttgagatgatcgaatctcaggatcctacgatgatcggagtggccgtggatacagtcgggattctcggttcaaacgtggaaggtaaacaagttttacagaagaccggatggtacgatcttgcgctgttcagggacattcttattttcgacagaggctctatctgtaagttcatatgctggtgggtcaattatatcgtggagaccatcctgtgggttgccgtgctactcacaatgactctgtacagctgtttgaagatttag

SEQ ID NO: 130275 - DNA, 1386 bp, synthetic construct
  misc_feature 1..1386: note = Description of Artificial Sequence: Synthetic coding sequence
  source 1..1386: mol_type = other DNA
atggccgcccaggcactggctcttttacgcgaggtggcccgacttgaagcaccactagaggagctaagagcgttgcactctgtcctccaggcggtgccactgaacgaactgcggcagcaggctgcagagttgcggttggggcccctattcagccttctcaatgaaaatcaccgcgagaagacaacactgtgtgtatccatcttggaacggttacttcaggccatggagcctgtgcacgttgctcgaaacctcagggtagacctgcagcgaggtctcatccacccagatgatagcgttaagatattaactcttagtcagatcggccgaattgtggagaactcggacgccgtcacagagattctgaataacgcagaactgctgaagcagatcgtttattgcatcggaggcgagaatttgagcgtggctaaggcactcatcattgagatcagttctgtgagccctgaaagtctgaattattgcacaacttctggactggtcacacagctgctgcgcgagttgactggggaggatgtccttgtgcgggctacctgcattgagatggtcacatctctggcctatacacatcacggacggcagtatttggcacaggagggtgtgatagaccagatatctaacattattgtgggtgccgattctgatcctttttcatcattctatttacccggattcgttaagtttttcggcaatcttgctgtgatggatagcccacagcagatctgcgaaagatatcccatctttgtagaaaaagtgtttgaaatgatcgaatcacaggacccaacgatgatcggcgttgcagtagacacagtgggaatccttggctctaacgtcgaaggcaaacaggtactccagaagacaggcacccgatttgagcggcttctgatgcggattggacaccagtctaagaatgcccctgtcgagctcaaaatcagatgcctggacgcaatatcatccctcctttaccttcccccggaacagcagactgacgatctcctgcgaatgaccgagtcgtggtttagctcgctctccagagatcccttagaactgttccggggcatttcttcccagccattccccgagctccactgtgctgcccttaaagtctttactgccattgctaaccagccttgggcccaaaagctgatgttcaactccccgggatttgtagaatatgtggtcgatagaagtgtcgaacatgacaaagcctctaaggacgccaagtacgaattagtaaaagctctcgcaaactcgaaaactattgccgaaatcttcggaaatccaaactacctccggctgaggacctatctctctgaaggaccctactacgtgaagccagtgagcactacagcagttgaaggggcagaatag

SEQ ID NO: 130276 - DNA, 294 bp, synthetic construct
  misc_feature 1..294: note = Description of Artificial Sequence: Synthetic coding sequence
  source 1..294: mol_type = other DNA
atgcgcatcgggcaccaaagcaagaacgcccctgttgagttaaagatcagatgtttggacgccataagctccctcttatatctgcctccagagcagcagaccgatgatctgcttagaatgacagaatcatggttctcgagcctctctagggatcccctggagttgttccggggcatttccagccagccttttccggagctgcactgtgcagctttaaaggtgtttacagggcggaaacatttgcatctggaggagctggtgggaggcaaccaagtcaagaataccgtggagtag

SEQ ID NO: 130277 - DNA, 510 bp, synthetic construct
  misc_feature 1..510: note = Description of Artificial Sequence: Synthetic coding sequence
  source 1..510: mol_type = other DNA
atgatttgccttgttttgacaatctttgccaatctttttccagctgcgtgcacgggggcccacgaacgaactttcttggccgtcaaaccagacggagtacagcggcgcttggtgggagagatcgtgaggaggttcgaacgaaagggttttaaactcgtggcgttgaagctcgtgcaggcgagtgaggaactgttgcgcgagcactatgcagaactgagagagcggcctttttacggtcgcctggtcaaatacatggcttcaggacccgtagtggcgatggtctggcagggcctggatgtggtgcgcacgtccagggcactgatcggcgccacaaatcctgccgacgctcccccgggaacaattagaggcgacttctgtattgaagtgggcaagaacctcattcacgggagcgacagcgtcgaaagtgctaggagggaaatcgctctgtggtttcgcgcagacgagctgctgtgttgggaggattctgccggacactggctgtatgagtag

SEQ ID NO: 130278 - DNA, 744 bp, synthetic construct
  misc_feature 1..744: note = Description of Artificial Sequence: Synthetic coding sequence
  source 1..744: mol_type = other DNA
atgtacggcatgtttaagaaggtgaacgctagagaacgcattgtcgggtggtaccacactgggcctaagctccacaagaatgacatagcgattaacgagctcatgaaacgctattgcccaaactccgtcctcgtgattattgacgtaaagccaaaggatcttggtctccccaccgaagcctatatttccgtggaggaagtccacgatgacggaacgcctactagtaagaccttcgagcacgtcacatccgaaattggggcggaagaggccgaagaagtgggcgtggagcatctgctcagagatattaaagacaccacagttggaactctctcacagcgcataactaaccaggtccatggactaaagggcctcaactctaagctcctggacatccggtcttacttagagaaagtcgccactggaaagctacccatcaaccaccagatcatataccagttacaagacgtttttaacttattgccagatgtgtctctgcaggaatttgtgaaggccttctacttgaagaccaatgatcaaatggtcgtggtatatctggcttctctgatccgctccgtagtggcactgcataatctcatcaacaacaagattgcaaaccgggatgcagagaagaaggaagggcaagaaaaggaagagagcaaaaaggaccgaaaagaggataaggaaaaagacaaggacaaagagaagtctgacgttaaaaaagaggagaagaaggagaaaaagtag

SEQ ID NO: 130279 - DNA, 624 bp, synthetic construct
  misc_feature 1..624: note = Description of Artificial Sequence: Synthetic coding sequence
  source 1..624: mol_type = other DNA
atgtctgatgaagaggccagacaatctggcggaagtagccaggctggggtggtaacagtcagcgacgtgcaggaactgatgcgaaggaaagaagaaatcgaggcacagatcaaggcgaactacgatgtgttggaatcccagaagggaatcggtatgaatgaaccactggtggattgtgaaggataccctagaagcgatgttgatctgtaccaggtgagaacggctaggcataacatcatctgcctgcagaacgaccataaagccgtcatgaagcaggtggaggaagcgttgcaccagctgcatgccagggataaggaaaagcaagcccgcgacatggcggaagctcataaggaggcgatgagtagaaaattgggccagagcgagagccaagggccaccacgcgcctttgcgaaagtcaatagcattagcccaggctcccccgcctccattgcaggcttgcaggtcgatgacgagattgtggagtttgggtccgtcaatacacagaacttccagtctttacacaatataggttcggtcgtgcagcactctgagggagccctggctccgaccatactgctcagcgtctcaatgaacctgacaaccccgggaacaagctccagatag

SEQ ID NO: 130280 - DNA, 672 bp, synthetic construct
  misc_feature 1..672: note = Description of Artificial Sequence: Synthetic coding sequence
  source 1..672: mol_type = other DNA
atgagtgacgaagaggctaggcagagcgggggttcttcacaagcaggagtagtgaccgtttctgacgtacaggaactgatgcgccggaaagaagagattgaggcgcagatcaaagccaactacgacgtcctggagtcacaaaagggtattggaatgaatgagcctcttgtggattgcgaagggtaccctaggtccgatgtagacctctatcaggtacggaccgctcgacataatatcatttgcctgcagaacgaccataaagctgtcatgaagcaggtggaggaggccttacatcagttacatgcccgggacaaagaaaagcaggccagggacatggctgaagctcacaaagaagccatgtccagaaagttgggacagtcagagagtcagggaccacctcgggcatttgccaaagttaacagcatcagcccagggtctccagcatccattgctggcctacaggttgatgatgaaatcgtcgaattcggatcagtgaacactcagaatttccaatccctccacaacattgggtccgtagtgcaacactctgaaggcaagccccttaacgtgacagtaatccggagaggggagaaacatcaattgcggctggtgccaacaaggtgggcaggtaaagggctccttggatgtaacattataccactacagaggtag

SEQ ID NO: 130281 - DNA, 411 bp, synthetic construct
  misc_feature 1..411: note = Description of Artificial Sequence: Synthetic coding sequence
  source 1..411: mol_type = other DNA
atgctgctcaaacttaaagagaaagcaagcctcactttggctgtgggaaccctgcccttcccaagtcagtttaacttcgtccctccgggtcgcatgtgcagggtagccggctgggggcgcacaggggtgctcaagcccggtagcgacaccctgcaagaggtgaagttacggctcatggaccctcaagcctgtagtcactttcgtgattttgaccacaacttgcagttgtgtgtgggtaaccccaggaaaacaaagtctgcctttaagggcgattccggaggaccccttctgtgtgcaggagtcgcccaaggcatcgtgtcatacggcaggtcagatgcaaaaccaccagctgtgtttacaaggattagccattataggccctggatcaaccagatcctgcaagctaactag

SEQ ID NO: 130282 - DNA, 753 bp, synthetic construct
  misc_feature 1..753: note = Description of Artificial Sequence: Synthetic coding sequence
  source 1..753: mol_type = other DNA
atggctatgctgagggtccagcccgaggctcaggcaaaagtagacgtgttccgtgaggatctgtgcaccaagactgaaaaccttctggggagctattttccgaaaaaaatctctgagctcgacgcctttttgaaggaaccagcccttaatgaagctaatttaagtaacctgaaagcacctctggatatccccgtacctgaccctgtaaaggaaaaggaaaaggaagaaagaaagaaacaacaggagaaagaagataaggacgagaaaaagaagggcgaagatgaagacaaggggcctccctgtggcccagtcaactgcaatgaaaagattgtggtgttgctgcagagactgaaacctgagataaaggacgttattgaacagctgaacctggtaactacatggctacagcttcaaatccccagaatcgaagacggaaataatttcggcgtcgccgtccaggagaaggtgtttgaactgatgactagcttacacacgaagctggaaggttttcatacccagatttcaaagtactttagtgaaaggggagacgccgtgactaaggcggccaagcaacctcacgtcggcgattatcgccagttggtgcacgagcttgacgaggcggagtatcgcgacatccgacttatggtaatggaaattagaaacgcctacgtgagacgccagggccagggtcgcggcggccagagacagctgagccaagcaacccattctcttacactgcaggccagagggtag

SEQ ID NO: 130283 - DNA, 627 bp, synthetic construct
  misc_feature 1..627: note = Description of Artificial Sequence: Synthetic coding sequence
  source 1..627: mol_type = other DNA
atgggtgaagtggagatcagtgctttggcttacgtcaagatgtgcctccacgcagcacgataccctcacgctgccgtcaatgggctctttctggctcctgcaccaaggagcggagagtgtctgtgcctgacagattgcgtgccactgttccatagccatctggccctaagcgtcatgctcgaggtggccctgaaccaggttgatgtatggggagcacaggcaggtttagtcgtcgccggctactatcacgcgaacgccgccgtaaacgatcagtcacctggcccactggctctgaagatcgctggtcggatagcggaatttttcccagacgctgttcttatcatgttggacaatcagaaactcgtgccacaaccacgtgtcccccccgtcattgtcctagagaaccaaggacttcgttgggtccccaaagacaagaacctcgtgatgtggcgggattgggaggagagcaggcaaatggtgggagccttgctggaggatagggcgcaccagcacttagttgattttgactgtcacctagatgacatccgacaagactggacgaatcaacggctcaacacacagatcactcagtgggtcgggccaacaaatggtaacgggaatgcatag

SEQ ID NO: 130284 - DNA, 804 bp, synthetic construct
  misc_feature 1..804: note = Description of Artificial Sequence: Synthetic coding sequence
  source 1..804: mol_type = other DNA
atggcctctctcttgaaggtggatcaagaggtgaagctgaaagtagattccttccgtgagagaatcacaagtgaagcagaagaccttgttgcaaacttctttccgaagaaactgctggaactggactcttttcttaaagagcccatcttgaacatccatgacctgacgcagattcattccgacatgaatctgcctgtgcccgatccaatccttctgacaaatagccatgatggccttgatggacctacttacaagaaaaggaggttagatgaatgtgaggaggccttccaaggcacaaaagtgtttgtgatgccgaacggtatgttgaaaagcaaccagcaactggtggatattatcgagaaagtgaaacctgaaatcagactgctgatagagaagtgcaacacccccagcggaaaggggccacacatctgttttgacctgcaggtgaagatgtgggtgcagcttctaataccacgaatcgaagatggaaacaacttcggcgtatctatccaggaagaaaccgttgccgaactgcgcaccgtcgagtctgaggcagcctcctatctggatcagatatccagatattatataacccgcgcgaaactggtttccaagatcgccaaatacccacacgtcgaggattacaggaggactgtaaccgagattgacgaaaaagaatatatcagtcttcggctgattatcagcgaacttaggaaccagtacgtcaccctacacgatatgatcctaaaaaacatagaaaaaattaagaggcctagatcatctaacgcagaaaccttgtattag

SEQ ID NO: 130285 - DNA, 765 bp, synthetic construct
  misc_feature 1..765: note = Description of Artificial Sequence: Synthetic coding sequence
  source 1..765: mol_type = other DNA
atggcctcacttctgaaagtcgaccaggaggtgaagctaaaggttgattcctttcgggaaagaatcacatctgaggccgaagatctagtggccaacttctttcctaagaagctgctcgaacttgatagctttctcaaggagccaattctaaatattcatgatctgacccagatccactcggacatgaatctgcccgtacccgatccaattcttttgaccaactctcatgatgggttagatggccctacatataagaagagaagattagatgagtgcgaagaggcatttcagggtacgaaagtgtttgtgatgcccaacgggatgttaaagagtaaccaacaactcgtcgacatcatcgagaaggtcaagcccgaaatccggctactcatcgaaaaatgcaacactgtcaaaatgtgggtacagctcttgattccccggattgaggatggcaataatttcggagtttccatccaggaggaaacagtggcagaactcaggacagttgagtccgaggccgcaagctatctcgaccagatatctagatactatatcacacgggcgaaattggtgagtaagattgccaaatatccacacgtcgaagactaccgtagaactgtcaccgagatcgatgaaaaggagtatatctcattacggctgatcatctcggagctccggaatcagtatgtcacactgcacgacatgatcttgaagaatattgagaaaatcaagcgacccagatcgagtaatgctgaaactctgtattag

SEQ ID NO: 130286 - DNA, 48 bp, synthetic construct
  misc_feature 1..48: note = Description of Artificial Sequence: Synthetic coding sequence
  source 1..48: mol_type = other DNA
atggccagccttctgaaggtggatcaggaagtcaaattgaagctctag

SEQ ID NO: 130287 - DNA, 393 bp, synthetic construct
  misc_feature 1..393: note = Description of Artificial Sequence: Synthetic coding sequence
  source 1..393: mol_type = other DNA
atggccagcctgttgaaagtggatcaagaggtgaaactgaaggtggactcattccgagaaagaattactagcgaagccgaagacttagtcgccaatttcttcccaaaaaagctgcttgagctggacagttttttgaaagagcccatcctgaacatacacgaccttacccagattcacagtgatatgaatctaccagttccagacccaatcttgctgaccaactctcatgatggtctggatgggcccacatataaaaaaagacgactggacgaatgcgaggaagctttccaaggccagaacgttggcacagcccccgactcccaggatcgtaggtggaaacagctctggggggtgcactccggcggcaatagttgccgtgccaaaaactgttag

SEQ ID NO: 130288 - DNA, 582 bp, synthetic construct
  misc_feature 1..582: note = Description of Artificial Sequence: Synthetic coding sequence
  source 1..582: mol_type = other DNA
atgaatctcccggtgccagacccaattctcttgactaacagccacgatggcctggatggccctacatacaaaaaacgaagactggatgaatgcgaggaggcgttccaggggaccaaagtctttgtgatgcctaatgggatgctcaagtccaaccaacagctagtagatatcatcgagaaggtaaagcccgagatccggcttctcatcgagaagtgcaatactgtgaagatgtgggtccagctgctgattccccgaattgaggacggtaacaatttcggggtttctatccaggaggagacagttgcggaactcaggaccgtggagtctgaggccgcttcctatctagaccagatttctcggtattatataacccgcgccaaactggtgtcgaagatcgccaagtacccccacgtcgaggattaccgcaggaccgtcaccgagatcgacgaaaaggaatacatttctctgaggcttattatcagcgaactcaggaatcagtatgttactctccacgacatgattctcaagaacatcgagaaaattaagagaccgaggagcagtaacgctgagaccttgtattag

SEQ ID NO: 130289 - DNA, 5532 bp, synthetic construct
  misc_feature 1..5532: note = Description of Artificial Sequence: Synthetic coding sequence
  source 1..5532: mol_type = other DNA
atggagcccgccgagcgcgcaggggttggagagccaccagaaccaggcggacgccctgaacccgggccacgcggatttgtcccacagaaggaaatagtttacaataaactgctcccttacgctgagagactcgacgccgagtccgatcttcagcttgcacagattaagtgcaatctgggccgagctgtccaacttcaagaactctggcccggtgggttgttctggactcgaaagctgagcacttatatcaggctttatggcaggaaattttccaaggaggatcacgtgctcttcataaaactcttgtacgagctggtctcgattcctaagctggagatctctatgatgcagggctttgctcggttgctgatcaacctgttaaaaaagaaggagctgctcagccgagcagaccttgaactgccttggcggcccctatatgacatggtcgagaggattctgtattccaaaaccgaacacctcggcttaaactggttccctaattcagtggagaatattctaaagacactcgttaaatcttgtcgaccatacttcccagccgatgctacggcagagatgctcgaagaatggcgaccactaatgtgtccatttgatgtgacaatgcagaaggctataacctacttcgaaattttcctgcccacctctttgcctcccgaactccaccataaggggttcaagctgtggttcgatgagctgattggcctgtgggtctccgtccaaaacttgccacagtgggaaggtcagctggttaacctgttcgcccgtttagccactgataatataggatacattgattgggacccgtacgtgcctaagatattcacgcgaattttgcggtcccttaatctgcccgtggggagtagccaggtcttggtgccacgtttcctaacaaacgcatacgacataggccacgctgtcatctggatcacggccatgatgggcggcccgagcaagttggtgcagaaacacctcgctggacttttcaattcaatcacctcattttaccatccctctaataacgggaggtggctaaataagctcatgaaattgctgcagcgactgccaaacagcgtggtgcggcgtttacacagggaacggtataaaaaaccctcctggctaacaccagtgcccgattcacacaagctgactgaccaggatgtgactgatttcgtgcagtgtattattcagccagtactcttggctatgttctccaagactggaagtctggaggcagcccaagccctgcagaacttggcactgatgagaccggaactggtgattcctcccgtgctcgagcgtacttatcccgccctcgagaccctgacagagcctcatcagctgaccgctaccttgtcctgcgtgataggggtggccaggagcctggtgtcaggcggacgctggtttcctgagggaccgacgcacatgctcccgctgcttatgagggccctaccaggagttgatccaaatgacttcagcaagtgtatgatcacttttcagtttatagctacatttagcactctcgtccctcttgttgattgtagcagcgtgctccaagagcggaatgatttaactgaggtggaacgagaactttgtagtgctaccgctgagttcgaagactttgtgttgcagttcatggacaggtgctttggacttattgagagcagtacactggaacaaaccagggaggaaacagagaccgagaagatgacccatctggagtctttagtcgagttagggctgagcagtacattctccactatcctcacgcaatgttctaaggaaatttttatggtcgccctgcagaaggtgtttaatttttctacgagccacatctttgaaactcgggtcgccgggcggatggtcgcggatatgtgccgggctgctgtaaagtgctgtccagaggagtcactgaagcttttcgtaccacattgttgtagtgttattacccagctaacaatgaacgacgatgttttaaatgatgaggaacttgataaagagctcttatggaacctccagctgctgtcagagattactcgtgtggacggtcgcaagctgctgctctaccgggaacagctggtgaagattctgcagcggacacttcacctgacatgcaagcagggctatacactatcatgcaatcttttgcatcatctgctcagaagtaccactctaatctatcctaccgagtactgtagcgtgcccggcgggtttgacaagcctccctcagagtattttcccataaaggattggggcaaaccgggcgatctttggaatcttggaatacaatggcacgtgcccagttctgaagaagtttcttttgctttttacctgctcgactctttcctgcagcccgaactcgtcaaactgcaacactgtggggacggcaagttggagatgagccgagatgacatcctgcagtccctcaccatcgtccataactgcttgatcgggtcaggaaaccttctgccaccactaaaaggagagcctgtgaccaacctggtcccaagtatggtcagcctcgaggagacaaagctctatacaggattggaatacgacctctccagggagaaccacagagaagtgatcgctaccgtaattcgaaaattactgaatcatatactggacaatagcgaggacgacaccaaatcactgtttttgattattaaaatcattggtgacctactgcaatttcagggaagtcacaaacacgaattcgattccaggtggaaatccttcaatctggtcaagaagtctatggagaaccggctgcatgggaagaaacagcacattcgtgcacttttgattgatcgggtgatgctacagcatgagcttagaaccctcacagtcgaaggctgtgaatacaagaaaatccaccaggatatgattcgcgacctcctgcgcctgagcactagtagttactcacaggttcggaacaaggctcagcagaccttcttcgcagccctgggtgcatataatttctgctgccgggacatcatacccttggtgttagaatttctgaggcctgaccgccaaggagtgacgcaacagcagtttaagggcgccctgtactgtctcctgggaaaccacagtggcgtatgcttagcgaatctccatgactgggactgtattgtacaaacgtggcccgccatcgtgagttcgggcctgtcccaagccatgagccttgagaaaccctccatcgtgcgactctttgacgacctggctgagaaaatccaccgccagtacgaaacaattgggctcgacttcactatcccaaagagttgcgttgagatcgccgagcttctgcaacagtccaagaaccctagtataaatcagattctcctctcccctgagaaaatcaaggaaggcatcaaacggcagcaggagaagaatgccgacgccttaagaaattacgaaaacctcgtggataccctgttggatggggtggaacagaggaatctgccctggaagttcgagcatataggaattgggctcctctcactcctcctgcgggacgatagggtactcccactaagggccattagattctttgtggaaaatttgaaccacgacgccattgtggtgcgcaaaatggccatttccgcagtggctggaattctaaagcaacttaaacgtacgcacaaaaaactgactataaatccttgtgagatatctggatgcccaaagcccacccagatcatcgcgggagatcgacccgacaaccactggctgcattacgattccaaaacaatcccccgaaccaagaaagagtgggagtcctcttgttttgtggagaagacgcactggggctattatacatggcccaaaaacatggtggtgtatgccggcgtggaagaacagcccaagctggggcgatctcgagaggacatgaccgaggcagaacagatcatcttcgaccacttttctgatcctaagttcgtcgagcagcttataaccttcctctccctggaggaccgcaagggcaaggacaaatttaatcccaggaggttctgtttgttcaaaggtatttttcgcaactttgatgatgcttttctccccgtgcttaagcctcacctggagcacctcgttgctgatagccacgagtccacacagcggtgtgttgcagagataattgccggccttattcgcgggtctaagcactggacatttgagaaagtcgagaaactctgggagctactatgccccctgctccgcactgctttgtccaatattactgtggagacatataacgactggggtgcctgcatagcaacttcttgcgaatcccgggatcccagaaaactgcattggctgttcgaactactgctggaatcacccctctcgggcgaagggggctcgttcgtggatgcatgtcgcctgtacgtgttgcagggggggctggcccagcaggaatggcgtgtgcccgaacttctgcatcggctcctgaaatatttggaacccaagctaactcaggtgtacaagaacgtgcgcgagcggattgggtcagtcctgacttatatctttatgattgacgtctccttgcccaacactaccccgactatttctcctcacgtcccggagttcacagcaaggatattggagaagctgaagccactgatggatgtggatgaagaaatacagaaccacgtgatggaggaaaatgggattggagaagaggatgagcgtactcaaggcattaagctgttgaagactatcttaaagtggctcatggcctccgccggaagaagtttttctactgctgtgactgagcaactccagcttctgcccctgttcttcaaaatcgcacctgttgaaaacgacaactcatacgacgagttaaagcgtgatgccaagctttgcttaagcctcatgagccagggactgctgtacccccatcaggttccgctggttctgcaggtgctgaaacaaacagctagaagttccagttggcatgctcgctacacggtgttaacgtaccttcagaccatggtattttataatctgtttatctttcttaacaatgaggacgctgttaaagacatccgctggcttgtaatatccctgctggaggatgaacagctagaggtcagggaaatggcagcgacaacgctgtctgggcttttgcagtgcaacttccttactatggacagcccgatgcaaatccactttgagcagctgtgcaagaccaaactcccaaaaaaacgcaaacgggatcctggctctgtgggtgacactatcccttcagccgagctcgtgaagcgacatgcgggggtgctgggcctgggagcctgtgtacttagcagcccctacgacgtcccaacgtggatgccccagcttttgatgaatttatcagctcaccttaatgatccacagccaatcgagatgacagtaaagaaaacattgtccaacttcaggagaacacaccatgacaactggcaggaacataagcagcaattcaccgacgaccaacttcttgtcttaaccgatcttctggttagtccctgctattatgcttag

SEQ ID NO: 130290 - DNA, 2964 bp, synthetic construct
  misc_feature 1..2964: note = Description of Artificial Sequence: Synthetic coding sequence
  source 1..2964: mol_type = other DNA
atgggcgagaatttagcaaaaaaaatcatgttttttctgttgaccattaagctcatcctgaatcatatcctggataattctgaggacgatacgaagtctctttttctgatcattaaaatcatcggagatcttctgcaattccagggctcacacaagcacgaatttgactcccggtggaaatcttttaatctggtgaaaaaatccatggagaatagactgcatggcaagaagcaacacatccgcgcattactaattgaccgagtgatgctgcaacacgagcttcgcacgctgacagtagagggatgtgagtataaaaaaattcaccaggacatgataagagatctgcttcgcctgagtacttctagttacagtcaagtgcgtaataaggcccagcagactttctttgcagccttgggcgcatacaacttttgctgtagggatataattccactcgtcctcgaatttctgaggcctgatcggcagggtgtgacccagcaacagttcaagggtgctctgtattgtttgttaggtaatcacagcggagtatgcctggctaatctgcatgattgggattgtattgtccaaacttggccagccatcgtgtctagcggattgtcacaagcgatgtccttggagaaaccatctatcgttaggctcttcgatgacctcgcagaaaagatccaccggcagtacgagaccatcggcctagatttcacaattcccaaatcttgcgtagaaatcgccgagctgctgcagcagtctaagaatccttcaatcaaccagatcctgctatcccctgagaagatcaaggagggcataaagagacagcaggagaagaatgcagatgctcttcggaattacgagaacctggtggacacattactggacggtgtggaacagagaaatctgccatggaagtttgagcacatcgggatcggtctgctctcactgctcctgagagacgaccgcgttttaccactgagggctattaggtttttcgtggagaatctaaaccacgatgcaatcgttgtgcgcaagatggctatctcagccgttgccggcatcctgaaacagcttaaaaggacacacaagaagttgacgattaatccctgtgaaatctctgggtgccccaagcctactcagattatcgctggggaccgtcctgataaccactggctgcattatgacagcaagacaattcccagaacgaagaaggaatgggagagctcatgctttgtggaaaagacccactggggctattacacttggcctaagaacatggtggtgtacgcaggcgttgaagagcagccaaagctgggacgttcccgggaggatatgaccgaggcagagcagataatctttgaccacttctctgaccctaagtttgtggagcagctcatcacattcctctccctggaagatcgcaaaggaaaagataagtttaacccacggagattttgcctgtttaaagggatctttcgcaacttcgatgacgctttcctgccagtgctgaaaccccatctggagcatctggtggctgactcccatgagtccacccagaggtgcgtggccgagattatagccggcttgataaggggttcaaagcattggacttttgaaaaggtggagaagctgtgggagttactctgtcccctgctgcgcaccgctctctcgaacattaccgtcgagacctacaatgattggggggcatgtattgctacgtcctgtgagagtagagaccctagaaaactccactggttattcgaactgctgctggagtcacccttgtctggggagggcgggagcttcgtggatgcgtgtcgcttatacgtgctgcaaggtgggctggctcagcaagagtggagagttcccgaactcctgcacaggctcttaaaatatctggaacccaagctcacccaggtgtacaagaacgtacgcgagaggatcggcagtgtactgacctacatctttatgattgacgtatccctccctaataccacccccacgatctccccccacgtgccggagttcacggcccgaatcctggaaaagctcaaacccttaatggatgtggacgaggagattcagaatcatgtcatggaagagaatggtataggggaggaagacgaaaggacacagggcataaagctgctgaaaaccattctaaaatggctgatggccagtgcaggccgaagcttttcaaccgccgtcactgagcagctccaattgctgccgctgttttttaaaatagccccagttgagaacgataacagttacgacgagctcaagagggatgctaaactctgtctcagtttgatgtcccaggggctcctgtatccacatcaggttcccttagttctgcaggtgctgaagcagaccgcccgctccagtagctggcacgctaggtacacggtattgacttaccttcagacgatggtgttctacaatctgtttatcttcctcaataatgaggacgccgtaaaggatatccggtggcttgtcatttcactgctggaagatgaacagttggaagtcagggagatggcggccactactctttccggactattgcagtgtaactttctgaccatggacagcccaatgcaaatccacttcgaacagctatgtaagaccaaattgcctaagaagaggaagcgtgatcctgggagtgtgggggacacgataccttctgctgaattagtgaaaaggcatgccggagtgctgggactgggagcttgtgtcctttctagcccctacgatgtgcctacatggatgccacagctgttgatgaacttgtcagcccatctaaatgacccccagccaattgagatgactgtgaagaaaacactgagcaactttaggcgcacccatcatgataattggcaagagcacaagcagcagtttacagacgatcaactgctagtgcttactgatctactggtctcaccatgttactatgcctag

SEQ ID NO: 130291 - DNA, 867 bp, synthetic construct
  misc_feature 1..867: note = Description of Artificial Sequence: Synthetic coding sequence
  source 1..867: mol_type = other DNA
atggcagcaaccttctttggcgaggttgtgaaagccccgtgcagagctggaacggaggatgaagaagaggaggaggaagggcgccgagagaccccagaggaccgtgaagtgcggctgcaactcgctagaaaacgcgaggtccgtctacttaggaggcagacgaaaacttccctcgaggtgtctctgctggagaaatacccctgcagcaagttcattatcgccattggcaacaacgctgtggcatttctgagcagcttcgtgatgaattcaggagtgtgggaggaagtaggttgcgccaaactctggaacgagtggtgtagaactacagataccacgcacctgtcctctacagaagccttctgtgtcttctaccatctgaagagtaatccttcagtgtttctgtgccaatgttcatgttacgtggccgaggaccagcagtatcagtggttagagaaggtttttggaagttgtccgagaaagaacatgcaaatcaccattctgacatgccggcacgtcacagattataaaacctcggaaagcacagggtctctgccaagccccttcctgcgtgccctgaagacccaaaattttaaggactctgcctgctgtccattgcttgaacagcccaacatcgtgcacgacctgcccgccgccgtactgtcatattgtcaagtgtggaaaatccccgctattctctacctatgctacaccgacgttatgaaattagacctcataactgtggaagcgtttaagcctattctctcaacgcgctcactgaaaggactagtaaagaacattccccagagcacggaaatcctcaaaaagctgatgactacgaatgagattcagagcaacatctacacttag

SEQ ID NO: 130292 - DNA, 804 bp, synthetic construct
  misc_feature 1..804: note = Description of Artificial Sequence: Synthetic coding sequence
  source 1..804: mol_type = other DNA
atggctgctactttcttcggggaggtggtgaaagccccttgccgggctggcaccgaagacgaagaggaagaagaggagggaaggcgggaaacacccgaggaccgagaagtgcggctgcagttagcccgcaaaagagaggtcaggctgttaaggcgccagaccaagacttccctggaggttagcctgctggagaagtatccttgtagcaaattcatcatcgccattggcaataatgctgtcgccttcctgagcagtttcgtaatgaattcaggagtgtgggaggaggttggttgtgccaagctctggaatgaatggtgtcgcaccaccgacactactcatctgtcctccaccgaggccttttgtgtattctaccacttgaagagtaacccaagtgtgttcgggtcatgccctagaaagaacatgcagattaccatactgacctgtcggcacgtgactgattacaagaccagcgaatcaacagggagtcttcccagtcccttcctgagagcgctgaagacccagaatttcaaggactccgcatgttgcccgttactggagcaaccaaatatcgtgcacgacctcccggcggctgttctctcctattgtcaggtttggaaaatccccgccatcctttatctctgttacactgacgtgatgaagctggacctcattaccgtcgaggcctttaagcctatccttagtacacgctccctgaagggccttgtaaaaaatatcccacaatcaaccgagattcttaaaaaactcatgaccacaaatgaaatccaatcgaacatttacacctag

SEQ ID NO: 130293 - DNA, 795 bp, synthetic construct
  misc_feature 1..795: note = Description of Artificial Sequence: Synthetic coding sequence
  source 1..795: mol_type = other DNA
atgttcgtgccctgcggcgaaagcgccccagatcttgcaggctttacactgttgatgcctgctgttagcgtgggcaatgttggccagctcgcaatggatcttataatatccaccctgaatatgtctaagatcgggtacttctatactgattgtctggtgccaatggttgggaacaatccttacgctactacggagggaaacagcacagagctgagcatcaatgccgaggtttattccttgccctcccgaaagctcgtcgccctacagctcagatctatctttataaaatataaaagcaagcctttctgcgaaaaactcctttcttgggtgaagtcttcaggctgtgcccgagttatagttctctccagtagccattcttatcaaaggaacgatttacagcttcgttccactcccttccggtaccttctgacccccagtatgcagaagtctgtgcagaataagatcaagagccttaattgggaggaaatggagaagtcgagatgcataccagagatcgacgatagtgagttttgcatcaggatccctggcggagggatcacgaaaactctctatgacgagtcatgctcaaaggaaatacagatggccgtcctactgaagtttgtaagcgagggagataacatcccagacgccctgggtctggtcgaatatttaaatgaatggctgcaaattcttaaaccattgtcagatgatccgactgtgtcagccagtcgctggaagatcccctccagttggaggttattgtttggcagcggcttgccacccgccctgttttag

SEQ ID NO: 130294 - DNA, 459 bp, synthetic construct
  misc_feature 1..459: note = Description of Artificial Sequence: Synthetic coding sequence
  source 1..459: mol_type = other DNA
atgccggccgtgtcagttggtaacgtgggacagcttgccatggatttaattattagcactctgaacatgtccaaaatcgggtatttttacaccgattgtctggttcccatggtggggaacaatccgtatgctacaacggaaggaaacagcacagaactgtctatcaacgccgaagtgtactccctcccgtctagaaaactagttgcactgcaactacgttccattttcataaaatataagagcaagccattttgtgagaaattattaagctgggtgaaaagttccggatgcgctcgggtgatcgtgctcagttcttcacattcttaccagcggaacgatctacagctacgctcgactccattccgatacttgctgaccccaagtatgcagaagagcgttcagaataaaataaagagcctgaactgggaagagatggaaaaaggtgcattcctgaaatag

SEQ ID NO: 130295 - DNA, 792 bp, synthetic construct
  misc_feature 1..792: note = Description of Artificial Sequence: Synthetic coding sequence
  source 1..792: mol_type = other DNA
atgttcaggaaccagtacgataatgatgtcacagtatggtctcctcagggccgcatacaccaaatcgaatacgccatggaggcggttaaacaggggagtgcaaccgtcggactcaaaagcaaaacccacgcagttctggtagcactcaagagagcccagagtgaactagctgcccatcagaagaaaatcctgcacgtggataatcacatcggaatcagcatcgccggacttacagctgatgcccgattgctttgtaatttcatgcgccaggaatgcttagacagtagatttgtgttcgataggcccctgcctgtgagccgattagtgagcctgatcggcagcaaaacgcagattcccacacagagatacggcagaaggccatatggcgtcggactgctgatagccgggtatgacgatatgggcccccatatattccagacctgtccaagcgctaattattttgattgccgtgctatgtccattggcgctagatcacagagcgcgcggacctacctggaaagacatatgtctgagtttatggaatgcaatttgaatgagctggttaagcatgggctccgagcgctgcgcgaaactctccccgctgagcaagacctgacaaccaagaatgtgtctatcggcattgtgggcaaagacctcgagttcaccatctatgatgacgatgatgtctcccccttcttggagggcttggaagaaagaccacagcggaaggcccaacctgctcaaccggccgacgaacccgccgaaaaggccgatgagcccatggagcattag

SEQ ID NO: 130296 - DNA, 792 bp, synthetic construct
  misc_feature 1..792: note = Description of Artificial Sequence: Synthetic coding sequence
  source 1..792: mol_type = other DNA
atgtttagaaatcagtacgataacgacgttactgtgtggagccctcaagggcggattcatcaaattgagtatgctatggaggcagtaaagcagggatccgcaactgttggactcaagtccaagacccacgcagtcctggttgccctgaaaagggctcagtctgagctggcagcacaccagaaaaaaatacttcacgtagacaaccatatcgggatcagcatagccggattgacagcagatgctcgcctgttatgtaattttatgcgccaggaatgtttagactctcgcttcgttttcgacaggcctcttcccgtgtctcgtctggtgtccctgatcggcagcaagactcagatcccaactcagaggtatggacgacgaccgtatggtgtaggcctgctgatagcgggttatgacgatatggggcctcacatttttcagacttgccctagcgcaaattacttcgattgtcgcgcgatgagtatcggagcccgaagccagtcagctcgcacctacctcgagcgacacatgagcgagtttatggagtgcaatctcaatgaattggttaaacatggattgcgcgcgttgagggaaaccttacctgctgagcaggatttgaccaccaaaaatgtgtccatcggcatagttgggaaggacctagaatttaccatctatgatgacgatgacgtatcgccattcttggaaggactagaagaaaggcctcaacgtaaggcccagcctgctcagcccgcggatgaaccagcagagaaggcagatgaaccaatggaacactag

SEQ ID NO: 130297 - DNA, 810 bp, synthetic construct
  misc_feature 1..810: note = Description of Artificial Sequence: Synthetic coding sequence
  source 1..810: mol_type = other DNA
atgcagctgtctaaagtgaagttccgcaatcaatacgacaacgatgttacggtctggtcccctcagggtaggatccatcagattgaatacgcaatggaggcggtgaagcagggctccgccaccgtcggccttaagagcaagacccacgcagtgctcgtggctttgaagagagcccagtctgagctggccgcccaccaaaagaagatcctacacgtggataatcatatcggcatttcgattgccgggttgaccgcagacgcccgcctgctgtgcaattttatgcgtcaagagtgtctcgactcccgctttgtgtttgatcgaccccttcctgtctccaggctcgtgagtcttattggaagtaaaacccaaatcccaactcagaggtacggtagacgcccttatggcgtcgggctactcattgctggctacgatgacatggggcctcacattttccagacttgtccatctgcgaactactttgattgtagggccatgtcaatcggcgctcgatcacagtccgcgcgtacctatttggaaaggcatatgtctgagttcatggagtgtaatttgaatgaactggtcaaacatggccttagagccctgcgagagacactgccggcagagcaggatctgactaccaagaacgtctcgataggaattgtgggtaaggacctggagttcacaatctacgacgatgatgacgtaagccctttcctggagggcctggaggagcggccccaacggaaagctcagcccgctcagcctgcagatgagcccgcagagaaagctgatgaacccatggagcactag

SEQ ID NO: 130298 - DNA, 495 bp, synthetic construct
  misc_feature 1..495: note = Description of Artificial Sequence: Synthetic coding sequence
  source 1..495: mol_type = other DNA
atgtttagaaatcaatacgacaacgatgtaaccgtgtggagcccccagggtcgcatccatcagattgagtatgccatggaagcggtcaagcaaggctccgccactgtgggactcaaaagcaagactcatgctgtgctggtggccttgaagagagcgcaatctgaactggctgcacaccagaagaaaatattgcacgtggacaatcatatcggaatctctatcgccggactcaccgcggacgctcgtttgttgtgtaatttcatgaggcaggaatgtctcgactcaagattcgtcttcgataggcctctccccgtgtctcgtctagtctccctgattgggtcatcaatcctgttcatgatctgggccttaactttcagcaagcctgtacacttgttaactatactgaccgccgagccttgccccctagagcccgtccccaatcagctagtgctaacctggcgggacatctgcctgaatctctggtcggttatttag

SEQ ID NO: 130299 - DNA, 1014 bp, synthetic construct
  misc_feature 1..1014: note = Description of Artificial Sequence: Synthetic coding sequence
  source 1..1014: mol_type = other DNA
atggatcagaacgaacattctcactgggggccccacgcgaagggacaatgtgcatctcgtagtgagctgcggatcattttggtcggtaagaccggaactggcaagtccgcagcaggaaactcgatcctaaggaaacaagccttcgaatccaaacttggctctcagacactgaccaagacctgctcaaagagccagggaagttggggcaatagggagattgtcatcatagatactcctgatatgttttcgtggaaagatcactgcgaggcactctataaagaagtgcagaggtgttacctactatccgcgccaggtccacatgtgctcttactggtgacgcaacttggcaggtacacttcgcaggaccaacaggccgcccaaagggtaaaagagatcttcggggaggatgccatgggacatactatcgtgttgttcactcataaggaggaccttaacggaggctccctgatggactatatgcacgactctgacaacaaggctctgtcaaagctggtggctgcttgtggaggcagaatctgtgcatttaacaaccgagctgagggatccaaccaagatgaccaagtcaaagagctgatggattgcatcgaggatctgctcatggagaagaacggagatcactatactaacgggttgtatagcctgatccagagatcaaagtgtggccccgtgggttctgatgagagagttaaagaattcaaacagagcctcataaagtacatggagacacagaggtcctacactgctctagcggaggccaactgtctgaagggcgcactgatcaagacccagctctgcgttctgttctgtatacaactgtttctacggctaataatcctgtggctttgcatactgcacagcatgtgcaacctcttctgctgtctcctgttttcaatgtgcaacttgttttgctcactcctctttatcattccaaagaaactcatgatattcctgcgcacggttatacggttggaaagaaagaccccccgactttag

SEQ ID NO: 130300 - DNA, 300 bp, synthetic construct
  misc_feature 1..300: note = Description of Artificial Sequence: Synthetic coding sequence
  source 1..300: mol_type = other DNA
atgggaccagattatagggtgctcgtacatagagcaagaaagttggcgcagcagtactatcttgtgtaccaggagcccattccgactgcacagttggtccagcgtgtggctagtgttatgcaggagtatactcagtctggcggagttaggccctttggtgtttcattgttgatctgcggatggaacgaagggcgcccgtacctattccagtccgatccgtccggcgcgtactttgcttggaaagccacagccatgggaaaaaactatgttaatggaaagacttttctggagaagaggtag

SEQ ID NO: 130301 - DNA, 465 bp, synthetic construct
  misc_feature 1..465: note = Description of Artificial Sequence: Synthetic coding sequence
  source 1..465: mol_type = other DNA
atgctctactgcgaagcggagagtccgcctacggtggagaaggtgaagcctgcgagagagaacagcgaaaccgatctggaaattgaaggtgagcacggccaccttggagcagttagggcggcatcgccccagaaactcgagaagagcgggtttcaggaactctcgagtcattccttccctgagagcgcgctgcggatggcgtgcgggggcaacgtagcagaacgccctgctcgattctgcctggagtcaagcagcggactggcgggtgagagtagctgcagttttccacgtctatcccctgcctccggggcagtgccatctcgacgactcgtcaagagtggtataaacacccaaacacgcttttcaaatctgctgaacgtgagtacatgggggattctttgtaacctctgcaattctcctaggagcttccccaagaagggatccacagaaagagagcatctatag

SEQ ID NO: 130302 - DNA, 747 bp, synthetic construct
  misc_feature 1..747: note = Description of Artificial Sequence: Synthetic coding sequence
  source 1..747: mol_type = other DNA
atgtctagtataggcactgggtacgatttgagcgcctctaccttttcccccgacggaagagtcttccaggttgagtacgctatgaaggcagttgagaattctagtaccgccataggaattaggtgtaaggacggcgtcgtgttcggagtcgaaaagctggtcttatctaaattgtatgaagaaggttctaacaaaaggttgtttaacgtggaccgacacgtcggcatggctgtggctggcctcttggcagacgctcgctctctggccgatatagcacgagaagaagcaagcaatttccgctccaacttcggttacaatatacccctcaagcatttagctgaccgagtcgccatgtacgttcacgcgtacaccctctatagtgccgtacggccattcggctgtagcgttaatgacggcgcacagttgtacatgatagatccttcaggggtgagctacggctactgggggtgcgcaattgggaaggcacggcaggccgctaaaacagagatcgaaaaattgcaaatgaaagagatgacttgtcgggacattgtcaaggaagtggctaagattatctacattgtgcacgatgaagtcaaggataaggctttcgagctcgagctcagttgggtgggcgagctcaccaacggtagacacgaaatcgtgcctaaggacatcagggaagaggccgaaaaatatgccaaggagtcgctcaaggaggaggatgaaagcgacgacgacaatatgtag

SEQ ID NO: 130303 - DNA, 786 bp, synthetic construct
  misc_feature 1..786: note = Description of Artificial Sequence: Synthetic coding sequence
  source 1..786: mol_type = other DNA
atgtccagaagatacgactcccgcacaaccatattcagtcccgaagggcggctgtatcaggtcgagtacgccatggaggctattggacacgccggcacttgcctgggcattctcgcaaatgacggggtcttgctggccgccgaaagacgaaacattcacaagctccttgatgaggtctttttcagcgagaagatctacaaactaaacgaggatatggcatgctctgtggccggcattacatctgatgccaacgtgttgacaaatgagttgaggttgattgcacagagatacctgttacagtatcaggaacctatcccatgcgaacaattggttactgcactgtgtgacataaagcaggcctatacccaatttggcggaaagcgaccatttggggtctcattactgtatatcggctgggataaacactacggattccagctgtaccagagcgatccctccggcaactacgggggctggaaagcgacatgcatcgggaacaattcagcagctgcagtgagtatgctgaagcaagactataaagagggcgagatgaccctgaagtcggctctggctctggcgatcaaggtgctgaataaaactatggatgtatcaaaactgtctgccgagaaggtggagatcgcaacactgacaagagaaaacggcaaaacagtcattcgcgtgctgaagcaaaaggaggtggagcagcttatcaaaaagcacgaggaggaagaggccaaagctgaacgggaaaagaaggaaaaagaacagaaagagaaggataagtag

SEQ ID NO: 130304 - DNA, 573 bp, synthetic construct
  misc_feature 1..573: note = Description of Artificial Sequence: Synthetic coding sequence
  source 1..573: mol_type = other DNA
atggcctgctccgtggccggcattacttctgacgcgaacgtcttgaccaatgaactacgactcatcgcccaacggtatcttttacagtatcaggagccaatcccatgcgaacagctagtgacagctctgtgtgacattaagcaggcatacacacagttcggtggtaagaggccattcggagtgtcgctactttatattggatgggataagcattatggtttccagctgtaccagtccgatcccagcggaaattacggaggctggaaagccacttgtataggaaacaatagtgctgccgccgtaagcatgctgaagcaggactacaaagaaggcgagatgacccttaagtcagcactagctctggccattaaggtccttaacaagaccatggatgtctcaaaactgagcgcagagaaggtcgaaattgctacactgacacgggaaaacggtaaaactgtgattcgtgttctcaagcagaaagaggtggagcagctcatcaaaaaacacgaggaggaagaagccaaggccgaacgcgaaaaaaaggaaaaggagcaaaaagagaaagataagtag

SEQ ID NO: 130305 - DNA, 786 bp, synthetic construct
  misc_feature 1..786: note = Description of Artificial Sequence: Synthetic coding sequence
  source 1..786: mol_type = other DNA
atgtcccgaaggtatgactcccgaacaacaatcttcagcccagagggacgcctgtatcaggtggaatacgccatggaagctattggccacgcggggacttgtcttggcattctggcaaatgatggggtacttttagccgccgagaggcgcaacattcataaactcctcgacgaagtctttttttctgagaagatttataaactgaatgaagatatggcatgttcggttgcaggtataaccagtgacgcaaatgtgctgacaaacgagttgagactaattgcgcagaggtaccttctgcagtaccaggaaccaatcccctgcgagcagctcgtgacagccctttgtgacattaaacaagcgtatacacagtttggtgggaaacggccttttggtgtttcgctcctgtatatcggatgggacaaacactatggcttccagttataccaatcggatccctcgggcaattacggcggctggaaggcaacttgtatcggaaacaactcggcagcggccgtcagcatgttgaagcaggattataaagaaggagagatgaccctcaaatctgctctcgcccttgcaattaaggttttgaacaaaactatggacgtaagcaagttaagcgcagaaaaagtagagatagcaaccctgaccagggaaaacggtaagacggtcattcgcgtccttaagcagaaggaggtggagcagctcattaagaagcatgaggaagaagaggccaaagccgagcgggagaagaaagagaaggaacagaaagagaaggataaatag

SEQ ID NO: 130306 - DNA, 666 bp, synthetic construct
  misc_feature 1..666: note = Description of Artificial Sequence: Synthetic coding sequence
  source 1..666: mol_type = other DNA
atgtctagacgatatgattcccgcactactatctttagtccggaaggtcggctgtatcaagtggagtacgccatggaagccataggtcacgccggcacatgcctgggcattctggccaatgacggagtgctattagcagcggagaggagaaatatccataaattactggacgaggtgttcttttccgaaaaaatttataagctgaacgaagatatggcctgtagcgtagcaggtatcactagcgacgccaatgttctgaccaatgagctgcgattgattgcacagcgctacctgctgcagtaccaggagccgatcccctgcgaacaacttgtaacagcattatgcgatattaagcaagcctatacacagtttggcggcaagcgcccgtttggcgtgtctctgctttacattgggtgggacaagcactatgggtttcagttataccagagcgacccttctgggaactatgggggctggaaggctacatgcattggcaacaactccgccgccgccgtgtcaatgttaaaacaggattataaagagggggagatgactttgaagtcggcgcttgcgttggccataaaggtgctcaacaagactatggatgtctcaaaattgtctgcggagaaagtcgagatagctacactcactcgggagaacggatag

SEQ ID NO: 130307 - DNA, 630 bp, synthetic construct
  misc_feature 1..630: note = Description of Artificial Sequence: Synthetic coding sequence
  source 1..630: mol_type = other DNA
atgtcccgtcgctacgactctcggaccacgatcttcagcccagaaggccgcctgtatcaagtcgaatacgccatggaggctataggccatgctggtacatgcctgggtatactcgccaatgatggagtcctgctagctgccgaacgaagaaatatccacaaacttttggatgaagttttcttctcggagaagatctacaagcttaacgaggacatggcctgttcagtcgcaggcattacttccgacgcaaatgtgctgaccaatgaactgagattaattgcgcagcgctatctgctccagtatcaggaacctatcccctgcgagcaacttgtgacagctctttgtgacatcaaacaggcctatacacagtttggggggaaaagaccattcggggtatccctgctatacattgggtgggacaaacactatggttttcagctgtatcagagtgatccctccggaaactacggcggctggaaagctacttgtatagggaataatagcgcggcagcagtctccatgctgaagcaggattataaagagggagaaatgaccctgaagtccgctttggccctggcaatcaaggtactgaacaagaccatggacgtgtctaagctctctgccgaatag

SEQ ID NO: 130308 - DNA, 693 bp, synthetic construct
  misc_feature 1..693: note = Description of Artificial Sequence: Synthetic coding sequence
  source 1..693: mol_type = other DNA
atgtcccggcggtatgactctagaacgacaatcttttcccccgaagccgaaagaaggaacatacacaaactgctcgacgaggtattcttttccgaaaaaatttataaattgaacgaagacatggcctgcagcgtggccggcatcaccagcgatgcaaacgtgctcaccaatgaactcagactgatcgcccagcgctaccttctccagtaccaggaaccaataccctgtgaacagctcgtgacggcactgtgtgacatcaaacaagcatatacacagttcggtgggaaacgccccttcggcgtttctctgctttacattggctgggataagcattatgggtttcagctctaccagtcggacccatctggcaattacggcggctggaaagcgacctgcataggcaacaattctgcggccgccgtgtcaatgctcaagcaagattataaggagggagaaatgaccttaaagagcgcgctggctctggcgattaaagtattgaacaaaaccatggacgtatcaaaactctctgccgagaaagttgaaattgcgaccctgacaagggaaaatgggaagactgttatcagggtactcaaacagaaagaggtcgagcagttgattaaaaaacacgaggaggaggaagccaaggcagagcgggagaagaaagaaaaagagcagaaagagaaggacaaatag

SEQ ID NO: 130309 - DNA, 711 bp, synthetic construct
  misc_feature 1..711: note = Description of Artificial Sequence: Synthetic coding sequence
  source 1..711: mol_type = other DNA
atgtcacgtcgctatgattctcgaactaccatcttctcacctgaaggaaggctctaccaggttgagtacgcaatggaggctatcggacatgccggaacctgcctggggatcttagccaacgatggggtgctcttggcagctgagcgccgaaatatccacaaactgctcgacgaagtatttttctctgagaagatatataagctgaatgaggacatggcctgctctgttgccggaataacttccgatgccaatgtcttgactaacgaactccgacttatcgcacagagatacctcctgcagtatcaggagcctattccttgcgaacagttggttacagcattgtgcgacataaaacaagcgtatactcagtttgggggcaagcgaccattcggtgtgagcttgctgtatattggttgggacaaacactacgggtttcagctctaccagagcgacccctccgggaactacggaggatggaaggccacttgtatcggcaacaactctgcagcggcggtatccatgctgaagcaagactacaaagagggggaaatgaccctgaagtccgccctagccctggccataaaggtgctaaataaaactatggacgtgtctaagctgagcgccgaaaaggttgagattgcgactctcacgcgagagaacggaaagacagttattcgggttcttaagcagaaagaggttgagcagctgtag

SEQ ID NO: 130310 - DNA, 726 bp, synthetic construct
  misc_feature 1..726: note = Description of Artificial Sequence: Synthetic coding sequence
  source 1..726: mol_type = other DNA
atgtttctgaccaggtcagagtacgacaggggagtgaatacattcagtccagaagggcggctgttccaggttgagtatgccatagaagctatcaaactggggtccacagctatagggatccagacatctgagggcgtgtgtctggccgttgaaaagcgcattacgtcccctctgatggagcctagctcgatcgaaaaaattgtcgagattgacgctcatatcggctgcgcaatgtcagggcttatcgccgatgccaaaacgctgatagacaaggccagggtcgagactcagaatcactggttcacgtacaacgagaccatgactgtcgagtctgtgacacaggcagtcagcaatcttgctctacagttcggcgaagaggacgccgatcccggggccatgtctcgccccttcggcgtcgctctgttattcggtggggtggatgagaaaggcccccaactcttccatatggaccccagtggaacttttgtgcaatgtgatgctagggccatcggctctgcctctgagggagcgcagtcaagtctccaagaggtgtaccataagtccatgactttgaaggaagcgattaaatccagtcttattatcctaaaacaagttatggaggagaaattgaacgcaacaaacattgaactggccacagtccaaccaggccagaatttccacatgttcaccaaggaggaactggaggaggtaataaaggatatttag

SEQ ID NO: 130311 - DNA, 552 bp, synthetic construct
  misc_feature 1..552: note = Description of Artificial Sequence: Synthetic coding sequence
  source 1..552: mol_type = other DNA
atggaaccgagctctatcgagaagatcgtggaaattgatgctcacatcgggtgtgctatgtccggactgatcgcggacgccaaaaccctcatcgataaggcacgtgtggagactcagaaccattggtttacgtacaacgagacgatgacggtcgaatccgtcactcaggctgtaagtaacttggcgctgcaatttggggaggaggacgccgaccctggggctatgtctcgaccgtttggtgtcgctctgctgttcggaggtgtggatgaaaagggtccacaactgtttcacatggatccgtctgggaccttcgtccagtgtgatgccagagctatcggttcggctagcgagggcgcacagtccagtcttcaggaggtttaccacaaatccatgacccttaaggaggcaatcaaaagttccctgatcatccttaagcaagtgatggaagagaagctgaacgctacaaatatcgaactcgcaaccgtccagcccgggcagaactttcatatgttcactaaggaggagctggaggaagttatcaaagacatctag

SEQ ID NO: 130312 - DNA, 741 bp, synthetic construct
  misc_feature 1..741: note = Description of Artificial Sequence: Synthetic coding sequence
  source 1..741: mol_type = other DNA
atgagcagaggatcttccgctggattcgatcggcatatcacgatattcagtccggaagggcgcttgtaccaggtcgaatacgcattcaaagccatcaatcagggaggtttgacatctgtggctgtgcggggtaaggattgtgccgtcatcgttactcagaagaaggtccctgataagttacttgactctagcacagtaactcacctgtttaagattactgaaaatatcggttgtgttatgactgggatgactgcagatagccgctcacaggttcagcgcgctcgatatgaggccgccaactggaaatacaaatatggatacgagattcccgttgatatgctctgcaagcgtatcgctgatattagccaagtttacacacagaatgcagagatgaggcctttaggatgctgtatgatcctaatcggaatcgacgaggaacaaggaccacaagtatacaagtgcgacccggccggctactattgtggattcaaagccaccgcagcaggagtgaaacagaccgaaagcacctccttcttggaaaagaaggtgaaaaagaagtttgactggaccttcgagcagaccgtggagaccgctatcacctgcctctccacagtgcttagtatcgattttaaaccctccgagattgaggtgggcgtggttaccgtggagaaccccaagttccgaattctgactgaagcagaaattgatgcacacctggtggcacttgccgaaagggactag

SEQ ID NO: 130313 - DNA, 684 bp, synthetic construct
  misc_feature 1..684: note = Description of Artificial Sequence: Synthetic coding sequence
  source 1..684: mol_type = other DNA
atggctggcttaaggagagaatacgcttttaaagcgatcaaccagggcggcctgacatctgtagcagtgaggggcaaggattgcgcagtaatcgtgacacagaagaaggtgcctgacaagcttctcgactctagtactgtgactcacctgtttaagatcaccgaaaatatcgggtgcgtgatgaccggaatgacagctgatagccgcagccaagtgcagagagctcgctacgaagccgcgaattggaagtacaagtacggctatgaaatcccagtggacatgctctgtaagcgcatagctgatatctctcaagtgtacacccaaaacgctgagatgaggccactgggttgctgtatgattctcattgggatcgacgaagagcaaggcccacaagtctacaagtgcgatccagcaggttactactgcggattcaaagctactgctgccggggttaaacagaccgaatctactagtttcctggagaagaaggtaaaaaaaaagttcgactggacctttgagcagaccgttgagactgcaattacatgtctgagcacagtcctttccatcgactttaagcccagcgagattgaggtgggggtcgtgacagtcgaaaacccaaaattcagaattctgactgaggctgagattgacgcccacctcgtggcactggccgaacgggactag

SEQ ID NO: 130314 - DNA, 759 bp, synthetic construct
  misc_feature 1..759: note = Description of Artificial Sequence: Synthetic coding sequence
  source 1..759: mol_type = other DNA
atgtctaggggaagttcagctggcttcgatcgacatattactattttctctcctgagggccgcttgtaccaagtcgaatacgctttcaaggccatcaaccagggcggcctgacgtccgtggccgtgcgcggcaaagactgcgcagtaatagtgacacagaagaaggttcccgataagctgctggacagcagcacagttacccatctattcaagatcaccgagaacattggatgtgtgatgaccggcatgaccgctgatagccggtctcaggtccagcgagctcgatatgaggccgccaactggaaatataagtatggatacgagatcccggtcgacatgctatgcaagcgcatcgctgacatttcccaggtgtatacccaaaacgcggaaatgagacctttaggctgctggtcattcctttttctaggcatgattcttatcggcatcgatgaggagcagggtccacaggtgtataaatgtgatcctgccgggtactactgtggatttaaggctaccgccgcgggggtgaagcagaccgaatctacttcttttctggagaaaaaagtgaagaaaaaattcgattggactttcgagcaaacagtggagactgccatcacctgtctctcgacagtactgtcgatcgacttcaagcccagtgagattgaggtcggagtggtaactgtggaaaaccctaagtttagaatcctgacagaagccgaaattgacgcccacttggtggccctggctgaacgcgattag

SEQ ID NO: 130315 - DNA, 324 bp, synthetic construct
  misc_feature 1..324: note = Description of Artificial Sequence: Synthetic coding sequence
  source 1..324: mol_type = other DNA
atgagccgggggagctcagcagggtttgataggcacattaccatcttcagtcctgaaggccggctctatcaggttgagtacgctttcaaggcaatcaatcagggcggcctgaccagcgtcgctgtgcgcgggaaggattgtgctgtgatcgtcacccagaaaaaggtgcccgataaactactggacagcagtaccgtcactcaccttttcaagatcaccgagaacattggatgtgtaatgactggcatgacggtgtccttgtgccgtcccggttgctcggccagctgggtccaggcgatcctagtcccgcaaccccccagatag

SEQ ID NO: 130316 - DNA, 447 bp, synthetic construct
  misc_feature 1..447: note = Description of Artificial Sequence: Synthetic coding sequence
  source 1..447: mol_type = other DNA
atgtctcgcggttcctccgctgggttcgaccggcacatcaccattttcagtcctgaagggaggctctaccaggttgagtacgctttcaaggccataaaccagggggggttgacaagcgtggccgtgaggggcaaagattgcgctgtgatagtgacccagaagaaagtcccagataaacttctcgattccagcactgtaacccatttatttaaaatcaccgaaaatattggttgtgtgatgaccggcatgaccgctgattctcgcagccaggttcagagagcacgctacgaagctgccaattggaaatacaaatatggctacgagatccccgtcgacatgctgtgtaagcggatcgctgacatctcacaggtctatacccagaacgctgagatgcggcccctgggttgctattgtaactatatgcctgtatactgctcgattaattag

SEQ ID NO: 130317 - DNA, 504 bp, synthetic construct
  misc_feature 1..504: note = Description of Artificial Sequence: Synthetic coding sequence
  source 1..504: mol_type = other DNA
atgactggcatgaccgctgacagccgttcacaggtgcagagggctcgttacgaggcagccaactggaagtataagtatggttacgagatccctgtggacatgctgtgcaaaaggatagccgatatctcacaggtgtacacccagaacgcagagatgcgccctctgggatgttgcatgatccttattgggattgatgaggaacagggcccccaagtgtacaagtgtgaccctgctggttactattgtgggtttaaggcaactgccgctggcgtgaagcagacagagtccacatcctttcttgaaaagaaggtgaagaaaaaattcgattggacgtttgagcagacagtggagacagccataacctgtcttagcacagtgctgagcattgactttaagccatccgagatcgaagtgggtgttgtcactgtggagaaccctaagtttcggatcctcaccgaagctgagatcgacgcccacctggttgccctggccgagagagattag

SEQ ID NO: 130318 - DNA, 612 bp, synthetic construct
  misc_feature 1..612: note = Description of Artificial Sequence: Synthetic coding sequence
  source 1..612: mol_type = other DNA
atgagtcgtggaagctccgctgggtttgacaggcatattaccattttttcacccgaagggcggctgtaccaggttgagtacgccttcaaggccatcaatcaggggggcctgacgagtgtcgctgtgcggggtaaggattgcgccgttattgttacccagaaaaaagtacccgataaactgctcgactcgtccacagtgacgcacctgtttaaaattacagaaaacataggctgtgtaatgactggtatgaccgctgattcacggagccaggtacagcgtgctcggtacgaagctgcaaactggaagtacaaatatggatatgagattccggtggatatgctttgcaagcgcatcgccgacatctcccaagtctacacccagaacgccgaaatgcggccgcttggttgttgtatgatactcattggaattgacgaggagcaaggtccgcaggtctacaagtgcgatccggcaggatattactgtgggtttaaagctacggccgcaggtgtgaaacagactgagagtacctccttcctcgagaagaaagtaaaaaaaaaatttgattggaccttcgagcagacagttgaggactcttacaggagtagggactag

SEQ ID NO: 130319 - DNA, 450 bp, synthetic construct
  misc_feature 1..450: note = Description of Artificial Sequence: Synthetic coding sequence
  source 1..450: mol_type = other DNA
atgagctacgaccgcgcaataaccgtgtttagccccgatggacacctgtttcaagtagagtatgcccaggaagcagtcaagaagggatcaacagctgtgggtgttcgcggacgcgatatcgtggtcttgggcgttgagaagaaaagcgtcgctaaactgcaggatgagcgtacggttagaaaaatctgtgctttagacgacaatgtctgcatggcatttgccggactgactgcagacgccagaatcgtcatcaaccgggcccgtgtagaatgtcaatcacataggttaacagtggaagatcccgtgactgtcgaatatataaccagatatattgcctcattgaagcaagtcggagcctgccctctagcatgtagcccactcgctgccggccaatccaggctgcggcacggcggttcttgtcacgtgacgtctggcgagtcggaaaactag

SEQ ID NO: 130320 - DNA, 537 bp, synthetic construct
  misc_feature 1..537: note = Description of Artificial Sequence: Synthetic coding sequence
  source 1..537: mol_type = other DNA
atggccttcgctggcctgaccgcagatgccagaatcgtgatcaaccgcgctcgcgttgaatgccagtctcaccggctgaccgttgaagatcccgtcactgtcgagtacattacacgatacatcgcatccctgaagcagaggtatacccaatcgaacggccggagaccatttgggatatccgctctgatcgtggggttcgattttgacggaacccctaggctttaccagaccgaccccagcgggacctaccacgcatggaaggctaacgccatcggccggggcgccaagagcgtgcgggagtttctcgaaaagaactacactgacgaagcaatagaaactgatgacctgaccatcaagctcgtcatcaaagccctgctcgaagttgtgcagtccggaggtaagaacatcgaattagccgtgatgaggcgggaccaatcgctgaagattctcaatcccgaggagattgagaagtacgtcgctgagattgaaaaggagaaggaggaaaacgaaaagaaaaaacagaaaaaagcctcgtag

SEQ ID NO: 130321 - DNA, 747 bp, synthetic construct
  misc_feature 1..747: note = Description of Artificial Sequence: Synthetic coding sequence
  source 1..747: mol_type = other DNA
atgagttatgacagagccattactgtattttccccagatggccacttattccaggtcgagtatgcccaggaggccgtgaagaagggctccactgctgtcggggtccgggggagagatattgtcgtcctcggggtggagaagaagtcggtggctaaactgcaggacgagcggacagtgcgcaagatctgcgcgctggatgataatgtctgcatggcctttgcagggctgaccgccgatgcccggatagttatcaatcgcgcacgggtagaatgccagtcgcaccggctgactgttgaggacccagtcactgttgagtacataacgcggtatatagcttcattgaagcagaggtatacccagagcaacggccggcgcccctttggtatctctgctctgattgtcggtttcgacttcgatggaacacccagactctatcaaaccgacccttccggcacttaccacgcatggaaggccaacgctataggccgaggcgccaagtccgtaagagaattcctggagaaaaattacacggatgaggcaatcgaaaccgacgatctgacaatcaaattagtcatcaaggccttattggaggtcgtgcagagcggggggaagaacatcgagctggcggtgatgcgaagagaccaatccctcaagattctaaaccccgaggaaatcgaaaagtacgttgctgaaatcgagaaagagaaggaagagaacgagaagaaaaaacagaaaaaagccagctag

SEQ ID NO: 130322 - DNA, 564 bp, synthetic construct
  misc_feature 1..564: note = Description of Artificial Sequence: Synthetic coding sequence
  source 1..564: mol_type = other DNA
tagctcaccgctgacgccaggatcgtgattaatcgcgcccgggttgagtgccaaagccatcggctgacagtagaagaccctgtgactgtggaatacattacccgatacatcgcttcattaaaacaacggtatacacaatccaatgggcgaagaccattcggaatttcagccctgatcgttggctttgacttcgatggcacaccccggctttatcaaactgaccctagtggcacctaccacgcctggaaggctaacgcaataggacgcggcgctaaatccgtgagggagttcctggagaagaattataccgatgaggctatagaaactgatgacctgaccatcaagttggtgatcaaggccctgctggagggcaaggtagtgaatgctccagtcttttgtcctttcaaggtggtccagagcgggggcaaaaatatagagctcgccgtcatgcggcgcgaccagagcttgaaaattctcaaccccgaggaaattgaaaaatacgtggcggagattgagaaggagaaggaagagaacgaaaagaaaaagcagaagaaggcctcgtag

SEQ ID NO: 130323 - DNA, 726 bp, synthetic construct
  misc_feature 1..726: note = Description of Artificial Sequence: Synthetic coding sequence
  source 1..726: mol_type = other DNA
atgctatccagcacagcaatgtatagcgctcccggtcgcgacctgggcatggagcctcatcgagctgctgggccacttcagttgcggttctccccatacgttttcaacggtgggacaatcttggctattgctggtgaggactttgccattgtggcctccgacacaaggctttccgaggggtttagtattcacacaagggactctcctaaatgctacaaattgacagataagacagttattggctgttctggctttcatggagactgcctaaccctcactaagatcatagaggctcggctgaagatgtataagcactctaacaataaagccatgacgacaggggctattgctgccatgctgtctacaatattgtactctcgccggttcttcccttattacgtgtataatattatcgggggcctagacgaggaagggaagggtgcagtgtactcctttgaccctgtgggatcttatcagcgggacagctttaaggcaggagggagtgcaagtgctatgctgcaacctctcctagacaaccaagtgggttttaagaatatgcagaatgtagagcatgtgcctctgtctctcgacagggcgatgcgactggtaaaagatgtgtttatcagcgctgccgagcgggacgtgtatacaggcgatgctttgaggatttgtattgttaccaaggaggggattcgagaggagactgtgtccctgcgtaaagactag

SEQ ID NO: 130324 - DNA, 591 bp, synthetic construct
  misc_feature 1..591: note = Description of Artificial Sequence: Synthetic coding sequence
  source 1..591: mol_type = other DNA
aggagaagcagggccatgctgtcatccaccgccatgtactctgccccagggagagacctgggtatggagccccatcgtgctgccgggcccctgcagctcagattctctccctatgtttttaatggaggtactattttggccattgcaggtgaagattttgctattgttgcttcagacactagactctccgagggcttctccatccacactagggactctccaaagtgctataagctcactgataaaacagtaatcggctgtagcggtttccacggagattgcttgacattgacaaagatcatcgaagcgaggctgaagatgtacaaacactcaaataataaagccatgaccacaggcgcaatcgcagctatgctgtcaacgattctgtactctaggaggttctttccatattatgtctacaacattatcggcggtctggatgaggaagggaagggcgcagtgtattcatttgatcctgtgggaagttaccaaagggacagcttcaaagcaggcggttctgcctccgctatgctccagccgctcctagacaatcagtacatctcctctaactctgtgagcctgtgcgtatag

SEQ ID NO: 130325 - DNA, 822 bp, synthetic construct
  misc_feature 1..822: note = Description of Artificial Sequence: Synthetic coding sequence
  source 1..822: mol_type = other DNA
atgctaaaacccgcactggaacctagagggggcttctcattcgaaaattgccagcgtaatgcaagcctcgaaagggtactgccgggcctgaaggtgccccacgcacggaagactggcaccacaattgctggactcgtctttcaggacggagtgatactgggtgcagatacgagagctaccaacgatagcgtcgtcgccgataaatcttgcgagaaaatccattttatcgcccctaagatatactgctgtggggctggtgtggcagcggacgcagagatgacaacacgcatggtagcctccaagatggagttacatgccctctcgaccggaagagagcctagggtggccactgtgacgcgcatcttgagacagactcttttccgctaccaggggcacgttggggcttccctaatcgtgggaggcgtggacctgaccggaccacagctgtacggggtgcatccacatggtagctactcgaggctgccatttaccgcactgggttccgggcaggatgctgcgctggctgtgctcgaggaccgcttccaacctaatatgaccctcgaagctgcacaggggctccttgtggaggccgtaacggcaggaattctaggagacttagggtcggggggcaatgtggatgcctgtgtgataaccaagactggcgccaagctgctgcgtaccttgagttcccctaccgagcctgtcaaaaggagcggtagatatcacttcgtgccgggcactacggctgttctgacgcagacagtaaaacccttgacgctcgaactggttgaagaaactgttcaagccatggaggtggagtag

SEQ ID NO: 130326 - DNA, 903 bp, synthetic construct
  misc_feature 1..903: note = Description of Artificial Sequence: Synthetic coding sequence
  source 1..903: mol_type = other DNA
atggccttgcaagacgtgtgcaaatggcaatcccctgatacacagggcccatccccccacctgccaagagctggcgggtgggctgtcccacgcggttgcgaccctcagaccttcttgcagattcacggcccacggctagctcacggaactaccactctcgccttccgctttcggcatggcgtcatagccgcagcagacactaggtcgtcttgcggtagctacgttgcgtgcccagcatcatgtaaagtgatcccggtgcatcaacaccttctgggtaccacctcgggcacttctgcagactgcgctacatggtaccgcgtgttgcaaagggagctgcggctcagagaactgagagagggacagttgccctctgtagctagcgccgcaaaactgcttagcgcgatgatgagccagtacagggggctggacctgtgtgtggctactgctttgtgcggctgggaccggtccggcccagagctcttctatgtgtactcagacggcaccagactgcagggcgatattttttctgtggggagcggaagcccatacgcctacggagtgttggatcggggataccgatatgacatgtcaactcaagaggcatacgctcttgcccgttgcgcagtagcccacgcgacgcacagggatgcttattctggcgggagtgtcgacctgttccacgtgagagaatctgggtgggagcatgtgagcaggtctgacgcctgtgttctgtacgtggagctgcagaagcttttggaaccagaacctgaggaagacgccagtcatgcacatcctgagcctgctaccgcccaccgcgcagcagaggacagggagctgtctgttgggcctggcgaagtgacaccaggcgacagccggatgccggctggcacagaaaccgtttag

SEQ ID NO: 130327 - DNA, 606 bp, synthetic construct
  misc_feature 1..606: note = Description of Artificial Sequence: Synthetic coding sequence
  source 1..606: mol_type = other DNA
atggagtatttgattggcatccagggacccgactatgttttggtggccagtgatagagtagctgcgagcaacattgtacagatgaaagacgatcacgataagatgtttaagatgagtgagaaaattctcttactgtgtgtgggggaggccggtgacaccgtccaattcgccgagtatatacaaaagaatgttcagctgtacaagatgagaaatggttacgagctctctcctaccgccgccgctaattttacgaggcgcaatttggccgactgccttcggtcccggaccccctatcacgtcaatctgttactggccgggtatgatgagcacgaagggccggccctgtactatatggactatctcgccgcccttgctaaggctcctttcgccgcacacggatacggcgctttcctcacactgtccatcctagatcgctactacaccccaaccatatcccgggagagagcagtggaactgctgcgcaagtgtttggaagaactgcagaaaagattcattctgaacctccctacctttagcgtgagaattatcgataagaatggcattcacgacctggacaatataagtttcccaaagcagggaagttag

SEQ ID NO: 130328 - DNA, 468 bp, synthetic construct
  misc_feature 1..468: note = Description of Artificial Sequence: Synthetic coding sequence
  source 1..468: mol_type = other DNA
atggccagcctgaagtgctccactgtggtgtgcgtaatctgtttggagaagccgaaatatcgctgccctgcatgtagggtaccctactgcagcgtggtatgcttccgtaaacacaaggaacaatgcaaccccgagacaaggccagtggagaagaagatacgctctgctttgcccactaagactgttaaacctgtcgagaataaggacgatgatgattccatcgcagacttcttgaactcagacgaagaggaagatagagtatctctacagaacctgaagaacctgggggaaagcgccacattgagaagtttactgctgaacccacacttgagacaactgatggttaatcttgaccagggggaagataaggccaaactcatgcgggcttacatgcaggagccgctgtttgttgagttcgccgactgttgcctgggcatcgttgagcccagccagaacgaggaaagttag

SEQ ID NO: 130329 - DNA, 795 bp, synthetic construct
  misc_feature 1..795: note = Description of Artificial Sequence: Synthetic coding sequence
  source 1..795: mol_type = other DNA
atggaagcctttctcggaagccgttcagggctgtgggctggagggccagcaccgggccagttctatcgaattccctcaacacctgacagctttatggatcctgctagcgcactatacagagggcccatcacacggacgcaaaatcccatggtgacaggtacgtctgtgctgggggttaaatttgaaggaggagttgtcatcgcagccgatatgctcggcagctacggatccctggctcgtttcagaaacatctctcgcattatgcgggtgaataacagcaccatgctgggcgctagcggtgactatgccgatttccagtaccttaaacaagtgctgggacaaatggtaatcgatgaggagttacttggggatggccactcatattcacccagagcgattcattcctggctgacaagggcgatgtactctcgacggtccaaaatgaaccccctgtggaacactatggttatcggaggttacgctgatggggaatcatttctcggctacgtagacatgttaggcgtcgcctatgaggccccttccctcgctaccggttacggggcttacctcgcccagcctctgctccgtgaggtcctcgagaagcagcctgtactgtcacagaccgaagccagggaccttgtggagagatgtatgagagttctgtattacagagacgccagaagctataataggttccaaatagctactgtcaccgagaagggagtcgagattgagggtcccctctctacagaaactaactgggatatcgctcatatgatctccgggtttgaatag

SEQ ID NO: 130330 - DNA, 792 bp, synthetic construct
  misc_feature 1..792: note = Description of Artificial Sequence: Synthetic coding sequence
  source 1..792: mol_type = other DNA
atggccctggcttcagttctggaacgacccctgcctgtgaaccagagggggtttttcggtttggggggccgcgccgatctgctggatctcgggccaggcagtctcagtgatggattgagcctcgcagcaccaggctggggcgtccccgaggaaccaggaatcgaaatgttacacggtactactacactggcatttaagtttcgccacggggtaatcgttgcggcggactctagggccaccgccggagcctacattgcgagccagaccgttaagaaagtgatcgaaatcaacccatacctacttggtaccatggccggaggggccgccgattgctctttctgggaaagactcttggcacgtcagtgtcgtatctatgagctccggaacaaggagcgaatatctgtcgccgcggctagtaagctgctcgccaatatggtgtaccaatataaaggaatgggcctaagtatgggcactatgatttgcgggtgggataagcgcggcccaggactgtattacgttgacagcgagggcaacagaatctcaggggcgactttttccgtcggttctggaagtgtctacgcttatggcgtgatggaccgaggatattcttacgacctcgaggtggaacaagcctatgacctagcacgccgtgcgatttatcaggccacatacagagacgcctactctggcggtgcagtgaacttgtatcacgtgagggaagacggatggattagggtttccagcgacaatgtggccgacctgcatgagaaatatagcgggtcaacgccatag

SEQ ID NO: 130331 - DNA, 483 bp, synthetic construct
  misc_feature 1..483: note = Description of Artificial Sequence: Synthetic coding sequence
  source 1..483: mol_type = other DNA
atggccgggggcgcagcagattgcagcttttgggaacggttgctggccaggcagtgccggatatatgagctccgaaacaaggaacggatttccgtagcggctgcttccaaacttctggcaaacatggtctatcagtataaaggtatgggactaagcatggggaccatgatttgcggctgggacaaacgcgggcctggcctgtattatgtggactcagagggaaacagaatttctggcgcaactttctcagtgggctccggatccgtttacgcctatggtgttatggatcgggggtactcttatgacctagaagtagagcaggcctatgatctcgcgagaagagccatctaccaggccacctacagggacgcatactcagggggagccgttaatctctaccacgtgcgcgaagatggatggataagggtgagctccgacaacgtggcagatctgcacgaaaagtactcaggttccacaccctag

SEQ ID NO: 130332 - DNA, 612 bp, synthetic construct
  misc_feature 1..612: note = Description of Artificial Sequence: Synthetic coding sequence
  source 1..612: mol_type = other DNA
atggctctcgccagcgtgctggagcgcccattgcccgtaaatcagcgcgggtttttcggcctaggtggcagagccgaccttctagatctggggccaggcagtctttcagacggactatctttggcagcacctggatggggtgtgccagaagagcccggtatcgaaatgctgcatggaactaccactctggcctttaagtttcgtcacggggtaattgtagcggccgattctagagcgacggctggtgcatacatagcttcccagaccgttaagaaagtcatcgagattaacccgtacctattgggtacaatggcgggaggggctgcagattgtagcttttgggagcgccttttggccagacagtgtagaatctacgaactgaggaacaaggagcgcatttcagtggccgccgcgagcaaacttctggcgaatatggtgtatcagtacaagggaatgggcctctctatgggaactatgatctgcggatgggacaagagaggccctgtgtcagaagttctctgtctgaagcctaaatcattcggcatgtacctgttttgtgggtgtgccgaacgaatcggcaacatggctaggcctttactcagagggcagtag

SEQ ID NO: 130333 - DNA, 834 bp, synthetic construct
  misc_feature 1..834: note = Description of Artificial Sequence: Synthetic coding sequence
  source 1..834: mol_type = other DNA
atggcggctgtcagtgtctacgccccccccgttggggggttctcctttgacaattgccggcggaacgccgtccttgaagccgattttgcgaagaggggctataaactccctaaggtcagaaagaccggcactacaattgcaggtgttgtctacaaggatgggattgtcttaggagccgacaccagggccacagaaggaatggtggttgcagataagaattgttctaagatccattttatctctccaaatatctactgttgtggcgctgggacggccgcggatacagatatgacaacacaacttatatcctcaaacctggagctccacagcttgtcaactgggcgactaccgcgagtcgtcactgcaaacagaatgctcaaacagatgctgtttcgatatcaggggtacatcggcgctgcacttgtgctcgggggcgttgacgtgacaggacctcatctgtattcaatttatccccacggaagcaccgacaaactcccgtacgtaaccatgggcagcggcagcctggctgccatggctgtgttcgaagataagtttcggcccgatatggaggaggaggaggcaaagaatcttgtgagcgaggctatcgcagcaggcattttcaatgatttggggtcagggtcaaacatcgatctgtgcgtgatcagcaagaacaagctggacttcctcagaccttacaccgttccaaataaaaaagggactagactcgggcgctaccggtgcgagaagggtactacagccgtcctgaccgaaaagattaccccgctggagattgaagttttggaggagaccgtgcaaaccatggacaccagctag

SEQ ID NO: 130334 - DNA, 633 bp, synthetic construct
  misc_feature 1..633: note = Description of Artificial Sequence: Synthetic coding sequence
  source 1..633: mol_type = other DNA
atggccgctgtgtctgtttatgccccccctgtgggcggattctcctttgataattgcagacgcaatgccgtcctggaagcagacttcgcaaagagaggctataaactgcctaaagtccgaaagaccgggaccacgatcgccggcgtcgtttataaggatggaattgtattgggggcagacacccgtgccacagagggcatggttgttgccgataaaaattgcagcaagattcatttcatctcccccaacatctactgttgcggtgccggaacagccgcagataccgacatgactacacaattgatttcatctaacctcgaactgcattcgttaagtaccggaagactgccccgagtggtaaccgctaataggatgctcaagcagatgctcttccgataccaaggctatattggcgccgcactggtcctgggcggagtcgatgtgactggtcctcatctctattccatctatcctcacgggtctacagacaaactaccctacgttaccatggtacactgtgaggaagaactgttcacagagaatctattctttatccggcaggcagaggttgtgtctgaggaggcttggggaccatcctttgctattagtctggctgtctttttggtggcttag

SEQ ID NO: 130335 - DNA, 429 bp, synthetic construct
  misc_feature 1..429: note = Description of Artificial Sequence: Synthetic coding sequence
  source 1..429: mol_type = other DNA
atggcagcagtaagcgtatacgctcctcctgtgggcggcttctcctttgataactgtaggaggaatgcagttctggaagcagacttcgccaaaagaggctataagctgccaaaagttcggaagactggcaccacaattgcgggcgtggtgtacaaagatgggatcgtgcttggggcagacactcgtgccaccgaaggcatggtggtcgctgacaagaactgttccaaaattcattttatatcccctaacatatattgttgtggggccggcactgctgccgacactgacatgactacgcagctgatatcttccaatctggagttacacagcctgtccacagggcggctgccgagggtagtgacagctaataggatgttgaaacagatgctctttaggttttggctcctcgggtcgaatggatgcatttag

SEQ ID NO: 130336 - DNA, 819 bp, synthetic construct
  misc_feature 1..819: note = Description of Artificial Sequence: Synthetic coding sequence
  source 1..819: mol_type = other DNA
atgctaatcggaacccctacaccgagagatactactccttctagctggctgacatcttcactgctggttgaggccgctcccctcgacgatacaacactacccaccccagtgagcagcggatgtccaggtctggagcctacagagttctttcagagcctgggcggagacggggagcggaacgtgcagattgagatggcacacgggacgacaaccctcgctttcaagtttcagcacggggtcatcgctgcggtagattcaagggccagtgccggctcctacattagtgctctccgggtcaacaaggtgatcgagatcaacccatatctcttggggacgatgtccggctgcgcagctgactgccaatactgggaaaggttgctggctaaagagtgccgactgtactacctgagaaatggtgaacggatcagcgttagcgcagcctctaagctactgagtaacatgatgtgtcagtacaggggtatgggactgagcatgggaagtatgatctgcggctgggacaagaaagggcccggcctttactacgtcgatgagcacggaacaagactttctgggaatatgttctccacaggctccggcaatacttatgcttacggtgtgatggactcgggctatcggccaaatcttagtcccgaggaagcgtatgatctgggtcggcgagctatagcttatgctacacaccgggactcctactcggggggtgtggtcaacatgtaccacatgaaggaagatgggtgggtcaaggtggagtcgacagatgtcagcgacttgctgcatcaatatagggaagctaatcagtag

SEQ ID NO: 130337 - DNA, 831 bp, synthetic construct
  misc_feature 1..831: note = Description of Artificial Sequence: Synthetic coding sequence
  source 1..831: mol_type = other DNA
atggctctcctggacgtgtgcggagccccacggggacagcgccccgagtccgctttgcccgtggctggcagcggccgaagatccgaccccgggcattactcttttagtatgcggtcaccggagctggccttgccaaggggaatgcagccaacagaattcttccagtctctgggaggagacggggaaaggaacgtacagatcgagatggctcatggtactaccacacttgccttcaagttccagcacggcgtcatagcggctgtggactccagggcttctgccgggagctatatcagcgcgctaagagtgaataaggtcatcgaaatcaatccctacctccttggtacaatgtctggttgtgccgcggactgtcagtattgggagcgcctgctggcaaaggagtgccggttgtattatttgcgcaatggagagcgaatcagtgtgagtgcagcctcaaagttgctcagcaacatgatgtgccagtaccgaggaatgggcctgtccatggggtcaatgatttgtggctgggataagaagggtcccggactttactacgtggacgaacacggtactagactttcaggaaacatgttttccactggttccggaaatacctatgcttacggagtgatggactctggctacagaccaaatctttcaccagaggaggcttacgatttggggagacgtgccatagcctatgcgacccaccgggactcttactcaggcggcgtggtaaacatgtatcatatgaaggaggacggttgggtgaaagtcgaatcaactgacgtgtcagatttgctccatcaatatcgggaggccaaccagtag

SEQ ID NO: 130338 - DNA, 831 bp, synthetic construct
  misc_feature 1..831: note = Description of Artificial Sequence: Synthetic coding sequence
  source 1..831: mol_type = other DNA
atggcacttctggacgtctgcggagctccccgagggcagaggccagaatccgcactccccgtcgctggaagcggaaggagatcagaccccggccactacagctttagtatgaggtcgccagaactggcacttcctcgaggtatgcagcctacagagttctttcagtcgttaggaggcgatggggaaaggaatgttcagatcgaaatggcacatggaacaacaactctggctttcaaattccagcatggcgttatcgcagctgtggattctagagcttcagccggttcctacatctctgctttgcgggtgaataaagttatcgaaatcaacccatacctcctcggcactatgtccggatgcgcagccgattgccagtactgggagcggcttcttgccaaggagtgtaggctgtactatctgcggaacggagaaaggattagtgtttccgcggcctccaagctgctgagtaatatgatgtgccagtaccggggaatgggcctctctatgggttcaatgatttgcgggtgggacaagaaagggccagggctgtactacgtggatgagcacgggaccagactgtccggaaacatgttctccactggctcaggcaacacttatgcctacggagtgatggatagcggctacaggccgaatctgagtccagaagaagcgtatgatttaggcagacgggctatcgcctatgccacccatagagattcttactctggcggagtcgtaaatatgtatcacatgaaggaggacggctgggtcaaagtggagtccacagacgtgagtgacctattgcatcaatatcgcgaggccaaccagtag

SEQ ID NO: 130339 - DNA, 819 bp, synthetic construct
  misc_feature 1..819: note = Description of Artificial Sequence: Synthetic coding sequence
  source 1..819: mol_type = other DNA
atgctgatcggaactccgacacctcgagatacgacgcctagcagttggctgacaagcagcttgttggtggaagctgcacctttggatgatacaaccctgcccacaccggttagcagcgggtgccccggactggaacctaccgaattctttcagtccctgggaggagacggagagcgaaatgtgcagattgagatggcccatggcactacaacgttggcttttaagttccagcacggtgtgatcgcggccgtagactcaagggcttccgccggtagttacatctctgcgttgagagtaaacaaagtgatcgagattaatccttaccttctgggtactatgtctggatgtgctgcagactgtcagtattgggaacgactgttagccaaggaatgccgattatattatctgcggaacggcgagaggattagcgtaagtgcggcatccaaattgctgtctaatatgatgtgccagtaccgtggcatggggttatccatgggatcaatgatttgtggctgggataagaagggaccgggcctgtactacgtggacgaacatggaacacggctgtctggaaacatgttctccactggatctggcaatacttacgcctacggggttatggattccggctaccgtccaaacctgtctcccgaagaggcctacgaccttggtcggagggctatcgcctacgctacacaccgcgactcttactcaggtggtgtggtgaacatgtatcacatgaaggaggatggctgggttaaggtggagtctaccgacgtatcggacttgctgcatcagtaccgcgaggcaaaccagtag

SEQ ID NO: 130340 - DNA, 759 bp, synthetic construct
  misc_feature 1..759: note = Description of Artificial Sequence: Synthetic coding sequence
  source 1..759: mol_type = other DNA
atggccctcttagatgtgtgcggtgcccctaggggacagaggccagaatccgcgttaccagttgcaggatctggaaggcgttctgatcccggacattacagctttagtatgagaagtcctgagctggcccttcctagagggatgcaacccacggagttctttcaaagtctgggcggagacggcgagaggaatgtgcagatcgagatggcacatgggaccacaaccctagcttttaaatttcagcatggcgtgattgccgctgtggactctcgggcatctgccggctcctacattaactgccaatattgggagcgcctgcttgccaaagaatgtaggttgtactatcttcgaaatggcgagcggattagtgtctccgctgcttcaaagttactttctaacatgatgtgccagtatcgtggaatggggctgagcatgggatcaatgatctgcggctgggataaaaagggcccaggattatattatgtcgatgaacacggcacacggctcagcggcaatatgttctccaccggctccggcaacacatatgcatatggagtgatggatagcggctaccgcccaaatctgtcgccagaggaggcctacgacctggggcgtagagcaattgcttatgctacacatagggactcgtattcggggggggtcgttaacatgtaccatatgaaggaggatgggtgggtgaaagtggaatctaccgatgtgtctgatctgctccaccagtatcgggaagctaaccaatag

SEQ ID NO: 130341 - DNA, 759 bp, synthetic construct
  misc_feature 1..759: note = Description of Artificial Sequence: Synthetic coding sequence
  source 1..759: mol_type = other DNA
atggcactgctggacgtgtgcggcgctcccagaggccagagacctgaaagcgccctgcctgttgccggctcaggacggcgaagtgatccaggccactactccttttccatgagatcccccgagctggctttgcccagaggcatgcagcccaccgagttctttcagagtttaggcggagacggtgagagaaacgtgcagattgagatggcgcacgggaccacgactctcgccttcaagtttcagcacggagtgatcgctgccgttgacagtagagcatctgccggtagctacatcaattgtcagtattgggagcggttactcgctaaggaatgccgtctgtattacctacgtaatggggagaggataagcgtgtcagccgcgtccaaactgttgtctaatatgatgtgccagtacaggggaatgggtttgtcaatgggatccatgatttgtggatgggataagaagggacccggtctatactacgttgatgaacacggtacccggctgtctggcaatatgttttcaacaggttccggtaatacatacgcatacggcgtgatggactccggataccgtcccaatctgtctccagaggaagcatacgacttaggccgccgggctatcgcgtacgctacacatagggattcatactctggcggcgttgtgaacatgtaccatatgaaggaggacggctgggttaaggtcgagagcacggatgtcagcgacctgttgcatcaatatcgagaagcaaatcagtag

SEQ ID NO: 130342 - DNA, 819 bp, synthetic construct
  misc_feature 1..819: note = Description of Artificial Sequence: Synthetic coding sequence
  source 1..819: mol_type = other DNA
atgctgattggaacgcccacccccagagacactaccccatcatcctggttaacttccagtctcttggtagaagcagcacctctggacgacactaccttgcccaccccggttagctctggctgccctggactcgagcccactgaattcttccagtccctgggcggagatggcgagagaaacgttcagatcgagatggcccacgggaccactactctcgccttcaagttccagcacggtgtcatcgccgccgtcgattcccgcgccagcgccggctcctatatttcagcactgagggtaaacaaagtaatcgagataaacccatacttacttggaacaatgagtgggtgcgccgctgattgccaatactgggaacggttgctcgctaaagagtgccggctgtactatttaaggaatggcgagcgtatctcagtgtcagcagcatcaaagctattaagcaatatgatgtgccagtatagaggcatgggcctcagcatgggaagcatgatctgtggatgggacaagaagggtcctggattatattatgtagatgagcacggaacgcgcttgagcggaaacatgttcagcaccggttctggtaatacatacgcttatggcgtgatggactcaggttaccgtccaaacctgagccctgaggaagcatatgatctaggcagacgggccatagcctatgccacccatagggatagttactctggcggcgtcgttaacatgtatcatatgaaggaggatggttgggtcaaggtcgaaagcaccgatgttagcgatttactgcaccagtatagggaagcaaatcagtag

SEQ ID NO: 130343 - DNA, 819 bp, synthetic construct
  misc_feature 1..819: note = Description of Artificial Sequence: Synthetic coding sequence
  source 1..819: mol_type = other DNA
atgcttatcggaacccctaccccacgcgatacaaccccctccagctggctgactagtagcctgctggtggaggctgcacccctcgacgacaccactctgccaactccggtctccagtggttgccccggcttagaacccacggagtttttccaatcgctcggaggggatggggaaagaaacgttcagattgaaatggcgcacggtacaacaacactggcatttaagtttcagcatggcgttatcgccgctgtggactcgcgggcgtcagcgggctcttacataagtgcactacgcgtaaataaagtgattgaaatcaatccatatttactgggtacaatgtccggctgtgctgcagactgccagtactgggagagacttctagccaaggagtgccggctctactaccttcggaacggggagcgcatctctgtatccgccgcttcaaaattactgtctaacatgatgtgccaatataggggtatgggattgagcatgggaagtatgatctgtggatgggataaaaaaggtccggggctctattacgtcgatgagcacggaacaagattatcgggcaatatgttctcaacaggctctggaaacacttatgcttatggagttatggattcaggctatcgccccaacctgtctcctgaggaggcgtatgatctcggtcggagggccattgcatacgctacacaccgggattcctactcgggaggcgttgtgaatatgtatcacatgaaggaagacggttgggtgaaagtagaaagcacagacgtctctgacttgctgcatcagtaccgagaggcaaaccaatag

SEQ ID NO: 130344 - DNA, 831 bp, synthetic construct
  misc_feature 1..831: note = Description of Artificial Sequence: Synthetic coding sequence
  source 1..831: mol_type = other DNA
atggccttgctggatgtgtgtggggcaccacggggccagagacctgaaagcgccctacctgtggctggatctggcagaaggtccgatccaggacactattcattcagcatgagatcgcctgagctagccctcccaagaggtatgcagcccaccgaattcttccaatctctgggaggcgatggcgagcggaacgtacagattgaaatggcccatggcacaactaccctggccttcaagtttcagcacggcgtaatagctgcagttgatagccgcgcaagtgccgggtcctatattagcgcgcttcgcgtgaataaggtgatagagatcaatccgtacctgctcggtaccatgagcggctgcgccgccgactgccaatattgggagaggctcctggcaaaggagtgtaggctatactacctgcgtaacggagaaagaatttcagtaagcgctgcaagtaaattgctgagcaatatgatgtgtcaataccgcggtatgggactgagcatgggtagcatgatctgcggatgggacaagaagggacctgggctgtactacgtggacgagcacgggactcggttgagtggcaatatgtttagtaccggttctgggaacacttatgcgtatggggttatggattctgggtaccggccaaacctcagccccgaagaagcgtatgatcttggaagaagagccatcgcctacgccacacaccgcgacagttatagcggtggagtcgttaatatgtaccatatgaaggaggatggttgggtcaaggtggagtccaccgatgtgagcgacctgttgcaccagtatcgagaagctaaccagtag

SEQ ID NO: 130345 - DNA, 759 bp, synthetic construct
  misc_feature 1..759: note = Description of Artificial Sequence: Synthetic coding sequence
  source 1..759: mol_type = other DNA
atggcgctattggacgtctgcggcgcccccagaggacagagacccgaatctgccctgcctgtagccggaagcggtcggaggtccgaccctgggcactatagtttctctatgaggtcccctgagctggcccttccaagaggaatgcagccaaccgaattttttcagagtctgggtggggacggggaacgaaatgttcaaattgaaatggcacacggaacgaccacacttgccttcaagtttcagcacggagtaatagctgccgtggactcccgcgcatctgcaggtagttatatcaactgtcagtactgggagcgtctcttggctaaggaatgccgactgtattatctcagaaatggtgaacgtatctcggttagcgccgccagcaaactgttatcaaatatgatgtgccaatatagaggaatgggcctaagcatgggatctatgatctgtggatgggacaagaaggggcctgggctgtattatgtcgatgaacatggcacaagactgtcggggaacatgttcagcaccggaagcgggaatacatacgcatatggggtgatggatagcggctaccgcccgaatctgagccccgaagaagcttacgacctgggccgacgagctatagcatatgccactcaccgtgatagctactcagggggcgtggtcaatatgtatcacatgaaggaggacggctgggtcaaagtggagtccaccgatgtgtctgacctgcttcaccagtatcgggaggcaaaccagtag

SEQ ID NO: 130346 - DNA, 759 bp, synthetic construct
  misc_feature 1..759: note = Description of Artificial Sequence: Synthetic coding sequence
  source 1..759: mol_type = other DNA
atggctctgctggacgtgtgcggagcaccaaggggccagcgacctgagtccgccctgcctgttgctgggtctgggcggaggagcgacccgggccattactcattctccatgcggtcccccgaattggctctgccacggggaatgcaaccaaccgagttttttcagtccctgggaggggacggggaaaggaacgttcaaattgagatggcacacggaacaacaacgctggcatttaaattccagcatggggtcattgcagccgtggattccagggcatcagccggcagttacataaattgccagtattgggaaaggctcctggccaaagagtgtcggttatattaccttaggaatggcgagaggatcagcgtttccgcggcttcgaagctcctaagcaatatgatgtgtcaataccggggaatgggactgtctatgggtagcatgatatgtgggtgggataagaaaggtcctggcctgtattacgtagacgaacatggcacaaggttgagtgggaacatgttttccacgggcagcggaaacacctacgcttatggcgtgatggattccggatatagacccaatttaagtcccgaggaggcctatgaccttgggcgtcgggccatagcttatgcgacgcatcgcgactcctacagtggaggcgtagttaatatgtatcatatgaaggaggatggttgggtgaaagtcgagtctaccgatgtctctgacctgctgcaccagtaccgggaagcaaatcagtag

SEQ ID NO: 130347 - DNA, 831 bp, synthetic construct
  misc_feature 1..831: note = Description of Artificial Sequence: Synthetic coding sequence
  source 1..831: mol_type = other DNA
atggcattgcttgacgtgtgtggcgcccctaggggccagagaccggaaagcgcgttacctgtggcagggtccgggcggcggtccgacccgggccactactcgttctccatgcgcagcccggagcttgcattgcccaggggcatgcaacctacggagttttttcagtccctgggaggggacggtgagcggaatgttcagattgagatggcccatggaacaaccaccttggcatttaaatttcagcacggcgtgatagccgctgtcgattccagagctagcgccgggtcttatatttcagctctgagagtgaataaggtcattgagatcaatccctacctgcttggaactatgtccggctgtgcggcagattgccagtactgggaaaggctgctcgccaaagagtgcaggctctattacctcagaaatggcgaacgcatcagcgtgtcggctgcttcaaaactgctttctaacatgatgtgccaatatcgcggcatgggcctgtcgatgggctccatgatctgtgggtgggacaagaaaggacccggactctattacgtcgatgaacacgggactcggttaagcggtaacatgttcagcaccggcagtggaaacacatatgcttatggtgtgatggatagcggatataggccaaatctgtccccggaagaagcgtatgatctgggtaggcgagctattgcttacgctacacaccgggattcctactccggcggtgtggtgaacatgtatcacatgaaggaggacggctgggtaaaggttgaaagcactgatgttagcgaccttctgcaccaatatagggaggccaaccagtag

SEQ ID NO: 130348 - DNA, 819 bp, synthetic construct
  misc_feature 1..819: note = Description of Artificial Sequence: Synthetic coding sequence
  source 1..819: mol_type = other DNA
atgctgattggcactcctacccccagggatacaactccctctagttggttgacaagtagcctgctggttgaggccgcgcccttggacgataccacactgccgactccggtcagcagcggctgccctggccttgagccaaccgagttctttcagagcttggggggagacggagaacgaaatgtgcagatcgagatggcccacgggactacaacgctggcattcaagttccaacacggcgtgattgctgccgtggattcccgcgccagtgctggatcatacatatccgcactgagggtgaacaaggttattgagatcaacccatatttgctcggaacaatgagtggctgcgctgccgattgtcagtactgggagcgccttctcgcaaaagagtgcaggctgtattatttaagaaacggagagcgtatatctgtgagcgccgccagtaaattgctttcaaacatgatgtgtcagtaccggggtatgggactgagtatgggatcgatgatctgcggatgggataaaaaagggcctgggttatactacgtggatgagcacgggacccgcctaagcgggaacatgtttagcacaggcagcggcaacacttatgcatatggtgtcatggactccggatatagaccaaacctgtctcctgaagaagcatatgatctgggtcgtagggcaatcgcgtatgcgactcatcgggactcttattccggaggcgtggtcaacatgtatcacatgaaggaggacggatgggtgaaggttgagtccaccgacgtctcagatctgcttcatcagtaccgggaagccaaccaatag

SEQ ID NO: 130349 - DNA, 819 bp, synthetic construct
  misc_feature 1..819: note = Description of Artificial Sequence: Synthetic coding sequence
  source 1..819: mol_type = other DNA
atgttgattggaactcccacacctagagacactacgccctccagttggctgacatcaagcctgctggtggaggccgcccctcttgacgacaccaccctgcctacccctgtgtccagcgggtgtccaggactggagcccacagaattcttccagtctctcggcggggacggtgagcgcaacgtgcagatcgagatggctcacggcaccaccaccctcgcctttaaattccagcacggtgtcatcgcagcggtggatagccgcgcaagtgctggaagctacatctctgcgttgcgagtaaataaggtcattgagatcaatccatacctcctgggcaccatgagcggctgcgcggccgattgccagtattgggagcggctgctagccaaagagtgtcggctatattatttgaggaacggcgagagaatctccgtgtcagcagcctcaaaacttctgtcgaacatgatgtgccagtaccggggaatggggttatccatgggcagcatgatctgtggatgggataagaagggaccagggctgtattacgtcgacgaacatgggacccgattgtccggcaatatgttcagcacagggagcggaaacacctacgcttacggggtgatggactcagggtaccgcccgaacctctcacctgaagaggcatacgacctgggacggcgtgccattgcctacgcaactcatcgggacagctactctggcggcgtggtgaatatgtaccacatgaaagaggatggatgggtgaaagtggagtcaacagacgtctctgatttgctgcaccagtatcgagaggctaaccagtag

SEQ ID NO: 130350 - DNA, 831 bp, synthetic construct
  misc_feature 1..831: note = Description of Artificial Sequence: Synthetic coding sequence
  source 1..831: mol_type = other DNA
atggccctgctggacgtatgcggtgcacctcggggtcagaggcctgaatcggcattacctgtggctggctccgggcggagaagtgatcccggacactactcatttagtatgagatcacctgagctcgcgttgcccagaggcatgcagcccaccgaattctttcagtccctcggtggagacggagagagaaacgtgcagatcgagatggcgcacggcacaaccacccttgccttcaagtttcagcatggtgtcattgcagctgttgatagtcgggcctccgccgggagttacattagcgccctcagggttaataaggtgattgagattaatccatatctcctgggcaccatgagcggatgtgccgcagattgtcaatactgggagagactgctcgcaaaagaatgcagactgtattacttacggaacggagagcgcattagtgtctctgcggccagcaaactgctcagcaatatgatgtgtcagtatcgggggatgggcctgagcatgggaagtatgatttgcgggtgggacaagaaaggtcctggtctgtactacgtggatgagcatggcacaagactgtcggggaacatgtttagcaccggcagtggtaacacatacgcctacggcgtcatggacagcggttacagaccgaatctcagcccggaagaagcctatgacctgggacggagagcgatcgcatacgccactcatagagatagttacagcggaggcgtagtcaatatgtaccacatgaaggaagatggctgggttaaagtggaaagtacagatgtgtcagacttgttacaccagtatcgtgaagccaatcagtag

SEQ ID NO: 130351 - DNA, 819 bp, synthetic construct
  misc_feature 1..819: note = Description of Artificial Sequence: Synthetic coding sequence
  source 1..819: mol_type = other DNA
atgctgatcggtacgcctacaccccgcgacaccacgcccagctcatggttgactagttccttgttggtagaggcggcccccctggacgacaccaccctgccaacccccgtgagtagtgggtgcccaggcttggaacccaccgaattctttcagagtctgggcggcgacggcgagcgaaacgtgcagatagaaatggctcacggcactacaacgctggctttcaagtttcagcacggcgtcatcgccgcagtggattcgcgggccagcgccggctcgtacattagtgcactgcgcgtcaacaaagtaatcgagatcaatccctatcttttgggcaccatgtcaggttgcgccgccgactgtcaatactgggagcgcctgctggccaaggaatgtagattatactatttgaggaatggggagcggatcagcgtgtctgcagctagcaagctgctgtccaatatgatgtgccaataccggggtatgggactgagcatggggagtatgatatgtgggtgggacaagaagggtcccggcctgtattatgtggacgagcatggcacacgcctgtctggtaatatgttctcgactggctcagggaacacctacgcatacggcgtgatggactcagggtatagacctaatctaagtcccgaagaggcatacgatctgggccgaagagccattgcttatgccacgcatcgggactcttatagtggaggggtagtaaacatgtaccacatgaaggaggacgggtgggtgaaggttgagtctacagatgttagcgatcttcttcaccaatacagggaagccaaccaatag

SEQ ID NO: 130352 - DNA, 831 bp, synthetic construct
  misc_feature 1..831: note = Description of Artificial Sequence: Synthetic coding sequence
  source 1..831: mol_type = other DNA
atggcattgttagatgtctgcggagcacccagggggcagaggccagaaagcgcacttcccgtagctggcagtgggcgccgaagtgaccctggccactactccttttcaatgaggtcaccagaactggctttgcctcgtgggatgaagccaaccgagtttttccaaagccttggtggcgacggggaacgtaacgtgcagatcgagatggcgcacggcaccactaccctggcctttaagtttcagcacggagttattgccgctgtcgactcccgtgcttctgcagggtcatatattagtgctctgcgcgtgaataaggtcattgagattaacccatacctcctcggtacgatgtcaggctgtgctgccgactgccagtactgggagagattattggctaaagagtgtcgcctgtattacctgcggaacggggaacgcatttccgtgtcagcagcgtcaaagttgctatccaatatgatgtgccaatatcgcgggatggggctttcgatggggtctatgatctgcggttgggataagaaaggacctggactgtattatgtcgacgaacatggtactcgtctttccgggaacatgttctctactggttcgggcaacacctatgcgtacggtgtcatggattcaggctaccgcccaaacttgtcccccgaggaagcctatgacctggggagacgcgctattgcatatgctacccaccgagatagctactctggcggcgtcgttaatatgtaccacatgaaggaggacggctgggtgaaagttgagtccacagatgtgtccgatttgctgcaccagtatagagaagccaatcaatag

SEQ ID NO: 130353 - DNA, 759 bp, synthetic construct
  misc_feature 1..759: note = Description of Artificial Sequence: Synthetic coding sequence
  source 1..759: mol_type = other DNA
atggctctgctggatgtgtgcggggcaccccgcggacaacggcctgaatctgccctccctgtggctggctccggccggaggtctgatcccggtcactattcgttcagcatgagatcccctgagcttgcccttcctcgaggaatgcagcctacagagttctttcaatcactgggaggagacggggaacgaaacgtccaaatcgagatggcccatggaacgaccaccctggcttttaagttccagcacggagtgatcgcagctgtggattcaagagcatccgcaggatcttatatcaactgtcagtattgggaaaggctgctagctaaggaatgcaggctatactatctcagaaatggagagcgcatcagcgtctcggcggcctccaagctgttatctaatatgatgtgccagtatcggggcatgggattgagcatggggagcatgatctgtggatgggacaaaaaaggtcccggtctgtattacgtcgatgagcatggtactcgtctatcaggcaacatgttttccactggatctggcaatacttatgcttatggcgtgatggatagtggatacagaccaaacctgtcaccggaggaagcctatgatctcgggcggcgggcaatcgcctatgcaacccaccgcgattcctactcaggtggggttgtgaacatgtatcatatgaaggaggatggttgggtcaaagttgagagtacagatgtttctgacttactgcatcaatacagggaggccaatcaatag

SEQ ID NO: 130354 - DNA, 759 bp, synthetic construct
  misc_feature 1..759: note = Description of Artificial Sequence: Synthetic coding sequence
  source 1..759: mol_type = other DNA
atggcactactggacgtctgcggcgccccccgaggacagaggcctgagtctgctctgcccgtggctggctctggtaggcggtcagatcctggccactactccttcagcatgcggtctccagagcttgccctgcctcgcggaatgcagcctacagagttctttcagtcccttggcggcgacggggagcgcaacgtacagatcgagatggcccacgggacaactacgctggcttttaaatttcagcatggcgtgatcgctgctgtggactctagagccagtgctggttcctacatcaattgccagtattgggaacggttactcgcaaaagagtgccgtctttactatctacgcaatggcgaacgaatctccgtcagcgcagcttctaaactgctgagcaacatgatgtgccagtaccggggaatggggctgtcaatggggagcatgatctgcggttgggacaaaaaaggacccggactttactacgtggacgaacacggtactagactgtctggaaacatgttctcaacagggtctggaaacacctacgcttacggtgtgatggattctggttaccgaccaaacttgagtcctgaggaggcgtatgatctgggtcggagggctatcgcctatgcgacacaccgggattcctactctggtggagtagtgaacatgtaccacatgaaagaagatggctgggtgaaggtagaaagcactgatgtcagcgatttgctacatcagtatcgggaagccaaccagtag

SEQ ID NO: 130355 - DNA, 759 bp, synthetic construct
  misc_feature 1..759: note = Description of Artificial Sequence: Synthetic coding sequence
  source 1..759: mol_type = other DNA
atggcattgctagacgtttgtggggcaccccgggggcaaagaccagagtctgcgttgcctgtggcaggctctggccgtcgctctgatcccgggcattacagcttttctatgcgatcacctgagctcgcacttccgaggggaatgaagcctactgagttctttcagtcgttaggaggcgacggggagaggaacgtgcagatagagatggctcacgggacgacaactttggccttcaagttccagcatggcgtgatcgcagccgttgattctcgtgcaagcgctggcagctacataaactgtcagtattgggagcgacttcttgccaaagaatgtcgattgtactacttgcgaaatggagaaaggatatccgtgtctgcggcctctaagctgctgagcaacatgatgtgtcaatacagaggaatgggactcagtatgggatcaatgatttgtggatgggataagaaagggccaggcctgtattatgtggatgagcacggcactcggctgtccggcaatatgttctctacagggtccggtaatacatacgcatacggcgtcatggactccggttacagacctaaccttagtcccgaggaggcttatgatctgggccgtagagctatagcgtatgccacgcaccgggactcctacagtggcggagtcgttaacatgtatcatatgaaagaagacggttgggtaaaggtcgaatctactgatgtctcagacctcctccaccaataccgtgaggccaaccaatag

SEQ ID NO: 130356 - DNA, 819 bp, synthetic construct
  misc_feature 1..819: note = Description of Artificial Sequence: Synthetic coding sequence
  source 1..819: mol_type = other DNA
atgctgattggaactccgacaccccgggatacaaccccttcttcgtggctgacatcaagtttattggtggaggcagcacccctggatgacacaacactgcccacacctgtgtcgtctgggtgtccaggcctggagccaacggagttcttccagtcattgggcggcgatggagagcgcaacgtccagattgagatggctcacgggactacaaccctggccttcaagtttcagcacggagtcatcgcagcagttgacagcagggcaagtgctggtagctacatttcagctttgagagttaacaaggtaattgaaatcaatccttatctgcttggaaccatgtcgggctgtgcggcagattgtcagtactgggagagattgttggctaaggagtgtcgactgtattacctacggaatggagaaaggatctctgtgtcagctgcgagcaagctgctgtcaaatatgatgtgccagtaccgcggcatgggcctgagcatgggctcgatgatctgcggatgggacaaaaaaggtcccgggctttactacgtggatgaacacggcacaaggttgagcgggaacatgttttccacaggatctggcaacacctatgcctatggggtcatggactctggatatcgccccaatctcagtccggaggaggcttatgacctgggtaggcgagcgatcgcttacgctacccaccgcgattcgtacagtggtggcgttgtgaatatgtaccacatgaaggaggatggatgggtcaaagttgaatctactgatgtgtctgacctcctacaccagtatcgagaggcgaaccagtag

SEQ ID NO: 130357 - DNA, 831 bp, synthetic construct
  misc_feature 1..831: note = Description of Artificial Sequence: Synthetic coding sequence
  source 1..831: mol_type = other DNA
atggctctactcgacgtctgtggcgcaccccgcggccaaagaccagaaagcgctctccccgtggcagggtcaggaagacgctccgaccccggacactactccttttccatgcggtctcccgagcttgccctgccacggggcatgcaaccaactgagttttttcaatccctcggcggcgacggtgagcgaaatgtacagattgagatggcccacggtaccactaccctagctttcaaattccagcatggagtgattgcggcagtggactctcgcgccagcgccggctcttatatttctgcacttagagtcaataaagtcatcgagattaacccttaccttctgggcaccatgtctggatgcgcagccgattgccagtattgggagcgactgcttgcgaaagaatgcagactgtattacctgaggaacggcgagcggattagcgttagcgcagcctccaagctgcttagcaatatgatgtgtcagtacagagggatggggttgtctatggggagcatgatatgcgggtgggataagaagggtcctggtttatattacgtagacgaacatggcacgcggctaagtgggaatatgttctcaacgggttccggtaatacgtatgcctacggcgtcatggactcaggatacaggccaaacttgagtcctgaggaagcgtatgatcttggacggcgcgccatagcctatgcaacccaccgggatagctacagtggcggtgtagtaaacatgtaccacatgaaagaagatggctgggttaaggtggaatctaccgacgtgagcgatcttctgcatcagtaccgggaagctaaccagtag

SEQ ID NO: 130358 - DNA, 831 bp, synthetic construct
  misc_feature 1..831: note = Description of Artificial Sequence: Synthetic coding sequence
  source 1..831: mol_type = other DNA
atggctcttctggacgtgtgcggggcaccaagaggccagagacccgagtctgccctcccagtggctggtagcgggcgccgtagtgaccccggccactatagcttttctatgcgctcacccgaactggccttgcctcgtggtatgcaaccaaccgagttcttccaatctttgggaggggacggagagcgcaatgtccagatcgaaatggcccacgggaccaccaccctggcctttaagttccagcacggcgtgatcgcggctgttgacagcagggcctccgccggctcctacatctctgcactgcgcgttaacaaagttattgagatcaacccctatctcctcggcaccatgtcgggatgcgcagctgattgtcaatattgggagcgtctcctagccaaggagtgccgtctctattatctgcgaaatggcgagcggatcagtgtctctgctgccagcaagttgctgtctaacatgatgtgtcaatacagggggatgggactgtccatgggcagcatgatctgtggatgggataagaaggggccaggactctattatgttgatgaacatggtacaaggctttcaggtaatatgttctccacgggatccggcaacacgtacgcatatggagtaatggattccggataccgccccaacctttccccagaagaagcctatgatctaggcagaagagccatcgcatatgccacccatcgagacagctactccggcggcgtcgtcaacatgtaccatatgaaggaagatggctgggtgaaagtggaaagcaccgatgtgagcgatttgcttcatcagtacagggaggcaaaccaatag

SEQ ID NO: 130359 - DNA, 759 bp, synthetic construct
  misc_feature 1..759: note = Description of Artificial Sequence: Synthetic coding sequence
  source 1..759: mol_type = other DNA
atggcgcttctagatgtgtgcggagctcctagggggcagagaccggagagcgctctgccagtggccggctcaggccgtaggtcagatcccggccattactccttttcgatgcggagcccagagctggccttgccccggggtatgcaacccacagagtttttccagagcctgggtggcgatggggagcggaatgtccagatcgagatggcccatggaactactacgttggccttcaagttccagcatggggtcatagctgcagttgatagtcgggcgtccgcaggctcttacattaattgtcagtactgggagcggttgcttgctaaagaatgcaggctctactaccttaggaatggggaacgaattagcgtgtctgccgcaagcaaactcctgtccaacatgatgtgccagtatagaggaatgggattgagtatgggatcaatgatctgcgggtgggataagaagggccccggcttgtactacgtagacgaacatggcacaaggttgtcaggcaacatgttctcgactggatccgggaacacctacgcctacggggtgatggactctggctacaggccaaacttatcgccggaagaagcctatgatctagggaggcgagcaatcgcgtacgccacccaccgggatagttacagcgggggcgtagtgaacatgtaccacatgaaagaggacggctgggttaaagtggaatccaccgacgtaagtgaccttctgcatcagtatagggaggcaaaccagtag

SEQ ID NO: 130360 - DNA, 831 bp, synthetic construct
  misc_feature 1..831: note = Description of Artificial Sequence: Synthetic coding sequence
  source 1..831: mol_type = other DNA
atggcccttctagatgtttgcggggcaccccggggacagaggccagaatctgccctgcccgtcgctggaagtggtcggagatcagatccgggccactatagcttctccatgcggtctcccgaattagccctaccaagaggaatgcagcctacagaattttttcagtctttgggtggcgatggcgaacggaatgtgcagattgaaatggcccatggaactaccactctggcttttaaattccaacacggcgtgattgctgccgtggacagtagggcttccgcaggctcatacatctctgccctgcgcgttaacaaagtcatcgagatcaatccctatctgctagggacaatgtcaggctgcgcggctgattgtcaatactgggaacgtttgttagctaaagaatgcagactgtactatctgcgtaatggcgaaagaatttccgtctctgcggcaagtaaactgctatcaaacatgatgtgtcagtacaggggaatggggctgtctatgggatcaatgatttgtggctgggacaagaagggtccaggcctgtattacgtagacgagcacggcactcggctgagtgggaatatgttttctacgggatctgggaatacttacgcttacggagtaatggacagtggttaccgacccaatctgtcccctgaagaggcttacgacctgggcaggcgggccatcgcctacgccactcatagagatagttactcaggcggcgtggtgaacatgtatcatatgaaagaagatggatgggtgaaagtggagagcaccgatgtgtccgacctcctacatcagtacagagaagccaaccagtag

SEQ ID NO: 130361 - DNA, 660 bp, synthetic construct
  misc_feature 1..660: note = Description of Artificial Sequence: Synthetic coding sequence
  source 1..660: mol_type = other DNA
atgttaagagccggcgccccaaccggtgatttgcctcgcgccggggaagttcacacaggcactacgatcatggctgtcgaatttgatggcggggtggttatgggctcagattctagagtttcggcgggtgaagccgtcgttaaccgcgtttttgataagttatctccactgcatgagagaatctattgtgcgctgtctggaagcgccgcggacgctcaagccgtagctgatatggctgcataccagctcgagttacacgggatagaactggaagaaccacctttggttctggccgcggcaaacgtggttcgcaacatatcttacaagtatcgcgaagatctctcggctcatcttatggtcgccggatgggaccaaagagaaggagggcaggtgtatggaactctgggaggtatgcttacaagacagccatttgcaataggaggttctggttccacatttatctacgggtatgtggatgctgcttacaagccaggaatgtccccagaagagtgtcgtaggttcactactgatgccatcgcccttgcaatgagccgtgacggtagtagcgggggtgttatttacctggtgacaatcaccgccgctggggtggaccatcgcgtgatactcgggaatgagcttccaaaattctatgacgaatag

SEQ ID NO: 130362 - DNA, 660 bp, synthetic construct
  misc_feature 1..660: note = Description of Artificial Sequence: Synthetic coding sequence
  source 1..660: mol_type = other DNA
atgcttcgggctggggctcccacaggtgacctgcccagagctggcgaagtgcacaccgggaccactatcatggccgtggaatttgatggtggggtggtaatgggctctgacagcagagtgtctgccggtgaagctgtggtgaatcgcgtcttcgataaactttctccccttcacgagcggatctattgcgcactgtccgggtctgctgcagacgcacaggccgtcgccgatatggctgcctaccagttagaactccatggcatcgagcttgaggaaccaccattggtgctggccgcagccaatgtggtgcgtaacatctcctacaagtaccgggaagatctgagtgcgcatctcatggttgccggctgggatcagcgggagggcgggcaagtgtacgggacactgggcggcatgttgaccagacaacccttcgccatcgggggcagcggaagcactttcatttacggatatgtggacgccgcatataagcctggaatgtcacccgaggagtgtcgccgcttcactaccgacgccatcgcgctagccatgagtcgcgacggctcatccgggggcgtcatatacctggtgaccatcaccgctgccggtgtggaccaccgggtaatcttgggcaacgaactgcctaaattctacgacgagtag

SEQ ID NO: 130363 - DNA, 660 bp, synthetic construct
  misc_feature 1..660: note = Description of Artificial Sequence: Synthetic coding sequence
  source 1..660: mol_type = other DNA
atgctacgagcgggtgcccctactggtgacctgcctagagcgggcgaggttcatacaggcactacaattatggccgtggagtttgatgggggagtcgtgatgggtagcgactcgcgggtgtctgcaggggaggcagttgttaacagagtgtttgacaagctttctccactgcacgagcgaatctattgcgcactgtcaggcagcgctgctgacgcacaggccgtggccgacatggcagcctaccagctggagttacacggtatcgaactagaagagccccccttagtgctggctgctgctaatgtggtcagaaacatttcctacaaatatcgcgaggatctctccgctcacttgatggtggctggctgggatcaacgtgaggggggccaagtctacggcaccctgggggggatgctcacacgccaaccattcgcaatcggaggcagcggttccacttttatctatggatacgtggatgccgcctataaacccggtatgtcccctgaggaatgccgccggttcaccactgatgctattgccttagccatgtcacgcgacgggagttccgggggagtgatctacctagtaactatcacagctgctggggtagatcacagggttatactgggcaacgaattacctaagttctatgacgagtag

SEQ ID NO: 130364 - DNA, 591 bp, synthetic construct
  misc_feature 1..591: note = Description of Artificial Sequence: Synthetic coding sequence
  source 1..591: mol_type = other DNA
atggcggtagaattcgatggcggcgtggttatgggatccgactctagggtgtctgcgggggaggccgtggtcaaccgcgtgttcgataaactcagtcctttacatgaacggatatattgcgcactgtcaggatcagcagctgacgctcaggcagtcgcggacatggctgcttaccagcttgagctgcacggaattgagctcgaggagcctcccttagttcttgccgcagccaatgttgttaggaacatttcgtacaagtaccgcgaagatctgagcgcccatctcatggtggccggttgggaccagcgcgaggggggacaggtgtacggcacgctcgggggcatgctgacccgacagcccttcgccattggtggcagcgggtcgacattcatttacggctatgttgatgctgcgtacaaacccggcatgagtcccgaggagtgcagacgttttaccacagatgctatagcgctcgcaatgtctcgggacggtagttccggaggcgttatctacctggtgaccatcaccgccgcgggcgttgaccatagggtcatcctggggaatgagctgcctaagttctatgatgagtag

SEQ ID NO: 130365 - DNA, 537 bp, synthetic construct
  misc_feature 1..537: note = Description of Artificial Sequence: Synthetic coding sequence
  source 1..537: mol_type = other DNA
atgctgagggcaggcgccccgaccggggatctgcctagggccggagaggtgcacaccggcacgactatcatggccgtcgagttcgatggcggtgtcgtgatgggaagcgattctcgcgtcagcgcagggatcgaactcgaagagcctccactggtgctggcagcggccaacgtcgtgaggaacatcagctataagtaccgtgaagacctgtctgctcacctaatggtagccgggtgggatcagcgcgaggggggacaggtatatggaacactcgggggcatgcttaccagacaaccatttgccattgggggaagcggttcgacatttatctatggctacgtggacgctgcttacaagcccgggatgagtccagaggaatgcaggcggtttaccaccgatgccacttcgaccaaacgcagggtatgcggctactttctgcgcacacagaaaagagagaatcaaaatcagcgggtgcatgagtacatgtgcacgggtgagaggagtctcagtagctcacccctgttgagttgttcatag

SEQ ID NO: 130366 - DNA, 591 bp, synthetic construct
  misc_feature 1..591: note = Description of Artificial Sequence: Synthetic coding sequence
  source 1..591: mol_type = other DNA
atggccgtcgagtttgacggtggagtagttatgggttctgactccagagtatcagcgggtgaggcggtagtcaatagagtgttcgacaagctctcaccacttcacgaaagaatttactgcgccctgtcaggctccgccgctgatgcccaggctgtagcagatatggccgcctaccaactcgaacttcacggcatcgaactggaggagcccccacttgttctggcggccgcaaacgtcgttagaaacatctcttacaagtatcgcgaagacctgagcgcgcacctcatggttgccggttgggatcagagggaaggcgggcaggtctacggcaccttgggaggtatgctaacacgtcaacctttcgctatcggaggaagtggcagtacttttatctacggttatgtagatgctgcctataagcccgggatgagtccagaagagtgtcgaagattcaccaccgatgctattgcgctagccatgagcagggatggctcgtctggcggggtgatatatcttgtgacaatcaccgctgccggggtggaccaccgcgtgatcctgggcaatgaactcccaaagttctatgacgaatag

SEQ ID NO: 130367 - DNA, 537 bp, synthetic construct
  misc_feature 1..537: note = Description of Artificial Sequence: Synthetic coding sequence
  source 1..537: mol_type = other DNA
atgctgagggctggcgcgcctaccggggatctgcctagggcaggggaagtccacactgggacaacaattatggctgttgagtttgatggcggtgtggtgatggggtcagattcgcgcgtttccgctgggattgaactggaagaaccccccctggtactggcagccgcaaatgtcgtccgaaacatttcctacaaatatcgggaagacctttccgcgcacctcatggtcgcagggtgggaccaaagggaaggaggtcaagtctacggaaccctgggaggtatgctaaccagacagccctttgctatcggcggctccggaagcactttcatatacggatatgttgacgccgcctataaaccaggaatgagcccagaggagtgtagacgattcaccaccgatgccacctccaccaagcgtagagtgtgcgggtactttctgcgtactcagaaaagggaaaaccagaatcagagggtccacgagtatatgtgcactggggaacgttccctatcatcgagcccactccttagctgttcatag

SEQ ID NO: 130368 - DNA, 591 bp, synthetic construct
  misc_feature 1..591: note = Description of Artificial Sequence: Synthetic coding sequence
  source 1..591: mol_type = other DNA
atggccgtagagttcgatggcggtgtggtgatgggttccgactctagggtgtccgccggggaagcagtggtaaaccgcgtgttcgataagctgtcaccccttcacgagcggatatactgcgccctgagcggcagtgcagcagacgcacaggcagttgccgacatggccgcctatcagctggaactgcacgggatagaactcgaggagccgccgttggttctcgctgccgccaatgtggtgaggaacatttcctacaaatacagggaggacctgagcgctcacctgatggtcgctggctgggaccagagagaaggaggccaagtttatggaactctgggagggatgctgacacgacagccattcgctatcgggggatctggttcaacatttatctatggatacgtggatgccgcttataaaccagggatgtctcctgaagaatgcagacggttcactacagacgccatcgctcttgcaatgtcacgggacgggtcctcaggaggagtgatttacctggtgactatcaccgcggctggcgtcgatcatcgggtaattctcggcaatgaattacccaaattttatgatgaatag

SEQ ID NO: 130369 - DNA, 537 bp, synthetic construct
  misc_feature 1..537: note = Description of Artificial Sequence: Synthetic coding sequence
  source 1..537: mol_type = other DNA
atgttgcgcgcaggcgcccccaccggcgacctcccccgcgccggcgaggtgcatacaggcactacaatcatggccgtagagtttgatggaggcgtcgtaatgggcagcgactcacgcgtttcagccggcattgaactcgaggaacccccgcttgtgctcgccgccgccaacgtagtgaggaacatttcctacaagtacagagaggacctcagcgcacacctgatggtagcagggtgggaccagagagaaggaggccaggtttatggtacgcttgggggtatgctaacaagacaaccttttgccattggcggaagcggctccacattcatctatggctacgttgacgccgcatataagcccggtatgtcaccggaagaatgtagaagattcaccacggacgccactagcacaaaaagaagagtgtgtggatattttctgaggacccagaagcgcgagaaccagaatcaaagggttcacgagtacatgtgtacaggcgagcggtctctcagctcttcaccgcttttgtcctgtagctag

SEQ ID NO: 130370 - DNA, 396 bp, synthetic construct
  misc_feature 1..396: note = Description of Artificial Sequence: Synthetic coding sequence
  source 1..396: mol_type = other DNA
atggccgtcgagttcgacggaggggtcgtaatgggatccgattctagagtgtccgccggcgaggccgtggttaatagggtcttcgacaagctgtcccctctgcacgagcgtatctactgtgccctgtccggtagcgctgccgatgcccaagctgtggccgacatggctgcataccagctagagctccatggaatcgagttggaagaaccgccactggttcttgccgccgccaatgtggtccgcaacatatcttacaagtatagagaggacttgtcagctcatctgatggtggctgggtgggatcagagggaaggcggccaggtttatgggacactgggtggaatgctgactcgacagccattcgctatcggtggcagcggttccacattcatttag

SEQ ID NO: 130371 - DNA, 396 bp, synthetic construct
  misc_feature 1..396: note = Description of Artificial Sequence: Synthetic coding sequence
  source 1..396: mol_type = other DNA
atggcagttgaattcgacggaggagttgttatgggtagcgattctcgcgtctctgcaggcgaggccgttgtgaacagagtgtttgacaagctctcaccactgcacgaaaggatctactgtgccctgagcgggtctgcggccgacgctcaggctgtggccgatatggccgcctatcagttagaactgcacggcatcgaattagaagaacctccactggtgctggctgcagcaaatgtggtgaggaatatatcctataaataccgggaagatctgtccgcacacctgatggttgcgggctgggatcaaagagagggaggccaggtttatgggaccctgggaggaatgttgacacgccagccatttgcaattggaggatctggtagcacctttatatag

SEQ ID NO: 130372 - DNA, 396 bp, synthetic construct
  misc_feature 1..396: note = Description of Artificial Sequence: Synthetic coding sequence
  source 1..396: mol_type = other DNA
atggccgtcgagttcgacggaggggtggtcatgggatccgactcacgagtatcggcgggggaggcggtcgttaacagagttttcgataagctgtcaccgttgcacgagcggatatattgtgccctgtcaggcagtgctgcagacgcccaggccgtcgctgatatggctgcctaccagctcgaactgcatgggatcgaactggaggaaccccctctcgtgcttgctgcagccaatgtcgtccggaatattagttataagtatagagaagatctgtccgcccacttaatggtagctggctgggatcagagagagggcggtcaggtgtacggcaccctaggaggcatgcttacacggcagccattcgcaatcggagggagcggctctacttttatatag

SEQ ID NO: 130373 - DNA, 396 bp, synthetic construct
  misc_feature 1..396: note = Description of Artificial Sequence: Synthetic coding sequence
  source 1..396: mol_type = other DNA
atggcagtcgaattcgatggaggcgttgttatgggcagtgactcgcgcgtgtctgctggagaggccgttgtgaacagggtttttgataagctgagccccttgcacgaacggatttattgcgcgctgtctggttctgccgcagacgctcaagccgttgccgacatggccgcataccagctggaactgcacggcatcgagcttgaagagcctcctctggtgttggccgccgcgaatgtggtgcgaaacatctcctataagtacagagaagatttgagcgcccatctgatggtggcaggttgggatcagcgggaggggggccaggtgtatggcacgctcggcggcatgctaactcgccagccatttgcaatcgggggatctgggtcaacatttatttag

SEQ ID NO: 130374 - DNA, 537 bp, synthetic construct
  misc_feature 1..537: note = Description of Artificial Sequence: Synthetic coding sequence
  source 1..537: mol_type = other DNA
atgctccgcgcgggcgcacctacaggagatctgcctcgggcgggtgaggtgcatacaggaaccaccatcatggctgtggagttcgatggcggagtggtgatggggagcgattctcgggtctcagccggaatcgagctggaagagccccctctggtcttagcagcagcgaatgtggtgcgcaacatctcttataagtatcgggaggacctttcagcccatctcatggtggccggttgggaccagagagagggcggacaggtttacggcacccttgggggcatgctaaccaggcaacccttcgcaatcgggggcagcggcagtacattcatttacgggtacgtagacgcagcctataagccggggatgagcccagaagagtgcaggaggttcaccacagacgcaacctctacaaagcggcgagtgtgtggctattttctgcggacacagaagagagaaaaccagaaccagcgggtgcatgagtacatgtgtacttctgagcggtcactgtcctcctcgcctctcctgagctgctcctag

SEQ ID NO: 130375 - DNA, 396 bp, synthetic construct
  misc_feature 1..396: note = Description of Artificial Sequence: Synthetic coding sequence
  source 1..396: mol_type = other DNA
atggccgtcgagtttgatggaggggtggttatgggcagtgattccagggtttccgccggcgaagcagtagtaaatcgtgtattcgacaagttgagccccttgcacgagcatatttactgcgctctctctggatcagccgccgacgcccaggcagtcgctgacatggctgcctatcaacttgagcttcacggaattgaactggaggagcctccactagttctcgcagctgccaacgtcgtgagaaacatctcgtacaagtatagagaagatctgtctgcccatctcatggttgccggctgggatcaaagggaggggggccaggtctacggtactttgggaggaatgctgacccggcagcccttcgcaatcggaggcagtggtagcacatttatctag
